United States Patent Application Publication US 2019/0348154 A1 - sequence listing, part 81

SEQ ID NO: 307020 - DNA, 2532 bp, Proteus mirabilis
atggttaataagaatactaataaagatatcgtttattttctctttccaagtgtcattgcattgtcattgacgctgtccttttcatcatatagcgcaaaccgatttaatcctgcatttttggctgactctcctgatgccgtcaccgatttaagttattttgaagcaggcaaccgcattaaacccggtgattatcttcttgatattgtttttaatcatgagtatctgcgtagtgaaaatattcattttattagtcaagataaccatgttattccttgtttaaatcgagatgattatcaatcactcgggatcaatattaaactatttgctgattttgagaaattctcggcaaatgaatgtattgatattgaaaaaatcattccagattctgttgttaattatgatattgagaaacaagctttaaatattcaagtccctcaagccgcgttagatctgaaagcgcgcggttatattccaccagaaaaatgggataacggtataacagcaggtattttaaattacacctttagtggcgctaatagctggggaaattctcataataatagctactatttaaatctacgtagtgggatcaatattggtgcttggcgattacgcgattattccacttggaattcgtcaaacgggaaaaaccaatggaaccatatcaatacctatctgcaacgcaatattgtgtcattaagaagccaattacaaattggtgatagttatacctcatcaacactttttgacagtgttaattttcgaggtatttcattagaaagtgacgacactatgttacctgatagccaaagaggatttgcacctgtagtcagaggtattgctaaaggcaatgctaaagtggtgatccgccaaaacggttatgtgatttatcaaacctttgtttctccgggtgcttttgaaatccgtgatctctatccaacgtcaaatagtggcgacctctatgtcaccattgaagaaaatgatggtagcaaacacagctatgttgtgccttattctgctgtacctattttacagcgagaaggccaaaaacagtttgtcatccaagccggtgaaatacgccaaaataaccaacataaaaaacctcgctttatacaaggtcatcttatttatggcttaccctatgacaccactgtctatggcggtgcattagcaacaaaagattaccaatcttatgccctaggagcaggtaaaaatatgggtaccctaggtgccttctctaccgatatcacctttgctcatagccaattgccaaataactcaacatcagatggttattctttacgttttctttatgccaagtcgttaaaccaatttggcacaaactttcaattgctcggttatcgttactctacttcgggtttttacacattagatgagacattaaatacacgaatgtccggttatctgtatgaagataatcaaaaaaaaccgttgagttattttaatttgcataatcgcaagaaagggagcctacaaattaatttatcacaacaactgggggattatggctctatttttatgatgaccaactggcaaaattattggggaactaatgagaaaaatgtcctagtacaaaccggctacaatggcaatattaaagggctctcttataacgtcatttatagttataacagaatgatgaatagtggtcagcgtgaccaaacattgtctgtgggtctttctatcccattacaattgctaatgccgacaagttatcaatccatcaatagcacttatctcacatataattacagccacaataataacggttattcgacacataatgcgggtattgccggtacattattggaagacaatacccttaattacagtgttcaacaaggttatagcaatcaaggtggaaactatacaggtagtgcggcgttgggttatcaaagtcgctatggcaatttaaatgctagctataactatcatcaagatgctcaacaaattaactatagcctcgctggaggtatgctactccatagtggcggattaaccttaagccaacccttaagcgctaatgccattttagtagatgctcgtaatactgcggatgtaccgattgataatgcgacaggggtttatactgactggcgagggtttgccgttattccctatgctaccgcttatcgacaaaatcgagtggcattagacacaaccgcattacccgataatgttgaaattgagcaaaacattaagcaagtgatcccaacacaaggcgccgtcattaaagttcagtttgatgctaaaaaagggtatcgcttattactgacgctacaacaccaaggtcgcccactcccttttggggcaatagcaactgataaacaaaatcatctgtccggtattgttggcgatgatggcttactctacttatcgggtgtccctgattcaggaaaattagagatccgctgggggcataatgcctctcaatactgtcaagtgaactatcaattacccgcctctcaacttgatgaaccttttgtgaaaatgacacaggagtgccaataa

SEQ ID NO: 307021 - DNA, 519 bp, Proteus mirabilis
atgcacaaattaatgcttattgtagcgttgtcattactgtttaccactaagggatctgcttacgatacattggtacacattaatgccagagtaacaggaaacacatgtacggtagagacaaactcaaaacgtattaccgtaaaattaggccaaatcgccacaaaagattttatttctacgacgataacgcaacaacgtacgcctgttatcccttttagtattaaattagtcgattgccaacctgaagccagtgctgtgaaggttagttttaatggtcgtgccgatcctattgataacgccttactcgccattgatgcaacgggtgcgaagggagttgccatttccattatggataactcaggagcttccatcgatattaacgataaaagccagtcttataccttattgcctaaccaagataataccctgcaattttatgctcgctatgtagcgactcaacttcctgttcaagccggatcggcgaatgcaacagcaacctttttactggagtaccaataa

SEQ ID NO: 307022 - DNA, 1074 bp, Proteus mirabilis
atgacacgctctttttctttcttcacattgctggtttctcttctttgtatcccgagccaaatggcatgggctattgcagatccattagtggtaacccctccacctatgaattttgatggtgccgccgatggtactcccgcaggaacgcccatcacgtcaacttggataggtgaaacctctgtccataatggtttcaaatgtgagaagaaatttttgcaaaaatgttgggttgaaaccctctatgctaatgctactggttcaaaaattagcgggatctactattacgaaggtagtaatcgttatcctgtttattcactccccggagttaaaggtatcggctatgcttttggtttaaaagataacaatgatagtgttgcttacgtacctattgatgttgataacggttcgggtgcaacggtgatttatcctgcagtaggctctaccgttaaccataatgtggatcgcgtttcactgaaaggcaaagtcgtctttgtggtgacagataaacatcttgagactggcgtttataacattccatatacagttatagccaatacatggtctgaatatggtggaggccataaaggcaataatacctctatcgtagcaattaaccccgtcactattactattaaagctcgaggctgtaccgtaaataccaaaaatctcacctatgaattaggtgatatctcaatgcgagatatggcagccattggttcaacatcaaaaagtcaggctaaacccatctctgttacatgcgatagtaatgtgcatttatatgccagcatgaccgatcagtctacctattctaataatacagatatcctcacactgacatcagactctgatgcttctggtattggtattcaatttttctttaatgataatccaactcccgtggtgtatggccctgatatcagtgcgataggacaacctaaccaacgtttactccatataacaacttctaacaacgaaaactacatattaaacctgtcaactcgctatatcacgactgggacactaaaaccgggtaaagcaaacggattagccagtctcactttttcttatcaataa

SEQ ID NO: 307023 - DNA, 318 bp, Proteus mirabilis
atgattgatagcagcaaaacgattaattttcgtataggacaacgaatacgtcacttgcgaaaaaatttaaaatattcggggaaactatttgccaaagagttaggcataagtcagcaacaactttcacggtatgaacgaggaacaaataggatcagtattgagtttgtttatttaattactgaaaagtttgatgttcatatcagctatttcttacaaagtaactatatgattaatattgagcaacaacgaaatatacaagaaaaaaacagcctgctgattgccgaggcttgtataaaaaatggcactaatcgcccttaa

SEQ ID NO: 307024 - DNA, 1044 bp, Proteus mirabilis
atgaaaaagtggtcctctgtacttgctgccagtgtaatggcattaagtattggtacagcatcggctgatgatggtaagacaatctatttctataactggacggaatatgtaccgccaggattgctggaacagtttacaaaagagactgggattaaggtgatttactccacctacgaatctaacgaaagcatgtataccaaattaaaaacctataaagacggtgcttatgatttggtggttccttcaacttattttatttctaaaatgagtcatgaggggatgctacagaagattgataaatcaaagctcagtaattttgataatcttgacccaagtttattacataaatcattcgatcctcaaaatgactactcaatcccttatatttggggagcgactgcgatagggattaatagtgatgaagttgatgtaagtagcattacttcatgggctgatttatggaaaccggaatataaagatagtttactgttaacggatgatgcacgtgaagtattccaaatggctttattaaaattaggctattcaggtaataccacagatccaaaacagattgaagaagcctataaagagttacaaaagctgatgcctaatgtactggcttttaattcggataatcctgccaatccttatatgcaaggagaagtgaatctagggatgatctggaatggctctgcatttattgcgcgagaagccggtgctcctattgagttggtatggccaaaagagggcggtatcttctggatggacagcttagctattcctgcaaatgcaaaaaatgttgaaggtgcgcataagcttatcgacttcttattacgccctgaagttgctgcaaaagtggctgaaaatatcggctatccaacacctaatttagcggcacaaaaattattgccaaaagctatcacaaaagatagctcactttaccctagtgaagagattatcagtaaaggcgaatggcaaaatgatgtgggtgaagcgacggttttatacgaaagctattaccaaaaactgaaagcgggtcgttaa

SEQ ID NO: 307025 - DNA, 780 bp, Proteus mirabilis
atgataggacggttattgcggggtggatttatgtccatcatttacgcgtatctttatatcccgattatcattctgatagttaactcttttaactcatcacgtttcgggatcaactggaaaggctttaccactgactggtataccattttattaaataatgacagcctgctacaagctgcagggcattcattaacgatggcagtcacctcagcaacctttgcgacgttgattggttcattggctgcggtggcgctttatcgctatcgttttcgtggtaaaaagtttgttggtggtatgctgtttgtggtgatgatgtcgccagatattgtgatggcgatttcattattggttttatttatgctattaggcatttccttagggttttggtcattactggtgtcgcatattaccttttgtctgccttttgtggtggtcacggtctattcgcgactcagtggttttgatgtcaaaatgcttgaagccgctaaggatctaggggcgggtgaatttactattttacgtaaaatcattatgccattagcgatgccagcagtagcctcggggtggttattaagctttacgttatcgatggatgacgtggttgtctcttcttttgtgactggaccaagctatgaaattttaccattaaaaatttactcaatggtaaaagtaggtgtttcaccggaagtgaatgcactggcaaccatccttttagggctatcattagtattagtattaattagtcagttgatcttacgagatagaactggcaaagcgtaa

SEQ ID NO: 307026 - DNA, 861 bp, Proteus mirabilis
atgaagaaaacacgtaaactatttcaaaacatcgttattactggtgttgtgggttggttaatggtgttcgtcttcttaccgaatatcatgatcatcgccaccagttttttaacccgtgatgatgcgaatttagtcgagatggtttttacgctcgataactattatcgcttatttgatccaatgtatgcagaagtattactgcactctattaatatggcattggtagcgacattagcttgtttaatattaggttatccttttgctttttttctggcaaaaatgcctaagaaaatacaaccattactgctgtttttattaatagttcccttttggactaactcacttattcgtatttatgggttaaagatttttctcagtacgaaaggctattttaatgagtttctattgtggatagggcttatcgataaaccgctaaggatcatttataccccagaggcggtagtattagggttggtttatattttattaccttttatggttctgccactctattccagcattgaaaaactggataaaccctgtttggaagcggctcgagatctcggtgcgaataaattacagacctttattcgtattattatcccattaactatgccggggatcatcgcaggttgtttattggtaatgttacctgccatgggcttattctttgtggcggacttaatggggggcgcgaaaaacctacttattggtaacgtaataaagagccaattcttaaatattcgcgactggccatttggggcagctaccagtatctgtttaacactggtgatggggttaatgctatttgtgtattaccgagccgtaaaactactgcataagaaggtagaaatagaatga

SEQ ID NO: 307027 - DNA, 1116 bp, Proteus mirabilis
atgactgagaaaacatctctgacaccactagtcgaattaaaatccttaagtaaaggtttcgacggaaaacaaatcatttcccgcctcgatctgactatcaaccatggcgagtttttaaccatactcggcccttcaggctgtggtaagacgacggtattacgtttaattgcgggcttagaagacgcggatgatggacaaattatcctagatggacaggatattacccatattccagcagaacagcgttttgtaaataccgttttccaaagttatgccctgtttccccatatgaccgtatttgaaaatgtggcttttggtctacgtatgcagaaaacacctgctgcagagatcaatagtcgcgttatggaagcgttacgtatggtgcaactggaggactttgcccaacgccgtcctgctcacctttctggtggtcaacagcaacgggttgcgattgcacgggcggtggtcaataagccgaaggtattgttgttagacgaatcattgtctgctctggattacaaattacgtaagcagatgcaaaatgagctaaaagccttacaacgaaaactggggatcacctttattttcgtcacccacgatcaggaagaagcactgactatgtcagataggatcgtggtcatgaaagaagggcgtattgagcaagacggcacgcctcgagaaatttatgaagagccaactaacttattcgttgcgcaatttataggtgaaatcaatatctttgatgcacgtgtcctacatcgtattgatgagacacgtattagagcggatgttgaagggcacgaatgcgatatttatacgcaattacctgttactcaaaatcagcaactgaaagtgttgctcagaccagaagatctgcgcgttgaagagatacacgatcttgaaaaccttccgggacttatcggttatgttcgtgaacgtaactataaaggcatgacgctagattctgttgttgaaatggaaaatggcaagatggtgatggtgagtgaattctttaatgaagatgatccggatgttgatcactcgttagaccaaaagatagcggtaacttgggttgagagctgggaggtcgtgctggctgatgaagaaaacacgtaa

SEQ ID NO: 307028 - DNA, 993 bp, Proteus mirabilis
gtgcaaaaaattccaaaattacctgtacagccacctaatattacgccggatttaactcgccatcagcattatttaaaaaccccaaaaataaaatcaaatgaaataactgggttaggtattatagacgcttggaataaaaatgcttatggacaaggtatacaggtggccgatattgagtgggattttgatttatcacatcccgatttgttagctaataatatcacgccactttttcctttaactgaaaaaaccgatcaagccgaccatggtacggcagtggcggggttaattatggggaaaaaagacggtaaaggtattactgggcttgcttataaattagatatgttttatgccatatcagaattaagcagtggtcgtattgaagcaattattgccagtaaacagaaattacacgcgggtgatattgttttatatgagatgcagacagtttgtgaacatcatgcttatgttcctgctgattatgaaatgcatatctgggaggcaactcgtacattaacagaagcggggattattgtgatcatggctgccggcaatgggggggttgatctcgatttacctttttatgatagctatcgtcaacgtagcgataaccactctatacgtgtcggtgcgggctcgccttatacgctaaatcgtttacctttctcaacgcatggctcccccattcatgtgcaagcatggggagaagatgtgaccactgccggatatggtgatctttttcatggtgacgggaataacaaatatacggctaattttagtggaacatcatcagcctgtgcattagtcgcgggggcggctgcggttattcaatcttggtataaagataaaaccaacacggtgttaacgccaatagagatgcgagagctactgattaaaacaggaacctatccatcattaaatgaaaagataggccctttgcctaatgtgaataatgccatcttacatttaaaaaatttaatccaatataattaa

SEQ ID NO: 307029 - DNA, 207 bp, Proteus mirabilis
atggcactcaaacaaatgggaatgactatattaccagagtggtacattcaacaagaaataacacagggtgaacttgttagccctattcctgaacttaccttattaaatcaatctattaatgtcatttttccacatggtgaacatatgccaagaaaaacccgtctatttattgattttttaaaagagagaattaattctatgccctaa

SEQ ID NO: 307030 - DNA, 219 bp, Proteus mirabilis
atgctaagtgatttattaataatatcattatttaataaagttactttttcatccggctgttttaaacccagtagatataatgcaggtaaaaaatgttctgctgttgggtgtgcgagttgcccttcttacgttgataaaatggtaaaaagcgcttcaggcactttatcactttgtaaacagcgctctactgtttcactaaaagataatgcccaagagtaa

SEQ ID NO: 307031 - DNA, 204 bp, Proteus mirabilis
atgacagaagaacagtcaacattatccatagattcaaaaatagagtggttgcaaaaaaccatttccagaacagatagctacctaaattcagcaaatacaaaatcgacaataatgcttacattttctatcgccttagggactgcaatctgtattaattcaatacacatactaaaacttggttttactatatcagtttgcaattag

SEQ ID NO: 307032 - DNA, 1371 bp, Proteus mirabilis
atgagttttgataatatatatgaatcactaaataaagaactgtcccaagtttcggataaaaaattccgttctgttaataaatcaaatatatcaactgaagattggtctactcgagctacagcaggtaatgagtgttacagtcgacctgttacgcttgaggaatcaaacattggtgaaacattatctgccccaaaaataaactatgattttgaaagtcaaatcaggacactttttaaaaaaccaataaaatccattgatgatagaaaaatcggatgtcacccagactttaaaaatcttgaaaaaaatgaatcaaacctagtcatgggttatacaataacactatttatggatattattggctcaacaaagctgggggtaatataccaaccagatgaagtcttttttataaaaaatagtgtaatcaaatgtgcaatagaaacgatcaatgcttttgatggtcatgtacatagaattatgggtgatgctgtaatggcattctttcgctctaatgacgcaaagagtcatatggatagtgcaattgatgcaatcaattgtgcaacttatctaattcaaatgatcaaacaattcgttcaacctaatttggaagaaaaactaggtagtgaaaatattggcatcagaattggcatcgattatggtcgaaatgaagatgttgtttggggttattacggtcatggtttaattaacgaggtaacagccacatcattctttgttgacgctgctgcaaaactacaacaaaaagcaccaaaaaattccttaatgataggtcaatcaattaaagaattattaggtctagataatgaacactacaaaatcaaggaaagtaatagcaatgagaaagattactatctaacgccaaactatatagggagtgatgggcataaaattaattacaaacaatttgtttttgatactaaaaaatacttcttacagttacctggagctaactcaaaattaaacaaagacaaaagaataaagatagatgtaaaaataagggatagtcgacatgccccaaatggaattccatatgaaagatgtacatcctcaataccaaaaaacaaatatctttatatacatattgaattcgaccctagacatcaattaaacacagactgtttgcaatttaaatgtgatgtatataacactggtgatgaagcaagggcagcaaaccctgaaacattagataatcacacaacacttataaaagatattaagattaatcatgacactggacgctattcggcaaaccatttcgaacatacatcctataaaggcctccataaaatcattgtgtcagtgataatcgataacaaagttgttgaacaagatgaatattcaatctttatcaactga

SEQ ID NO: 307033 - DNA, 216 bp, Proteus mirabilis
atgatgaaagctgttattcctgtcgctggattaggcacacgtatgttacctgcaactaaatccattccaaaagaaatgttaccgatagttgatcgtcctttaattcaatatattgttgaagagtgtgcacaagcgggcgttgaagaaattattttagtgacacattcatctaaaaattcaattagagaatatgttagagcaacgaataaaaaataa

SEQ ID NO: 307034 - DNA, 1890 bp, Proteus mirabilis
atgtctacaattccaacacaaaatccagttccaagtgaagcaccgaaagaccttaaatttaactcaggtaaaattgacgagttcgttacgtcaaataatcacttttacactgaccgttttggtaaaaatcattatacaatagatggtattaactatttatcaaaacaggcaatgcttaactatggctatatcacgaagaggtcttttgagtcgggtaataccatcatcaatcctaacgatgttcttctctgggaaagtaatggcgaatactacagatgggatggcgacctccccaaagtagttagcgctgactcaacaccagagtcagctggaggaattggcgaaggaaagtggaaaagcgttggggatgcaacactaagatctgagctatcatcaacgactggatcatcaatgattggtgacgtgaatttcaacaatctaaatgttctatcatctatcgtcagtaataaatattataatcacggagatatttttgatgtttttgttgtgtatggacaatcaaatgcagttgggtacgctcaagacactaatggatttccagatgttattgatggggcaatgttctttgactacaaagataaccaaataaaaaaaattacaaaggcgctaccttactcatctggaaatgttagcactggtcatgcatgggctacatttgctaacgagtatattagaaaaactgggagaaaggttttaattataccatgtgccaaaggtgagtcctctattgttgagttatcaaaaccattaaccccatcaaataccgtctatgacaagatgattagttcatttaactccgcaatgattgttgcaaatagagatggtatatcaatagggtataagtcaatcttgtttcatcaaggtgaaacagatatgacgttaggaaccaaaaaacaggaatatcaaaataagctagatcaactaattagagatatgcgttcagatatggggcttgataagtgcttcctgtatagagttgggtgccctcaaaatagaaaagaaatgagttggtatgccatgcaaacagctcaagattatttgtgtcaatcatatgactggatggtgatggcttattctggttgcgggacatttactattggcaatggattgttgcgcgagggggttcattacactcaaaatggatataatgttatggggcatgaatcagccagtgttattgttgattctctatttaataaaaacccttcctcagaatttgaaactgaaatgtatggaaccccactattaccacaagaccaaatatggagatatacatatggtaggttattggttggctctgatggaaatttaacactacttgataagtcgaatactgggtactcatatagaacgataaatatctctagaatagaaatgttagaagataaagttaggctttacttgcaaagtagagctaactggatacttggtcttgatgttgaaatgaatgagggtggtaaggtttttggtgttcagtgcttccctacaattgtatctgttgggaataatgaatttgctatagatttatcttttttaatggatatttcatttgcagtttcaacagatggtgatttgatgagagcaccagatttgagttcatcaagcattccaccatttgtatctgaaaacataacaatagacaagtcgaatggcatcaagataacccatggcgggataactggatttcctgtgctatttggggttggaggtggaacagtgtcaatatctaacatatctagcaattcatttatgatcagtagttcttctggcgcgctaataaccctaaatagaatgaaagtaaaaccaacatcactaccacgctctatgcaaatagcgcttaaggcgataatttgtgagaaaaaagagtaa

SEQ ID NO: 307035 - DNA, 1143 bp, Proteus mirabilis
atgatcaacgtatcacgcctttatatacatcctgtaaaatcaatgaaagggactcgtctttctcaagcctttgcccgtgagagcggcttcacgtttgatcgtgattttatgataacgacccctgaggggacatttatcaccgcacgtaaataccctttgttgctgtgttttattcccactgtaatgacaaatggtatttatattcaagcacccgatggtgaaggaattgccattacttatcaggattttcaatcttcattacaaccaactgaagtgtggggaaatcattttaccgcttatgttgccccagatgaaataaatcaatggttcagccgctatttaggcatggatgtacaacttcgctggacgggtgaaaaatcaacacgtcgagtaaaaaaatctcctgaaaccgcggtttcgttcgctgacggttacccttatctattgattaatgaagcctcatttcagtctctgcaacagcgttgcccagcttcaatcaatattgagcaatttcgcggtaatatcatcatcacaggtgcaaaaccttttgcagaagatagctggcaaacaatccgtattggctctgtcgtcatggacttagtcaagccttgcagtcgctgcattatgaccactatcagtatcgataaaggcattaaacatcctaccacagaaccgttagcaacactgcaaacattccgtacagatgaaaaaggcgatgtggattttggtcaaaatattatcattcgccaatcaggtattattcgtgttggggataaagttgaaatattagcttataaagaagcgaaatcttatttacaaacaacagagcaaacaaccgaaccggcaactgacaatgcggttacagcagcctccgctcaagagccaaaacaagctgtcactattgaatttaatggcatcagctttgctgggaataatcaagaggtgttgttagagcaactggaaaatcacggttatgctattccctatagttgtcgtgcggggatttgtggctcttgtgttattcaattagatgaaggtgatgtcaatgcattaaaagcaggtgccataaaacgttctggcagaatactcgcatgtagttgtgttcctaaaggcaatgtaaaactttcacttaataaaaaataa

SEQ ID NO: 307036 - DNA, 420 bp, Proteus mirabilis
atggtgtattcaaatagattcaataacaatattaattttgctgattactattttaccttttatactcatcttctctattcgtatctttttgatttttttgattttgttcttcttgagctaaataaagataaatcacatgatttaaacaattttattcttgatgatatacctcacgaatggtttggtgctcaccctcaaacatggttgctatctgatgttgatcaatttatgaaaattacaagagaaatgatttccctacaactagctgatggttatttaaataaaattgataaaataccctcagaagatattgaacatttttttaactacttcccattttgtcttatgacaaaggttagccccggagattgggttttggttgaggatgaagcgaatgaaacaaagtcatcggacatttaa

SEQ ID NO: 307037 - DNA, 459 bp, Proteus mirabilis
atgcctaacattaaacctttttcattattcccaacattatctgacaacttactttcaaaccgttttgatcagatagatcgcctgtttagtcagttaacaggcagtaaacccattgcatcaccaattcagacttataacctgaaacagattgatgataaccattatgaattgacagtaagtgtgcctggatatcaaggaaatgacctatcggtttcattaaaaggaagtcgtttattgattgaagggaaaaaagaagaaaaatcagaagaagataatgataaatggatccaccgaggcatatctcaagggcaatttacattgcagtttgacctcggtaaaaatgttaaaatagaaaaagctgatttatcaagtggacttctgactattgctattgagtatgaattacctgaagaagaaaaacggcaaacaatagcgatagaaaataaagataaaaaataa

SEQ ID NO: 307038 - DNA, 864 bp, Proteus mirabilis
atggaaaagagacattatcaacttattgaacaagcctgccgttttattgaagaaaatcagggtgatgtttctcttgccgacatcgccgcacatattcaatccagcccatattatttccatcgacgatttaaatctataatgggaattacacctaaagagtatgcgaatgcttatcggcacaaactaattaagaaagcattagctggcgataaaacaattacagatgcgatatatcaatcaggctttaatgcgaatagccgattttatgaaaatgcgacggccatattaggtatgacgccaacccattggcgcaatggtggacaaaatatcgtgattttttttgctgtagggatctgctcattaggccatatccttgtagctcaaagtgaaaagggcatttgtgcgataacacttggcgatgatcctgcgtgtttattagaagaattacaaaaacaatttcctcaagctgaacttgttggtgcaaaccaagagtttgaaaaattggttgcccaagtcattggttttgttgaactgccaacacaacctttggcattaccacttgatattcaaggaacagtatttcaacaaaaagtttggcgggcattattagatattccttttggttgtaccatgacatatcaagaaattgctcaaaaaattggttcgccaaaatcttatcgagcagtggcgaatgcctgtgcatcaaataaactagcagtggcgatcccttgccatcgagttatcagacaaaatggtgaaatatctggatatcgttgggggattgagcgcaaagaaaaattattacaaagagaaaaatcccttcatcatcagcatgatagattggctattagcaagagcgattaa

SEQ ID NO: 307039 - DNA, 135 bp, Proteus mirabilis
atgctaatacagggttctgccgtgcctgtaacggaagatatttatacgcaatcggaatgcaataaacgtgctgaatatttaatgtcagtgagagatttaactattatttgtggagaggtgattagtggaaagtga

SEQ ID NO: 307040 - DNA, 210 bp, Proteus mirabilis
gtggaaagtgaactaattcaagtcccaagggatttgctagaggaattagcatcagaatatcaagctaaaatatcttggtttatggaagcgtataagggttattacgacgtaataggttctcgatataacagagattacaatgattacattgatagttttaatgcagctgctgatttattaggttgggataagatggagaaaatagaatga

SEQ ID NO: 307041 - DNA, 321 bp, Proteus mirabilis
atgaataaatacaccgaactatctgatttagagattaacaagcgcgtctttgttgctgcgaaaatagaacatgaagacacagacttgcatagcaataaagttttctatggcgatggtgctaactggattgaatttaacccatgcaacaacccagccgacgcaatgccgattattattgagaatgaaatatcgatgattaaaagctcaggtggctggatgtgctgccatggttcagttggtcaggttgagcgtgaaagcttataccgtggcgctatggaagtattcttaatgatcaaggatgcggagaatgaaaaagtatga

SEQ ID NO: 307042 - DNA, 333 bp, Proteus mirabilis
atggaagatgaaatattgaaaacatcagaagccgccaaggagttaaaaacaacacctagaacagttgcttatcttatttctaaaggagagttgaaaggtagaaaagttggccgaggttataggaccaccagatctgctgtgcttgattatataaataacccagagcaaactcatgatgcgagcaaggataatctaaacggaggtagattatgtcaatcaaacaaagaaacgggatatggcactgtcatttctttacaccgtcagggaagagaattagaaaatctcttggcacaaaagacaagaagcaagcgcaggagctgtatgacaaattaa

SEQ ID NO: 307043 - DNA, 480 bp, Proteus mirabilis
atgcaaaggcgtgtagcatgggtaaatccagaggatgccaaaggtggtaaggcaattggcatagctctgaatgataccgcatgtaaagttttaagagatcagataggaaagcattcaagatatgtctttgttcatacagagtcaaaaaaacggccagatgggaccatgacacctcaggttagaaaaatgagagttgatgataacagcggttggagagctggattaaaaagagctggtatcgaaaactttcgtttccacgatttaaggcatacttgggcaagttggttaattcaatctggagttccacttacagcattacaagaaatgggaggttgggaaagtatagaaatggtaagaaggtatgcacatttagcgccaaaccatttaacagaacatgcacgtaaaattgatgacgtttttaataataacgacacaaatacgacacaaagcaaaaaccaagttggattgaagttagcgtaa

SEQ ID NO: 307044 - DNA, 450 bp, Proteus mirabilis
atgttaaaaattagaatatcacgcccctcagaagcaccagaaatcatacaaatctggaaaaattcagtcgatgctacacatgactttctgacagctgacgatcgccaagagattgaaaaagaagttatcggttttttttccgaaacaccggtatgggttgctactaatcaacaagatcgcccactcggctttatgtttttacatgacggtcatctagaggcgctttttatcgatgcatcagcacgcgggttagggataggaaaacagttaatatcacacgcattaactcttcatcctaatttaagcgttgatgtcaatgaacaaaatcagcaagccgttggtttttatcagcatatgggctttcaaatatctggacgttcggagttggataatcaaggaagagcgtacccattattgcatctaagtagagctaaggcgatcaccctttag

SEQ ID NO: 307045 - DNA, 828 bp, Proteus mirabilis
atgacttattcacgtgaagtattactcaaaaaatttaatgacatgatcgcacgtaaagagcctattattggtggcggtgcgggaacaggtctttccgcaaaatgcgaagaagcaggcggtatcgatctgattgttatctataattcaggtcgttatcgtatggcgggtcgtggctctctggcaggattattagcctatggcaatgccaatgaaattgttatggatatggcaaaagaagtattgcctgttgtaaaacagacacctgtgcttgccggggttaatggtacagatccattctgcaattttgataagtttttagatgacgttaaagccatcggttttgctggcgtacaaaacttcccaaccgttggtttaattgatggtaacttccgcgctaacctagaagaaacaggtatgggttatgctcttgaagtagagatgatccacaaagcacatgaaaaaggcttactcacaacaccttatgtttttagtcgtgaagatgccattgcaatgacacaagccggtgcagatattattgttcctcatatgggtttaaccactggtggcaatattggtgcagaaacagccgttactttagatgattgtgtcgcccttattaacgattgggcaaaagcagcaaaatccgtacgttctgacgtaattgtactttgtcatggtggccctatagcaacaccaaaagatgcgcaatatatccttgataactgtcctgattgccatggtttttatggcgcaagttcaatggaacgtttaccaacagaagtcgctttaactgcaacaacaaaagagtttaaaaatattaaacgctaa

SEQ ID NO: 307046 - DNA, 357 bp, Proteus mirabilis
atgttagttattgttgttattcaatctgcactgtcactgatgaccatcagcccatcattaaataaacagtttaatgtactcgtcaatctagcagttgtgactaatattattccttacatcctttctatggcggcaatgattattttacaaaaagtcgccaaagtggaacctcataaagcgagaaccagtaatatcatcgcatttattggagctatttatagtttctatgctctgtattcatctggtgaagacgctgtaatgtggggggcattagccacattcttgggatggacactatatggttttgtctctccacgatttgaaatgaaacaaaaccaagacctaatgacaaaataa

SEQ ID NO: 307047 - DNA, 984 bp, Proteus mirabilis
atgaaaagtgtcaataacgctataatcgaagattctgatgctatctatacggctcagcttaatgggcatggcggaattatgccgatcacggctaatagcatagcaagtaatgaaaggcctttttgggttcatctcgattatcgtaaacccaaaagtgatcagtggattaatcagactgagttacttcctcctatcgcaaaagatgtgcttttagctgaaaatgttcgacctaaggcacagcgtatcggggaaggggttattattaatttgcaaacgattaataacaaccccgatgatcggccggatgaactgattgcgtatcgtatttatattaatggtcaaatgattatttcgagccgacatcgtcgcgttaattccgttgattcggtgatccactctttagaagtgggtgatggtccagaaaatagtggtagttggttgatcactatggccgatgcagtgacagatgaaataggtgattttgttgaaacacttcatgaccaattaattgagttggaagatatgatcctcgatcagcaaattccggctcgaggtgaattggcattgctacgtaagcaactgattgtgttacgccgttatatggcgccacaacgtgatgtattctctcgactctctatcgaaaaattaccttggatgagcgacagtgatcgcattagtttggttgaaatatcagaacgtctctcgcgtcgattagaagatttagatagtagtatttctcgtacagccgttattgctgatgaaattacttcaatgatggcagatgcgatgaacagacgaacatataccatgtcattaatggcgatgctatttttgcccacgacctttttgacaggactatttggggttaatttaggggggatccccggtaatgaatttccttatggctttgctatattttgcttttcactgtttttcttgattgtgattgttgcttggtggttaaagcgtagtaggtggttgtga

SEQ ID NO: 307048 - DNA, 1566 bp, Proteus mirabilis
atgttagataataatttaaaagctcaactgaaagcttacctagaacgattaacccagccagttgagttagttgcaacattagacgacagcaaacattctgctgatatccaagccttattaaaagaaattgaaccgttatctgataaagtcacataccgtgaagataacagtgctaatgtgcgcaaaccatcttttcttattaccaacccagggaaaacaactggcgttcgttttgcaggctcgccattaggtcatgagtttacttctttagtattagcattattacaaactggtggtcatccatctaaagaagccccggaattacttgaacaaattcgtcagttagacggtgagtttcatttcgaaacctattattcgctctcttgtcataactgccctgatgttgttcaggcattaaacttaatggcgattttaaatccgaacatcacccatacggcgattgacggaggcatgttccaaaatgaaattcaggaacgtaatatcatgggcgttcctgcggtgttcttaaatggcaacgagtttggccaaggtcgtatgactttagctgaaattgttagcaaagtagatagcaatgcagaaaaacgcactgcagagttattaaataaaaaagatgcctttgatgttctgattgtcggaagcggccctgcgggggcgtcagcggcagtatatgctgcacgtaaaggcttaaatacaggtcttatcggtgaacgttttggtggacaagttctcgatactgttgatattgaaaactatatctctgtacctaaaaccgaaggcgcaaaattagcaggggctttaaaagctcacgttgatgattatcaagttgatgtcattgacagccaaactgtcagccgtttaattccgggagaagcggaaggtgatctacaccaaattgaaaccgcatctggtgcgattttaaaaacccgtagcttaattattgccacgggtgctcgctggagaaatatgaacgtaccgggtgaaaacgagtaccgtactcgcggtgtaacatactgcccacattgtgatggtcctctatttaaaggtaaaagagtggctgttattggtggtggtaactcaggtgttgaagctgccattgacttagctggtttagtggagcacgtgaccgtactagaatttgcctcagaaatgagagccgatgctgttttacaaaagaaactgcgtagcttaagtaatgtcgatgttatcttaaatgcccaaacaacagaagtatatggagatggtactaagttaacaggactgaaatataaagatcgcactaacgattcaatgcatgatattgccttagcgggtattttcgtccaaattggtttactgccaaacacacaatggttagacggaactgttgagcgtaataaaattggtgagatcgtggttgattcacgtggtgaaaccaatattaaaggggtatttgctgcgggtgactgtacaactgttccttataaacaaattattatcgccgcgggtgaaggtgcaaaagcctcattaagcgcttttgattacttaattcgcacaactgcaaaataa

SEQ ID NO: 307049 - DNA, 564 bp, Proteus mirabilis
atgtctttaattaataccccaatcaaaccattcaaaaacatggcatttaaagacggtcaattcgtagaagtgactgaaaaggacgtcgaaggcaaatggagcatttttttcttctatccagctgactttacctttgtttgtccaacagaattaggtgacttagctgatcattatgaagaattccaaaaaatgggtgtagaaatttactctgtttctactgacactcattttactcataaagcatggcatagcagctcagaaactatcggtaaaatcaaatatggcatgatcggtgacccaactggcgcattaactcgtaactttgaaaatatgcgtgaagcggaaggtctggcagatcgtggtactttcgttgttgacccacaaggtatcatccaagcaatcgaaattactgctgaaggtattggccgtgatgcagctgacctattacgtaaagtaaaagcagctcaatatgttgctagccacccaggtgaagtttgcccagcaaaatggaaagaaggtgatgcaactttagctccatcactggatttagttggcaaaatctaa

SEQ ID NO: 307050 - DNA, 210 bp, Proteus mirabilis; identical to SEQ ID NO: 298382

SEQ ID NO: 307051 - DNA, 438 bp, Proteus mirabilis; identical to SEQ ID NO: 14572

SEQ ID NO: 307052 - DNA, 381 bp, Proteus mirabilis
gtgaataaatacaccgaactatctgatttcgagattaatttagctgttgctcacattgcgcttggcaagggtagctatgattggtgccctgataaaaaagaggtttactttgcaggtattgatggtggtgaatttttacatcatggatacttcgacccatgcaacaacccgtcagacgcaatgacgattattattgagaacaatatctcattgcacgcccctaacttaagggaaggctggatggctgagtataccggcagtggtgacgatgttaatgacgggcttcaggctgattattttgatgcacataataaaaacccactacgctctgctatggaagtttttttaatgatgaaggatgcggagaatgaaaaagtatga

SEQ ID NO: 307053 - DNA, 297 bp, Proteus mirabilis
atgaacgattttatgtgccaaggacaaattatgaaatttgttgtaccagagccagaccataaaaatgtttgcaacctttgcggtggaaatgtcggcaaagacaatttaatccaaggtcaggcagcaaatatttgcttcgactgctctgatttagcgaaggaaatggcagaaaaggaaattcagcaaatggcaattgatttatcaactggtgacttaggtttagttgatatgggaatgggaacagccagagcacatgccgaacgcttatataaagctggatatagaaaggtggagtga

SEQ ID NO: 307054 - DNA, 258 bp, Proteus mirabilis
atgaaattggaagtaaccaaggctcaacttgaagctatcaagtctcttactgatgattgcgcgggaatgattggtggaggatgcgaggaagctgataggatttggagtaaacatattcggctaatagatagaatgctacgaaaaaacggacatgatcgctattttaactcgcagggatgcaataagaggaatgaatatgaacgattttatgtgccaaggacaaattatgaaatttgttgtaccagagccagaccataa

SEQ ID NO: 307055 - DNA, 312 bp, Proteus mirabilis
atggatatacacgcaaaaagagttgatagtccactttataaaattatcatgtacttaaataagtatgaagaagatactttggaagacaaaaaacttcagtttcttttaaaaaatttaaaaactcatttcaagaaactattttatatgattgcttacattaataaaattcagaaagatgaaaatttcatcaaaaaatatgatgcaacatcagttgtcagcattagtgctattgaatattgctattataaaatcagcacgatatgggctgtctcttatacacatctgacgctgccgacgaatagagaggtgtag

SEQ ID NO: 307056 - DNA, 225 bp, Proteus mirabilis
atgaatgtttctgctgagattgttagcgatattgagacaattaaacagaatttagttaatcaactcacagaaaccgtaagatggacagcaactatggcgctatggtgtcatttaggctatcacaattttattgaacttggtgatagcaagtcattgtattatttagcgaaaaattcatatacgctaaaagataaaaatatattgcatgttaatgattatatttaa

SEQ ID NO: 307057 - DNA, 885 bp, Proteus mirabilis
atgaaattcgccaaggcaatgcgaaaaaaagcaaaattaaggctcgctttaacagggcctagtggctcaggtaaaacctatggagcactggaaatagccaaaggacttggcggaaaaacggcattgattgatacggaaaaaggaagtgcttctctttactctgaccgttttaattttgacgtattggagttagatccaccattcacaccagagcgatttattgaagctatcggggttgcgcaggaagctggctacgataatttgataatcgacagtattactcacgaatggagtggaacaggcggatgtctagaattactcgatgtgttagcaaaagccaagtatcgaggcaatacgtggtcagcatggagcgaaataacaccacgtcacaatgcatttctcgacgcgatactacggtctgacctgcatattatcgcaacgatgagaagtaaaacggaaactgctcaggtcgataaaggcaatggtaagaaaggcgtagataaacttggcatgaaatcagagcagcgtgacggggttgagtatgagtttacgactgtactagacctaaatcacgaaactcacacggcaatggcaagcaaggatagaacaggattgttcagcaacgccgaagttactcagttaaatgaattaacaggtaaaaagctaatggattggcttaatgatggacgcactaaagcagagatagatctagctcactttacgagcattgcaacggaagcacaaaacatggatgagttaaaaatcgcctttagtgaagcatacaaagcacttagagatacacctgaacaagcggaggctcaaaaagtgtatgagctaagaaaagaagaactaaccaaacaagaggtaggtactgatggcaagtaa

SEQ ID NO: 307058 - DNA, 735 bp, Proteus mirabilis; identical to SEQ ID NO: 103789

SEQ ID NO: 307059 - DNA, 204 bp, Proteus mirabilis
atggataataattcgctaaaaaatgcgagtttatttgataatgatcccgttctttatgctgcatggctttactatcaggacggactcagtcaaagtgaagttgcaaatattatgagcgtttctcgagtgactgttgtgaagtatttacatctcgcgagagaaaaaggtttcgttaatataagcttggattcatcagtattttaa

SEQ ID NO: 307060 - DNA, 612 bp, Proteus mirabilis
gtgcctaagtccagcgaacagaaagccaatgcaacagcgaatgcggtaaaccaacttgaaactaaagtgaccgaggtttcaggtaaagcgacctctaccgcccagcaagtcactcgccttgaaagccaagtggggacaagttcagccaaaattgaacaaacgtcgaaagtggtcaccgacataaatggcaaaatttccgcatcatggacaatgaaagttcagcaagatagcaaagggaataaagtcattacgggcattggcttagggtttaatgcacaaggaaatagccaatttctggtcaatgcccaaaactttgcagtgatatcgtcattaaatggcaaagtggtgacaccgtttatcgtgaagaatggacaggtggttgttaatgaagcttttattggtgatgcaactattaccagtgcaaaaatagctaatgtattgcaatcaaccaatttcagccatgcaaacaaggtgggctatcaacttaatatgcgcactggtgaagaaattaaatatgggaataacgctcaggggtactggattgaaacaaacatattaaaacgtttgtttgataaaaaaggcacaatgcgtatcagaatggggatatggtaa

SEQ ID NO: 307061 - DNA, 642 bp, Proteus mirabilis
gtggcaccgaaaggatttgtggcgaatgaagtacctaagtccagcgaacagaaagccaatgcaacggcgaatgcggtaaaccaacttgaaactaaggtgactgaggtctcaggtaaagtgacctctaccgcccagcaagtcactcgccttgaaagccaagtgggtacaagttcagccaaaattgaacaaacgtcgaaagtggtcacagacataaatggcaaaatttcagcatcatggacaatgaaagtccaacaagatagcaaagggaataaagtcattactggcattggcttaggattcaatgcacaaggaaatagtcaatttctggttaatgcccaaaattttgcggtgatatcgtcattaaatggcaaagtggtgacaccgtttatcgtgaagaatggacaggtggttgttaatgaagcttttattggtgatgcaactattaccagtgcaaaaatagctaatgtattgcaatcaaccaatttcagccatgcaaacaaggtgggctatcaacttaatatgcgcactggtgaagaaattaaatatgggaataacgctcaggggtactggattgaaacaaacatattaaaacgtttgtttgataaaaaaggcacaatgcgtatcagaatggggatatggtaa

SEQ ID NO: 307062 - DNA, 642 bp, Proteus mirabilis
gtggcaccgaaaggatttgtggcgaatgaagtacctaagtccagcgaacagaaagccaatgcaacggcgaatgcggtaaaccaacttgaaactaaggtgactgaggtctcaggtaaagtgacctctaccgcccagcaagtcactcgccttgaaagccaagtggggacaagttcagccaaaattgaacaaacgtcgaaagtggtcaccgacataaatggcaaaatttccgcatcatggacaatgaaagttcagcaagatagcaaagggaataaagtcattacgggcattggcttagggtttaatgcacaaggaaatagccaatttctggtcaatgcccaaaactttgcagtgatatcgtcattaaatggcaaagtggtgacaccgtttatcgtgaagaatggacaggtggttgttaatgaagcttttattggtgatgcaactattaccagtgcaaaaatagctaatgtattgcaatcaaccaatttcagccatgcaaacaaggtgggctatcaacttaatatgcgcactggtgaagaaattaaatatgggaataacgctcaggggtactggattgaaacaaacatattaaaacgtttgtttgataaaaaaggcacaatgcgtatcagaatggggatatggtaa

SEQ ID NO: 307063 - DNA, 612 bp, Proteus mirabilis
gtgcctaagtccagcgaacagaaagccaatgcaacagcgaatgcggtaaaccaacttgaaactaaagtgaccgaggtttcaggtaaagcgacctctaccgcccagcaagtcactcgccttgaaagccaagtgggtacaagttcagccaaaattgaacaaacgtcgaaagtggtcacagacataaatggcaaaatttcagcatcatggacaatgaaagtccaacaagatagcaaagggaataaagtcattactggcattggcttaggattcaatgcacaaggaaatagtcaatttctggttaatgcccaaaattttgcggtgatatcgtcattaaatggcaaagtggtgacaccgtttatcgtgaagaatggacaggtggttgttaatgaagcttttattggtgatgcaactattaccagtgcaaaaatagctaatgtattgcaatcaaccaatttcagccatgcaaacaaggtgggctatcaacttaatatgcgcactggtgaagaaattaaatatgggaataacgctcaggggtactggattgaaacaaacatattaaaacgtttgtttgataaaaaaggcacaatgcgtatcagaatggggatatggtaa

SEQ ID NO: 307064 - DNA, 612 bp, Proteus mirabilis
gtgcctaagtccagcgaacagaaagccaatgcaacagcgaatgcggtaaaccaacttgaaactaaagtgaccgaggtttcaggtaaagcgacctctaccgcccagcaagtcactcgccttgaaagccaagtggggacaagttcagccaaaattgaacaaacgtcgaaagtggtcaccgacataaatggcaaaatttccgcatcatggacaatgaaagttcagcaagatagcaaagggaataaagtcattacgggcattggcttaggattcaatgcacaaggaaatagtcaatttctggttaatgcccaaaattttgcggtgatatcgtcattaaatggcaaagtggtgacaccgtttatcgtgaagaatggacaggtggttgttaatgaagcttttattggtgatgcaactattaccagtgcaaaaatagctaatgtattgcaatcaaccaatttcagccatgcaaacaaggtgggctatcaacttaatatgcgcactggtgaagaaattaaatatgggaataacgctcaggggtactggattgaaacaaacatattaaaacgtttgtttgataaaaaaggcacaatgcgtatcagaatggggatatggtaa

SEQ ID NO: 307065 - DNA, 531 bp, Proteus mirabilis
atgaacgagctgtttgatttacgcaaagctgaagaagagcgcaaacgcattgctcgtgaagaagaaatgaagcgacaagctgcggaacaggcaagacttgaagctgaacgaaaggcacggcaagaaattgaagcggcagcacggcgtgagcgtgaagcaaaagaagccgctgaacgtgcagagcgtgaaaagcaggaagctattcaacgtgcagaacaagcagcaaaagaagccaaggaaaaggcagagcgtgatgctaaagaagctcaggagcgagccgaacgcgagaaacaattagctatcgaagctgagcgcaagaaagcacaagaagcagaacaagcgcgattagcagaagaagaacgtaagcgtcaggaggaagctaaacgtcaggctgataaggagcatcgtcgcaagtataaccaagaaacattacaagccttagtaagtaacggatttgatgaaaaattatcgactgaatttattaagttagttgctagtaataaaatcccccacatgacaatgaactactaa

SEQ ID NO: 307066 - DNA, 306 bp, Proteus mirabilis
atgcgaagaggtctagtcaaaaagttaagtttaaggttacttggcatatcattaaataatgcaccattaagagatgaaactttatctaaaccttttaattttaatgcacctaaattattaccatcaataacagcgtgttcatgtgaaacaaaacgaagaattgttgttatacgctgtagtccatcaattacttcccaagaagaatctaaattagttgccataaaaatgtttgggataggaatgccaagaaaaattgattcaattaattgtgattgtctgactgcgtcccacacaaaacgccgttga

SEQ ID NO: 307067 - DNA, 285 bp, Proteus mirabilis
atgggaaaaatatcgtgggaagaaatggcctatgccgataatggctctcctgatatcttttggaaatcgcttaattttcaagaacgattagaacaaggatatagacccaatccaataagttgggaaaaatatattcttagtacttacttaaatcaccgtatttttcgttacgaagctggatttgaacgcttatctcctattgagttagttagccctgaagggaaaaattatttttataacccttacctttctattattgatgggaaagtgactattgtccgataa

SEQ ID NO: 307068 - DNA, 1674 bp, Proteus mirabilis
atgatcttactatcgatagaagggatgacctgtccaagttgcgtcgcccacgttaaagaagcactcgatgcgatcgaaggcgttaataaggttgaaatatcttatgaaaacgccagagcaacgatcaccacgaacggtggggtcagcgtaaccgttctcattggagcaatagaagctctcggttatatcgcaaaagaatccactggcactgcaaaagaaattacttcaccgaacgactgctgtgacaacgaaaatgcaagcaacactgaaagcaaccaaactcaacatgtggcgattatcggtacgggttccggcgcttttgcctgcgctattaaagccgctgaaggtggtgccaaggtcactcttattgagggagccgatgtgattggcggctgttgcgtgaatgtcggctgcgtaccctcaaaaattctaatccgcgccgctcaattggctcagcagcaacgcaataatccctttaccggactggaaaatcatgcgccccaattgagtcgagccttgttgactcagcagcagaccgctcgggtcgaagagctgcgcgcggcaaagtaccagaatattctggagacaaatcctgcgcttagtttacttaaaggttgggcgcaatttaaaaatgccaacaccctgatagtcagaaaaaatgatggaaccgagcaggcagttcacgccgataaaatcctgatcgctaccggctccacgccaaccattcctcctattgatggtttaactgaaacaccttattggacctctaccgaagcgctgtttgctcaggaattgccgcagcacctggtcgtgattggttcgtcggttgtagcgctggaaattgcccaggcttatcgccgtttaggcagtgaagtcaccatattagcaagacatacattgctttatcgggaagatcccttgctcggtgaaaaactcaccggatgttttgaaaaagaaggcattcgagtattaaacagtacgcaagctaccaaggtgacccacgatggaagccaatttacattggaaactaacgcgggcgatctacgctgcgatcgtttgctggtaagcaccgggcgacacgccaatacttgccaactcaatctgggcgcggtgggtgttacgaccaacaaaaagggcgaaatcgttgttaacgaacgcatggaaacgaatgttcccggtatttacgccgccggagactgctgcaacatgccgcaattcgtctatgtcgccgcggccgccggtagccgttccggcatcaacatgacgggcggatacgccaaactggatctatccaccatgccagcagtgatttttaccgatccccaggtggcaactgttgggctcacggaagagcaagccaacgcacaagacattgaaaccgacagtcgtgtattggagatggagaacgtgccgcgcgcactggcgaatttcgagaccgatggttttatcaaattggtgacggaaaaagccactggccgcctgatcggggcgcagattctggcgcatgaaggtggagaactgatccagagtgcggcgctggcgatccgcaaccgtatgacggtgacggaattagccgaccagcttttcccttacctgactatggtggagggtttgaagctctgcgcccaaacctttaacaaggatgtcaaagaactgtcctgttgtgctgggtaa

SEQ ID NO: 307069 - DNA, 414 bp, Proteus mirabilis
atgctaatacggttactgacccggttcggcgataagattagctcattgggcgcgctggtttctgctatgggatgcgccatgtgtttcccggccattgccagtctgggcgctgcggtaggactgggttttctcagccaatgggaaggtctgtttgttagcacgctattacccctgtttgcctggattgccttggtactcaacggacttggctggttcagccaccggcaatggcaccgtagtgcgctgggtgtggccggccccattttattgctgttatcgctctatccgtttttccagtacggctggagcagctatgtcacctattcagcattaggcctgatggttgccgtatcgctttgggatattttttcaccggcgaataaacgctgtgatgatgacagctgtgctgtttaa

SEQ ID NO: 307070 - DNA, 276 bp, Proteus mirabilis
atgaaaacactcgccctaatgtccctgttcgtactgaccagcctgaacgctttagctgccccgaaaacagttactttggaagtcccaaccatgaactgtgtgacctgtccctttaccgtggaaaaagccttacaaaaagtcgatggcgtcagtaaagccgaagtgacctttaagaccaaactggcggtggtcaccttcgacgacgaaaaaaccacggtaaaagcactgaccgaagccaccactaacgcgggttatccgtcaacgctcaaggagtaa

SEQ ID NO: 307071 - DNA, 348 bp, Proteus mirabilis
atgtcaaaaagtaatcccaactttccaatcatcggcggtgttattgccgctattggcgctggtctttgctgcgctggtcctttcgtcttgttgctgctaggcgtgagtggctcctggattggtaatttaaccttgttagaaccttatcgtcccatttttatcctgctggttttagccttatttggcttcgcaggctggaaggtctatcgccccgtcgaggactgtgagccaggcaccgcctgtgcagttcctcaagtgcgaaaacgtcggcaggtgatcttttggttaacggcactgactgcgttggttttagtcaccagtaattattggattgtctggtttgcctga

SEQ ID NO: 307072 - DNA, 390 bp, Proteus mirabilis
atgtacacaattggaaaattagccgaacaagctagtatcaatgttgagactgttcgttattacgaacgacgtggtcttatagaaaaacctgaaaaaccgcatctaggctaccgactttatcctttggcaacattaaaccgaataaaattcattaaacgttcccaagatcttgggttcactttggaagaaatctccaatttactcagccttaatgacactccctgtatagaagtgcaagaaatgactttacacaagcttgcaagtgtgaaagccaaaatagcaggtcttcgccgcttagaaaccgttctcacagaattattgaatgagtgtaattctaatactaaccaatcccactgtcccattattgattccctacttcctgaagattaa

SEQ ID NO: 307073 - DNA, 870 bp, Proteus mirabilis
atgagtgctggaaaaatggtgacttacgatcaactcatgctgcctttgatgaaggcgctggttaacctgggtggctccggcagcatcgatgagatctatgaggctgtggtcgagcttgagaagtttgacgaagaaacgcttgccattttgcacaaccccgaaaaaagcagtcaaacagaaatcggctatcgcttggcctgggctcgcacctatctgaagaaggcagggtttcttgagaactcgtcacgcggtgtctgggcattaacagataaggccagacaggccccagaaattgatagccgcgagatcgtgaattatgtgcggtcactggatagaaaggcttctcaagatgcgacagacccatccgatccggcagcgtctgttgatgagtcaccggaagaagttctcgcctggcgagagaagttgcatcatattctgattgaggaaatgagtcctgacgcctttgagcggcttacacaacggatgctcagagaatcaggctttgttcatgtcgaagtcaccggccgtaccggtgatggtggcatcgatggaaaaggcatcgccagaatcaatggcttgatgagttttcacatcgcctttcaatgcaagaaatacaaaggctctgtgggcgcgccggagattaggaactttcgaggtgccatcgttggtcgcgctgaccgaggtatgttcatcaccacaggaagcttcaccaaggccgctattgaagaagccaaccgtgatggtgttgctccgattgacttggttgatggtgatcagttagcagataagctcaaagaacttagtttaggtgttaaaacagagttagttgaaaaagtaacagttgaaccagactggtttttaagtctttag

SEQ ID NO: 307074 - DNA, 2751 bp, Proteus mirabilis
atgagtattcgtcgattttcatcgcgcacccataggctcgatagtagctttttgctggagcacctcaaaggtgctcgcagctataagcgtattgccggttactttactagctcgctgtttgaagtggccaacgagctgattgagtccatccccgatgtgaaaatcgtctgcaatgtggatatccatcccgatgacctgaaggtggctcagctacgcgaatctaagatgattgggcgctggaatgagcgggatattgaagccgaaagcttgctcaaccgtgaccgctatcgccgcctggacagcttccttgccaagcatggccaggtcatccgcgttgcgcccgacagcatttgtggatttttgcatggcaaagcgggtgttattgagctggccgatggcaaaaaaattggcttcattggctcgatgaacgagaccagcagcggctggcaacgtcactatgaaatcctgtgggaagacgaatcaccggaaggtgtgcagtggattgagcaggagtttgagtatctgtggaacgcggctcgcccattacctgaagcagtgatccgagaggtgaaacgccgtggctatcgcagagaggtgctgtttgaagatattgtcgaagacgatgatattgcccccgctgcgctgattgagtccccgctgtatcgccaaggcttctcattgcagccctggcaacaaggctttgtcagcgagtgtgttcgccattatcacaaccacggtattgtgcgtttactgattgctgatgaggttggcctgggtaaaaccttatccatggccacggcggcgctttcgctttgtttgctgagcgacagagagaacaagaagcgtaagcccgtcatcattttcgccccagctaccctctgcgagcagtggcaagtagaaatgattgataagctgggcattccctgtgcccgctggcaaacgcaaaagaaagcatggctggatcctgaaggacgaattatttctccttcagggcaagagcatattgccaagtgtccgctgcgcgttggcatcgtatccaccgggctaatgatgcgcgattctttagaaaagcagcatctgctggggttgcgctttggcgtgtctatattggatgaagcccataaggcgcgcagtcggcagggtttcggcaaagacgccggcacccacaatgaattactggcctttatgcgcgagattgctgcccgttcagatcatgtcattctgggtacggcgacacctatccaaacccgccccgaagatttgtgggacttgataggcattctgcatcagggcagtggcaatttcgtactcggcaacgactttgccaaatggcaccgtccacctgaggtactgcctattttatctggtgagcagcgcgttaccgagccgagcttcgcctgggaactgcttcgctcaccactacccgttgtcgattcaaccaacgagcagttcgcacgccgtttattcagctctcttcgtcaggatcttggattaattaatcagaacgacaagtgggacattaagagcacgctttctgatctatcagatgactcgttagaatatcttgaagatgaattggatagaaatatttcgggtgccagttttttccagcgggaaaatccatttatccgtcatgtcgttttacgtaaacgtgtaacgctcgaggatgccggacttttaccacgcataggcgtcgacttgcatcccgaccgggggctgtcgaaggaagtccatcaatttaacagcttgttcgagggtaaagcgctgcgaacaagcgaggatttcaggcaggcctacgccgaagcgcggcactttggtaaagcccttgctcaaagtggcaaaggcagcgggtttatgaaaaacctgatggaacaacggatttgctcaagtattgcggctggattgaacactgctcgaatgctgctggaaggccgaactgttcgtgaggaaagtgacgagcagttgatagaggttaaagccgaaagcccggatgaaattgccgttctcgagcgaatgatcgctcggcttgagcgcattgaagaagacccaaagctcaacgcagtaatccattacctggaaaaggaaaagtggctgaagtttggcgtcattatttttagccagtactacgacacggccaagtgggttgcagattcgctcgctgagcgttacccagaccaggcggtaggcctgtatgccggcgcaggccgcagtcggctgtaccaaaagggtgacagcgtcaatattgaacgggagacgctgaaacgtatggtggctgagcaccagctcgaaatcatggtggccaccgatgcagcctgcgaaggattgaaccttcagactctgggaaccctgatcaatatcgacctgccatggaaccctactcgtttagaacaacgtatcggtcgaatcaagcgctttggtcaagtgcgagaaaaggtcgacatgctaaacctcgtcaacgaacaaacagtcgacgaaaaagtttacgagaagctgtccgaacgaatgcaagatcgctacaacctgtttggctcactgcccgataccattcgcgacgaatggattgaggatattgaaaccatgggcgaaaaaatggatgagtatatcaacgcccagaaacaggccaatggatttgatctacgctacacagagactatgtctccatccgaaaaagattggcgggattgctccaacgtactctcgcgccgagattttactgaactgatgacatccggatggagtgaaagcaaatga

SEQ ID NO: 307075 - DNA, 3021 bp, Proteus mirabilis
atgacagaactaaaaccattcgcactcaaggatgcgcccgcactcattgaagcggtctatcccgcgcagaaaatatcattcgaagcgcaaaaagaacgcaaagccaatcttggtcaaacgctaacaggtttggggtcctactggaaaggtagaaaaccgctgatccttgttcgctccgtggtgctcggcacgctgctgcctcaaaccgaagacactgaaaaagatctcgaaatattcgaaatgctaatgggctttgatatcgaaagtcttgctaagcgcgcacttatacaaaatgacattaaacccgcagaaatcgcagctcgcattcagctgcacaatccctgggattactttagtcacaacatcaaagtcactgacgataatttcaatgatattgatactctgcagtttcccatcaatagcgatgcgctcggtttaaagctgcgctggcgtcgcgacattgaagagaatgaaaagctcgcgatttatcgtgactatttagaaaccatcgaaggctacgaggcaaaggcaagtctctgtaagcggccggaagaggtcgatcaggagtggctaaacgcacacatttggtcgcgggttaatcggcactatcaaaactttggtgttgctgctcagacccttgatgaacttgtagagcaacttggccagctgcgttatggtcgtcgaccaaaagtcgccgacactttcagtggcggtggctcaatcccttttgaggcagctcgaatcggatgtgatgctacaggaaccgatttgaacccagttgcatgcatgcttacttggggagccctagagttattgtccctatctcctgaaaagcaggtctgccttgacgaagactttcaaaaagtttgcgatctcgtagataaagaaattctgtcattaggaattgaatgtgatgacgaaggaaatagagcgaagtcatatctgtattgtttggaagtaacttgccccgaaactggctggaaaatacctctggctcccagctgggttatttcaaaaacccataatgtaatagcagttattgaaccgaactacactagaaaagcctttgatatttatttgaagtttggcgttaccaaaagagaaatgctgcaagcagaaaatggtaccgtatcaaacggctctatggtgtacaccctggagggaaaaacttataggactccgataaaaacacttagaggggactataaagatgccagtggaaatccaaagtcaaagttaaggaaatgggaaaaaaatgagtttttccctaattcaaacgatgtatttcaagaaaggctttatgctattcaatggataagggcgtcaacactcgaaagcacgaggcaagatgcattctttaggtctgttactgatgacgatttaaagagagaggaattaactattagttatctaaagcctcttttgaaagattggcaagaaaaaggcttcattcccgatatggagatagaagctggctataacactagccagcctgtacgcgaaagaggatgggcctactggcatcatttatttaatccacgtcagttgctgacatttgggcttattcataagcacattattgacaacggaaatcctgcattggtattagggctttgctcagctctaaataaaagtacaaagctatcgagatgggattcagctgatagaggaagagaaggcgtaaaagacgtcttttctaaccaggcacttaacactctttataactttggtgctagaggattccttgcgctaaaaggattcctgttctttaagccgaactacgtgaagctttcaggagccgggaaaatactaaacaatccagcttcaaataccacagcagaaaatgacgtatggattaccgatccaccatacgccgacgcaattaattaccacgaaattacagaattctttattgcatggttgcgtaagagtccacccaagccatttgatgaatggacctgggattcgcgccgcgccctagccatcaagggctctggtgacgacttccgcaagggcatggtcaacgcctataaagccatggccgaccatatgcccgacaacggcatgcaatgcgtaatgttcacccaccaggatacaggcgtttggtcagacatgatcggtattttctgggcatccggtttgcaggttgttggcgcatggtacatcgccacggaaaccagtaccgagctgaaaaaaggcggttacgtgcaaggtacagtgatactaatgctgcgtaagcgtcctgccggtgaaaacgcaggtttcaaacaacgactgctccccgctgtgcgtgcggaggtaaagcgccagatcgaaaccatgatgcacctgaatgatgaggtgaaagacaagctgggtgagcctgttttcaacgattctgatctgcaaatggccggttatgcggcagcactcaaagtactaacatcctacacccatattggcggtgaggatgtcactagctttgccctgcggccacgcaccaagggtgaggttacggttgtcgatgagatcgtgcaacaagccgccgaagccgcaaacagcttgctggtgccggaaggcttaactgccgatacctggcaaaagatcaacggcattcagcgcttctatttgcgcatgatggacattgaaaccaccggcgcctcgaaactcgacagctaccagaactttgccaaagccttccgcgttgaagattacggccgggtaatgggcaatatgactgccaataaagcccagctgaagcggatccctgagtttgcttctcgcgacctgacagatagcactgaaatcggctccacttggctaggtcacctagttattggtttgcaacagatcctcaacgagaaggaaccgcagacggttatcagtcaattacaagcagacttgccagactttatggaggtccggccaatactgatcgacatgttgacctttattgagaaaaaggccccagaaaaagccactcgcgatgccgctgaagtgttaggtgcgcgcttgaagaatatgcgtgccttgggtcagtaa

SEQ ID NO: 307076 - DNA, 1083 bp, Proteus mirabilis
atggcaaaggcaccatcaaagacaagcaatacagcggtgaagcatgcgacgctgggctttggtgtgcccgctacaagcgatccacatcactttaaagttatcattcccaaatcaaataacggtcaagtgcaaattaatgaatacttaggcttacaagctcaaagtgacgagtttgccatgattgaaagggtattgcttgatcgttcccgttggacagcaatacgctcagaagtccagcgtacatttaatgttaggctgaaaagctatggcttaaacacaagctcatggcaagtaggagaaaacgtcgttgatcgccttttgggcaaagagctatgtgttctagcatgggccattgaaggaatggatgttgaaaatattccagttgctgtgcgtaactggttggcattagtaccggaagagcgttggtggttattcggtatgacagcaagaagcacaggatctgcagaagaccgtgacgtcggttggcgtattgcactgcgtcatgccctaggtgatattgttcaggctgaacaggtagaattttcccaaaacaaagatgcaaattattctcgtggagtaacacgatcacaagatattaaagaaacatcagaaacctatagcgataagcaactaaataatggttcaggcttattgcttcatgtctcgtctgagaatggcaaccctttgctgccattggctcatgcaagcactaaacttgaccaagatgatttagcaataggcgaagaaaacttatttctgtttgaagcaaagcatgccaaagcgatcggacttcctgttggcaataagagtagccctgagtttttagtgaaaaaggggtctaccgcaaacatcgcaatggccaaatcattacgtcctgctattagagatttacgccaacagatgcttgaacaaggaatattgcttcaacaaggggaagtttattctttctcacaagattatttgttcaaaagccccagcgctgccgcttgtgtaatagctggtaatccgcgcagcggcatggatgcatggaaagatttgcaaggccatagcctaaaagatttaggctatggcaaaaaggcctga

SEQ ID NO: 307077 - DNA, 3126 bp, Proteus mirabilis
atgatcaagacagttaagcaggcgtgtcgttttaatcctgtgatccaggattatcgaatgagccagggaattgagaacctggctgatctcattaacgacgcaggtgatggtaaagagttcttctcgcgcaactatgttactcatggtatggagcaactcttccgcgagggtatgcttcgcctatcaggcaaatcagaccaggcagtgtttgaacttacacaagccatgggtggtggtaaaacccatatgatgattgccctaggcttgctggcaaaacatgcccatctgcgccctgatgtgttacctgctgatttaaacgagcgactggattttggcaacgcacgaattgctgcttttaatggtcgtaataaccccgacaactacatctggggcgaaattgctactcaactaggtgaagcagagaaaataaaacctcattggatcaacggacctaaatcagttgaccagcaaaaatggaaagagatcatcggtgatactcccacgctgattatgatcgacgagttgccaccttacctcgataacgccagcacccaggtctatggttcaggcaccttggctaatatggtggtttacagtctaagcacgctgatgagtgcagcacttgagctgcctaactgctgtatcgtcattgccaacctatctggcagctatggtgcgcaaaccaaaacactaaaagaagctatttctaatctgcagcaagaaacccgcaggcagtcgatgaccattaccccggtgcaactgtcaggtaatgaaatttatgaaattttaaaaaagcgtcttattgatgaacttccggatgagcaaaccatcagcgatgtcgctgaggaatatgcgcagcaaataaagaaagcggaagacggtggctacatcattgcatccagcatcgagcaaattgccgaacaggtgagagagacctatcccttccacccgtcgttcaagcacttggttgcgctctttaaagaaaatgaaggcttccgtcaaacacgcggcttgatgcagtttaccgctcgcctgctgaaaagcgtcgagcaacgccaaacagatgacgtattcctagtaggcactcagcatctagacctaaatgacgaacaagttaaagacgagattgaacgtatctcgccaaaactgattccagctgttactcgagatattgcagataaaggtgattccattgcggaaagcatcgatgccgaacaaagcaacgatgccgccagtcaattaatgacactgctattggcatcttcactatcacgtgctgtgggagggcgcattggcctgtcagaaagtgaagtaattgaattcttggctgcacctaaccgtaaagctgatgaattcttagaagcccttcaaaagctgcgtgagcaagcttggtacttacaccgtgaagaccagcgtttctttattaaagaaaccgaaaacctctctcgccagatagagcgtaacgctaaggaaattccccagcctaaaattgatcaagctctgattaaccggctcaagggaattcttcaacctaatcggcgcaacgtttatcaggaagtgcagattcttccgcgtatggacgaactcaagttgagtggtcctcgtgtactgattgtgataaagccagatggcaaagtaccacctaatgaactcatcaacttcttcgagttccagcaagaaaaaaacaatctattggtgcttactggccaagacagcatcatggccgatgcggtggaagaacgcttgcgcgagctctatgctattgagcagatagagaaacgtctcaagtctggcgacactttatttgaagaagctcgagaccgactcgaagaagcggaaggccgctttaccaaggcactttccgccgcttacaacaccattcttttccctggtatagatgagatcgatggctctgaacgactgctcaaagttaccatagacaatggtttgaaagtgggtgaaggtgatcaatcagctgaagtacaaatcgaaaacctgatggctgacccacgggctaactacaaactggccgctgatctgaaagatgacttcgggcagtacttcgctatggccgaatctgaactgtggccttctggtgcgaacaaccgtcgcaccccatggaaagatgtcgtcaaccgcgccaaatgcaatccgggctggccttggatgccgggtagcggtggcatggatactttaaaaaccgaggccctgaaacaaggtcgctggcgcttgggcgaagacggatatattgaaaaaggcccattcccgaaagagaaaaccagtgtcaacgtctcgctgttgggaaccagcccagatacgggagagtcgctaatcagcctaacaccgcgtaatgcgggtgagagtccggttatctattactcaaccaaacctgaagttctcgagaccgaccctaagattgacgatctggaaaacttcagcactgcggaaggaacgctgtatttcaaggtcgccgatccgacaggaaaatacgaggctggaccagccatccgctgggtggcagaccttaaggtgcgacaccagattgaaccatccgccgataagcgtaaggtcaccctacagtgcacaccgaaagcagacatgttctacacgttggatggttcaaaccccaaagacgggcaacactacaccgctccgttcgaagtgggttcggaagcggctcgattgctggtttatgcaaagtcaggtgaagcaaccaaaacagccgacttccagatcccacatagcggcgataaaacagtccagattgatgactccaagcccgcgcgcctgaacagcggcaagcgtgttccactggatacaacggacaaagtcttcacggttattaaccgctttaaagaccaggccaacacccgtttcaaaggtgtacgtatcgagattggcgaaggtgaaaacactgtgggtattcgctttggcgaacggcagatcaccgccgctatgatcgaggcgaccgttaatagcctgcgcgatgtactgaatgaagcagatgccaatgtctcaattgcagtcagagacggcatcgattttgagaacggctttgaagcaaaagagttcgccaaattagttggtattgagttaaaacctggagacattgctcaggacgagtaa

SEQ ID NO: 307078 - DNA, 210 bp, Proteus mirabilis
atggctaccatcaaaactgcgacgcttaccatccgagtcgatcctgacttgaaggaggcgttgcgagcagctgcgcaagcggaacaccgctctatcgccaacatgatagaagtgctcatccgagagcattgcgagaaaaatggtatagccataaagcaagcccaagattcagatcaacgtgggagcgttaagcatgatcaagacagttaa

SEQ ID NO: 307079 - DNA, 975 bp, Proteus mirabilis
atggctcataaggaaaaccctctgtccgcttctgaaacaggccaatgttcaccattttcgagaatcggcccaggacctgcatttactccaaaaccagaagtgatccattatggaggaaactgcactccaagcggaagttttgcacaaataggagtcttatcatgtgggccagacaaccaaatgttcgaatctgttgggactagttttgctacccctatagtttcttctatagcggcaaatgcatggaaatcaatagacggaacaattgtcgctacacctgagaaggtaaaagcactagtaattcattcagcagtacttggctgcaatggttacgagtattctacagggtttggaaagcctggagatatcgacgacttactctattgcacagatgatcaaatcacactgatgtttgaagtcgatgttcggcatggattagttgagtttgagcgaagtccaattccattgccaacttcagttcaagaagctggaatgtttaagggagaagtagccatgacactggtttattcgcctccttttgatagatcttttggttcagaatacagtcgtgtaaacattagcgtctcaatgggggaaacaaaagatgttctggacgaaaaaacaggggagctaaaaactatatttaagggaaaagtaccgcctttgccttctgagaaaaaagacttatatgaaattaaccagctaaagaactcctttaagtggtcacctacaaaagctcacaagaaaagatatcctcaaggtactggagttgctgcatggaagctcaagatggaatcgaccatcagggcagaagaacaaaatccggcgacgcctcaaaaaacagttttacttgttacaataaaatcaatcaaagaaggaacaaatctttacagtgatgctgtgagattgctaaagactaatggctggatactaaacccagttgcagtaaatgtaccaattactatccagcaatag

SEQ ID NO: 307080 - DNA, 213 bp, Proteus mirabilis
atggcgaaaggttcaagtatcaacggcaatggcggtaaaaatggtggaaatgatagctacacaattacagggcgcggcgaagtaagtcgaaaaacactggttcgtgaagttaaggaaggtaaacatccagacacgcacatttataagcgcaatggtgtggagtacgcccgaaacaatccaaatcacgataagcctgacaacattaacgaataa

SEQ ID NO: 307081 - DNA, 1140 bp, Proteus mirabilis
atggcgcaaccttcccgtatttcacttcagatcaaaaaaacagttatttcattagccattgctgctttaggctttacggcttcctcttctgcattggcttatcaaaaagtccatcaacccgataatagctatcagcaatatatttctcagcgccaaacggtggatatgttgatccaagatgcattagaggcatttaaatcgccagcgcgtgtttctgacgctggatttacgggaaaactaccttctaatatggaagtcgtagcacaaaagctacaacaagcttataaattagagccttatcgcttagatttactatttagtgccgccagtgcttatgtctataacaatcaaattgagcgtgcggtaacgatttataaacaaattttagaagctgcaccggatgatattgatgcattaatttatgtgacttcttggacgcgttttgaaggtaaagataaagaaagtgaagcctattttaacaagttaaaatcccttaatccggcaaaagctgaagagctaagccgcttttttgctcaaattgatcgtgtaagcaaaatgccattaagtgataagttaacgccagcagatttggcaacgctaaataaaaccaaaggaaataatgccattgtgacattgggttatgcacttaatccagatggtacgatgaatcagatcttgattgatcgtttaaataaaacccttgaagtcgcaaaacagttacctgatgcaatgattgttgtgacaggtggtgtgccgaaagcacatcaaaccgaaggtaaattaatggcggattggctagttaaacaaggtattcccgcagagcgaattttccaagacaattatgcacgctcaacggtggagaatgcgttatttagccgttatgcattaactaaacaccgaattaaaacagcggtgattattagctctggtagtcatgttcgtcgtgctgatgttatttttacggttgcgagttggcaaagtggccccagtgatatcacctatttaacggtagtagcccccgataagccattagccgaattacaaaaaacatcaaaatctgatttacaaggtatttatcgcgatggcttaaaagcattaggattatggagcttccgtagttatccattagaagagcgttga

SEQ ID NO: 307082 - DNA, 489 bp, Proteus mirabilis; identical to SEQ ID NO: 34914

SEQ ID NO: 307083 - DNA, 618 bp, Proteus mirabilis; identical to SEQ ID NO: 83863

SEQ ID NO: 307084 - DNA, 2979 bp, Proteus mirabilis; identical to SEQ ID NO: 83862

SEQ ID NO: 307085 - DNA, 447 bp, Proteus mirabilis; identical to SEQ ID NO: 83858

SEQ ID NO: 307086 - DNA, 378 bp, Proteus mirabilis; identical to SEQ ID NO: 83857

SEQ ID NO: 307087 - DNA, 663 bp, Proteus mirabilis; identical to SEQ ID NO: 83856

SEQ ID NO: 307088 - DNA, 138 bp, Proteus mirabilis
atgtccgcacaagctcacgtcagagaaagctcatctggttcattcatctcctggcagttccttgtctggcaggtgatgttcgttataggtgttgttgcagggatgaacctggaacacgcattcaattttctaggttaa

SEQ ID NO: 307089 - DNA, 378 bp, Proteus mirabilis
atgggaggaagtgtgaaccttaataaacaatttttctggtttttgatgaacgcggtgctgatgtgcatcttcatcgttccagtggccgtcgcgttttggctgtctgcttttgcggcaggttttgactggagtcagtgggttaagttggctgctgatacggccaacagagctgcaagtgacccggccaaggctctgggcacggttcagacctactggggcattctcagcttcttcctgctggcggcgtacagtctgatgttcaagtttaaagccaatgctaacaaggaagtgaaaactctgggggtggcccgaccagccaatgaagttagcgttgcggcttcggaaaaacattcggaagcggttcctcaaaatcaataa

SEQ ID NO: 307090 - DNA, 918 bp, Proteus mirabilis; identical to SEQ ID NO: 83851

SEQ ID NO: 307091 - DNA, 5532 bp, Proteus mirabilis
atgatcaatttcaagcctaaaattccggcgatgcttggggctctggcggttcttaccgctggtgctgctcatgcagagctgctggaatacacctttaaggctccagatggtacgcaacggtctctgactccgaatgccaactatgccaacccaacgggcaatatctcgtttgccttgagtgccggtatcgaccgaaaggtaaagatttcggtgattcggtcggatggaacagtggtttcgacagcgaccagccaccttcttggggctactgatcgcatcacagtgggtggaaaatcctactatggtgcggaacttcaactaccggctccttccgagggagtctacaaactaagggccgaaatactggcgtcagacggaagttccgttcagactgatgaatacccgcttcaagtcgatacgacagcgccaagtttggcaaacgtgacagtaaaaggggaatggaaccgggcgctttctgatggaacgctactgcgaggtcctaaccgattttcaggtatagatgtgtctgcatctgatgccggttcttcggtttcctctatacaggcgtatgctgtagatagcaaaggcaagaggagtcctgttgtctcggttaattacgccaacggccaaggccagttgttgaactggagcactgtgttccctaatggggaggatctatatacgcttcatttcgaggccctggataaagcagggaacaaagggtcaatagcctatcctattgcttgggattcagtaggtgcaaagtctggagagaatcctgagccagtagcagtgtatgaccctaagaacccgcaggcctcaacttttaaggttaatggtcaggccctatcaggttttgcgccttatcagaacggaatgaccatttattccgatacctacagggtgctctaccggatacccaaaacaaactcctatccttcttcaccttacggtgctcaaagcggtaactggtgtgattataaaaactgtattgaaggcaatatcattgccgaagacggtacatatgattatcggcagacgcaagctgatgtattccagcaacatgggacaaaaactaagtcgtttattatttacgactgggttatgaactctcttggtaatacatccgtcagtgtgaaagctgatccatcggttagcttggctcccatcggtaagtatgttgaatatcttagggatgatggtcagtgggtccgcggtgaaaccattaatatgagctcagttaaccattataaaaaactgagatttcatgttgagccgagaccttacgctcaggagttatggggatcttggttgcctactactaaaattccggcaaatgcttcttatgcagaagtggatacggatatatcgttcagtgggcgctcatgttcatggcctggatattggtctcgaccggaagggaagcctgaacttccgtctgatcggattggggcaacgttctgctatgaccttaaccctcctgaaattgctgggttagaacgaaatgggcggatttttaaagctcatttccgtgagcctgattcatttgacggttggggtgttaaccagtgggttatttctaacaactcaagtgcgtctgcgataacctcgactggcgaagaacgtccgttgtctcgtactgaagttcttcgtagtagcacaaatgattggtttttcacattttctgctgagaatctgtcagagggcacatataccggcatatctctcgtagctaaagatgctttcggtaatgaggttaagcaggtattcactggctcccaatatgctatgagcatagataattcagcgccgacactaaccgtatcgatcagtgatggagcaccaatccagtctttggatgatgttgtaatcaccttgactgatactgccgacccgagtcctaagctgacctctattgccctcgtcggaggcccagccgatgacaaggtgcagttgtcttggcgtgaggagtcgaaaggtcgattccgccttgagtacccggtaatgttcccgtctttgaaggaaggggaatcttacacgctgactgtttccggtgaggacgcacaaggcaacgcggttcaaaaggcggttggcttcgagtacaaaccgcgtcaggtgatgctggcggatgggatggatggcaaggttatggtccccgctgtcactcatgaatttgttcatgcagatggcaagcggatcatcgagaccaagccgctgacgctcagtgatggtgctgtcgtgacaggttcatacgacgtgtttgcgaccctccgttctgatgcgaaagtgccgctggtggtgaatggggtgcgtatcgagccgggccagacaatggggatcatgagccaacatgatttcggtgcgtcaggtggtcgtttgagcattccggttaaaccggctgttcctgatgtggtcggctcttccagtcttcttgtcatgacctccgcgccgaactcacccatcttggttgtggacatcaatacctggaaagggacggccaagctctcggctgaatcatggacaattcgccaggttattgacccggtgaaaatctatgccctgccagagtcgggtgtgccttgccggttcaccacgaaagaggatgtggctatggccgcagacccaattcgtgacccggtgtgtttgctccaatgggacagaactccggatgaggctgaacaaactacgcaggacaacaacgggatgaaagctgccgggctggtggggcaggctgtgagcattggtgaacaacctgtcgaatacagcctgtacctgttcagtggtgacggttccaaggtaaaagttgggtctggctctcagaacctgacggtaactactgcctatggctctgttggttacaccccgattgatgacattgctcaggtgaatcgcgtcattgaagactttgatgtgaacttcaagcagagcaaaggtcctgattgttcaatcactctcagtgctgaccgtgcgaaaaacgaggccgcgaacaaagctgttggcagtgcaagccgcacctgtctgttcgagtggcagcagatccccgatggactggtccaagacccgttatcggaatctccttcgttgtcaggttccctggccgagaacggtgatcaccctctggggtggcgggtaagtattttcacccgtaacggcactcgggtgacgttgaacgacgagactttcaatgtcgaagcggttgacccaccagctccgaccgttgaactagcctccgactacaacttcaaagacaacatctacttggtgccgatgacaggtaactacctgggtgatgccattatcaactctgaacgagctgatctggatattgccatatcgcgcaactctgatgttcttgagtctgagaccttcactccgggatggggtgccaccaataaggtgtatcgccgcatcaataccgatgagcgagcgttgtgggaggagaccacctacaaggtgaacgcggcctacaacaaggtgcctgatgtgaagactgaggttgtctaccgggctatctctgcaccttctgacagtatccgtcctatcgttgaagttaaaggtgataccgcgattgacacccaggcattgccggttagggttctcatccgtgatcagtacaaacctgatggtgactatgacgctaacacgatgggggtgtggaaagtacgcctgatccagcaaaaggcctacaacgagacggttgcgctcactgattatgcggaagcatcgaacggtgaagctcagttctcagtagacctgtctggtgtggatacttcctccgtccgtatcgctgctgaggctgttctggaaagccctgttgagggttacaaccgcacagagttgtctatcagacctgccttcttgacagtgcttcgtggtggtgccatcggtgctggcgtggaggctcgcaagttgtctggtgaagctccgttcactgctgtgttcaagctatctttggacgaccgtcaggatctccgggctaccggccaggttgtgtgggaaaccagtaaggacgacggtaaaacctgggagcagttcatcccagaagatcgatacaagtatcagcttgtgaagaccttcgacaagggggagtaccaggttcgggccaaggtggtgaacgtcaactcaggtgcggaaaagtacaccgaagcggtcagtgttgtcgcttacgacaaacctgatattgctgttatcggcccgaccacgttgtttgtcggaagtgaaggcaagtacacagcgaacctgacgttgaacgatgagccaatctccggtggcaatgccattgttgagtggtctactgacggtggcaaaacctacgcgcagacaggggatagcatcacgctttcgagcgatgaagaaacccgataccgcctgtgggctcgtgtgcgctctgccactgcaccggctgatgacggctatgcctatgaagttgcgaaaacggcagttgacttccgagcagtgaaggccccccgtccttacgtgacagggccgcgagtcattgagaccggtaagaagtatgtgttcaaagccgaaaccagcctgccttaccgtgggatggacgtgaagctgaacgggttcttcacgctgcctgatggctcaattgtgcagggtgatactgctgagtacgtgccttcggacactgacctcaaccaggctactgtagaaacgaagtacaccacctggatcgaaggataccgagatcagggtgcagaagcctcgcatagcctacgctcccgcgtgtggcagtatgtatggccgagcttcggaatgcaggtcaggaagaacgctgacgtggctcctgcgacgatcaccgcgtcagtgcggccaattgccttcaacggcaagctggaagaaccgacctacgagtgggagttgccggaaggcgcagtgattcaggatcagcggcaggatattgtccggtcctttgtgatcaatgagccgggcgattacaacatcaaggtgactgtccgtgatgctcgcggccatgaaaccgtgatcgagcaaccgctcaagatcggccaggcagagccctatgctatcgacctgcaatactctggctcgaacaaatacgagcgtgagcctctggatgtgctgttgcgaccgtacatttctggcggccacccacgcgaccgtatttcgactcgcgtctactcggtagatggtacgccgttggaaagcagcggttactacggcagagcaactctgggcgctggtgagcacagcatcaagctgaaaataacctcagaaatggggcatgaagctgagggcgaggtgaacatcaatgtggcagagaacaagttgcctgcatgtagcctgagctcacgagagaccgttgggtcgtggatcgtttatgcgaactgcgaagataccgatggccgcatgaagtcctacgaatggaccattgccggtgagttgcagagcatcagctctgatcgagtgactatcagcaagggcacctatgaaacgatgccgaccatctctctggttggggtcgatgactctggtggcaaatccgaagctgttaccatgaactaa

SEQ ID NO: 307092 - DNA, 672 bp, Proteus mirabilis; identical to SEQ ID NO: 83841

SEQ ID NO: 307093 - DNA, 1008 bp, Proteus mirabilis; identical to SEQ ID NO: 83840

SEQ ID NO: 307094 - DNA, 2799 bp, Proteus mirabilis; identical to SEQ ID NO: 83839

SEQ ID NO: 307095 - DNA, 177 bp, Proteus mirabilis; identical to SEQ ID NO: 56103

SEQ ID NO: 307096 - DNA, 528 bp, Proteus mirabilis; identical to SEQ ID NO: 83984

SEQ ID NO: 307097 - DNA, 990 bp, Proteus mirabilis; identical to SEQ ID NO: 25075

SEQ ID NO: 307098 - DNA, 336 bp, Proteus mirabilis; identical to SEQ ID NO: 83979

SEQ ID NO: 307099 - DNA, 540 bp, Proteus mirabilis; identical to SEQ ID NO: 83978

SEQ ID NO: 307100 - DNA, 204 bp, Proteus mirabilis; identical to SEQ ID NO: 56217

SEQ ID NO: 307101 - DNA, 270 bp, Proteus mirabilis; identical to SEQ ID NO: 25098

SEQ ID NO: 307102 - DNA, 219 bp, Proteus mirabilis; identical to SEQ ID NO: 25099

SEQ ID NO: 307103 - DNA, 558 bp, Proteus mirabilis; identical to SEQ ID NO: 49879

SEQ ID NO: 307104 - DNA, 852 bp, Proteus mirabilis; identical to SEQ ID NO: 49880

SEQ ID NO: 307105 - DNA, 147 bp, Proteus mirabilis; identical to SEQ ID NO: 49881

SEQ ID NO: 307106 - DNA, 4263 bp, Proteus mirabilis; identical to SEQ ID NO: 83951

SEQ ID NO: 307107 - DNA, 273 bp, Proteus mirabilis; identical to SEQ ID NO: 34916

SEQ ID NO: 307108 - DNA, 396 bp, Proteus mirabilis
ttgataatggccgcagccgcatcatgctcgtcagtctatgccgcgacattaccgaccagtgaggtagacgcatacatacttgcgatgaacaccatgtcacctatcactgcaaagtacaccatccagtacaagcaagcggttgagcagaaatgcaatacagccctgagcgttgagcagctcaactcaaaggcattcaccaatgttgtccaggcaatggtgagtagtgagaccgtcgatagaatggggcttgatgctgctggtggatcactccaggataccctgtctgtgatcggcaagaacgtcacatgcagtgacctgaacgcgccatttaaagcactcttggatgataaggacttcacggggtctgacgctcagtggaacgaaaactcacgttaa

SEQ ID NO: 307109 - DNA, 774 bp, Proteus mirabilis
ttgaatcgaactaatattttttttggtgaatcgcattctgactggttgcctgtcagaggcggagaatctggtgattttgtttttcgacgtggtgacgggcatgccttcgcgaaaatcgcacctgcttcccgccgcggtgagctcgctggagagcgtgaccgcctcatttggctcaaaggtcgaggtgtggcttgccccgaggtgatcaactggcaggaggaacaggagggtgcatgcttggtgataacggcaattccgggagtaccggcggctgatctgtctggagcggatttgctcaaagcgtggccgtcaatggggcagcaacttggcgctgttcacagcctatcggttgatcaatgtccgtttgagcgcaggctgtcgcgaatgttcggacgcgccgttgatgtggtgtcccgcaatgccgtcaatcccgacttcttaccggacgaggacaagagtacgccgcagctcgatcttttggctcgtgtcgaacgagagctaccggtgcggctcgaccaagagcgcaccgatatggttgtttgccatggtgatccctgcatgccgaacttcatggtggaccctaaaactcttcaatgcacgggtctgatcgaccttgggcggctcggaacagcagatcgctatgccgatttggcactcatgattgctaacgccgaagagaactgggcagcgccagatgaagcagagcgcgccttcgctgtcctattcaatgtattggggatcgaagcccccgaccgcgaacgccttgctttatag

SEQ ID NO: 307110 - DNA, 1023 bp, Proteus mirabilis
atgaagaaaatcgacatcagtggttccccgtttgagattggcctgcgccttggcgagcttggccgtgaagcatggcatcagaaactgatgctcacgtcattgtggcaaacggtgatgaccctgcaggcatcccctgagacccgattaatgcgcgctgaggtgcagcggcattatccgcacatctggcaggagctggaggggttggcgcaggggctggaggccaatgttgatcaggtctttgcctggaactgccgtggcgatctggtgcgctcaacgtcggatggctgtacgacggtggccggggtaaacgccgcaggcgagcggattatcgcgcacaatgaagacggttttcctcagttacgggatgaatgcttgctggctaccattaccccgagtcgcggtctgagctttacgagttttgcctatccggggtcgatttgcggccacacctttgcggtgaatgaaaaaggtatcgttaacacggtgaataacatccgtgcagtgcatcgtccgcagggattaccgcgtcagatcctggctcgcgcctcgctgaatgcgaacaccctcgacgaggccatcactatacttatcggccagccgcgatccggggcgtttcaccatacgctcgggcagctgggcgatgcgcggctgttcagcgttgaggccaccgggcaaggctgttccgttctccccctgacgacggtaaccgggcatgccaaccatctggtgcatgcggcactggctggcgttgagcagatcgttaccgacagttcagcgtcgcggcagttacgcctcgtgcagtggcgggaaacgcaacctccgtttgacgccgcggcggcaaaagccattctctcagatacccatgacgccgaactgccaatttaccggctggctgccgacgatccggatgaggagaacaccctcgccacggcagttttcaccctcgatgccaaccacgtcaggtggcaaattttcgacattaaccgcgacgatgctaaatttcagggagaagtgcgtgggtga

SEQ ID NO: 307111 - DNA, 189 bp, Proteus mirabilis
atgcgttcactggcggatgaagggatgaccatgattatagtgacgcacgagattggctttgcacgcgatgtggcctctcgattgatttttatcgatggtggaaccattgctgaagatggcccacctgatatcctgctgaatgccagtagcaatccgcgcctgaaagaatttttacagcacgtttcctga

SEQ ID NO: 307112 - DNA, 852 bp, Proteus mirabilis
atgaaagacaagagcgccgccgctggcctgctgctgggatatgcccgcgtcagcaccgacgaccaggacttgaccaaccaacgcgccgagctgcacgccgcaggctgcacgcgcatctttgccgagaagatcaccggcaccaggcgcgacaggcccgagctggcccgcgtgctcgatcacttgcgccctggcgatgttgtgactgtgaccaggcttgaccgcctggcccgcagcacccgcgacctgctggacattgccgagcgtatccaggcggtcggcgcgggtttgcgcagcctggccgagccgtgggccgacaccaccaccccggccggccgcatggttctgaccgtgtttgccggcatcgccgagttcgagcgttccctaatcatcgaccgcaccaggaacggccgggaagcggccaaggcccgaggcgtgaagttcggcccgcgccctaccctcaccccggcgcagatcgagcacgcccgcgagctgatcgaccgtgacggccggacggtgaaggaagcggccgagctgctggccgtgcatcgttcgaccctttaccgggcgctggcgcgtggcgaggaagtgacaaagaccgaggcccgccgacgtggtgcgttcgccgaggacgcattgagcgaagccgacgccctggcggccgtcgatgatgaacgccaggaagaaggccccgcgttcctcgatggcgacggcccggccgccgacctgccgccgccgccgtatcgaacgcagagcctgccgcaaatcctggcggccctccccgatgacgagctggcgagctggcccggtgagctggccgaccaggagggggtcgtctcagaaaacggaaaataa

SEQ ID NO: 307113 - DNA, 276 bp, Proteus mirabilis
atgaaaaaactgtttgcctctctcgccatcgctgccgttgttgcccccgtgtgggccgccacccagaccgtcacgctgtccgtaccgggcatgacctgctccgcttgtccgatcaccgtcaagaaggcgatttccaaggtcgaaggcgtcagcaaagttaacgtgaccttcgagacacgcgaagcggttgtcaccttcgatgatgccaagaccagcgtgcagaagctgaccaaggccaccgaagacgcaggctatccgtccagcgtcaagaagtga

SEQ ID NO: 307114 - DNA, 990 bp, Proteus mirabilis
atgagcgcttcccagccaattgaatggacagtggcgcaactggcgcaggcggtcgagcgcgggcagcttgagctgcactaccagccgattgtcgatttgcgcagtgagcagattgtcggcgcggaagccctgttgcgctggcgtcatccgacgctcggactgttgccgccgggccagttcctgcccgtgatcgaatcgtccggcctgatgccggaaatcggcgcatgggtgctgggcgcagcctgccgtcaaatgcgcgactggcgggtgctggcatggcaaccgttccggctggccgtcaatgttgcggcgagccaagtggggccagatttcgacaagtgggtaaagggcgtgctggccgatgccgggttgcccgccgcgtatcttgaaattgagctgaccgaatcggttgcgttcggtgatccggcgatcttccccgccctggaagctttgcgacagatcggtgtgcgcttcgccgccgacgacttcggcaccggctattcctgcctgcaacacctgaaatgctgccccatcagcacgctcaagatcgaccaatcgtttgtcgccggactcgccaacgaccaccgcgaccagaccatcgtgcgcaccgtgattcagcttgcgcatgggcttggcatggaagtagtggccgaaggcgtggaaacatcggcgagtcttgatttgttgcgacaagcggactgcgacacaggacaaggcttcctgttcgccaagccgatgccggcggcggcattcgccgtcttcgtcagtcaatggaggggtgccaccatgaatgcaaatgatccgactgccaccagttgctgcgtgtgctgcaaggaaatcccgctcgatgccgccttcaccccggaaggcgcggaatacgtcgagcacttctgcgggctggagtgctatcagcgcttccaggcgcgcgccaagaccgggagcgaaaccgatgccgatccgaacgcctgcgactcatcactgtcagactga

SEQ ID NO: 307115 - DNA, 957 bp, Proteus mirabilis
atggtgatgagaaggacagggcgcgtcccccttcttttgctggttggtctcatggtcgcagctcctgcggcctttgccagtgactttgtgactggcgttatggtggggcaaatgctctcagatgactcaggcagcaagaagatagaggacactggcccggagagcaaaacggtcattgattaccatgacggtcagccagttgtgaccaaagtggaggccttcaaaagcaataaatggcgcaaactggatggccctcagggcggctattttgtttgcccaggtgaataccgtagctattcgggaaggctgcgatgccgtattcatgatgacgggtttaatggctttatgggcggtatgactgatgctcaggagctgccgctccaagaagctctgaccaagttggaaggtaaacccatctccctgcaaaccattgaagtccacggcaacaacctggcagtcaaataccagttagcaccaccagcacaaacgcacgtcaaaactcaggatctgggggtggtcaagcaggatggtgaaacgcagaaggctgccagccaacaatcagcgtcatccatagtgactgcaccaaagagtgaacctcccaagcagattaatgctgcacaagacactgaccgcaataccagtgcgtttcaaagtccgttcgaggaggtaagtgactccatgatcggtctaatggatagctctttcgtcaaagtcatagcgggattgatgctggtgtttggggttgctagtggaattatgaggcagagcccatcaggaattgtgatggggataatgcctgcaattatgatcatgaccgcgccaacggttattcgtaccgtattcgatacaggcgcggccagtaccaagccagtggaagatagcggaagctcatttcctttcttcttggtggcaatagtaccggtgctgattttcttggtaatgactccaacttattga

SEQ ID NO: 307116 - DNA, 195 bp, Proteus mirabilis; identical to SEQ ID NO: 34923

SEQ ID NO: 307117 - DNA, 393 bp, Proteus mirabilis; identical to SEQ ID NO: 34922

SEQ ID NO: 307118 - DNA, 330 bp, Proteus mirabilis; identical to SEQ ID NO: 34921

SEQ ID NO: 307119 - DNA, 147 bp, Proteus mirabilis
atggagtggattttttggactgctcttgctgtgtcattgatattccactcagaagtcagcgacttaatcaatgctctagctgagtgggctagggagcgagctggtgcggccaggagagagcatcaaaacggcagagaggagaattga

SEQ ID NO: 307120 - DNA, 1464 bp, Proteus mirabilis; identical to SEQ ID NO: 34920

SEQ ID NO: 307121 - DNA, 933 bp, Proteus mirabilis; identical to SEQ ID NO: 34919

SEQ ID NO: 307122 - DNA, 264 bp, Proteus mirabilis; identical to SEQ ID NO: 34918

SEQ ID NO: 307123 - DNA, 498 bp, Proteus mirabilis; identical to SEQ ID NO: 25003

SEQ ID NO: 307124 - DNA, 489 bp, Proteus mirabilis; identical to SEQ ID NO: 25004

SEQ ID NO: 307125 - DNA, 336 bp, Proteus mirabilis; identical to SEQ ID NO: 25005

SEQ ID NO: 307126 - DNA, 471 bp, Proteus mirabilis; identical to SEQ ID NO: 25006

SEQ ID NO: 307127 - DNA, 372 bp, Proteus mirabilis; identical to SEQ ID NO: 25007

SEQ ID NO: 307128 - DNA, 195 bp, Proteus mirabilis; identical to SEQ ID NO: 25008

SEQ ID NO: 307129 - DNA, 252 bp, Proteus mirabilis
atgtgcttccaacgaaaagctggccttgggcgttataactcaaccagacctgagtggctggcggcgtaccgaaacgcaagatgtatgagaagctcaggtaaagaacctgatgcttctctttccgggatagcttggaaggcgcaactcattgttgcccatgaaagaggcagaattgacagcctggctgtccctttggatgccagattgatagcaaagaacctcatcgacgagatccttgctgaggagaactga

SEQ ID NO: 307130 - DNA, 549 bp, Proteus mirabilis; identical to SEQ ID NO: 25009

SEQ ID NO: 307131 - DNA, 351 bp, Proteus mirabilis; identical to SEQ ID NO: 25010

SEQ ID NO: 307132 - DNA, 303 bp, Proteus mirabilis; identical to SEQ ID NO: 25011

SEQ ID NO: 307133 - DNA, 273 bp, Proteus mirabilis; identical to SEQ ID NO: 25013

SEQ ID NO: 307134 - DNA, 528 bp, Proteus mirabilis
atgaggttaggttttgtgaaaaatacgggggtttcagcgttcctggtagccatgctggtggtggcccctcaggtatgggcagaaacctttactgcgaaggttgtgggggtgtctgacggtgatacggtcaaggtcctgactgaacaaagctgtgactccgggaaagattgccggagcggcaaaatccagtaccgggtaaggctggcggaaatcgacaccccagagaagaaacaaccctacggctcaaaggcgaaacaggcgttgtccgatctggtgtttggtcgaatgattaaagtcgagcaaatcgacaaagaccgttatggccgtctggtcgccaacctttatgtcgatggcaaatgggtcaatgccgaaatggtccgttctgggagtgcgtgggtgtaccggcagtacgccaaaacaccggagctgttcaagctggaggccgaagccaaagccgataagcgaggtctctgggcattaccggaatcgaagagaactcccccttgggagtggcgaagaaagcactaa

SEQ ID NO: 307135 - DNA, 858 bp, Proteus mirabilis; identical to SEQ ID NO: 25016

SEQ ID NO: 307136 - DNA, 228 bp, Proteus mirabilis; identical to SEQ ID NO: 25017

SEQ ID NO: 307137 - DNA, 519 bp, Proteus mirabilis; identical to SEQ ID NO: 25018

SEQ ID NO: 307138 - DNA, 447 bp, Proteus mirabilis; identical to SEQ ID NO: 25019

SEQ ID NO: 307139 - DNA, 360 bp, Proteus mirabilis; identical to SEQ ID NO: 25020

SEQ ID NO: 307140 - DNA, 429 bp, Proteus mirabilis; identical to SEQ ID NO: 25021

SEQ ID NO: 307141 - DNA, 861 bp, Proteus mirabilis; identical to SEQ ID NO: 25022

SEQ ID NO: 307142 - DNA, 960 bp, Proteus mirabilis; identical to SEQ ID NO: 25023

SEQ ID NO: 307143 - DNA, 855 bp, Proteus mirabilis; identical to SEQ ID NO: 25024

SEQ ID NO: 307144 - DNA, 294 bp, Proteus mirabilis; identical to SEQ ID NO: 25025

SEQ ID NO: 307145 - DNA, 474 bp, Proteus mirabilis; identical to SEQ ID NO: 25026

SEQ ID NO: 307146 - DNA, 522 bp, Proteus mirabilis; identical to SEQ ID NO: 25027

SEQ ID NO: 307147 - DNA, 522 bp, Proteus mirabilis; identical to SEQ ID NO: 25028

SEQ ID NO: 307148 - DNA, 609 bp, Proteus mirabilis; identical to SEQ ID NO: 25029

SEQ ID NO: 307149 - DNA, 1116 bp, Proteus mirabilis
atgttgagacgagaaaaccaaggagatttgttcgatgaccaggtggtgttgccatcactggagtcggttcttaccggcatatcttccagtcagcgttgtgacgatagaacaacgtacttctccgctccggatgtggacctgagtttgtacgatcacatcattgtttgcctgtctggaggcaaagactcgattgctgcgtacttgcggctggtggacatgggtgttgataagtcaaaggtggagttctggcaccatgatgttgatggtcaggaaggcagttcgttgatggattgggccttcatgcgtgattactgtcgtcagctcggggaagaactgggtatcccaatgtacttctcgtggcttgagggcggctttgagggcgaaatgctcaaagacaatgcctatagccacccccatcgtgtagagacgcctgaggggcttctggtgctgcctagagaccataagcgctctaagcctggtacgcgccttcgtttccctcagcaatcgccatcactccaaacaaggtggtgctcatcagccttgaagatcgatgttggtcgcagagctcttaataaccaggagcgcttcaaggggaagaagatccttttcatcactggtgagcgccgggaggaaagtgcaaacagatccaagtacaaccagcttgaggctcatgcctgtgacagaagatatgggaagactgcacggttagttgatgcctggaggcccgttcttcattggactgaggaggaggtatgggaagtaatcgagcgtcaccgcatcctggccccagtcccttatcgccttggctggagccggtcgtcgtgtatgacctgcatctacaactcacagcgtatctggtccacgatccgtcactactggcctgaacgagctgggaaaattgctcagtatgaacaaacctttggtgtgacggtatcaagaaaaaaaatcgacgtaatagatttaggttctgctgttgcgccgatacagattagtgatgttgaggcattggagcaggtatccagagaagattacacgctcccgatttttgtgccggaggggcagaagtgggttctccctggtggcgcatttggccgagaggcctgtggttctgattga

SEQ ID NO: 307150 - DNA, 435 bp, Proteus mirabilis; identical to SEQ ID NO: 25031

SEQ ID NO: 307151 - DNA, 312 bp, Proteus mirabilis
atgcctccgcatatgggggacctgcacgttatgagatttgatatgtgggtacgttgcacgaaagcaggtcctgaacctctcgatatatgggaactctgcacgattgacgaagcagaacaaagattgacagatcaggacaaacctaaaaaagcagtcaaaatgactctaatagtccataaagtgatcacgcgcacacaaaaagaggccaaaagttatccacatttcctgtgcataaacggggttttggtatatgggaacgctgcacgatcatatgtgggtacgctgcacggtgcaaaaaacgaccaaaattga

SEQ ID NO: 307152 - DNA, 1065 bp, Proteus mirabilis; identical to SEQ ID NO: 25033

SEQ ID NO: 307153 - DNA, 288 bp, Proteus mirabilis; identical to SEQ ID NO: 25034

SEQ ID NO: 307154 - DNA, 540 bp, Proteus mirabilis; identical to SEQ ID NO: 25035

SEQ ID NO: 307155 - DNA, 984 bp, Proteus mirabilis; identical to SEQ ID NO: 83936

SEQ ID NO: 307156 - DNA, 294 bp, Proteus mirabilis; identical to SEQ ID NO: 25037

SEQ ID NO: 307157 - DNA, 420 bp, Proteus mirabilis; identical to SEQ ID NO: 25038

SEQ ID NO: 307158 - DNA, 609 bp, Proteus mirabilis; identical to SEQ ID NO: 25040

SEQ ID NO: 307159 - DNA, 534 bp, Proteus mirabilis; identical to SEQ ID NO: 25041

SEQ ID NO: 307160 - DNA, 363 bp, Proteus mirabilis; identical to SEQ ID NO: 25043

SEQ ID NO: 307161 - DNA, 1434 bp, Proteus mirabilis; identical to SEQ ID NO: 25045

SEQ ID NO: 307162 - DNA, 1029 bp, Proteus mirabilis; identical to SEQ ID NO: 25046

SEQ ID NO: 307163 - DNA, 1512 bp, Proteus mirabilis; identical to SEQ ID NO: 25047

SEQ ID NO: 307164 - DNA, 279 bp, Proteus mirabilis; identical to SEQ ID NO: 25048

SEQ ID NO: 307165 - DNA, 1041 bp, Proteus mirabilis; identical to SEQ ID NO: 25049

SEQ ID NO: 307166 - DNA, 876 bp, Proteus mirabilis; identical to SEQ ID NO: 25050

SEQ ID NO: 307167 - DNA, 492 bp, Proteus mirabilis; identical to SEQ ID NO: 25051

SEQ ID NO: 307168 - DNA, 870 bp, Proteus mirabilis
atgaatgatgaagaactcgaacttgccagagccgaagccatgaaagccgataggtgcttttcaaaaggacggctcagggacgaatttcggatgaagcctaagccaggagtagagccagtttcgttctacaaaaacaggtatggtggccaatttggagtgtaccggatagcagattgccaaccaatgcggagaaggggttgttcaccggcatcacaaaagcaaataagggcgcaatccatcctttcggtcaaggcaagaatgcgtagcaacctggcaaaggcctctgtcatggcacaaaggtgggtcgctctggaacctctggttctcgataccgagacgaccggacttggtgaaagagaccaggtgatcgagctggctgttactgacatcagaggcgcggttctcctctgcaccagattacggccaaccgtggaaatagaccctcaggcaatgggtgttcatggcatcaccgagactgagctgtcgaatgagcctacgtggactcaagttgcgccagctctcgcccggcttttgtcgggccgtcatctggtgatatttaactccagtttcgacagtaggatgttgaggcaaacagccagtgcatttggagaccaactctcttggtggcaagagcagaactgtctgtgcgcgatgaagctggcggctgatgcctttggctcaaccaaccggcacggcacaatctcacttgcggatgccacctgcgaggcaggtgtgagctggaaaggtcgagcccattcagcagcgaccgacgctattgccaccgccgacttggtgacagagatagccaaagtccaacgtgacctcgtggtccagctccaggagcttcaaagcaaaggtaatttggaatga

SEQ ID NO: 307169 - DNA, 1011 bp, Proteus mirabilis; identical to SEQ ID NO: 25053

SEQ ID NO: 307170 - DNA, 537 bp, Proteus mirabilis; identical to SEQ ID NO: 25054

SEQ ID NO: 307171 - DNA, 288 bp, Proteus mirabilis; identical to SEQ ID NO: 25055

SEQ ID NO: 307172 - DNA, 318 bp, Proteus mirabilis; identical to SEQ ID NO: 61213

SEQ ID NO: 307173 - DNA, 480 bp, Proteus mirabilis; identical to SEQ ID NO: 218366

SEQ ID NO: 307174 - DNA, 267 bp, Proteus mirabilis; identical to SEQ ID NO: 121407

SEQ ID NO: 307175 - DNA, 1245 bp, Proteus mirabilis
atgaaacgcatgcaggagcaagttgaagaggtagcctcaaaattaaaagaaagcaatgaggctctaacgagtcgcttggtaaaacttaaacctgatgttgatgctctctgtggtgttagaccgaaaagcaactctaaaaaaagagattttaatgtcactattagaaagcaacaaaataatatcgagacagaagatttacgtgaagagattatagatagtgtactggatgctttaaataaacaaggccgcaaaacagattattcaactgcggccaatattttaacaactatttctcaaacgcaatttactctgtttagcggactacctggaacaggtaaaacatcccttgctaaaatgcttgggaactgtttaggccttcataatcgtttattgaacattccagtagcaagaggctggtcatcatttagggatgttctcggtttctataatgctttatcccagtcatttacctcttcatcaacaggtctctatgaattccttattcacttacataacgaaaagatgagtaatgtggaatctgcggctgcaataattcttttagatgaatttaacttgtctcaaccagaacattattttagcccgttcctagaaatggcagatcctgaatctcaacgtacccttgctaccgggaatcctgacgagccatacttattagttcctgagtatcttagattcctaggtactataaaccaagatgaaacggtacagacgctgacacctagattattagatagagctgccattatcaactttgatgactttgaacataattatgatgttgtcattaaagagtctgaagttaaatcaaatatactaatggaagcaatatctgggaatgattttataaaagcatttcagccaacaagtttagaaatcccgcaagatgttgaacaaacattattatcaataataagtgttttacgtgatgatagattggaatttggcattccaattattgtttcgtacagaaaaataaaggccataagatattattataatatcgcaggtcctttgatgtctatggagagccgatacttagcattggactatgcagtatctcaacatatattacctctactaaatggttatgggcaaggtttcggtaaaaggttagaagcattgttaaatatcctcccagaggaaatggaaagatcttgtcgtttacttaaaagaagtatcaatcatggaagtcaaaatctctttgggtatgggaataatttatga

SEQ ID NO: 307176 - DNA, 1812 bp, Proteus mirabilis; identical to SEQ ID NO: 235969

SEQ ID NO: 307177 - DNA, 1542 bp, Proteus mirabilis
atgaaagagaatttcaatatcacaaaactcccctatgggatcaaactggttgatttaatcatcagtggggctaaaacagatgagttgtttgtaaaattaccagttgaatacttcaacaaatggaaaaactatcctgttctcgggttcaatgaagaggatagcaatagtgaaacaacaagcaatgcaaaatttttcaacctaaagatgttaccgattgagtcgtcaaatctgaatgattttttgcatccttatgatactgttctaaaaacccccttccttaatagatacaaatcagaacacccctttgctttagaggttaaagaacatgcgaacgggcgaaaatttagaccatatgaatcatatttggcttattggcgatcatacgttatttttgaaactgtccagaactgtaaatttatagatcgatatttagatagtgaaagaggaattgctttctttaaaaagaccttcttttgcttaaatgagttttgggttaaaaattatagtgatacttttaatagaatagcgctgtacaaatctttcatgaccagaattagattggctaacaatacagaatgttttacaggtggtgaaatatcggaatttattttgagccactgtaaatcttcgattttagatcttcaatctgatatgacccttttacttaaaattcattcaacatggaaacgaaaatataacacatcaacaataaccagttatgtacaggctattgagttattaaagaaagacatttattatttatttgaatggctttgctatacggggatgagtgaaacagaggtaatcgaaaaatggtcttattctgaaaatgatcgagaaatgagagagtggtcagaattgaaaggtgttctcgattttgaagaattgaaattttcgtcatcatttataaaatatgttcctcattattcaaagagtcttgagcatcagatccctagttgtaggtatactcaaatatatgattacctcaagtcatttgggagtttcagtccctggattagaggtttttatgatctacataaatcgattaacaacaaaacacatatccagttaattcagtctagagttattgacaacttactacttatttcaataagaacggaaatagtcatccgggaaatatttagttctatatctaacgaaccaagtccagatgacttaaggacgatatttctaggattgccaaaatttattcaggatgatataagtgcctctgtttttaatagaatttcagataatgcaaattggaaattgacaaaattaaatgaacgctcagaggatattttttctaaacttagctcttgtaatacagggaagaattggtctaatgaacaaaaatatttttttgaacagatttttaagtttatcacatcaaggaattactttgcgcatcattattataaagatgaagagttgaatgaccaagtaaacagtctagctagagatgtacttgtctcttgcttgaattcattgttatacatttcagctttagctacacaagtcattgcatggcggaaaaagtaa

SEQ ID NO: 307178 - DNA, 795 bp, Proteus mirabilis; identical to SEQ ID NO: 219749

SEQ ID NO: 307179 - DNA, 1359 bp, Proteus mirabilis
atgttggtgaccatgtcagataaagagattcatcgcttaccagtgatacaggctgtttgtgaaaagcgtctacgccgtcgcgatgcagcgtcacagcttggcatctcagaacgtcaggcgcaacggcttatcaatcgttaccggatttcaggtgctgaaggacttgtcagccgcaaacgtggccagcccagcaaccgcaggttgaccgaatctctcaaactacgcgtgctcagactgatacgtgaaaactacagcgattttggacccacgctggccgctgaaaaactcagagagcgccatgatatccggctttcaatcgagaccgtccgcaactggatgacgtctgaaggactctgggttccgcatgctcgccgcaagtcacgggtttatcaaccccgacatcggcgtgattgcctgggtgaacttatccagatcgacggctcccaccatgactggtttgaaggccgtgcgccaaaatgctgccttctggtatttatcgatgatgccaccggccgtctgatgcatctgcggttcagcgagtcagaaacagcctttgactacatgctggcaacccgggaatacattgagcagcatgggaagccggtatcgctgtacagtgataaacacgcaatatttcgcgtcagtggtccggagaaccgcaataccaccgttacccagttcggacgtgtcctctatgacctggcaatcgagcttatttgtgccaacagctctgaagctaaaggccgcgtggaacgtgcgaatcagacacttcaggatcggctgatcaaggaaatgcgtctggacggtattaccgacattgaagccgcgaatgcctggcttgccactttcatcgttgactttaaccgccggttttcacgaccggcaaggttcccgaaagatttgcatcgtccggtgcaggaaagccccgatgaattaagagacatctttgcctggcatgatgttcgtaccgtgtcgaaatcactgaccttccagtacgataagatcctttatctcattgacccaacagaagaaaatagccgtcttgccggtgaaaaaattaaagtactggattatcccgatggcaccctcgccttccactatgggcatcgtagccttaagtgccaggcatttgataagctggcctgtgtcgaccaggggcagattgttgataacaaacgtctcggaacagtactcagactggctcaggtaaagcaggatgagcgggaaagcgaaggcaaacgggaacgaagcaaaaaatcgcccagccgtaaggctcaggtgcgcgtccaggaacagctccgggctattaatcccgttctggcagacccgagcttgtttgtggcaagttcaaagcgatag

SEQ ID NO: 307180 - DNA, 153 bp, Proteus mirabilis
atgcgtgaaaatgaaataaatcagttggttaaaggactcttaaagcacagtgaaccgtatagacaacgacaattaaaaacgcctacaaagcccattacagggcgcaatactcaacgtgatagggagctaatggaatgtttcagaaatcgttag

SEQ ID NO: 307181 - DNA, 432 bp, Proteus mirabilis
atgagcagagacatacagaaaattttgacacattggggcggctggtcggctggcgatcattgtgctgccgtgggctggtcatcagtggcggcaggctttagcgactattcgccaagcgctagcggcaataggctatcgtgtagcgacgaggacggcttagtcatcgacttatgcgttgctaagctcgctacggtcggtatggagcgtgaacgcgcctatcttgaagaatattacatcaagggcaaatctaaacgtgcaattggtcgcaagttcaaaatacgagaggatgaagtacgtaggcagatgcaaattgcggagggctttgttttaggcttcttagaagcgcttaatattcaattggatatagatatattgtataaaaagcaatcaatcagtgcgctgaagttagtgcggtcgcaaaatgtgtgttaa

SEQ ID NO: 307182 - DNA, 270 bp, Proteus mirabilis
atgagcaatagtgacagacttccacccgcagaaaccttggaatctcaggcttccagaacagccgcttcttggcttcaggatgcgattagggaaattgataaggcctttggtagcggttacgccaaggaacacccagaattagttgctgcgtttatgaagtcagctggccttgatgaaattgcaatgcacattagaggattagcgctagcgcatcagcgtattgatgactccctagatgttctactcacacggttagatattagtaagtaa

SEQ ID NO: 307183 - DNA, 2283 bp, Proteus mirabilis
atggctattataaaacattggggggctaccgttgaagaatgggttcattttgacctcattttggggtgtacagataagcttttgcctgtggtatgtaaccccgaagcgactatttcactgaatagtaaaatgaaagcgttaggtaaaacgcctagcttatacaacgctcaacgacatgttgttggtttcagtaattgggtgagtaaaatctctactggggttgatatcgaaaaatggatggcggaacctgattatgggatctgcattcgaactggccataatgaaatcgcgatagattgtgatattgaagatgcagatatccaagctcaaattcaatctatcatgctaagatcatttgggcagatacctcctcgccgtttcagagacaacagcaataaatgcctttacctcctcggtacagaaggtgattacgttaagcgcgtccaccgtttagaggataatttagggatcattgagtttcttgctaaaggtcaacaatttatagctgcgggaacccatcctagcggttctcgaattcagtgggatgatgggtttcctacagaaccttttatggttactgagcagcagttaaatgatttttggaatgttttagcaacagagttacctgtaatttcatctacggaatcagggcgcaatggtaaagcaagagacctcactattgctacacccaatgcaaccgatgatatagcagagttccttgatagtaatggcttaactctagattttggtcgtaacggtgagcgctacatcacatgtccttttgagaaagggcatagtaccgatagtgggatcaccagcaccgcatattttcctaaaaacaccgctggctatgagatggggcatttcaaatgcttacatgcaagctgtgcacaccgtaatgatggtgattttttaaatgcgattagttttggggtagaagattttgaagatttcactaccactgatgatacagaccaagatagcgaaagtatggagagctttactgatttgtctattgatatgacaagtcattttttagaacgttttatttacgtactgaaaggcgatcaagtttgtgacctgtcacgccctccatacagttgtatgatggaaatgaagtcgtttagaaacttgatggcaccgtatcaatttcctcctgagtcaaaaaaagggaaccctatacccgcgactaaaaggtggattgaacatcctaaaaaacaggttgctgaaaatacgggatatcagccgggtaaagggcgtttgattaaacgtccagacggccgctttgatatcaacgagttttatttaccagaacatcctaaagtttccaactttgaaaagtcggatagtatatttctcaaacatatggaataccttttacctaaaaaagaacaaatggagtttttcattgctagattagcgtggatactccaacgccctgagcgtagatgtcctataacaatgctccatatttctactttacatgggacagggcgtggctggcttatacagctaatggaaaagattttagggtactggaattgtactagagccaaaatggatgttatttgtaaaaatcaataccacgattatttacaccattcattgctatgtaccgttgatgaagtaagagaaaacacagataaacgttactctattagtgatcagctacgtgacattcttactgaacctagatttgaggttaataataaatacggcaaaaaagtaacagaagatatttttaccagctttttatttttatctaaccacatcgacgcgattattatccccgaggaagataggcgtatcgctgtttttggtgggcctgaatatttgcaagatgctaattactatgagcatatctaccaatcgctttcagatagtgatttcgtggctcaagttttttggtatctaaaatcaattgatttaaacaagttcaattggcagcgagcacccgacagtgaagagcgtagaacaatgatagaaagtagcagatcagaggttgctaaatcgttgcatgacttaattgaagcgccaattgcttctgtaatgacgtatcagcagattgttaacttcattattaatgaggttgggttggaagctgaaattaactctaagcagattacagctattttaagagccaaaggcttgacgcaatatgaaaagctaaaattcaaaggtgatacggttcgcccttggttattggtgaaaaattgcaagttaacaaaagaagaagttagagcagaacttgaaatttgtgaaaaattgcaagatcaagtttaa

SEQ ID NO: 307184 - DNA, 216 bp, Proteus mirabilis
atgaatggtttaacagcaaaagaaatgattgaaaccctgattaagtccggtttaacgcaggttgatgtacaaaaactaacagggattagccagccatcaataagccgtattttgtctggtaaaaatagtgaccctagattatcagtaatacgtgctatcgaaaaagcgtacttatttgtgagtaaagaaggttcatcctctaacgtagaggcttaa

SEQ ID NO: 307185 - DNA, 675 bp, Proteus mirabilis
atgagcagagatattgaaaaattagtcgaaaatataaacatattgatgagagataaaggggttgctaattttactgagttagctaaaaacacaaaaatacctcaaccaaccatgcaccgcttggtatctggggatattaaagatcctaaatatacattacttaaaaatattgccgattattttaaagtgtccgttgatgaactagtagaaagtagtctcaaacacaacaaagatcttaataacgcagaatcaagggtagcttcagtcgcttttaaacagatacctgtagttggaggggctcaattgggtgcagatggatactggttagactttcaatacccagtgggctttggcgatgggtatgttaattggccatcaaacgaccccgatgctttcgctttacgatgtaaaggggattcgatgaaacctagaataaaaaatggtgagtacgttattatagaacctaaccattcatatcaacctggagatgaggttcttttagtctcaaagcaagaagaagtcatgattaaaacctttttatataagagggatgatgaaatcatggtcatgtctattaatgaagaacacccaccattacgttttgatattgataatgtagaacatctttactacgtcgctggaatcgcaaaaccctccctatatcattgtatataa

SEQ ID NO: 307186 - DNA, 621 bp, Proteus mirabilis
atgaacgtacgattaacaaatacgattaaagatagtattaaaaataatgcgctagctaaagctggcatatttaaacaaaaagaagatctggaaaaagaatttaatcaattagcgttggatgttcgaactgaagctttaggcggcgaagataaagcaaaaaaaatggaattagtcttagaagttgctttatctaatctcagaatgttagaggaagaagttaattctaatatttatgtaaataatactagtggttactatatttatcccgcttttaatggacaaaggacgactttagaatatggcaaagataacaatggtaataaaattagactgttaaccccctcacgtgataaatgtttgttttccgcagatcatgaattaagtaaacgatttgaaaagttaaataaaaaagaaagtaaaatcgaaaagaaaaaaattgaaatagaaaataatatacaagcgactttaaattcagtaaccacaattaaacgactctttgaaatatggcctgaatcaaaagaactcattccaactaatattagtaaaccattatctacactacctgcacttcaagttgaagatttaaataaattaattggtttaccaaccgataaaaaataa

SEQ ID NO: 307187 - DNA, 135 bp, Proteus mirabilis
atgaaaaaagtaaaaattttgccatcggatagatttccgatgaataacaacgttcgccgtttacgttatcaacaaaaacgtgaagcccttaaacaaaaccctaataccaccttccctatcaccgtgtatctttga

SEQ ID NO: 307188 - DNA, 687 bp, Proteus mirabilis
atgagtctcgaactagcaattaaagaaaacaccgaagtgatgcgccaattaattgccacaatgcaatcaggcgcagtagtacaaactaaagtcaccttacaaccaaacgaaaaaccacaacctactaaaaacaaaataaaagcaactataaaacctgtagatattaatacattagagttgaatcaattagttgcgttagcggtactatttaaaggcgaaattaaagaactaacgactgaacaactatcccaagttaccgaaactctcacagctaaaggggataagcgtaatgcacaagttgatgcgctttatgttgcgcttgttaacttagacgaaataactaatctcgataacaatactatccacgatttatgtcttgaaatgctagagaactgggatgatatgcctagtgtaactgaacgtcgggagtatgcggttgccttactaaatgaaggtaaagcggtaagtaaagagccagagccagagccagagccagagccagaaaagatagatccaaaaactcttttagaacaagctgaaaaacttattttacaactagctaaaggcggctatcgcaatgaagctgtggaaatcttatctaaatttggtgctaaaaaattaggtcaagtccctgaaaataatttagcggagcttatcactctagcagaaaaagttttggaggcgtaa

SEQ ID NO: 307189 - DNA, 1287 bp, Proteus mirabilis
atgcctgatattcacgcgaagctatctccctcttcagcacatcgttggatgcggtgtagtggaagtttagccttagaatcaacggtaccagataaggattctcttttttcgttagaaggtaccgcagctcatgctctagctgaacttatcttactcaatttaaaaaataccgataaagaacatggtaaaaatgcacatttttatttgagatgttatccgttaaataaggcagataccccccaagttaatgatgaaatggcagattcggtacaaacctatgtagatacagtttggcatcttgccgttggtaaagagctattaatcgaacaacgtgttgatttttctgatgctatcggcgtgggaaactcatttggtactgccgatgcgataattttatcccctgatgaattacaaatccacgatttaaaatatggtaaaggtgttaaagttgatgctgaaaataatgagcaactacagctttatgctttaggcgctttagaccaattcagtatgctttatgacttcaaaactgttcgcctgttcatccaccagccacgcttaaatcacgtttcagaatgggtgctaacggttagtgagttggttacctttggcgaacgggcaaaagaagctgctgcagaagcagttgttacctgctcaatcgcggagtgcgaaggtgttaatacattaccgataacctgtttctcccctggtgaaaaacaatgtcgtttctgtaaagccaaaggcggtttatgcgccgcagaagcacagcatgcccttgagctggtaaaaggtgattttgttgatttaaccgtacctcttgaggggcagattagcgaagcgccacagcgtattaccgtattagagccagaacaattagctgaagtatacaaagggttagattttattgagaatttctgcaagaacctacgtgctcgtgtcgctgatgaacttaatgcaggccatactataccaggcttaaaactggtcacaggtaaattaggtaaccgtgcttgggatgatgaaactgaagccgaagccacattaaaaggctttagactaaagcgcgaagaaatgtacaacatgaagctaattagcccaactcaagctgagaaactactcaagaaagacagccctcgccgttggacaaaattagagccactcattacccgaggcgaaggtaaacccgtcgttacgttcgaatcagatcctcgccctgctcttgtcatcaatcctgaaaacgatttcgacgatgtgaccgacgagtcactcgtagctgacctcatttaa

SEQ ID NO: 307190 - DNA, 552 bp, Proteus mirabilis
atgaaagttaaattatccaacgtccgtttggcattccctgatttattcgaagcaacccaagttaacgggcaaggcgattacaaattccgttcaaccttcctaatccccaaaaaccgcactgatttaatcgaatcgattgaaaacgcgattaaacaagtagctaccgcgaagtggggaacgaaagctgatgctgttctcaagtccattcgcggtaatccaatgcgttttaacttccgtgatggtgacgagaaaattgagtacgacggttatgctgatcatatgtatatcggcgcaagtaacaaagcgcgaccactggttattgaccgtgaccgcactccgttaacggcacaagatggccgcccttactctggttgctacgtcaacgcaactatcactatttttgcttatgacaaccaaggtaaaggcatttcagcttcactcggtggggttcagttcttccgcgacggtgacgccttcgcaggtggtggtgtcgcgagtgaagatgacttcgatgacttaagtgtcgccgaagaggaagaatcattgatttaa

SEQ ID NO: 307191 - DNA, 261 bp, Proteus mirabilis
atgttaggttttagtgtagggattttttcttttgctgtagctgtgttaattccgttgatttacgtaataggtagaggtcttgattggtttggtgcgacaattaatagaacagaaaaaccaaaagatatgatgatggtgaaagtagttcttgggattattattggttttattttaggtagctttattcagtatttttgggatacatttacggcttgtaaagagagtggatatcctctacttcaatgctttagtaaacggtga

SEQ ID NO: 307192 - DNA, 207 bp, Proteus mirabilis
atgaatattgcagatatatgggcaacaggggtcttaattactttcattgcacttactctctacccaagaaaagtaaaagataaggctaaaaaggttcctttattaattaacatcctactatcaggtttttggcctgcgaccttagtaatcagcgcactcgtttgtcttaattcattatatgaatgggcgattggttacacagactaa

SEQ ID NO: 307193 - DNA, 228 bp, Proteus mirabilis
atgacattcaaaaacaacgatagcccgttatatttccgcgcggctcgagatgctattcgtcttgagcaagccggaaaatacttcgaggcagcaaaagcttggtcacaggctaatcggctcgcacgagcaagaagtaatcaaatttggagtgagcgacgctctgatttttgttttatgcaaattaaaaggcaacaggataaaggtacaggcaatgagcagagtacgtga

SEQ ID NO: 307194 - DNA, 270 bp, Proteus mirabilis
atgagcagagtacgtgaagatgaaatcgaaaggcacttggtcaacgaagtaaaaaaagcaggcggtatcgcttataaatttacttcacccggacgtaaaggtgtgccagataggatcgtacttttgcctaatggcagaatcattttcgttgagtgcaaagcccctagtgaaaagccccgtcccgatcagttacgtgaacacgcgaggcttttcgcattagggtttcatgttgtcgttttggatagtaaggatttaggagaaatactctaa

SEQ ID NO: 307195 - DNA, 705 bp, Proteus mirabilis
atgtctaaacggtttcagttaattaaaagtgaagttcctctaataactctagctacggcaatgtcttattttttgatttatttttatcattatggatatactgacttttggggatatcctaaagaatttatttctatagacgtatcatcaatattgagcgtaagtataggtttattctctgctctacttatagcattctttaacctaagatttttttctgaaaatcctaaacctaccctactagatgctgtagtttactcacttataacattggtggctgtttgttttttatttggttattatttatttaaaactaatgattatttttataacggtaaaatattgtatttatgtattacatttatagttataacgccattcgcattttatggttcttttaaacaatatttttctaaagagagaaataatatatttgtttatatatcttgtttattttgtttgatgttctttttttcctattcagttggatggttatttgctttttccaaacctgatatttactcatatggaggtggtactttaatttcgcgatatggagattattatgttattggctactgcggaaaggaaaaagctaattatgaattagtgtcaattaataatactattaaactaaatccgatgttacaaaagagtagggagcagttaaaaatctgcttcagaaattctgcaacacttcattga

SEQ ID NO: 307196 - DNA, 1389 bp, Proteus mirabilis
atgatatctaaaaacttcaccccacgcccctaccaaaatctcatactcagccacgaaattgacattaagcgctcaaatgtttgggctggtatgggcatgggtaaaacagtagcaacgctcaccgccttagaagatttgtttatggctggaagtgaaacacagccagctttagttcttgctccgttacgagtcgcaagttcaacatggccagacgaagcggttaaatggaaccacttacgtaatatagatgttcagcccattataggtactgtcaaagagcgtatggttgctatcaaaaataccaatgccagcgtatttactattaactacgataatcttgtttggctagttgaaatatttggtgagcattggcctttcggaaccatcgtcgcagatgaaagtacaaggctaaagtcgtttagacttcgtaaagggggtaaacgtgctgcagcactggcgaaagtggcacacaaacatgtacatcgatgggtaaatttgacgggaacaccttcccctaatgggttgattgatttgtgggggcaagcatggtttgtcgaccaaggtcagcgattaggtagaacatatagtgcttttacttcacgttggttcaatagcattcaattccctggtcaacaatggtctaagttagagccttggccttttgctcaagagcagatgcaagacgctttacgggatgtcacggtatcactagatgcagctgattggttcgatatcgaagagcctatccacaatatcattaaactagaacttcctactaaagcccgaaaacaatatcaagaaatggaaaaagaaatgtttcttgagttagaacatgagggcattgaagcgctaaatgcggcggctaaaacagtaaagtgtttacaaatcgctagtggagcaatctacaccgatgatagtaaatgttgggccgaactacacgatgccaaaattcaggcgttggaaagtatcattagtgaatctagcggtatgcctatactcgttgcttaccactggaaacacgacctagaacgcctattaaaagcctttccgaaaggtaaaaatttagatgcggatccacaaacattacgcgattggaatgcaggtaaaatacctattctctttgctcatccagctagcgcgggtcatggcttaaacttgcaagatggcggtaatattttggtatttttctcgcattggtgggatttggaacaataccaacaaatcatcgaacgcatcggccctactcgacaaatccaagcaggttataaccggcctgtatttattcaccatcttattgcaactggaactatggacgagatagttatggagcgtcgaaattccaagcgagaaatacaagatcttcttttagaagcaatgaaaaggaaataa

SEQ ID NO: 307197 - DNA, 279 bp, Proteus mirabilis
gtgaaaaaagatgagctaattaaagccacacggcaaattaaacatgaatcacgcgatgctatgaacagtatggatgacaattatatttcattccccgcagaactgatttatagaatatgtgatgaactgctcaagtaccagtggcttaccccctatgcttgggaatatcgaaacgctctaggcttaacttttactaaagacaaaaagcaaatcgatctcgttaaagaatattgctctgatgcaaacatcattgaattatttaaattagataacaagtga

SEQ ID NO: 307198 - DNA, 990 bp, Proteus mirabilis
gtgtataagagacaggcctataatggcgaacaacttctgttgaaaaaaacctattactccattggtggcggctttattgttgatgaagagcattttggtcaacccgaagagaataaagttgaagtaccttatccttatcaatatgctgccgatttgcaacgtcactgtaaggaaaccggtctctctctttctgcactggtgatgcaaaatgaacttgcattacgcagtaaagaagagatctcagcccattttgctgccgtttgggaggtaatgaaatcaggtatcgagcgcggtgttaataccgaaggcttattaccgggaccattacgtgttcctcgtcgcgcgtctgcgttacgtcgtatgttagtgactgaagataaaaccaccaccgatcctatgacagtggttgattggatcaatatgtttgcattagccgtaaacgaagagaatgcagccggtggacgtgttgtaacagcccccactaatggcgcatgcggtattattcctgccgtactctcctattacgataaatttattcgcccagtcaacgaaaactcctatacacgctttttcttagtggccggtgttattggatcgctgtacaaaatgaatgcctctatttccggtgctgaagtgggttgtcaaggtgaagtcggtgtagcctgctcaatggctgcaggggctttaactgaactgctagggggtagtcctgagcaagtctgtattgcggctgaaatcgcgatggagcataacttaggtcttacttgtgatccggttgcaggacaagtacaggtgccttgtatcgagcgtaatgctattgctgccgtacaagcggtaaactcagcacggatggcgcttcgtcgtgtcagtgatccacgtatctgtttagataaagtcatcgagaccatgtatgaaacaggtaaagatattaattctaaatatcgtgaaacatcacaaggtggcttagccattaaagtctcttgcgattaa

SEQ ID NO: 307199 - DNA, 1326 bp, Proteus mirabilis
  misc_feature (1246)..(1255): n is a, c, g, or t
atgaaattttcacgttcggcaaaagcgaagacaaagacaaagtcaaatgccaaactccgtaaacctgaagaaaaaacaggatttgtgagttggcgttttgcgttgctttgcggtggtattggtattgctttagcggcgttattaatacgagttgcctatttacagattattaacccagatcccctgatccgcgaaggggatctgcgctctttacgtgtgcaaaaagtccccactgctcgtggcatgataagcgatcgtatgggaagaccattggcggtgagtgtccctgtatatgctatttgggctgatcctaaagttgtgttagaagctaaccctgatatgaccgattcacgttggttagcacttgctgacgcattaaaacttcccgttaatcaaatttctcaaaaaatttctgcaacaccttccgctcgttttatttatcttgcgcgccaagttaatcctgaaattagtgattacataagtaagctgaaaatcaaagggataaacatgcgccaagagtccaaacgctattatccttcaggagaagtgaccgctcacatcattggtgttacaaacattgatggcgatggtattgaaggggttgaaaaaagctttaaccaatggcttaccggtgcccccggagagcgagttgtacgcaaagatggctttaaccgtgtgattgaaaatatcgctcaaacagatagccaagctgctcacaacttaatgttaagcattgatgagcgtttacaatctgttgtgtatagagagttaaccaatgcagtcattgaaaataaagccgaatcaggtacggcggttttggttgatgtcaatacaggcgaagtgttagcgatggcaaatagcccatcctataacccgaataatttagcgggaacgccgaaagatgcgatgcgtaatcgagctatcaccgatatttttgagccaggctctacggtaaagccgatggtggttatgagtgcgctaaacaataatattattaaagaaaataccgttattaatactgttccttatcgaattagtggtcatcagataaaagatgttgcgctttatcgtgagctttcgataactggaattttacagaaatcgagtaacgtaggggtatctcgccttgcgttagcgatgccggcgtctgaactggtagatgtttattcccgttttggcctcggaaaaccaactaacttggggctagttggtgaaagtagtggcatatttccaataaaaaaacaannnnnnnnnnaccttctcattcggatatgggctaatggtaacgccattacagttagcgcgtgtctatgcaactatcggtag

SEQ ID NO: 307200 - DNA, 195 bp, Proteus mirabilis; identical to SEQ ID NO: 190863

SEQ ID NO: 307201 - DNA, 426 bp, Proteus mirabilis
atggcggagtggtcaaacacaccaagaaacggcgttaatttatgcgctaacgcatcacgcgcaccgatttgtttgagtaattcacccgtatccattgccggttttgctttctctaatcgcttaattttacgtttcagagatgccatttcatccattgcagtcatgctacgatttaggcgctttaaacgacgattaagaccatcggtagttgcttggtcaagatgctctttggcttcttcaatcgcttcgacagcctcttcaatggcgacttcggctttctctacggcttcaggttcgccagattctgcttcttctgtggcaatttcggctttttctacggcttcttccgctttctgctcttcgtcagggtctgaatcagttgaagacttatctttatcgtctggctcatcgtctgtcgcaggttga

SEQ ID NO: 307202 - DNA, 471 bp, Proteus mirabilis
atgggtgagattaaaatcagtggattgtctgaactcgctcaacgaatgcaagacatcgcccgtaaaaccagaaatcaaagtgcgcgtaaggcgatgaatacaggcgcttcggtgttaaaggaagaaatcaaacatcgagtgcctatccttaaggaaacggtgccccatcgacgcaagggtaccctcaagcgcaatattcgttctaaaacgaaagtgcagcgcaatgggcaagtcaaaacacgtatttgggtaaaatcattatcgggtaaaaaagtgtctgcctttaaacaagcaacgggaaaaagtgcagcattgaacccaaatgatccgttttattggtggtttgtcgagtttggtaccgccaagatgcccgcacaaccgtttatgcgccccagctttgaagcgaaaaaggaagcgacagctaaagtgatagttcaaacactcaaagaggatattgaaaaagcaaggtag

SEQ ID NO: 307203 - DNA, 195 bp, Proteus mirabilis
atgtcatcgatacatactgaacaatttataccagctaaattagcacaggcattagcgaattcactttttcctgaactggatagtcagctacgtgcaggtcgacatattggtatagactcactagataaccatgcttttttgatggactttcaagatgagttaacagatttttatgcgcgttataatgtcgaataa

SEQ ID NO: 307204 - DNA, 597 bp, Proteus mirabilis
atggtgcaaatacgaaattgggaatataactcgttatcaagcattatcgatggtgatgctgatattgcttttttaggtcgtgaatattattcaggctctaaagaggcgttacatttattacctgaagtcatcgattgtgaagagctttttcgtgatacaccattggtttatgttcgaaaaaatcatcctttattaaatgaaccttggaatttagagacatttttgcactattctcacatttcaacagaatatgataaacgtgcccattgggcactagatgatatattggcagagcatgggcgtttacgtaatatcgcgataacttacacgtcatttgagcaaactttatttacgatttctcaacctaatcatgaactcattacttgtttgcctggatattgtgtccattatacctcacgagttttacctaatttagtaacattgcctatccctctaccacatagtgtttctgaacaacttgatatttcatttattttactatggcataaacgccatgcgtataattctaaagtgctgtggttaagagaaactatcaaaaatagtgttaatcagtttatgcagaaaaatacttattaa

SEQ ID NO: 307205 - DNA, 375 bp, Proteus mirabilis
  misc_feature (331)..(340): n is a, c, g, or t
atgcataagccattacatcgaatagacttgaatttattagttatttttcaaattcttttacaagagcgcagtgttacattaactgcaaaatggttgtctatttcgccttcagcagtcagtaaagcattggctaaattacggatttggtttgatgatccccttttcgttcgtagccctcaaggattaattccaacacctttgacattaagtattgaagagtctctttctgattttattaatattggtaaccatatcgcgagcaagcaaaatagcgaaacgcctaaaggtgttcatttcagtttaatattagaatctcctttacatcaggtannnnnnnnnnggtactactcaatcaatttcctttggaaatattga

SEQ ID NO: 307206 - DNA, 1173 bp, Proteus mirabilis
atgacaaaatatatcctttttagcttttgtttagtgctgatttaccctcttggtgtggatttacatttaacaggtttaacggcaatagcgaatgatttagacgcatcagaagcgacattacatcaagctttttcaatttatttaatgggcatggtttcatccatgttagttgcaggatggtgtagtgataatttagggcgtaagcccattgtattgcttggaacagctattttcttattggcatcatttaatgcgggaatttctgtaacggaaaataattttttgattgcacgttttttccaaggtattggggctgggttttgttacgttgttacctttgcgatattacgagatacattagctgaaaaacaacgcgctaaagtcctttctatgataaatggtattacttgtattattccagtattagcgcctgttttaggttttctgatcttattaaaatttaaatggccagtgatgttttatgctatggcaatctatgcgctattaatttttatttattgtttctttggaataaaagaaactaaaccaaaacagtggactaaaaataaaaataacacaatcactggtgagtctttcttaaatagtttctttttaagtcgtttgcttatttcatgcttgggaatgagcgtgatcctgacttatgttaatatctctccaatcgtgattatgcaacaaatgcattacactactgggcagtattcaacagcaattacattgctttcaatggtcagtatggcaacgtcgtttatgatgcctaaaattttaacaaaacttcgttatgaaaccattttatatactggcttatcgagctttttaggtgcagttatttttctttttattggaaaaaacagtgatcctcgttggttctttgcttcattttcattatgtggtgcggggtttgcgttgttatttggtattataatgagccaagcgctctctccatttagtcagcgtgcagggcttgccagttcgattttagggatttcgcaattgagttttgcatctctctatatctggactatgggatggttgggaatatctgcacttaatatgctgatggttatattgtctgctagttgccttattggttttacctttttgcatctctttcgttcttctggacaacaacaaaaggtgaattgtgatgcataa

SEQ ID NO: 307207 - DNA, 1086 bp, Proteus mirabilis
atggaatcagcgttttctgctcaaaatattcgacatattcttgctaataacacacctattattgatgtgcgtgcgcctattgaatttaatcaaggttcgatccctaatgctatcaatttgcctttaatgaatgatgaggaacgcgctgctgtggggacttgttataaacagcaaggttcacaaaaagcggttgatttagggcatcaattggtgagtggtgaaattcgtgacaaccgtattgcagcttggcgtgaagcttgtgagcaatttcccaatggttatatttgctgtgctcgaggaggaatgcgttctcatatagttcagcaatggcttaaagaaataggtatagattatccattaattgaaggtggatataaggcgttaagacagactgttattgaaatgaccaatgaattggttcaacggcctattatcttaattggtggatgtactggtaatggaaaaacgactttagtgcgttcattacctgagggtattgaccttgaaggtattgcacaccatcgaggttcatcttttggccgcactgtagaagaacaatttcctcaagccacatttgaaaaccatcttggtgttgaaatgttgcagaaagcaccgaaatatacacgatgggtacttgaggatgaaggtcgtgctattggcgccaatggattacctgaatgtttacgagcaaaaatggttgaggcttcaatagttgttgttgatgatccctttgaacgacgcatagaacgtttgaaagcagaatattttgatcgtatgacacacgattttttagatgtttatggcgaaaatgaaggctggcaagcttatagtgattatttacatcatgggctatttgcaatacgtcgtcgattaggctctcaaagagcctctgaattaactcaattacttgataaagcattagaaacacaaaaaatgagtggtaatacagaagcgcatttttcttggttaacccctttacttaaagagtattacgatcctatgtatcgttatcaattaagtaaaaaggaagataaaattatttaccaaggaagttatgaagaagtcatgcagtggtttaaaaattag

SEQ ID NO: 307208 - DNA, 408 bp, Proteus mirabilis
gtgatatttgagattgttagaacgcttttacattacagcttgcactttttagctcctattttattaggctatcttttctggcgtaagaattggaagatagcctcacttcttatgataggaacaatggctattgatattgaccatttgttagcaacacctatttttgatcccaaccgttgtagcgtgggttttcacccattacataccagttgggcagctttaatttacttaggcatatggtttttaccctcatggaaattaaaagccattgcagtggggtgtttatttcatttatttaccgactcggttgactgttatttaggtggattaaaacccaatttaacaataacgatgagttgtgataaaaattactttatatccgttctaaatagcaactctattctctaa

SEQ ID NO: 307209 - DNA, 1353 bp, Proteus mirabilis
atgtttattggctttgactacggaacatcgaattgttctgttgcaatgatgaaagagggaaaacccactcttttgcctttagaaggtaatgatgtgtatattccatcaaccctttgtgcgccaacccgtgaatccgtttctgagcacttatttcgccatttaaatattaaaccgtccagtgaagttggcgaacaattactaagaaaatcgatcgcgtttaatcgagaagaagatattgaattagttcctgaagatattcttttcggacaatctgcattaagtttatacctacgtgatcctcgtgatgtctattacgttaaatcacctaaatcctttttaggtgcatcaggcctacatgagatacaaattagcttctttgaagatttagtttgcgccatgatggcaaatattaagcaccaagcagaaaaaaccacacaagaagcgatcacagataccgttattggcaaacctattaactttaatgggttaggtggcgatgcttcaaataggcaagctgaaagcattcttatccgtgcagctaaaagagctggctttaagaatattatgtttgaatttgaacctgttgctgccggacttgaatatgagtcgacgttaactaaagaccaaactgtattagtcgttgatattggtggtggtacaactgactgctcattaattcaaatggggccaagttatcaaggtaaaaccgaccgttcaaacacattacttgcgcatagtggacaacgtgttggtggtaatgatcttgatatttaccttgcttttaaacaaattatgccattatttggtatgacagggttaacgtcttcaggtattaaattacctctgaaacagttctgggatcctattgcgattaataatgtagaagctcaaaaagatttttattctcgtcaaaaccttgctgtattaaatcagttaagacgggacgcaaaagagcctgaaaaaataacacgccttattgaagtctataatgaaacattgggttacagcattgttcgacgtgctgaaaaagccaaaattgccttatcagattctcctgaatatattgctaatatcgcgttattaagtgaaaccttagaattaacgattgaacgtgatcaaatggttgaatctattgaatcaccaaaaagtaaaatgattgaattggttaatgatgcggtaaaacaagggggaataaaaccggacgctatctttatgactggaggttcggctcgttcacctattttatgccaagcaatagaacaacagttacccaatgttcctattgttaaaggtaatgattttggctctgtcaccgcaggattagcacgttggggcgaggtttgctttaaataa

SEQ ID NO: 307210 - DNA, 1026 bp, Proteus mirabilis
atgtaccgcttccaaaatgattataatgaaattgcacatcctgcggtcatgaaagcaatcactgatacaatagggcaacgctatgatggatatggtatggataagctttgtcatcaagctgctcaatcaataaaacagcgtattcaacaacctagtgcagatattcacttttttaatggtggcaccattactaatttaaccgctatctctcattttttacgtccacaccaagctgttatttctgttagtactgggcatatcgctacacatgaaacaggtgctattgaagcaacggggcacaaagttatcaccactttttcggcagatggtaaattaacgcccgcattgttaaaacctattctcgctgaacataacgatgaacactgggttcaacctaagcttgtttatattacgaatgccaccgaaattggtacggtttatcgcaaagcggagttgcaagcactgcgtgatttctgtaacgagcataacttatggttatatcttgatggtgctcgtttggcagcaggattaatgtctgcacaaagcgatctgactatcgaagatatcgctagcttaaccgatgctttttatattggtggcactaaaattggtgcaatgtcagctgaaacgctagtgatttgtcacccagcactaaaatctgattttcgttttagcttaaaacaaaagggtggattacaagcgaaaggctggttattaggcgcgcaatttgaagctttatttaaagaggatctctatttcaaattaggtaaacaccttaatgaaatggcatcacaattaactgagttctttactgcacaaggctttgaatttttagcgccaccagaatccaaccaaatttttgttattttgccaaacacgattgcagaaaaattaacacagcagtttgtttttcatcgtgttttacttgaagcccctaatttgagttgtttacgtctttgtacttcttgggcaacaacacaacaagatattgatgaattcaaagtgacctttttgaaattaatttaa

SEQ ID NO: 307211 - DNA, 1455 bp, Proteus mirabilis
atgtatttagggctagatttaggcacatcaagcgttaaagcgatcataatgaatgaacaaggtgacgttgtcactagccattcagttcctttaacaatttcacgccctcaccctcaatggtcagaacaagatccactacaatggtggcaagcaacagaagaagccattcttcagcttggatgtcattttccaatggatcaaattgaggcgattggattaagcggacagatgcatggcgccgttttgcttgatgatcagcaagcggttttacgtcctgcaatattatggaatgatggacgcagttttaaacagtgccaaatgcttgaggcgcaatatcctcagtttaaaaaaatcacgggtaacttagttatgcccggctttactgcgccaaaactacaatgggttgctgaatatgaacctgaaatctttcaacgcattgcacatgttttattacctaaagattttttacgttggaagatgagcggtaatttcgccagtgatatgtcagattcagctggtacgctttggttagatatgcaaaaacgagattggagtgatgagcttttaaaggtaacaggattaacgcgtcgtcaaatgcccacgttgtttgaaggtaatcaaataacgggctatctattggctgatatcgctaaaaaatggcagatgaaacaagtacctattattgctggtggcggcgataatgcagcaggtgcaattggcgtgggtgtttatcaaccaggtcaggcaatgctttctttaggtacgtcgggtgtttattttgtggtgagtgaacagtttctccaaaatagtgataatgccgtacacagtttttgtcatgcattacctaatacttggcatttaatgtcggtgatgctgagtgctgcatcatgtcttgattgggtgtgtcaactaacaggtattgagagtgtgagtgcgatgtttgaagaaattgaacacgctacttttgctgatagccctctactttttttaccttatctttcaggtgaacggacaccttataacaaccctaatgcgaaaggtatcttttggggattaacccatgagcatcaacgagctgatttatgccaagcggttctagaaggagtgagttttgcgttacggcaaggtattgaagttgctgaaaatgcaggtcaatcagctgataatattacattaattggtggtggagccagaagtggatattggcggcaactgcttgctgatattacaggaaaaacacttgattatcgccaaggcggtgatgttggccctgctcttggtgcagcaagattggctcaattagcggtaaatccagcacattcatcacaagttattctttctcaacctaagcttaaaaaacgtcatacaccaaatttagaaaaacataaaatatacgataaaaaatatcatgcatttaaaaagttatattcattaatagagacgatggaaatataa

SEQ ID NO: 307212 - DNA, 1167 bp, Proteus mirabilis
atgaaaaaagataaatactttcgtattgtgctgttattcaacgctaataaagtgtatgaccgacaagtggttgagggtgttggagaatatcttcaagcatcacagtgtcattgggatgtatttattgaagaggattttcgtactcggcttgataatataaaccgttgggtttgtgatggtattattgctgattttgatgatcccattattacaaaacatttaagccaattaccattagcggttattggtgtgggtggttcttatcatcaagaagaaaattatccatctgtaccttatatcgccacagataattatgaattagtccagcaagcctttttacatttaaagcaaaaagggcttaaacactttgctttttatggtttaccagccaaagatcaccctcattggtctaatgaacgagagcatgcatttcgtcaattagtcaccagtgaaaaatatccgggcattgtttataacggcatggatattacccaagaaaattggcaacatgcgcaaaaccgtttatccgattggatacaaacattacccccacaaacagggattattgcagtcaccgatgcaagagcgcgtcatttactgcaagtctgcgataatttaaatattaatgtgcctgaagaaataagcattatcggtattgatgacgaagatatgactcgttatttatcgcgcattgcactttcatctgttgtacaaggctcacggcaaatgggatatttagcagcaaagcttttacatcaaacattagaagggcactcaacagataaacagcaaagaatattagtcccccctgttaaaattgttgagcgtcgttcaacagatttccattcatttaacgatcctaccgttgtacaggctatgcattatatttattacaatgcttgcaaggggataaaaacggagcaagttttagatgcggttaatatgtcgcgttctaatttagaacaacgctttaaaaaggaaattggcaagacaattcacacggttatttatgaagaaaagctcaaacgggctcaaaatttattagccaccacaacacttgcgatacaagaaatatccgtgatgtgtggctatccatcactgcaatatttttactctatctttaaaaaagaatttggtatgacgccgaaagagtttagggatgagtga

SEQ ID NO: 307213 - DNA, 291 bp, Proteus mirabilis
atgacaggacatatttctaaagatccgctacatggcatcactcttgaaatgcaagtaaatgcactagtagcaaaatatggttgggctaaattagggcaactcatcaaaattaactgttttagaagtgatcctagcgtgaaatcgagtttaaaatttttgcgcagaacaccttgggcgcgagcagaagtggaagcgctatatcttgattctcttgaagcagatattgatgatgtgattgaagttatcgatcacccagactgtgatccgtgggcgaatagtaggaagagatag

SEQ ID NO: 307214 - DNA, 1599 bp, Proteus mirabilis
atggcaacgcaacgcgcctctgcatggtcgcccttacgtaatcgcatttttttcgtattatggatggcaacgctattttctaatattggtacttggatgaatgatgtgggtgctggttggttgatgacaaacctaagccctgatcccgttatgattgctgctattcaagccatgacgacattacctgttttcttattagcacttccagctggagccattgctgatattttcgataaacgaaaactgcttattttcgtcaatatcttaatgctctgtgctgccactctattggctgttttggtttatttcaatgttatcagtattggctggttattattaattacctttgttttgggttctggtgcggcgtttttaggccctgcatggcaagctattgtgccaagtattgtcgagcctcatgaattaaaatcaggtattgccttaaacagtatgggaattaatatcagccgtgcaataggccccgcacttgcaggtattttgatttctcaagtcggtctttatcttccatttttacttaatgccttgagctttatcgccattatccttgctgtctggtggtgggaaggtgagaaaaaagaagaagagaaactccctgctgaatctgttgtggcagcaatgatctctggtttacgttatgcgcgttatagccccgcgttgataaaaacgattataagagccaccagcttttttatttttgcaagtgcctattgggcaatgttaccgctagtggctcgtgtctcattgcaaggtgatgcgacattatacggtttattaacgactagcattggtattggtgctgtcgttggcgcatttagcttatcaacattacgtgaaaaatttagcaccagcacactcattgcttttggcaccataggtacagctttggtgttatttatttttgccagtgcaacttcaaaatatctcgctattttcgccagtatgcttgcaggatttagttggataatcaccctttccacattaatggtctccgcacaaacagcattacctaattgggttcgtgcgagaggtcttgcactctatttaactgtgttttcaggctctatggcgttaggatctctcgtttggggacaaatcgcttcacatacttcagtgacgatcgcgttactgtgtgcaatggttgggattattttagtttggttatgtgttttgcgtgtcaaattagaacacgacaacatcaacttacagcattcagaacactttattcttgatgatggacttattgagatcacaacagataaaggccctgtgttaattaccgtcaattatcaaattgaagcaattcaccgtgagcaatttctcagtttaatgaatcgactaaaaacggttcgtttaagagatggcggttattcatggggattgtttgtttcatctgatgcgattacggaaaataacgctcaaacttatatggaaacttttatggtggcttcttgggctgagcatcttcgtcaacatgatcgcgcgacaatggatgataaacagttgcaacaacaattagataaaataattagcgctaaaaaagtgacacactctttttctgctttttcacgtaagaagtaa

SEQ ID NO: 307215 - DNA, 1869 bp, Proteus mirabilis
atgaataaaactttcgcgactgaaatatttatcaatggtgagatccatactcttgatagagaaaatcctatcgctcaagcgatagccgtctatcaaggtaaatttctttttattggctcaaatgatgaagcgatgcagtttcaaaatgcagaaacaaaaatcattgatctaaaaaaacacattattattcctgggcttaatgactcgcatcttcaccttattcgcggtggattaaattataaccttgaattacggtgggaaggcgtaccttcgctttctattgctcttgagatgttaaaggcacaagcacaagtgacaccgtcaccgcaatgggtgcgtgttgttggtggttggagcgaatttcaatttgcagagcgccgtatgccaacgctagatgaaataaatgcggtttctcctgatacgccagtttttgtattacacctctatgacagtgcattgctaaacaaagccgctttacgtgcgattggttataccaaagagacgcccaatccaccgggaggcgaaattcagcgtgatgaacatggcaaccctactggattgttgatagcaaaacccaacgctatgttgctctattctgcattagcaaaaggccctaaattaccccttgaatatcaagtgaattcaactcgtcaatttatgagagaactcaaccgccttggtgtaactagcgctattgatgcgggtggtggttttcaaaattatcctgaagattatcaagtcgttgatgagctagccaagaataatcaattaactattcgtattgcttataatttatttacccaaagaccaaaacaagaatttgaagatttccaacaatggacatcaatggtatcacctggtgatggcagtgatttttatcgtcataacggtgcgggtgaaatgttagttttttctgcggctgattttgaggacttcttacagccaagacctgatcttcctgaaaatatggaagctgaattagaaaaagtgatccgtcatttagtcgaacatcgctggccatttcgtttacatgccacttataacgaatctattagtcgtatgttagatgtctttgaaaaagtaaataaagacattcctttcgatggattacattggtttttcgatcatgctgaaaccatcagtgagaaaaatattgaacgagttaaagcgcttggtggtggattagcaattcaacatcgtatggcattccaaggcgaatattttgcacaacgttatggcacaaaagcactgaaacaaacaccgcctatcgccaaaatgctaaatgcagaagtgcctgtgggattaggtacagatgcaacccgtgtagctagttacaatccgtggacagcgctttattggttagtttctgggcgtactgtgggtggtctacaaatgtatgacggcgataatcgtttagacagagatacagcgcttatgttatggacgatggggagttcatggttctccaatgaacaaggtaaaaaaggtcaaattaaagcaggtcaacttgccgattttatcgccctttctgctgattattttcgagtgccagaaaacgagatcaaagcaattgaatcacttttaacggtagtggatggaaaaattgtgtatgcaaatggtgatttttcatcattaacaccaccgtctattcccgtattaccagattggtcgcctgtgatcaaagtgccaggtcattattcttatttacaacaagagacaaaaacagcggtattaaatcagttacatcaatgctgtggtgcctgccatgttcatgggcatcaacatgatatcgctcgccaatcatccattcctatttcagatgataatgcattttggggcgctttaggctgttcttgttttgcattctaa

SEQ ID NO: 307216 - DNA, 1572 bp, Proteus mirabilis
  misc_feature (1524)..(1533): n is a, c, g, or t
atggacgtctcatatctgctcgaaggccttaacgataaacagcgcgaagccgttgcagcaccgcgtgtaaatatgctggtacttgcaggtgctggtagtggtaaaacacgcgtattagtacatcgcattgcttggttattatctgttgaacaagcctctcctttttccattatggcggtaacatttactaataaagctgcagcagaaatgcgtcatcgtattgaggacttgattggtactagtcaagggggaatgtggataggtaccttccatagtctcgcccatcgtttattacgggcgcattatcttgatgctggtttacctcaagacttccaaatcattgatagtgatgatcaataccgtttaattcgtcgtatcgtaaaatccatggctcttgatgataagcaatggcctcctcgtcaaggtatgtggtatatcaatggaaagaaagatgagggactccgcccacaacatattcagacctatggtaaccccgtggaaaccacatggttaaaagtctatcaagcttatcaagaagcttgtgatcgtgcaggcttagtggactttgcggagttgttattgcgtgcccatgagttgtggctgaataaaccacaaattttagaacactatcaacaccgttttaccaatatcttagtggatgaattccaagatactaaccgtattcaatatgcttggatcaggatgttggcaggacagactggtaaggtgatgatcgtcggtgatgatgatcaatctatttacggttggcgtggggctcaagttgaaaatattcaaaactttttaaatgaatttcccggtgctgaaaccatccgcttagagcaaaattaccgctccaccagtaatattctaaaagccgctaatgccttaattgctaataatagcgatcgcttaggtaaaaacctatggacagaaggggctgaaggcgagccgatttcactctattgtgcatttaacgacctagatgaagcgcgttatgtagtagggcgtattaagcgttggcatgaagagggaggcgcccttgcagattgtgccattctttatcgtagtaatgcccaatcgcgcatcatggaagaagcgctattacaagcgaatatgccttatcgtatttatggtggacagcgtttcttcgagcgtcaagagatcaaagatgccctctcttatatgcgtttaacagcgaatcgtcacgatgatgcctcttttgaacgtgttgtgaatacgccaacgcgtggaattggtgatagaaccttagatgtggttcgccaagtagctagagataaccaaatcacattatgggaaagtgcattacaggttatcgagcataaaatgctagcaggccgggctattgcggcaattgcgcgctttttagaattaattgagacgttagcaaatgaaacagcggatatgccgttgcatgtgcaaacagaccgtattattcgcgattctggcttaaaagcgatgtatgagcaggaaaagggtgaaaaagcacaagcgcggattgaaaannnnnnnnnnctcgtcaatttagctatcaagatgaagacgaagatttaa

SEQ ID NO: 307217 - DNA, 1299 bp, Proteus mirabilis
atgcgatcaaaacccgcggccttaattcaaggttgggggccacaacgtcatatttgtggtgaacgtaccgcccgtggttcaacgttattagcagcaattactgggaatgtgggtaaaaaaggcgcttgggcggctggatatggcggaattggtaaccgtcaatctattcgtggtcctaatattggcaaaaatccggtaactgcacaaatatccattatgaattggatgcaagctgttgaggatgcgagcaaagtgacgccagaagatggccttattggcgtcgataaacttgatagtaatatcaaaatgatcttttctttagcgggtaactatcttgtcaatcaaaaccctgatgttaatgcggcagctaagttacttgaagatgaatctaaagtagagtttatcgttgttagtgatctatatatgtctccgtcagccaaatacgcagacttagttttaccagaaacgagctttttagagcgttggaatatcggtaatacatggggaacgggcaactatttcttactgtcagaaaaagtcgttgaacctgcttttgaaagacgttctgattatgaatggatcagcgatgttgctgagaaaatgggagtcaaagaggcttttaccgaaggacgaacagaaaaagagtggatagcttatctcgttaatactaacaaagaacgctttaaagatagacctgatttcccaacttttgatgaattactcaagactcgccgctatcttttcaaagatgcaccttttgttgcatttgaagaaaatattcgtgatccagaaaatcatcctttcccaactccatcaggaaaaattgaaattttctctaaacgtctctatgacatgaataatgtcgatattcctgcattatctcattatgttcctgcaattgaaggtccagaagataaattgaccgagaaatatccactacaaatgttaacttggaaaggaaaaaatagagctaattcaacgcaatatgctaacccttggttacaagaggtacaacgccaagaaatgtggataaaccctattgatgcacaaaatagaggcatcaaaaatggcgatatggtgcgtatctataacgacagagggatcacccaaatacccgctttagttaccgagcgaattattcctggtgtggttggtttacaggcgggggcttggtggtctcctgataaagacggtgttgatcatggtgggtgccctaacgttttgacatcaacacgtatgacaccattagcccatggtaattcacatttaaccgttttagttgaggtaaccaaagcatga

SEQ ID NO: 307218 - DNA, 1083 bp, Proteus mirabilis
gtggtgagagaagagcagcagtttatttttgatgatgttgctcaacagccaattccttcattattgcgagaattctctgcgccagtaaaacttgattatccttttacggatgagcaactctcattcttaatgaaacatgcacgtaatgctttttctcgttgggatgcggcgcaatctttattagggcgttatattaaagaaaacgtttcgcgtgttcaaaaagggcaaccattaattttacctgaaatggtgattgatgctttccgtgctgtattgcttgataaagatatcgatcctgccttggcggcacttattctgacattacctaccgatgttgaagcgggcgaagcttttgctattatcgatcctattgctattcatcaggccttaggttttattcgtaaaactttagccactgaaatggctgatgagttctctgcggtttatcactcaatgcatatcggtgcttaccgtgtcgatcatggtgatattgctaaacgtgatttacgcaatgtctgcttgggttatttagccgttgaaaaccagcaaacgggtaatcaattggttgaagcgcaatatcacaatagcgacaatatgaccgatgcactcgcggccttaaatgccgcagtaatggcacaattaccttgtaaagaggcactattacaagagtttgatgataaatggcatcaagatggcttggtaatggataagtggtttagcttacaagcaatgagtccggcaactgatgtattacaaacagtacgcagtttgctatcacatcgctcttttactttagctaacccaaatcgtactcgtgctttaatcggtacgtttgtgaataataaccctgtagctttccatgcagaagatggctcaggttatttattattgacagaaattctgactgacttaaatagccgaaatccacaggttgcatctcgtcttattgagccgtttattcgtttgaaacgctatgatgctaatcgccaagagaaaatgcgtgccgagttattaaagctaaaagcccttgataacttatcaggtgatttatatgagaaaatcactaaagcattagcggattaa

SEQ ID NO: 307219 - DNA, 618 bp, Proteus mirabilis; identical to SEQ ID NO: 83867

SEQ ID NO: 307220 - DNA, 219 bp, Proteus mirabilis; identical to SEQ ID NO: 34913

SEQ ID NO: 307221 - DNA, 264 bp, Proteus mirabilis; identical to SEQ ID NO: 34912

SEQ ID NO: 307222 - DNA, 657 bp, Proteus mirabilis; identical to SEQ ID NO: 83870

SEQ ID NO: 307223 - DNA, 501 bp, Proteus mirabilis; identical to SEQ ID NO: 83872

SEQ ID NO: 307224 - DNA, 312 bp, Proteus mirabilis; identical to SEQ ID NO: 49818

SEQ ID NO: 307225 - DNA, 507 bp, Proteus mirabilis; identical to SEQ ID NO: 83874

SEQ ID NO: 307226 - DNA, 675 bp, Proteus mirabilis; identical to SEQ ID NO: 83875

SEQ ID NO: 307227 - DNA, 282 bp, Proteus mirabilis; identical to SEQ ID NO: 83876

SEQ ID NO: 307228 - DNA, 378 bp, Proteus mirabilis
atgccaaagcaagcaaatcatctccgtttgaagaaaccttgcgccaactgtccattccggaaggagggcgctatcgagctggtccctgggcgattagaaggcatcatcaacgacatcgttgaaaacgacatgacgacgtttcattgccacaagaccgtgcattcaaagtcaggtggtgaatgggatgaagagggtaactatgcaccttcgggacaagagtcgatgtgtgccggtgctgcggcttacttgatgaaaataggcaggccgacagtggctatgcgaattgcctttgcgtttggtgatgcaaaggtgtccgactgggacgaagctcaagagctggttgtcgagcctttggtacaaggggaccgaaatgagtaa

SEQ ID NO: 307229 - DNA, 636 bp, Proteus mirabilis; identical to SEQ ID NO: 25135

SEQ ID NO: 307230 - DNA, 1182 bp, Proteus mirabilis; identical to SEQ ID NO: 25137

SEQ ID NO: 307231 - DNA, 786 bp, Proteus mirabilis; identical to SEQ ID NO: 25138

SEQ ID NO: 307232 - DNA, 312 bp, Proteus mirabilis; identical to SEQ ID NO: 25139

SEQ ID NO: 307233 - DNA, 765 bp, Proteus mirabilis; identical to SEQ ID NO: 6031

SEQ ID NO: 307234 - DNA, 264 bp, Proteus mirabilis; identical to SEQ ID NO: 235985

SEQ ID NO: 307235 - DNA, 249 bp, Proteus mirabilis; identical to SEQ ID NO: 161833

SEQ ID NO: 307236 - DNA, 285 bp, Proteus mirabilis; identical to SEQ ID NO: 161834

SEQ ID NO: 307237 - DNA, 1356 bp, Proteus mirabilis; identical to SEQ ID NO: 219753

SEQ ID NO: 307238 - DNA, 501 bp, Proteus mirabilis; identical to SEQ ID NO: 180210

SEQ ID NO: 307239 - DNA, 414 bp, Proteus mirabilis; identical to SEQ ID NO: 235974

SEQ ID NO: 307240 - DNA, 282 bp, Proteus mirabilis; identical to SEQ ID NO: 216674

SEQ ID NO: 307241 - DNA, 1083 bp, Proteus mirabilis; identical to SEQ ID NO: 162165

SEQ ID NO: 307242 - DNA, 741 bp, Proteus mirabilis
atgaacaacattattcccctgcagaattcaccagaacgcgtttcgttattgccgatcgccccgggcgttgattttgcgaccgcggtggcactccggcggatggccacctcaacaggtgccacgccggcttacctcctggcaccggaagtgagcgccctcctctggtatatgccggaccagcgtcaccacatgttgttcgccaccatgtggaataccgggatccgtatcggtgaagcccggacactcaccccggaatccttcgacctggatggtctgcgcccttttgtgcgggtgctgtcggagaaagtgcgcgcgcgtcgtgggcggccgccaaaagatgaagtgcgcctggtgccgctgacggatgtcagttttgtgcgtcagatggagagctggatggtgaccacccgcccccgccggcgggagccgttatggccggtcacggatgagacaatgcgcaactggctgaaacaagcggtgaagcgggctgaagctgatggcgtgcatttttcgattccggtaacgccgcatactttccgtcacagctatattatgcacatgctttatcaccggcagcccaggaaggtcatccaggcactggccgggcataaggatccgcgctcgatggaagtctatacccgggtatttgcgctggacatggctgccaccctggccgttccctttaccggtgatgggcgagatgccgcggagatccttcgctccctgcccccggccggctga

SEQ ID NO: 307243 - DNA, 1011 bp, Proteus mirabilis
atgacgagcgaaaataatagcttacttctgaaccttcaggaagttgataagacaaccggtgaagttgttaagctggatgtcaacagcaccagtaccgtgcagccagtagcgctcatgagactcggtctcttcgtcccaactctgaaatcaacagggaagagcaaggcgaaccggaaaaacgttacagacgcgactgaggagcttgtacagctgtccattgccaaaagcgaaggatacactgacgttaagatcaccggttcgcgtcttgatatggacacggattttaaagtctggctggggataattcgctccatgtcggagtatggggtaaaaagtgacaccctggaactgtcgttcgtcgaattcgttaagatgtgcggatttgactcccgtcgttcaaataaaaaaatgcgcgatcgcatcagtaattccctgtttaaactcgcctcggttacgctgaagttccagagcgagaccaaaggatggaccacccatctggtgcagtcagcctattatgacatcaacgaggatatcgttgagatcaaggctgaacctaagctgtttgagctttaccacatggacagaagggtacttctgcggctgaaagccattgacgccctgcagcgcaaggaatcagcccaggcgctttatacctacatcgaaagtcttccccagaatcctgcacctatttccatgaaacggatgcgtgaccggctgaatctcacctcaaatgtctatacgcagaaccacacggtgcgtaaggcgatggagcagctgcgggatattggttatctggattacaccgagtttaaacgtggccgagccacctatttcagcgtgcattatcgcaaccccaaactcatcagtggtcctgtgaaggttccgcgcaaagaggaagaagagaaggcgccagagcaaaattatgacgaagtcattaaggcgctgaaggctgctggcatcgatccccttaaactggccgaagctctctcagcgatgaagccagaaaattga

SEQ ID NO: 307244 - DNA, 1167 bp, Proteus mirabilis
atgggactcatggatacactcaaccagtgcataagtgctggtcatgaaatgacgaaagcaatcgccattgcacagtttaatgatgacagtccggaagcccggaaaataacacgtcgctggaggattggtgaagcggcagatttagttggcgtgtcatctcaggctatcagggatgccgagaaagctggccggctgccgcaccctgatatggaaacccgtgggagagttgagcaacgcgttggttataccatcgaacaaatcaatcacatgcgggatgtatttggtacacgactgcgccgtgctgaagatgcgtttccgccggtgattggcgttgcagctcacaaaggtggtgtttacaaaacctcagtatccgttcacctggctcaggatcttgctctgaaaggactccgtgttctgcttgttgaaggcaatgacccacagggaactgcttctatgtatcacggatgggtgcccgatcttcatattcatgctgaggacactctcctgcccttttatcttggggaaaaggatgacgccagctacgctataaagcccacctgctggcctggccttgatatcatcccgtcctgtctggcactgcaccgcattgaaaccgagctgatggggaaatttgacgaaggcaaattacctgctgacccgcacctgatgctccgtctggccattgaaactgtcgctcatgattatgacgtgatagttatcgacagtgcacccaaccttggtatcggtacgataaatgttgtatgcgctgctgatgttctgattgtccctactccggcagagctgttcgactacacctccgcactgcagtttttcgatatgcttcgtgacctgcttaagaacgtggatcttaaaggcttcgagccagatgtccgtattctgcttaccaaatacagtaataataatggctcacagtccccgtggatggaagaacaaattcgggatgcctggggaagcatggtccttaaaaatgttgtgcgcgaaacggatgaagtcggtaaaggtcagatccgtatgagaaccgtttttgaacaggctattgatcaacgttcttcaaccggtgcctggcgtaatgccctctctatctgggagcctgtttgcaatgagatttttgatcgtctgattaaaccacgctgggagattagataa

SEQ ID NO: 307245 - DNA, 972 bp, Proteus mirabilis
atgaagcgtgctcctgtcattccaagacataccacacatactcaatcgactgaagatacttcatcaccggcgccggccgcgccgatggtggattcattaattgcgcgcgtgggtgctatggcccgcggtaatgcaatctctcttccggtatgtggacgggaagtaaaatttacccttgaggtgctccggggagactctgttgagagcgcttcacgcgtatggtcaggcaatgagcgcgatcaggaactacttaccgaagatgctctggatgatctcattccttcatttttactgaccggtcagcagactccagctttcggccgccgggtttctgatgtcatagaaattgccgacggcagccgtcgccgtaaagccgcaatcctgacggaaagtgattatcgcgttctggttggtgaactggacgatgagcagatggctgcattgtcccgactgggtaacgattatcggccgacgagtgcttatgaacgtggcctgcgttatacaagccggctgcagaatgagtttgcaggaaatatttctgcgcttgccgatgcggaaaacatctctcgtaagatcattacccgctgtatcaatacggccaaattgcctaaatccgttgttgccctgtttgcacatcctggagaactgtctgcccggtcaggtgaagcccttcagaaggcttttgcagataaagaagaattactgaagcagcaggctgagactctccacgatcagaagaaagcgggactaatctttgaagctgaagaggtcattagtcttttaacatccgtactgaaacaatctcccgcatcaagagttaatctgagctcacgtcatcagtttgctccaggggcaacagcattgtataagggcgataaaatggtgcttaacctggataggtcccgcattcctgcggagtgtatagagaaaatagaagccattcttaaggagcttgagaaaccaggagtctga

SEQ ID NO: 307246 - DNA, 1053 bp, Proteus mirabilis
atgaatcaatttattcaattaagtaataaagagcgagaagaggcattattagcagcatccttatctcattcagaaaaattaccagcatttatcattgaaaaggatttttggatatgtcaaatattaaaaatcatctttactgtcattgagcctaaattaggatgtgtagaacctgcattaatatttaaaggtggaacgagtttatcaaaatgctttaatctaataaatagaatgtctgaagatattgatctctctttttcattagagctattagagtgtagcaatactgttccaaacaataatgcaaagaataagattatcgattcatttatttcctatatggctaggaaatctaaaatgtttgttgaggaaatattaactccagaattaaaaaataaccttagtttattagataataatattagaattgaaatagagagtcagtttcctcttaacctagctatttattatccacagagtttgccaaaagaacattatgctaataaaacagtgaaacctcgcgttctattagaaacaggcggtcgttcaaataatcatccaattgaacatatacatattaaccatatgctgggtgattgtataagtttttttaaagaagagaaatttaatgttattgcattaaaaccagaaagaacagttgtagaaaaaatgtatgctactcatgaactcattcttaaaagtgaaaaacgaaatggcgttaaattagctaataaatatgcgcgtcatctttacgatatttggatgatttatgaaaacgataaagaaaattgctttaatataaagctacatagagataatttaattttccaaaggctattttacagaaaaagccaagatgcatgttgtcctaaatttagtgggaaatttagattagtgcctacaggtgagctatataaattatataaaaaagattggaataatatggacgatctttttccaaatgctcagttgccttgggggtttgatgaaatgatagaaaaaatgacagtgattgaattagaattaaataaaagattaaataaatttctatag

SEQ ID NO: 307247 - DNA, 660 bp, Proteus mirabilis
atgaggatcaatattgcacattcagtgcgtcaatatgttacccatcaacgattcggaaaagtatttacttttgagcaaattattgatcgtaaaaaattgatatctaaagctaatgcagtttctgcagagatggttaggctaatgtctgaaggtgttgttaagcgagtgggtaaaggaacttattatcgccctaaagtatcacgttttggcgaaattcccgtagatcctgaagaggttattaaaacaataacatcaaccaaaaaagcagagtatgtattggcatcaacttcagcaatgaatgctttaggtttaagtacacaattacctatggtgtataaatattttgtcacagcgagaataagaacagatttttatcatctaccaataaaacttgaatacaaagaatctttgggtaaatttactaagcaccttcatattcaaaatattgacgatcgtaaaaatgcattactgttatggtcatgtttaactggccttaatgcaaacaattttgaaaaatatgaagataagatccactatatatttatttcattattatcgttagatgctcagcaagcattcttgcaagcacttcctaaatctatggaatggattacggtaaaattagaaaataaaaatgaatcaatttattcaattaagtaa

SEQ ID NO: 307248 - DNA, 597 bp, Proteus mirabilis
atgcatctatttcgttcatccttagtaatgttattattactcacattaataaccggactcgcctatcctttgcttgttacaggattagccaatcttattttcccatggcaagcgaatggttcattggtttatcaagataacaagctcattggatctgaatttattgggcaacaatttacacgggatgattattttaaaagtcgtccatcaatgacgtcagaaatgccctataacagcatggcttcaggcgctagccaattagcatcttcaaatccattattgcttaatgaggtcacgaaacgcgttcaaatgtggcaaaaagcggttgataatgatcaggctgttcctgttgatttagtgaccgcatcagggagtggacttgatcctcatatttcattacaagcggcctattaccaagttgaaaatattgcacactctcgtcaactcactaaagatgagattaagcaattaataaaagagaatacgacaacaccattaatctcatttttaggtgagcctgtgattaatgtctttaagcttaatcaggcacttgatagattaagtgcagaaaaacacaaaagagtgagtgttcaataa

SEQ ID NO: 307249 - DNA, 1335 bp, Proteus mirabilis
atgaagacaaaagtgattttgttctctatattgctattggcgggttgccagcaatctaagagcataaaacccgatttgtctgcgataacacccacatctttagggacttcaacttcttaccaaccacaatatgatataaaaaccaatttgtggggttatgtagtaagtgaattaaaaatggatatccctgacaatgaaaggatttcgcagcaagaaacttattttttaaataatccaaaacatatacaaaccgttgcattacgtgcagagccttatatgtattggattattgaggaaatagaaaaacgtaatctaccgatggagcttgcactggttccggtggtggaaagcgcgtttaatcctcatgtcacctcttcagctaaagcggcgggcttatggcaatttgtccctgtcacagctaattattatggtctagcacaaaatcaatggtatgacggtcgccgtgatgttgtcgcttctactaatgcagccttagatttgcttgagcgcctttacattatgtttgatagcgactggcctttagcattagccgcttacaatgcgggcgaaggtcgtgttatgcaagcgataaaagctaatgagagcaaaaacctacctaccgattactggtcactttcattacccaaagagaccatgaattatgtgcctaaaattctcgccttaagtaaagttatccgtgacaatgaagccgatatcactttcccgaaaagtaactatcgcgataaatcattagccgcaattgatattggcgaacagataacattaagcaaagtcgctgaacttagccaattacctattacaaccgtaaaagactataacccaggctataagcgcgggatcaccgcaccaaatggccctcatgttattttgcttcctcgtaataaacttacgcagttccaaaatgcgtttgctgacgaagcgattttaaagaccatccgtttagcggtcgctaaagccaatcagtcgattaaacaagaaggcatttataaagtccgctccggtgattctttttatgccattgctcgacgttataatatgagcgtaaaagagctacaacgactcaatggattaagtgcaaagagtaccttattagttgggcaaacattaaaaattcataatgcaggtagtgtgaacaatcgtccgacaagcaaaccaaccggcgcttcaccaagttactataaagttcgtcaaggtgactcttattacagtattgctcgtcgtcacaatattaatcttaagcaattaatgagctggaatgctgatatcaagatgttaaaaccgggaacgcaattaacgctttacttaaaaaaatag

SEQ ID NO: 307250 - DNA, 2085 bp, Proteus mirabilis
gtgattaatttttatgcatttaaattgaaacctgtggcattactttgttctgccacccttccttttattttgactacacaggcttttgctgaagaaacagcaaaaacagaacacgttgagaagcttgttgtgagcgctcaagcactaaaagtaaatacacgtttgcaagaaacacctaaatcggtttctgttctttctcaacaagatctagaaacacatgctccacaaaaattagatgaagcattgcgttatacatctggtgttgtctctcaaccttatggtgcggataacgacacagattggcttcgtgttcgaggctttgaagcagcaacctatttagatggtagccgtcttttccgtgatggttattatacatggttattagagccttatggttttgaacaaattgaagtggtaaaaggcgcatcggcggtattatttggtgaatcgacaccaggtggtgcggttaacgtcgtacaaaagaaacccagctttaagcctcaaaatgaagtatttcttgaggtcggaaataatgaccaacgtggtttaggttttgatgtttcaagtgctaccgatgataaacgtgtgcgctatcgtcttgttggattaatgaaaaagtcagatggagaattatctcacactgataatgagcgcatttaccttgcgccaagtgttgcgatcaacctgactgatgatacatcattaacctttatggcaacctatttgcatgatgatggtacgccaactaatcctttcttccctgctgccggtacattaatttcatctccttttggtaaaataaagcctactaccaacttaggtgaaccaggatacgataaatataaacgaacccaaatttcagctggttatttattagagagtaacatcaatgatttttggcgtttttctcaacgtttaaattatggttataacgatctgctcttacgtagtgtttatgcatttcctaattcagatataacagcaacagaattgaatcgcggtgttgttttccgtgatggtaaaaatcaaagtattacctttgataataatgtggtcggtgaatgggatacggataactttgagcacacattattagcaggcgcagaattgcaatatcaccaaactaaaggtgatgaacaagataattatagttttggcaccattaatccttggaaccctatttacggaaactataccccactcaatccagcagataacgttaataggactattgataaaacccaatatagcctttattcacaatatcaaaccaaatttgatagtcgctggattgccgttgctggtgtacgccaagattgggtaaaaacagagaatacagcaaaagtaaaaaatgaggataaatctcgtactgatagcgaatttagcctgaatgcaggattaatgtatttagcggataatggattatcgccttatgtcagttattccgagtcctttgaggtaatgagcactatcgatccagcaacaaaggatctgtataaaccgttaaaaggtgagcaaattgaagcaggtgtgaaatatacacctgattttatggatggctactttaatattgcttggtttgatatcactcagaaaaatgcgcttgttgcaaacccaacgacatttgtttcaacacaaacaggtaaagtgacttcaaaaggtattgaggtaacaagtgaaatgcaattaacggaacgtttagcgttaaaagccaattacacctataccgatatgcaaaccgatgacacgggtaatagaggtaaacaacaagcaggtttaattcctaaacatactgcttctgcttggggtagttacactattccaataacaggaacccaagatttaactttaggaacgggtgttcgttatttaggtaaatctaaagataatcctaagagcagtgatttaacagtaccaagtgcaacattatgggatatggcagcaacctataatttcaataaacagtggcaattacagctaaatatcaacaatattcttgataaagaatatctctctggctgtgattattactgctattacgggcaatctcgttctgttttattaaacgctaaatatcgctggtaa

SEQ ID NO: 307251 - DNA, 783 bp, Proteus mirabilis
atgtttgaactctcaaatattcaaatggatcgcggtggacgcactattttatcaataccctcactgcgtatttcagattcaggattaaccattgtgcttggccataatggctcaggtaaatcgacactcgtcagtttgttatcgggtcagcaaattcctgatagcggatgtctcacactaaataaccgtaatatctcacaatataagcctcgtgatttggctaaacaaatcgcgtttcttccccaaaaacttcccgcttctgctggattaactgtcagagaattagtgcgtttaggacgctttccttggcgtggaacattaagccgttggaataaaaaagatgatgaaattatcacaatggcgatggaaaaagcgggagtacttcctttcgctgacacgcttgctgatgatttatcaggtggtgagcgtcaacgggcttgggttgcaatgttactcgctcaacaatcaccgatcttgatcttagatgaaccaacctcggcattagacatacatcatcaataccaattaatggaattgttgagtgagttaaatcaaactcagcacgttggtattattgttattttgcatgatcttaaccttgccttgcgttatgccactcatatcatcgcacttaaaaaagggaaaattgcgtttgaaggtgaagcctcgttactttttgatgaagagcgactctcctcgctttatgaaacacccattaagctgattgaacaccctgataataaaggctcacaacaacataaagtggcggtggtatgcgtgtaa

SEQ ID NO: 307252 - DNA, 921 bp, Proteus mirabilis
atgcgtgtaatattacaaaaaatagttaatttactgtccttttgtttagtaattttattaattacccccacagtaaatgcggcgcaacataataatgaaaaggcttctaacacaccgcaacgtattattgttttagactgggatttacttgaacaaatattaacacttgaagttatccccgtaggggcaactgaaattgcaggttataaccaatgggttgctcaccctattgcaccgaattctattgaagaagttggtatgcgagcagagcctaatttagaaaaaatagcgacgttaaaacctgaccttattttagcatcaagctcacaacaagatttattacctgtattagaaaccattgctcctgtggtttatttacctaatttttctcgccaagataatgcggcacaagtcgctctagcgcattttaatacccttgcttcgcttttgggaaaagaagctctcgcacaacaaaagttagctgaaatggacgctacttttgcgcaatttaaagcaaagttacagcaggcatttatcacattacctgaagtagaagtgatccgtttttctacgcttacctccatctttttatatactgaaaattcaacaaccgaatatgtgataaataagctggggctgaaatcggcaatatcattaccgccacaaccttggggtattgatcaacgaagaatgaatgtattgcaacagattaaacatggttatgtcctttatatgttgccttttcctgatgaaagtaaactgcaaaaatcagtattatggaaagccatgccatttgtacaaaatgggcattttcattcagtcaaacctgtctggaattatggaggaatgacatcattgacattaatggcgcaagccattactgaaagcttattagatatggcacctagtaatgaaaattaa

SEQ ID NO: 307253 - DNA, 1968 bp, Proteus mirabilis
atgaaaattaagcaacttactttctattttttggtaattatcttattaagcattaccaacttacaaattgataattctctttctttatctcaccaattgtatttattggctaattcagccacaacaatgccttttgctgatgtttttttcttgcacgcacaattaccacgtttagttatgaccgttgttattggcgggttatttggtgttgttggcagtttaatgcagcaattaacgcaaaataatttaacttcccctttaaccttaggaacttcatcaggtgcttggctagccttagtgatcgttaatatttggttcactggctgggttgcagattacagtgcagtagctgcaacaattggcgctttattagccttttctctggtgattattattgcaggtattcgcaatatgaccggcttacctttagttgtttcaggtatggtggtcaatattttattaggcgctattgcaacggcattagtgacattaaactcacaatttgctcaaaatatattcatgtggggggctggtgatttagcacaagatggctgggataaagtttattggttattaccacgaataacacctgttttacttatttttatctttgcacctcgtattcttactttattacgtttagggcatgaaggtgcggcggctcgtgggctttctgttttacctgcatttgcctttttcattatattaagtacttggttagtttctgtttctattacggctgttggtgtaattagttttatcggattacttgcacctaatatagttagaacattaggagctagaacggctagccaagaactcattgcaagtggattaatgggaatatgtttgctgttaattaccgatagtcttgcgatatgggttggtcagtggctcaatacagttattcctagtggtgttacggcagcggctattggggcgccagcattaatttggtttagtcgtaagaaaatgcgagctcaagatcagctttctatttcaattatttctcaaactaaaaaaatatcgaattatacggtcataggaataacggcattattaatacttggattagcgcttaccctgtttattcatattaatgagcgccaatggttatgggaaataccttccgtttatcaatgggctttgcgtttccctcgtctattaacagcactctttgctggtgttgcactggctattgctggcgttattttacaacgtttaatttataacccgttagccagcccagatattttaggtgtttcatcaggtgcaaccttcgctttggtattttctagcttaattctgggaagcactttacaaacatcacaatggggaacggcgttattaggaagcggtgttgttatgattatcttattagtgttgggtaaaaggcaccaatatgcccctgccagtttaatcttaacgggtattgcattaaccgcgagtttagaggcttttattcagtttttcttagcgaaaggttcgttaagtagctataaaatattattgtggttatcaggctcgacttatcgtgtaacagggcaacaagctatttattttgcattagctatcatctttattgtgggcgttgttttattactcactcgatggttggcattaatatcaattggtcgaaactttgctttagcgcgaggattacatacagcgcgagcaagtattattttactgattattgtttctctgttatgtgcattagttacgtcaactgttggccctatcgcctttattggcttagtcgctcctcatatggcggtattaattggcgctcaaaaaataaaatcacaattaattctttcgggattaatcggtgcgactttaatggtttgggctgattggcttgggcaaatattgatttatcctgcacaaattgccgcaggaactttagtagcgattttaggtggtagctatttcctttgtttaatgctgttaaatcgtagtcgctga

SEQ ID NO: 307254 - DNA, 231 bp, Proteus mirabilis
atgtcacttattgagaagatagttccagaaaatcagcttactgaaggaatgacatggttactttcaggattaaatgtaggcacagcaattggtgcaacattaacagggcaacttgttgattattctggtgttcaatctggcgtatgggttgccattggcgcaagtactttagtgatgttaattgcatttattggctttaaacgcataaataatcacaacagtaagatttaa

SEQ ID NO: 307255 - DNA, 597 bp, Proteus mirabilis
atgtcattagaagaacaaataacagataaaccaagaacaaaacccgcagaggttcgtttagaagagttaatgaatgccgcagaagcgttatttcttgataaaggttttgatgccacaaccgttagcgatattgtaaaaaaagcaggggtagcaaaaggaacatattatcactatttttctgccaaaacagacgttcttgatgcgctcagaacacgttatatggattggtatttaaataaaatagataacgccatggatgcctgctcacaacaagatcatcgtgagaaattaaaacagtggtgtgaaatcagcgttattgcttatgttgagaaacaagaattacacgacatgctttttcatcaagtatttcatcaaagcagcaatattcatgaaaatagagcattacagcaaattcaaacactgttaatttcgggtacagaaaataaaacttggcatgttacacaaccggaattaaccagtacattgatttatcatggtatgcatgctgcggttgataatttaggtcatagcgaagaatataccgcaaaaacattaggtaatatgctatatcagcaatttactcaattgctaaaataa

SEQ ID NO: 307256 - DNA, 945 bp, Proteus mirabilis
atgaatgatacactgcctatattgagtaatagaaatacagtaggcagtgaattatttatgcaaatcgatcttaatttattacgtattttttctgccgtagcagagcaagggcaatttgcagcagcagctcggctattatctatgcctacctcaaatatcagtcgtgcaattaaacagcttgaacagcaactcaattgtaaacttattgatagaacaactcgaaaaatgcgccttactgaacaaggcaaaatactctatcagcaaggaataaaaaccttaactgaattagacaatgttgtaagcaatatcactagtgatggaccattaacgggtactttccgtttaactattccgagtgaatatggcagtgagctacttggtgatattttggctgattttgctgcacttcatcctaatttacttattcaatgtgatacccaactaatgccaagaaatatcatcgatgatgatattgatttactgttaacttttcatcgtggaaatttagcggatagtagctatcactcacgcttaattaaatcatggcgcagtattgttgtggcatctaatgaattattagaaaaaacaggaatacccacacatattgaacaattaagcaaaatgccttgtatttctagcttaagcgcactagaagggcaaccttggatatttatggatgaagataaaaagccaatcagagtaaccattaatagtaattatcgagtaaacagtgccatattagcaaaatcagcagtattaaaaggattgggatttgctattttagctgagcattgctgccttgatatgattaaagaagggaagttacgagctatcgagtttcctcaacaacccgcaacgattaacttagtggcaatatatgcaactcgtagcacactctcacgtaatattgagtcttttcttgaatttctagctcaacgtttatag

SEQ ID NO: 307257 - DNA, 426 bp, Proteus mirabilis
atgtcctttaaatctcatgtggtaagtagctcaacgggcatgatccaacgtttaagaatggtaaaaccaagcaatttagttgcgattaatccgctagatggtaaaaaatgggggatcaagcatggtgataaagtgcgcatagtgacccctggtggagaggttgaggctgaaattagtttattagagggggttatgcctggagtgttagcgattgaacatggttatgggcataaagagctaggctcacgtcaacactatttagatgggcaaccattagctatggataaagcaataggtagtggtattaacttaaacgacttaggctttgctgatccaacacgagaaataacgaatacttggttagattgggtttctggtgcctctgtacgtcaaggattaccggcaaagattgagcgtatcgcctaa

SEQ ID NO: 307258 - DNA, 2502 bp, Proteus mirabilis
  misc_feature (381)..(390): n is a, c, g, or t
  misc_feature (2330)..(2359): n is a, c, g, or t
atgaaaaatttatgtgaatttgattatttatcacccgataaggatattgaatcattaaagcgttccattgtttataaacttatgtttatcgttggtacgtcgccaaaatatgcaacaccaacagattggttaaatgcaacctcttacgctattagagaccgtttagtagagcgttggttaaaatcgaccaaagcagagctttcaccgaaagtaaaacaagtttattacatttcgatggagtttctcatggggcgttttttgacaaacgccatgctctctttaggtgtttatcacgaagtcaaagaggcattaaaagagttaggtcttgatcttgaaaaacaaatcgaactcgagcccgatccaggtttaggtaatgggggnnnnnnnnnnggtttaggtcgattggctgcatgcttccttgattcttgtgccacactaggttatcccgttacaggttatggtattcgttatgaatacggaatgttccgccaacaaattaaaaatggcgaacaacatgaagttgcggataactggcttgaaaaaggtaatccttgggaattccctcgtcatgatctgcaatttgaagtggattttggcggacgtttgcaacaagaaggtgagaaaaattattgggtcgatacctttaatgttatggcacaaccttatgattctattgttcctggttataacacccaagcgacagataccattcgtttgtggtcagccaaatcaaatgttgcgtttaacttaggtaaatttaataaaggtgaatatctagaagcaacagaagcaaaagatcgctctgaaaatatctctcgtattctctatcctgatgattcaacaatgtcaggtaaaatgttgcgtttacagcaagaatatttcttagtgagtgcttctgttcaagatattttgcaacgtcattatcatctgcatcaacgctttgataatttaaaagattttattgcaattcatcttaatgatactcaccctgttcttgctattcctgagttaatgcgtcagctgattgataatcatggatttagctgggatgaggcatgggaacaaactattcatatattctcatacaccaaccatacattaatgggtgaagcattagagacttggcctgttgacatgctaggccgttcgcttcctcgccatttacaaatcattttccaaatcaatgataaattcttgaaacaagttagagcacaattccctaacgataacgatttattgcgtcgtgtttctattattgatgaagagaatggccgtaatgttcgtatggcatggttagcggttattattagtcatcaggttaatggtgtttctgaacttcatagccaactaatggtgcaatctttatttgctgattttgcgatgatctatcctaagaaattctgcaatattaccaatgggatcacaccacgtcgttggttggcattagcaaacccttctctctctaaagtaattgatagccatattggtacaaactggcgaactaatttagagcaattgggtgaattaatgccattggtaaaagataaaaatttcttgcaccaattaaaagattcaaaacgtatcaataaacaaaatcttgctcagatcattaaggaaaatttaaatattgatattaatcctgatgcactgtttgatgtacaaatcaaacgtattcatgaatataaacgtcaactcctgaatatgttaggcattatcactcgttataatcgcattttagaaaatccagagaaaaactgggtacctcgcgtatttatttttggcggtaaggctgcatcagcctattataatgcgaagaaaattatcaatcttatcaacgatattgcaagtaagattaataatgacgagcgtattaaagataaactaaaagtgatctttattcctaattacggcgtaagtttagcgcaacatattatccctgcggcagatttatctgaacaaatatcattagcaggaacagaagcttctggtacaggaaatatgaaatttgccctaaatggtgcattaaccatcggtacacttgatggcgcgaatattgaaattggcgaacatgttggtttcgataatatgtttatctttggccacaatgcacaagaagtggcggaattaagacaacgttattcccctcgtcgttattacgatgaagatattgagttacacactgtgcttaatcaaatcgctaatggtttctttaacccaacggatcctgataagtacaaatcaattttcgatagcttaattgaatttggcgatcattatcaggtattagccgattatcgtagttatgttgatactcaagatagtgttgatgnnnnnnnnnnnnnnnnnnnnnnnnnnnnnngtgttgatgttctctatcaagatgaagatgcttggttgagaaaatctgcgttaaatatctgccaaatgggttatttttctgcggatcgtgcggtaacagaatatatgcaacgaatttggaaagcttctgcgattacattgtaa

SEQ ID NO: 307259 - DNA, 1434 bp, Proteus mirabilis
gtgaatgtccttcactgttgttctgaattattccctctgctaaaaacagggggattagctgatgttatgggctctttgcctttagctcagaaaaaaataggcttagatgcgcgggtggttattcccgcgtttcctgctatcaaagataatattcccgatctcaaattagtgactaatatcgatacgtttgcaggtaatgtttctctgctttacggacaataccacggtgttgatatttatcttattgatgcacctcatctttatcaacgtacaggtagtccttatcacgatcaacatcaacatccttatggtgataatgtttttcgttttgccctgttaggttgggtggcaagtgagctatcagcgggattagatcccttatggcgagcggatgttgttcatgctcatgattggcatgcaggactagcttgtgcttatctcgcggttaaacattactccgcaaaatctgtttttactgttcataatctggcttataaaggcgagttttcaccctatcatctgcatcagcttgaattacctgattacagtttttcaattaatgggctggaatattacgggcaaatttcattcctaaaagcaggtcttttttatgctaaccatattacgacagtcagcccaacttatgccaaagagataaccactcacgaatttggttacggtttagagggattattacgccaacgcgcttatgaacagcgattaagtggcatcttaaatggtattgatgaggccgtttgggatcctgcaacagacggcttaattacgcgtcgttacgatgttaaaaacctgaataagcgtttagaaaataaaaccgcattacagaaaaaatgtggtttacctgttaacaatagcgccccactttttgcagctgtcagtcgtttaacttcgcaaaaagggctcgatttagtgattgaaacgctccctgatatcgttgaacaaggcggtcagtttattttattaggtactggcgatagtcaccttgaagcggcatttttacatgcacaacaacagtatccgcaaaatgtagcggtacatattggctatgacgagagtttttcacaccaagttgtcgcaggtgctgatgtgattatggtgcctagtcgttttgaaccttgtgggttaactcagttatatggcttgaaatatggagccctacctttagtaagacacacaggtggattagccgatacggttaatgattgttcattagaaaatttagcgcatcaccaagcgactggttttgttttctatgaagcgactcctgactctctgcgtcaagctataaaccgagcctttaccttatggggtatgcctaaacagtggcaacaagctcaaactgatggcatgaatcaaactatttttagttgggaaaccgcggcaaaaacgtatgcgacactgtatcaaaatttatag

SEQ ID NO: 307260 - DNA, 1350 bp, Proteus mirabilis
atgatgacaacagaacaaggccaaaaattaatgttggcacaacaacttcctaaagaggcaattgcactcgttttagcgggaggtcgtggtacacgcttaaaagcattgacttcaaaacgtgcaaaaccggcggttttctttggtgggaaatttcgaattattgactttacgctatcaaactgtcttaactcaggaattcgtcgtattggtgtaatcacccaatatcaatcgcactctttggttcaacatattcaacgtggttggtcattctttaacgaagatatgaatgagttcgttgatttattacccgctcagcaacgtcgtaataccgaacattggtatatgggtacagctgatgctatctatcaaaacctcgatattcttcgtagttacaaagcaaaatatgtcgtgattttagctggcgaccatatttataaaatgaactatgcgcgtttattacttgatcacgttgaaaacaaatcaaaattcaccgtagcttgtattcgtgttcctaaagaagatgcattccaatttggtattatggatatcgatgaaaatcgtagagtgctcaatttcttagaaaaaccatcaaacccaccttgtattcctgatgatccagaacactcattagcaagtatgggtatttatgtggtagatagagattatctctttgatttattggaagaagatagcagcgatccaaattcacatcatgactttggccaagatatcattcctaagatcacagaacgtggagatgttcttgcccacccatttgaactctcttgtgtcagctcagatccttcagtaccaccatactggcgcgatgtaggtactattgaagcatattgggcagctaacctcgacttagcctctgtaacaccagagcttgatatgtatgcgaaagattggccaatccgcacctttatgacacctttaccaccagccaagtttgttcaagataatcatggtgaacatggacaaatgatgaactcgctgattgctgacggctgtattatcaatggttcaacgctctattcatctattctattcccattagttcgtgttgaatctttctgccatattgaagattctgtgattttacctgatgtgacggtgagccatcattgctacttaaaacgctgcattattgaacgtagctgtacaattccagaaggcacagtgattgggatgaatgcagaagaagatgctgcgcgtttccaccgcactgaagaaggcatcgtgcttgtaacaagagaaatgcttgagcaactagcacgtaaagaaaaagaaaatccaactgaaacaagtgcagaacaaaaacctcaaaatgaggaggcattttcgtga

SEQ ID NO: 307261 - DNA, 2070 bp, Proteus mirabilis
atgtctttagattatggtcgcccttttcctatgggcagtcattatgatggctatggagtaaactttacactctttagtgaaaatgccactaaagtcattctttgcctgtttgataaagcaggcaaagagatccgctacccattaccaggtaaaacgggcgcaatttggcatggatatttgcctggtgcagggccaggtttacattatggttatcgtgtagaaggcgaatggaacccagagcaaggattgttctatcaacctcagcaactattattagatccctatgcaaaacaggtgacaggtattgttgataatacattgccttacacctcccctgtttttaatgcattagagcatgatgatagtgcgattacacctaaagcagttatcacagatgatagtggttgtttttgccattcttataaagaaaaaggcacgtatcagcgtttaaatacgccgtggtcagaaaccattatttacgaaggacatgtaaaagggctgacaaagcttcatcctgaaatacccgagaaaattgcgggcacttatgcagcattagggcatcctgcctttattgcgcatttgcaaaaattaggtattacagcattagaactgttacccgttcaataccatttaacagagccacatcttcataaaatcggattaaaaaattattggggttataacgtattagcgccctttgctttatcgacacaatattattccaacacaggtcggaatattatggatgaattccgagaagcagtaaggtgtttacacaaagccaatattgaagtgattttagatgtggtattcaaccacacagcagaattaagtgatcaatatgaaggttatattgtttcgcagcgcggtattgataatcaaagctattattggctaaacgacgaaaataaagcacaaaattggactggctgtggcaatactctaaatttaagtcgccctgaaacagtgcagtgggttatggattgcctgcgttattgggtgacagaatttcatatcgatggttttcgttttgatttagcgacaagtcttggtcgagttccttattttgatactcaatcaccactactgacagcgatacgacaagatccgctgctgtcacgtatcaaacttatcgcagagccttgggacttaggctctgatggttatcaagtcggtaatttccctgttccatttacagaatggaatgatggctatcgcgatgttattcgtcgtttttggttatggcgtgatgtggctattgcgacatttgcagacaatattacgggctctgcaaagctgtatcacaaaaatggcagacctccctattctagcgtcaatatgataacaagccacgacggctttacactacgggatttagtgagttatcagaataaacataacgaggagaatggagaatcaaacctagatggacataacaccaattacagtgtgaattttggtgaagaaggtttgatagtcaacgaaaaaataagtcaacacagattgcttgcaactcggaatatgcttgcaaccttactgctttctagaggaacacctcatttactcgccggtgatgaagtgggtaatacgcaatatggtaataacaacgcttattgtcaggataataaagtcagttggatcaaatggtttcaacaaccttatgacttaactgattacattcgccaccttattgaattacgtcaccaaattacacctttaagttcgcttaagtggtgggaagaagatagccaaaacgtggtttggttaaatcagaatgctcaacctatgagtcatgaagaatggcaacaacttccaccctcaccattacaacttcttttagcgcaacaatggatcttaatgtttaacccattaagaaacagcgctgttttttctttacctgaagggtcttggtcttgcttgcttgatacggttagctggcctgattgtcacccgacacaatctcagcattgtgaaatacaacctaacagtatcaccctttggcgaaatagcgttttttatactcagtcttctactgaaaaattacccattatttcctcccaagttaagtaa

SEQ ID NO: 307262 - DNA, 2106 bp, Proteus mirabilis
atgcatgaaacatcggcaggtttagaggttcgtgcttttttaccagatgcagttgtagtcagtgtcatcgatagaaaaaatggccgaaaagtagcaacactagagcgtaagcaccctagtggttttttctgtggtgctatcccccgacgtaaacgccgttttagttactgtttagatgtaacgtgggaaaatgcacaaggtgtcgttgatgatccctatcaatttggcattttattgcaagaaatggatatttggtttttagcgcaaggccatcactcccgcccttaccaatgtttaggcgcacaccctgcaaaactgggtgatatcgatggtattacttttgctgtatgggcgcccaacgcaaaaagcgtaagtgttgtaggcgatttctcattctgggatgaacgtcgttttccaatgcgattacgccgtgaaagtggaatatgggagctcttccttccacaagctcatctaggtgattgttataaatattctattcttgatgcgaatggtgaacgtcgattaaaagccgatccttatgcttttgaaacacaaatacgccctgaaaccgcatcaattatcaatacattaccaccaatcaaaccaatgccattatcgcgtcagcaagcgaatcagcgtaatgcacctatgtctatttatgaagttcatttaggttcatggcgtagacatactgacgatcaaagctggttaagctatcgcgaattagctgaacagttaattccatatgttaaagaaatgggttttactcatattgagttgctccctattaatgagcatccttttgatggctcatggggatatcaaccattagggttatattcaccaactcgtcgctttggctccccaatggatttccgtgactttattgaagcagcacatcaagcagaaattaacgttattttagattgggttcctggtcatttccctgaagatgattacggtttacgtaattttgatggcacatcactctatgaatatgcggatagacgtgaaggctttcatcccgattggaatactttaatttataactatgggcgcaatgaagtgctgaattacctttctggtaatttattgtattggcatgagcattttgcactagatggtttccgtttcgatgctgttgcctccatgctttatcgtgattacagccgaaaagaaggcgaatggatacccaataaacacggtggacgtgagaatttagaagccattgattttattcgccataccaataaattactgggcacaacttgccccggtactgtcacaattgcagaagaatctactgattttccgggtgttaccttaccgcctgatgatggtggcttaggttttaattacaaatggaatatgggttggatgcatgacacgttagcttatatgcaacgtgatcctatctaccgtaaatttcaccacaatcaaatgacctttggcatgctctatgcctataacgaaaactttgttctgcctctttctcatgatgaatttgtacatggtaaaggttcgttgattggccgcatggtgggcgatgattggcaaaaatttgccaatttacgtgcatatctcggttttatgtgggcttatcccggcaaaaaactgctatttatgggatgtgagtttgcacaatggcgtgaatggaaccacgacagtagcttagattggcatcttctcgaagaaccaaatagcccacatcaaggtgttcaacactttgtacgtgatttaaatctttcctatcaagctaatgctccgctttatgaatgtgattttgaacgcgaaggctttgaatggcttaccgttgatgatcacgataactctgtctttgctttttgccgtaaagatgcgcaaggcaatgaaattattattatcagtaatttcacgcctgttgttcatcacaattacgttgtcggcgtaaataaagcaggtacttatcaggaaattcttaacagtgattctgagttttataacggcagtaatgtaggaaatttaggtgaaatagaagcaaccgcaagtacatttaatggcaaacctcactccttgtcattgtcactgcctccgcttgcgacgctgtatttaagattgaaggattaa

SEQ ID NO: 307263 - DNA, 390 bp, Proteus mirabilis
atgacctcacatcttatccaacaaaatattgaagcactctctttacctggtgggcattactctcatgtcgtgactgcaaacaatatgtcgtttatttcagggttattacccttagataaacaaggtaaacctttagcagacaaacctgttgaagtacaaatcacacaagtccttgaaaatttacaagcttgccttatcggaataaatgcaaagaaaaccgatattgctcaagttaaagtctatgtgacagatattaatgaatggcctatcgtaaatgagttatatgcaaaatggattggcgagcatagaccagcaagattagtggcgggtataaaagagctacattttgggagtaaaattgaaattgaagctgttgttattaaggaataa

SEQ ID NO: 307264 - DNA, 606 bp, Proteus mirabilis
atgaatattacgcttgatatgctcaaacaagcggtgatccgtatcgctattgcttgcgagcaatctcaatcaatgctatgtgaagcagatagtcgtctaggtgatggggatttagggatcaccatgcaaaaaggctggcgacaaattgcagatgattcacaagattggcctgaagatctaagcaaagcacttttccaatgcagtaaatcattacaaaaagcctgtgcttcttcttttggtacattgcaagcaaccgcttttatggcaatggccaaatactgcaaagaaaaccaacttcaagaaatatcgtcctccgacatttcatcgctattaactattgcataccaaagcatgatggcaaggggaaaaggggagttagggcaaaaatccgtactcgatattctttaccatttatctgaagcgctaaaaccaactttagctatcgataatttaaaagcagcagccttacaaagcgtcgatagtacgcttaatgaatttcgccaaaaacctaatttattaggtcgagcccgtatgttcccagaaaaatctattggtttagatgatccgggtatgttggcaattaaagttattgttgaagcaatctga

SEQ ID NO: 307265 - DNA, 438 bp, Proteus mirabilis
atgcctatgctaaatcgtcatattctatcgctaatattttgctgctttggtttatttcttattgtttatagtgcgtattcattaggtgattttagtgaatatggcgccgcatttatgccttctattattggcggtggcatgattatattttcattaatagatatattttcacgcaatcaagaaagtgatattccattagtttcatggcatgaaataaaatttgttttattaattattggaattattcttttttatgtttttgtatcagattatctaggttttattttaacaggattaattattaccgcaccgttaatgataaagtatgcaacaacaaaacctatatacagttttattatttcagccagtgtggtgttaggtgtgtattacttatttaccgctgtactgttagtaccgctacctcagctattttcataa

SEQ ID NO: 307266 - DNA, 315 bp, Proteus mirabilis
atgacatggtcgttattattaattttggcactcgtcatttttatgttgcgttatttctttcttgaaccggcgatccccgtcaaattaccgtctgtgatcagacaggcattaggatattctgcaccttgtttattaactgcaatttgtgcacccattgtgctgttagaaaaaggcgaatttaaaggtattctagataatccttatctttggggaaccttattatgtgtaggattagcgcttaaaatacgtaataccttagtggtcgtgttgctgacattagtgggcttttatctgcttaatgccttgttaaactaa

SEQ ID NO: 307267 - DNA, 465 bp, Proteus mirabilis
atgaggggatctctcagtgctcagcatcttttatacggactaaccttacgtcctcatgttgcccatttaaaatggtatcaacgcattacaataggttttttattaacggatgaactttttgctgtttcggcacaacctaaagtaaaactcacacccgcttatatgataggtgcgggattatgtttttatttagcgtgggttgccgttagtattgttggtattattatggcaagccaagtttctgatttatctcgttatcatcttgatttttctattgttgccacgttattggcaattgttattccgttaataaaaacatttagtacattagtaggcgttattgtctctttttgcctatctattattttcagctggttgaatatagaaggtggcgtagtgattggtggattaacaggcatgtttattgctgtttgtgttgctagagccagaggagaacaaaaatga

SEQ ID NO: 307268 - DNA, 303 bp, Proteus mirabilis
atggcgtcaagtgtaatgttaattgcactttcagttaatgttcgtgtttcttgggtactatgcaatgccatttcagaagctacaccaccagcgatatttgccaatgcaaacttacctgcggttgtggccacactgccaccttttacaatggctccccctggtatcatcattgcagcaacattaattggatcaataacccccatagcaatactactcacaacaccagcaccgccagcatctgctaacatttgcttatcgttacgctcacgatcaatacgttgttttattgcagcggtttcttga

SEQ ID NO: 307269 - DNA, 198 bp, Proteus mirabilis
atgaaacatattcaaatgataatgtttgaatcaaataataaaacttatcttatttctgagtctgatgttatctctagttatccagtgagagcattaaaatgtgattgtttaataacaaaatcaggaagggaatataatgccaccaatataaaaaaagtttatttagatgatattgatggcattttaaacatcaaataa

SEQ ID NO: 307270 - DNA, 243 bp, Proteus mirabilis
gtgctgttaaaattgttagcacaaaaactattgccttcatcaggccatatcatgtggcgtatgccttttattcatgtcgatcagcttactcgcctaacaggtaacaccattgctgatgctttaggtatagatactttttttcaagcatttaaacgggttgataacggcagtgcttcattagaagaaatttacttcattcagcacaactgccggtttcacttgatacacctattccccacttaa

SEQ ID NO: 307271 - DNA, 462 bp, Proteus mirabilis
atgaagtattggaaactttacattgtcattgcgatagtggggattgtttctggtgggtgtgtgctaattaacacacaagctgaaaaaattaacacgctgacagaaaacaacaaaaaacttaccgctatgctcgaagagcaaaaggctatcaatactgactatcaggcacgcattacacgattaaatcaactcgacattaaatacattcaggagttagtcagtgcaaagaatgaaattgataggctgcgtgatgatattcgcaatggcactaaacgggtgtacatcaaggccgagtgtccaaagtccgacagtgatacctcctccagcttggatgttagcagacccacccccgtggcgagagacactgaagaaaatatactcaatctcgtggagcaaattgaaacactcgaaaggcaataccttggtttaagggattattactttactgagtgcatccactaa

SEQ ID NO: 307272 - DNA, 570 bp, Proteus mirabilis
atgacaactaaactcacgcaaaaacaaagaatgttttgccacgagtatattgtcgatctcaatgcaacccaagccgccattcgcgcgggctacgcgcctaaacgcgctagcgaaatgggctacaagctacttaacaaacctaatatctgtgcgttcattgatgaacttaaacagaaccgtatcaaacagttaggtattgatgctaactatgtgcttatgcggttggttgaaatcgacaaaatggatgcggtagacatttttaatgatgacatgagccttaagcctattctcgattggcccgaagtctggcgtcgttatcttagtggctttgaccttgccgaaatgtttgaagggcgaggcgatgaccgtgagatgattggcttactcaagaaaattaagtggcctgataaagtgcgtaaccttgagttattaggtaaacatgttgccgtgcaagcgtttagagagcaggttagtaatgagcatttgggtaaagatggtggacctattcagcataaccactctgcatcggagttaactgatgaacaacttgcagcaatcatcggcgattaa

SEQ ID NO: 307273 - DNA, 126 bp, Proteus mirabilis; identical to SEQ ID NO: 19667

SEQ ID NO: 307274 - DNA, 1206 bp, Proteus mirabilis; identical to SEQ ID NO: 19666

SEQ ID NO: 307275 - DNA, 321 bp, Proteus mirabilis; identical to SEQ ID NO: 67344

SEQ ID NO: 307276 - DNA, 387 bp, Proteus mirabilis; identical to SEQ ID NO: 10354

SEQ ID NO: 307277 - DNA, 624 bp, Proteus mirabilis; identical to SEQ ID NO: 10353

SEQ ID NO: 307278 - DNA, 624 bp, Proteus mirabilis; identical to SEQ ID NO: 10352

SEQ ID NO: 307279 - DNA, 1206 bp, Proteus mirabilis; identical to SEQ ID NO: 10351

SEQ ID NO: 307280 - DNA, 594 bp, Proteus mirabilis; identical to SEQ ID NO: 10350

SEQ ID NO: 307281 - DNA, 417 bp, Proteus mirabilis; identical to SEQ ID NO: 10349

SEQ ID NO: 307282 - DNA, 369 bp, Proteus mirabilis
atgaacatgaaaattaaaaaaatattaaataacagtgttgtgatctctctggatgaagcagaaaaagaaattatcgtcatgggaaaagggattgcctacgccaaaaaagtaggtgatgagataacatctgaacaaataaccaaaaaatttatcttaagtcctaaaaattgtccgcagagagtgctcgatcttttatcgaatattacgttagattacgtagaaattgcggacaatattattcagtatgcaaaagaaaaaatgaccttagatacacaagatagtatctatattgcattgattgaccatattcaagccagcattgaacggtataaagaagggacttttataagaaataaaatatttttatag

SEQ ID NO: 307283 - DNA, 342 bp, Proteus mirabilis
  misc_feature (14)..(23): n is a, c, g, or t
atggtctgtacaannnnnnnnnngtacaacgaattagctaacatcgacccaactcaaggtcgtgtagtagttatcggttacactgaccgtatcggttctcaaaactacaacctgcctctgtcagaaaaacgtgctcaatctgtagttgattacctagtatctaaaggtattcctgcaaacagcatctctgcagaaggtcgtggtaaagaaaacccagtaactggcaacacttgtgacaacatcaaagctcgtgcagctctgatcgattgcttagcgccagaccgtcgtgtagaaatcgaaatccaaggtacaactgaagttgttgttcaacctggtcaataa

SEQ ID NO: 307284 - DNA, 804 bp, Proteus mirabilis
  misc_feature (777)..(786): n is a, c, g, or t
atgaaaaagacagctatcgcattagcagtggcagtggcagctttcgcaactgcagcgcaagcagctccaaaagacaatacttggtataccggtggtaaattaggttggtctcagtatcaaagtactggtaacaattgggacggcgtgaatatcggtaacggtagcacacacaaagaccaaattggtgctggtgcatttgctggttatcagtacaaccaatacttaggttttgaactgggttatgactggttaggtcgtatggcttataaaggttcatacaacaacggtgcattcaaagctcaaggtatccaattaaccactaaattaagctatccagtaatggatgacttagacgtttatacacgtttaggtggtatggtatggcgtgcagattcaactgcaactattaatgcaacttcagcaggaactcaaaaacgtttctctggaaatgatactggcgtttctccagtattcgcattaggtactgaatacgcgatcactcctaacattgctactcgtcttgagtatcagtggatcaacaacatcggtgataaaggtactctgaacgctcgtccagacaatggtatgctgagtgttggtgttgcttaccgtttcaaccaagaaactccagctccagttgttgagccagctccagtagttgctccagctccagttgttgagaacaaaacctttactctgcgttcagacgttctgttcaactacaacaaatcttctctgaaagctgaaggtcaagaagcactgaatggtctgtacaannnnnnnnnngtacaacgaattagctaa

SEQ ID NO: 307285 - DNA, 3498 bp, Proteus mirabilis
  misc_feature (1580)..(1589): n is a, c, g, or t
ttgactaaaacgacgaaagtatcaggaaaagcgggggtttaccaagccacttataccggaactgaaccaacaacggcaacttttaccgtcaatgtcgatgatatacaaaataatgatactaaagtaaatgtaattgtttggggaagaaatgatgtcaatgcaacacttgttgccaataacccgtcattggatctaacacaggtagagcataactcgttattaacacttacactaacagataaaaataataatccattacctacggataacgcggttattttacaagaacaacccaattacgggatcctagatgcgactaaaaaaattagtgcaacccaatatacagccaattttaatgcaactaaggtaggtacggctaaattctttgttgaattagaaggatttcgtttaaaaacaacagcagaaattaacgttattgatagtaaacctacaattgatttgaataatgccaccattgcgtccaatcctagccatatttatagcacagaagaaaagcaaaatggccatacacgtagtaatgacaataacaattggcgtacatccactattactttagatataaaagatcaatatgggaatttattctcccctgatgtccctatcgatatcgtgattaaaaatacccaaaatggacgtgtaagcgaagccaaagaagtcaaacctggagaatatcaagttgtttatacgccgactgagcaaaatataccttttaccgcgactttctatgcggtaataaacaatgtacaacaaaatcaaatttcaaccaccgttgatgttgaaccgttaatacataatgtaaaaatgggcgcaagtttaattccaatcccttcacatattactgtgggtaatgcatcaatattaaatgtgatcttctatcaagacaataaaccttacattccttccggcaccgttgaaattagactcgctgatgattcaaaagcgttaggccatatggaggcaacaacgaaaagtggccatatctttcaggctaaattcatcggtgaaaatgtaggtaaagctaactttgaaatatttgttgataagcagcagtatactgaaggtaatatcaacgcaaccgttaatgtaacagaatcttatcgaggaaaattgaatgcggagccgagttctattccggtaaaacaaacttctgtattaactttacaaattcaaaatcatcttggtcaatcaataaaagtcagtgatgatgatgtacaaatcattatgttgcaaggtgatggtaataccgcagaaggtactattagtgaaacaacttatgatgccaatacaaaatcatatcaagcgactttcactggcactaaacaaggcaaagctcagtttatctcgatcattgatggacaaacttataataatacctcaactactgtcactgtaaagcctgcctataattcagccaatatgggaagagaaacttctccgatcacattgaataaaacctctgatgtttatttaaccctactcgatgcgagtggtcagcccattcaagttgataatgcaaaaatcatgttaaatacaccgaatttaggctctttaactgctgnnnnnnnnnnatgggacaataccaataaacgctatgtggctacctttacaggctcagcgataggtaatgcagagtttagtgcttatgtcgataatcaaaaaatagcagatgttactacttctattcaggttaatgatagccctgatgcattttataatccgagtctagtaccatctccaagtgttattacagtaaataataaatctgaaattaggttaactattcaagatattaacggcctgcctattaaaggaaatagcgccaatattatcttagaaacaccaacattaggttcattatctgaaacagtatgggatgaaagtataaatgcatataaagcaacctttactggtaatcaggtaggtaaagcaaacttctcagctattattaatggcaaggtggggcaagcaaagacatccgttcaagttaatgaagtctataattcagcgacgttacaacctgatcctagcactatactatcaggggatacctctgagctaaccttaactttatttgataaatcaggtgaacaagtgaggatcacaaatgacaatgtcagtattaacattcttacaccaaagcttggttcactcaataaaacaacatttgacgccaagacaaaaacatataaagcaaaatttaatagcgctgggttaggtactgcacaatttaacgtttcgataaatggtattgttcgttctgatattaccgcgagtattatcatcaaaaaagcgtatgaaagtgcatcattaactgcaatgccttcatccatctatacaggtaaaacatcggaattaacactgacatttaaagatgccaacaataaacctattgaagttaatggtgccaaaattatcttacgagatggtgaagcaggacaattaacggatacaacttataacgaggccaaaaaggtatatacagcgacatttactggtacgctagcaaccaatgctaattttaatgcatcaattaacaataatattgatacatcaatcaaaactacggtaacagttaaggagctatccttagatagtttcaactatcaactgatcagtaaacctaactctatctatattaatgatgaatcaacattagaattgaaaataacagatgctaatggcgctgtagttcaattggatgatgtcagtattgctcaatcatcaaataaccaatacggcactctcagtaaaacgacctataacagcaaaacaggcacttataccgcaacttttaccggtaaaaatgtgggaacagaaaccttctatgtggttattcaacaaaccgtgttaagcgaggtgaaaacaactgttacagtggataaagtcataccgatcaccgatattgcttatattgattcgaataattactcatttgaattaaatgaaggattccctacaacaggttaccaattctcaagtttcagttttgtgatgaaaaatggaaccaaagcatcggattatacatggaaagcaaatcaatcatgggtcactctgactcaaaatagtaacaaaatgaatgtcatgttctccaaagcaccaaacagtgaaaataaaacggtaactattacagcacaacctcgtgtagaaggtgtaggaaccgcattctcctatacatttacactaaaacgttggtttacattctatggtggacaaccgttacctgctccgagagcatggaaaatatgtacagataatggattagataccacaccttcatccttacttacctcaggtacaaataaacgaggtataggaactgttttctcagaatggggtaaaggaggttcagttttccacgcatggtcttccgatatcaacgatcaacaacaggttggtttagtgaatctttatgatgggtcagttaaataccttaactcatattttcaatatgaccctgtatgtaaaacagacttgtaa

SEQ ID NO: 307286 - DNA, 1782 bp, Proteus mirabilis
  misc_feature (1768)..(1777): n is a, c, g, or t
gtgagttcaaattattataataggctaacgggctggaaggactctagcatcaaaaaaggatatgacgaacgccctgcaaacggttgggatattagaactcaaagttatcttcctgcataccctcaattgggtttaaaagctaattttgagcagtactatggtgataatgttgatttattcaataatacatctaatttaacaaaagatccttttgcatttactgcaggactaaattacaccccatttcctcttatcacctttaatgccgaacataaattaggtaaaggtggtgataatgatactcaacttagtctctccttaaactatcaatttggtacaccaattaaaacgcaattagatcctagtaatattaagccattgcgtctacttgaaaatagcaaatatgattttgttgatagaaataataacattgtttttgattataaagagcaaacttacctttctctcaaaacccctgatttaatcgaaggatatagtaatgagcaaaaagtcattaccattagtgtagaatcaagtgcagggcttgattatattgatgttaatggcgctgattttattcaaaatggcggtaaaattattaaacaagcgccaaatagctatttactctatttgccttactataaccaacaaaaaggggctacaaatacctataatattgtcgctattgcatacgataaaaaaggccgctcatcatcgccagaaacaacaaagattgttgtattaaaagataataacgctgaaaatgcgactatttctgccacaccacaaaaaataggtattgatgaatcatcaatcattactttaagctttacaaatcatgaaggtgaattggttgaaataaatgatgcccgtatcgttcttgataatggtgttaacggagtattatctgatacacaatacaatgccaaaaataaaacttaccaggctaagtttattggcgtaataccagaaacagctcgtttttatgctttctataatcaagtaattcatcaagatatatcaacaacggttagcgtagaaaaaaatacttctcgttatcagcaagtcacattaaaagcagataaaaatgccattacactaggcaattcaacactattacgccttactttctttgataaaaataagcaaccaatcgaggtagataatgcacaaattttattaacaaatagtgagcaaggtgatatttcaaacacaacctatgatcctaccacgaaacaatatacggctacatttgtaagcaaaaatgtcggggatgcgattttccaaccgtcattaaataatgaagttatttctgatgttaaagaaatagtgaacgtttctaccttcaaaaatattaatttaactacagttaatgaaatgtatgtaggggattcatctaaagttgtcatgaccatcttggatgataataatcagccaatggaagtcgataatgcaaaaattcagatgattagagtcaataatcaaacaggtaacggcgttatctctgaaacaatctataatgctgcagataaaaactattcggctcaatttcaggcaacagaaacaggtaaagtgactttctacccttatgtcgcgaataccccttaccctgatagtaaagctgagacatccattctttctcattcagagaaatataaaattgtttccttaacggctgaaccagaacaaattatccaaaatcaaacttcagtgatcgtgatcacggcagtagtgcaagataatcaaggtcaacccgttactgataaannnnnnnnnngataa

SEQ ID NO: 307287 - DNA, 2412 bp, Proteus mirabilis
gtgctgaatgttgctgatatcgctgagaaaaaacgagagcagggacaagtcgctctggtattatcagcacctgccaagataacgaattacttggtggcaatgattgaaaaaacggcagaaggagaagaacctctcactcaagtacgagaagcagagcaaatcttcgctaatctattgcaaggtttacgagaaaatcaacctggttttgattaccaaggcttaaaagacaaagttgagcgtgagtttgctgagattaaacatatcctgcatggtatctccctattagggcaatgtcctgatagcatcaatgctgcgatgatttgtcgtggtgaaaagctttcgattgccattatggagtcggtgttacaagctagaggatataacgttaccgtcattgatccggttaaaaatctccttgctcaaggtcattatctcgaatcgacagtggatattcctgaatcaactcgccgtatttccgcccttaatattccgaaagatcatatgatcttgatggcaggtttcactgccggtaatgaaaaaaatgagcttgtggttctcggtcgtaatggctcagattattcagccgccgtattagccgcgtgtttacgtgcacaatgttgtgaaatttggacggatgttgatggtgtttacacctgtgatccacgcctcgtcccagatgcacacatattaaaaggcatgtcctatcaagaggcgatggaactttcttactttggtgccaaagtccttcatccacgcactattgcacctattgctcaatttcaaatcccttgtttaattaaaaatacgggcaatccagaagcaccgggtacgttaataggtgatggtcaaaaagatgacagcacgccggtaaaagggatcactaacctgaataatatggcaatgatcaatgtatcagggccaggtatgaagggaatggtgggtatggcggctcgtgtcttttccgtgacgtcgcgagcaggaatatcggtagtattaattactcaatcttcatctgaatacagtattagtttttgtgtaccgcaaaaagagctaattagagcacaaaaagcactgtcagaagagttctatctagagttaaaagatggcgtacttgatccgttagatattatgaacaatgttgctatcatctcggttgttggtgatggtatgcgcacccttaaagggatctcagcccgtttcttctctgctttaactcgaggcaatattaatattgttgctattgctcaaggctcttctgaacgctctatctctgcagttattgctaatgatgcagcgacgaatgcggtgcgtttatgtcaccaaatgctctttaacactaaccaaatcgtagaagtctttattgtcggtgtcggtggtgttggtagcgcgctaatcgagcagatccatcgtcaacaagcatggttaaaaaacaaacatatcgacctacgtgtttgtgggattgccaattcacgtgcgatgctaaccaatatgcaaggtatcgatttagataattggcaacaagcgctacaagcagctaaagagccttttagctttagtcagcttattcgcttagaaaaagagtaccacttcctcaatcctgtgattgttgattgcacttcaaacgaaatgattgcacagcaatacgccaatttcttacaaaatggctttaacgttgttacgcctaataagaaagccaatacgatgtcgatggattactatcatcaaattcgccaatcagcggaagcatcacgtcgtaaattcttatatgacactaatgttggtgcgggtttacctgttattgaaaacttacagaacttgcttaatgctggcgatgagttggtgcaatttaatggtattctttctggctcactctcttatatttttggtcagctagatgaaggaaaaagcttgtctgaagcgacactttctgcgaaagaaaaaggctttacagagccagatccaagagatgatctctcgggaatggatgttgcacgtaaactgcttattctcgctcgtgaagcgggctatcaattagagttgagtgatattgatgtagagcctgttttacctagctcatttgatagtacaggtgatgtcgagagtttcttaaaccgcttacctcaagtagatgttgagtttgatgctaaagtcgaagaagcccaaaagtcagcgaaggtattacgttatgtggggatcatcaatgaagggaaatgccaagtcaaaataatggccgttgatgctaacgatcctctctttaaagtaaaaaatggtgaaaatgcgctagctttctacactcgctactatcaaccaattcctttagttttacgtggatatggtgcaggaaatgatgtcactgctgctggggtatttgcagatgtattacgtacactatcatggaaattaggagtttaa

SEQ ID NO: 307288 - DNA, 573 bp, Proteus mirabilis
atgttgctgatgggaaaagcgcgttatcaaatggcggtgatcagagcgaatattaatggattggatgggcagttaagagtgaatgaaaaaccttctgctaaataccttcatcaaactcaagaatatataaaaatcacccgtgaagagatccaccgttgggcggatgctgaaaagttaaccatggaagggcgtcaggttgctgatgatatgacgaaacgctttgatgagcttttagatatatttaccgatgccttagctaaattacgtaaaggacaattgactacgcactctgctagtcaaaaaatggatgaactcaacgagatcaccatgacatattatgcagtcgccaatggtattgagaataattatattgatattgcgaaaacctcacaacagcgcattatgctaatggcgttagtcacagcgattattgtcattatgctctttatcattatcttacgttggttctcccatagctttatcggcaatattaaagtgcttattaatatttttagtaaaatgagccaaggcgatttaagtatgcgagtagaaaatcacggtaacaatgaataa

SEQ ID NO: 307289 - DNA, 858 bp, Proteus mirabilis
atggtgggattgcatgaatggccactaatgttttttactgttatcggccaaagtgttgcgggtgcctttattattatggggtgcgctatcctttcgggtaagctttccgcagaaatgaaccgaaaagtgcattacagcatgtttggactctgggcattaatgggtattggcttcttattatccatgatgcatatgggaaccccattacgcgcatttaactcattacttcgtttgggtcactcatcattaagtaatgaaattgctagcggttcaattttctttgcgctgggaggtatttactggttactggctgtacttaataaaatgcctgttgcattaggcaaattatgggtcgcactggttatggtattagctgcattatttattacggctatctctcgtgtataccaaattgatactgttccgacttggtataacagctataccacatttaattttgtgctaacggcctttatctgtggtcctgttttagcggcactcttaatgcgtattgcaggttttaatctaaactgtgtcagtgcgttgccattactcagtgttatcgccattcttgtgagtgctattgtggcaacatcacaaggttttgaattaggttctattcaaacctctgtgcaaaaagcggtggatttagtccctaactatggtgctttgatggggattaaattagtggctttagtcttaggcttgagttgttggattgccccactgttacgtaaaaataacccttcgattgctttgttaacattgggctttattttagtgtttgctggtgagtttataggacgcggcgtgttctatggtttacatatgactgtcggcatggcagtcgtgggttaa

SEQ ID NO: 307290 - DNA, 369 bp, Proteus mirabilis
  misc_feature (271)..(278): n is a, c, g, or t
atgaaattacaacagttgcgttatatcgttgaagtggtgaataacgatttaaacgtctcaacgacagcagagcgtttatatacctctcagccggggatcagtaaacaaattcgtatgctagaagatgagttgggtatacaaatattctctcgcagtggtaagcacttaacacatgtgacgccagcgggggaagaaattgtcagattatctcgtgagatattatccaaaacagaagctatccgctcggctgcaggggaacacacttatcctnnnnnnnntcctcttcgtcggcagcgtcagatgtgtataagagacagctattgccaccactcatacacaagcgcgttatgttttaccccctgtgattaa

SEQ ID NO: 307291 - DNA, 1143 bp, Proteus mirabilis
atgacagtattaaccgtttatttatgtggtaccggcgcttcatcttttgataataataatcataataatcctgtttattggcaaggtgagcttgtttccaccttggcgcataataatctagatcgcgaatttgctcagtggtttattgtagatggcccaggtagcggtaatttgcaagaagatgatttatgggttgaaagccctaattattcagatttaaaaggctctttatttggcagtggatgggaagaaaatgttgaacatgcactgtgcttaatgaaaggcaactttgactggcaacgtgaaaagttaacagaacaacaatataatcaactgaaaaaagcgggcattcccattgaagatgttgaagtgaccggctcttttttatggcgtaaatataattatggtgaccgctatgtcactcaacaacaacttcagcaacaaattattcgtacctttcgcaaagatggcatcattcccacccaagtgaatttaattggttggagccgtggtggcatcacctgtcatatgcttgccaatgccatgttaaaagatcccctattaaaagatattccggtcaatatttttgctattgatcccgtcccagggccacttaatttccaaccagaaaaggtgacactaggtagcaatgttaaggaatatgtcggattttatgccattgatgaacgctcaaaaggatttgcttgcgttattccaaccgtgactgctgagactaaaatgcatattttcccgctttcaggacgccatgcgactttagtaggcaatgctgctattgatggtagtgaaggtaaaaatgcactattttcaccggggttaattgtgcgacattttgcagaaagatgtttaacacgttggggatgtcaattagcgaacaagctagaattaactgataaggagatatttgagcatcatactgatattaaaaatgatgcagataaatatattgctatgcgccgtaaaacttattccatatatgaaagtagcggtgatgatgaacgtaaagtttcattaggtaaagaggggaaagcattctctgatatatatggggcacaatatgagccttctatggcattaaccgcagactattttgcagatcctcaactctacgatgtgattaaataa

SEQ ID NO: 307292 - DNA, 1188 bp, Proteus mirabilis
atgttctcaaaaaaaacacgctcaacagctgcactgctattttcatcacttcttcttacaataggaagaggtgcaacattaccgtttatggctatctatttgtcgagggagtatcaattacctgtcgatgatattggtattgccatgtctattgcattaacaacggggattttcttcagccttggctttggcatgcttgctgataaatttgagaaaaaacgttatatgatccttgcaattctaacgtttatttttggatttgctgcaatccctcttgttcatagcactattttagtcgttatctttttttctgtgattaactgctcttatttagtgttttcaaccgtattaaaagcgtattttgccgaaaccttatcagtttcagcaaaacctaaaatattctctctaaactatacctttatcaatatgggatggacggtggggccccctatcggcaccttattattaatgtatggaacacaattacctttctggcttgcggctatttcggcaacatttccactatttatgatccaagtttttgttcaacgctcaaaagcggtgaatacagatgaagaaaatagtgtgaaatgggatccgaaaataatgctaaaagatagagcattaagttggtttgtattctcaacttttttcggtacattaacgtttggctcttttgcctcatgtatttcgcaatatattttagtggtttacgatgcaaaattagcagagtctgttatcgccgtggtattacctgtaaacgctgccattgtagtctctttacaatatatagtgggtaaacatgttaccgcagaaaggctacgtaaattaatgacattaggtacgttattttttatgacaggcttacttggctttatgtttgctggtgacaatttaatcttttgggcactagctatcgctgtgtttacctttggtgaattaatttatgcaccaggcgagtatatgatgattgataacattgcaccgttaggaatgaaagcaagttatttctctgcacagtcactcggttggttaggtgcggcacttaatccacttgccagtggttttattttaactgcatttccgcccgcctctttattcgctattttaatggtggtttctgcattggcttggttttgtatgatccaaggtatgaatgccagccgaaataaaatgatatctgtttaa

SEQ ID NO: 307293 - DNA, 3222 bp, Proteus mirabilis
ttgcatgtcgctgcacgtactgtcgcaacacatgctttgtctatttttggtgatcattcggatgtaatggcaatacgacaaacgggctgtgcgctactttgtgccaatagtgtgcaagaagcgcaagactttgcggtgattgcgcagatagcaacgctcaatagccgtattccatttgttcatttttttgatggatttagaacatcacatgaaatgaataaaataatgtctatttctgatgatgaactcaagcagcttatcccatactctgcgattgaagctcatcgccaacgtgcattatcgccagaatcgcctgtgataagaggaacttccgccaatcctgatacttattttcaagctagagaagcctcgaacccttggtataacagtggttatcaacatgttgaagaggcaatgaatttgtttgccaaagtgactgggcgtacttatcagccatttgaatattatgggcatcctcaagctacacgaattattgttctaatgggttcagccgcgggtccttgtaaagaagttattgatatgctcaatacacaaggcgagaaactcggcttactttgtgtacacctttatcgcccattttcggcgtgtcattttcttgatgctattccaaattcagttgagtctattgctgttcttgatagaactaaagagccaggcgcacaggttgaacctctctatcttgatgttattacggcatttgccgaagcctatcatcaaggtgaacgtgaaatattgcctctgactatttctggtcgttatggattatcttcaaaagaattcgatccagattgtgttatggctgtgtttaaagaattacagcaatctaaacctaaacgtcggttcactgttggtatttatgatgatgtaacacatttatcaattatgcctatggatgccaaattacctgaacatcataaacttagcgcactcttttatggattaggtagtgatggttctgtttctgcgactaagaataatattaatattattggtagcaacacaccgttatatgcccaaggctattttgtttatgactcaaaaaaagcgggtggattaactgtttctcatttaaggatcagtcaaacgcctattaactcaacttacctcattaaacaggctgattttattggttgtcaccaatggcagtttattgataaataccaaattgttgagaaattaaaagtagggggcacacttctattaaataccccttattcagcgccaaccgtttgggctaaattaccgcaagaagttcaagcgctacttattgaaaaagaagcgcgcatctatgttattaatgcttataagattgcgcgtgaatgccaattaggcgcacgaattaataccataatgcaaacagcatttttccacttaacatctcttttccctgccgaaaagataaatgattatctgcataagacaattattaaaagttatcaaaataaaggcgaagcattggtcaatgcaaacttaatggcgatttcacaaacattgtctgcattagagcgcgttcctgttggggctgtattaaccgaaagtccttataaatccccgattgtcgctgataatgcgcctgattttgtcaaaacagtcaccgccataatgatagcagggcttggtgatagtttacctgtttcggcatttccacctgatggcacatggccaactggcacaacacaatgggaaaaacgtaatattgctgaatttattcctgtctggaaaccgtctttatgtacacagtgcaactattgcgttgccgcttgtcctcatgctgctattcgcgctaaagtgaccaagactaacctgttagaaaatgcaccaataacccttgaaaaacttcctgtaaaatctcgtgaaatgaaagggttagactatattttacaagttgcacctgaagattgtactggctgtaacttatgctatgaagtttgcccagccaaagacagacaagatccaaacatcagggcgatcaatatgattgaaaagcttggtgtattagaacaagaaaaacaaaacttcaatttcttcaatcaattacctgatttacatccttctgaattagaaaaaatagatatcaggacatcacaattaattacgccactatttgaatattcaggtgcatgttctggctgtggtgaaaccgcctatattaaattattaactcagctttatggcgatgaattattaattgcaattgccacagggtgttcatctatttacggtggtaatctcccaaccacaccctataccacaaacagagaaggcagagggcctgcttgggctaactccttatttgaagataatgccgaatttggtctaggttttcgtctcaccttagatcagcataaaaaacgtgttgagcgcttattaaatcgatttgcaacagaaatacccgcttcactttatcaaacgttgactgatacgaataattctaatcaggataaacgcaatggaattaatgagttatccaccttattaggtctcagtagtgatccactagccaaagagttactccatgatgcgcactatttaatgcaaaaatctgtatggatggttggcggtgacggttgggcttatgatattggttttggcggacttgatcatgtattgagtagcggtgaaaacgttaatgtactggtgttagatacacaatgttattccaatactggtggacaacaatctaaagcaaccccaatgggcgctattactaaatttggtgaggatggaaaaaataaagctcgcaaagatttgggtatcaccatgatgatgtatggcaacatttatgttgctcaaatcgctattggtgctcaaatgaaccaaactattaaagccattcaagaagcggaggcctatcaaggaccttcactgattattgcttatagtccttgtgaagagcatggttatgacttggcctttagctatgaacaaatgaagcaactgactgcatcaggtttctggcctctctatcgatttgatcctcgccgtgaacaagagggcaaaaatccattaatgctagattcaagagctcctaaccaagtcgcttctgcggtgttaaataaagagcaacgttttagtcgactatttaaaatctatcctgataaagcaatggcattagcgaatcaagcacaacgtaatattgaaaagaaatatgctttacttaatctattggcagaaaaaagcataaagtcagagactgaataa

SEQ ID NO: 307294 - DNA, 240 bp, Proteus mirabilis
atgcgtgcttttggccttggtgctttgcatgttttacctttatgccttgcggttattccttggggactattagcgggatcaatggccgttgatgcaggattaacctttgcacaaagtgtcggaatgtctgcaattatatttgcaggggcggcgcaattggtgacattaggattagtggtttctggtgcgggaatgctgaccattattgtttctgtcttttttattacagctcagcactga

SEQ ID NO: 307295 - DNA, 1011 bp, Proteus mirabilis
gtgaaaaaacaaaagcgtacgactattacagatattgcaaaactagcaggtgtatcaaaaacaacagctagtttggtattgaatggccgaggtaaagagatgcgtgttgctgatgacaccattgcgcgtattacctctattgcccaacaatatcagtatcaacctaacattcatgctcgctctttacgtgataatcgcagttatgcattgggattggttattcctgatattactaactacggatttgcctcagtggcttatgaactagaaatattatgtagagaagcgggtattcagctacttatttcctgtacggatgaaaatgcggctcaagagactcttgcaatagaacatttgttatcacgacaaatcgacggtttgattgtggcttcttgtttacaaaatgattttgaatatcagcgcttaagtaaacaaattcccgttgtgttatttgaccgttattttaacggtacaacattaccttttgttgtcacagattcaactaccacgacacaacaacttattgcggagattgcttcaacaaaaggcattgatgaattttactttttaggtggacaatcaacgatttcacccacaaaagatcgccttttaggttttacgcaagggctttctcaagccaatattaatttgaaaacagagtggatcattcacgggcactatcatccaagttcaggctatgaaatgttcggctctttatgtgcgtctttaggtcgtccacccaagtttgtttttacttcagcctgcggtttgctagagggtgtattacggtatttaagccaaaataaaatcatgcaagatgatgtttatttagcgggttttgatgatcactatctttatgattcattatcgataccaatagatactattgcacaaaataatcctgaattagcctctcactgctttcgactcattatgggattaattaaccaagcaaatttagaaactcaccaaatttttgttccagcaaaaatacaccaacgacataaataa

SEQ ID NO: 307296 - DNA, 1407 bp, Proteus mirabilis
atgacaaaaagcgaaggattatctgcaattttacaagcggttatgcgtaatagtgctaaagctgcaaaagataaatactatccgcgttggcatttagcgccaataactgggttattaaatgatcccaatgggttttgttttgatggtaagtattatcatcttttctatcaatgggcgcctctgtcttgtgagcataaaaataaatgttgggggcattggcgttcaaaggatcttattacttggcaacatcaacctattgctttattgcctgatgaattttatgacaaagatggctgttattctggcagtgctgtgatcaatcaaggacaattaacgctttgttataccggaaatgtaaaatttgatgatggctctcgcactgcatggcagtgtttagcagttgaaaaccagcaaggtggttttgataagttagggcctgttttagggcttcctgaaggttatagcggacatgttcgtgatcctaaaatttggcaacacaacgataaatggtacatggtgttaggggcgcaaacgttagataaacagggtaaggttttactttatcgcgcatctcacttatatcaatggcaattaataggcgagttagcaggaagtcatttaggtggattagatgatgtgggttatatgtgggaatgcccagatctctttgaacttagtggacactttattttattaacctgtcctcaaggaataaaaaaagagcaatatcgatttttaaattcgcactctagtgcttatttaatgggcagttttgattattcaacattgcagtttcaacatggtgatttaatcgaacttgatgcaggttttgagttttatgcgccgcaaaccacacaagttaatggtaggcgtttattatttggttggatgggggttcctgatggagaggaaatgtatcaaccgaccattgctaatggctggatacatcaaatgacctgtcctcgtgaattacaaataagcgaagggcaactttatcagcaacccgtaaaagaattacagcaactcagacaaaatgtacaatattggcaaggcattgcagatgatgcgcctgaaattaacgggttttgtgttgaattagaggtggaattaatagactctctcttaattcaattctctgattcacttgaattaaccattgagaataatcaagcaatattaaaacgtcgtagtgttaaaaatggtgaatggcaatcacgtttctggtctggtgatataaaacatcttcaaatattatgtgacagttcgagcgtggagattttctttaatcatggtttgggtgtgatgagtagtcgttttttcccttcagcaaaacagatcattaatttttcgggtaaaaacacaataaagctaacaacttggcaattaaatgatgcattgtttagttaa

SEQ ID NO: 307297 - DNA, 1371 bp, Proteus mirabilis
atgaatattgaaaaagttgctcaccagcttgtgcctttattaggtggtgctgaaaatatcgcaagtgcagcacattgcgctacgcgcttaagacttgttcttgttgatgactcaaaagcagataaagaggcaataaataaattagagggtgtaaaagggtgttttagtaacgctgggcaaattcaggtcattttcggcacagggttagttaataaagtacatgctgcatttattgctgccgcaggtattggtgaatctagtaaatctgaggctgcaaatattgcggctaaaaagctcaatccatttcaacgaatagctagactgctttctaatatctttgtccctattattcctgccattgtagcgtcaggcttattaatgggattgctgggattaatgaaaactaaccagtgggtaagtcccgataatgcactctatatcatgcttgatatgtgtagctccgcggcttttattattttgcccattcttattggttttactgctgcaaaagaatttggcggaaatccttatcttggcgcgacattaggcggaattttaacgcatccagccttaactaacgcgtggggggttgcggctggatttaataccatgaatttttttgggttagaagtcgccatgattggctatcaaggaactgttttcccagtattactggcagtttggtttatgagtgtactggaaaaacaattacgtaaagttgttcctaatgcacttgatttaattatcacgccatttttaaccgttattatttcaggctttgttgcgttattagtgattggacctgtcggtcgtcttttaggtgatggtatttcattaatactaagtacgttaattacgcaggcaggttggattgcagggcttatttttggtggtctttattctgttattgttattacaggaatacaccatagtttccatgcagtcgaagctggattattagggaatccgaatattggcgtaaatttcttattacctatttgggcgatggctaatattgcacaaggaggagcctgtattgccgtttggtttaaaaccaacgatgcgaaaattaaagctattacgatcccatcgggtttctccgcgatgttaggtattacagaagcggcaattttcgggattaatttgcgttatggtaaaccttttattgctgcactaattggaggtgctgctggaggcgcttgggttgttggctctcacgtttatatgaccgctgttggtcttaccgctattccgggtattgcgattgtacaagcgggttcaattattaattatgttattggtttagtgatcgcattcttaacagcttttgttctttctcttttactgaaatataaagtggagtctgcataa

SEQ ID NO: 307298 - DNA, 882 bp, Proteus mirabilis
atgatgagaaaccttcctccattaccttcattgcgtgctttcttagtcgcttgccatagccaaagttatactgaagccgcacagacattatgtgtcactcatggtgcgatcagtcgtcatatccaagttatagaaaaatggtttggtgtcaccttattcaataaacaaggtttacgccgcgtacccactccttatgcattgacgctagcgcaagagttaagtgacgtttttgataaattaaatgatattggttttcgttatggtaatggtggaaaaaacgatattttaaatatcagtgttcctacaacactttgtttaaaatggcttattccgcgaatggaggatttttatcttcaatatcctaatgcaaatatccaagttgcttctgcaaatagcgagcgatttcatttgattagtcatgatgatctgataattcgccctcaacctcagcaacaagagtattcatccgttgtttttttagaggataaacattgtttaattgcttctgaaaaattcttaaaacgttacaacgtcactagatttgaagatgtttttgactgccccgttattgatacacttacccgccccgggcattggcaacaatggttaatggcgactcatcttaatactcagcgttcattttcacgtcactatcgctttgatcactttcatatttctcttcaagccattattgaaggattaggcctcggtattggccctgtttcgattttgtcgaatgaaataaatagcggtactttaaaagtgttatttccaaatatccaaattgtaccgataagctactacgctttaacaccattgggtgtacaaaaaaccaaaacacatcttgattttgaacaatggctcacccaacaaaaaagttaa

SEQ ID NO: 307299 - DNA, 726 bp, Proteus mirabilis
atgagttttatcgcggttattttattggcagtagtgtctggtgtaatcagtggcgttgtaggaacgggctcttctattttattaattcccgctttgacttatgtatttggtgctaaggaagccgtaccgattatggcattagcgtcagtgatgggaaatttatcacgtatttatttatggcgtcacagtattcgctttaaaccactattttattatctattacccagtattccagccgttattcttggtgctaatacattatggataatgtctgaaaaatggctaaatattggtatgggaatattttttatattgatgatccccgtgatccacttattacgcaaacatcaaatcaaaatgaaaacttaccaagttattattgcgggtgcagttatcggctatttaacagggattgtgttttctacaggaccattaactattccaatattctctgcatatggtctgacattagggccattacttgcaactgaagcagctgtctcatttgttatttatctcactaaagccctgacatttagccaactaggtgcagttaatagctttatctttattagtggagtgttagtaggttgtggcttaaccgtaggaaattactttggtaaaaaactggtattaaaactgacaccaaaactttttcaatggctattagatgccatgctaatttttgctggtggctcactgctatttaatggcatttattcttaa

SEQ ID NO: 307300 - DNA, 600 bp, Proteus mirabilis
atgacggaatacgaaaaaatggtatcaggtcatctttatcatgctagtaaagatgatagtttagaaccacttagagtaaaagcgcgtgaaattatttatgattttaatatgacgcgtccttctgacgttgaaaagagaaagacatatttaaaacagcttttaggaaaaacgggcaataattttactattgagccaccatttcattgtgactatggtcagttaattgaaattggtgaatcattttacgctaattttaatctaacgatattagattgtgctccagtaaaaattggacacaatgtgatgtgtgcgccaaatgtcagtattttaactgcaactcatccgattgatcctgaaatacgcaacagtgaattagaatatgcattaccgattactatcggtaattcagtatggttaggtgcagggtgtattatcttacctggtgtgactattggtgataattgcgttataggtgccggcagtgtagtcacaaaatctattccagctaattgcgttgctgttggaaatccttgtcgagtgataagacaaattagcgataaagataaacaagatgctgagaaaaagcttagtctttattaa

SEQ ID NO: 307301 - DNA, 354 bp, Proteus mirabilis
atggagttacgccattttgctcaaaatgagactattgcagctgaagattacattgataatagtgatgtacatcaccctgagcgtattgcatgccaagcacaagcgactttttatgataattttacacaaacaggtaaactaacaataaaacagattgctgtcggtgaaaggcctatgcctaaagatgaaatgccaattattggagaaatatctccttatcagagattatatcttgttactatgcacgccgccgtgacactgtcacctttattatgtgaattagttgcacaagaacttatttacgaaaaagcggaacctctattaacgccttatcgcgtatcacgattcagctag

SEQ ID NO: 307302 - DNA, 846 bp, Proteus mirabilis
atgataaacacagtgcccgccgagatttcggtacagttatcacaggcactcaacgtcatcgagcatcatctgggatcgacgttgctggccatgcatttgtatggctctgcactcgacggtggcctgaagccatacagtgatattgatttgctggttactgtgaccgcacggctcgatgagagtgtgcggcaagctctgttcgtcgatctcttgggggtttccgttttccctggtcaaagcagagttctccgcgccttggaagttaccattgtcgtgcacagtgacatcgttccttggcgctatccggccagacgggaactgcaattcggggagtggcagcgcaaagacattcttgcgggcatcttcgagcctgcgacaaccgatgttgatctagccattctgctaacaaaagcaaggcaacatagccttgccttggccggttcggctgcggaagatttcttcaacccagtcccggaaagcgatctattcaaggcactggccgacaccctgaaactatggaactcacagccggattggataggtgacgagcggaatgtagtgcttactttgtctcgtatttggtacagcgcagcaaccggcaagatcgcgccgaaggatgttgccgccaactgggtaatggagcgtttgccagttcaacatcagcccgtgctgcttgaagcccggcaggcttatcttggacaaggagaagattgcttggcttcgctcacggatcagttagaggcgtttgttcacttcgtgaagcatgaagccactaaactgcttggtgccacgccaatgatgtctaacaattcattcaagccgacgccgcttcgcggcgcggcttaa

SEQ ID NO: 307303 - DNA, 300 bp, Proteus mirabilis
  misc_feature (269)..(278): n is a, c, g, or t
atgcctaaatcagtttggtggttggcattttctttagcactttttattacaggcaatgcattagtcctttctgtcgccgttgttattggtgaacaacttgctaaagatcctatttattcaacagttccattattaagccaatatattggtattatttcagccaccattcctatggcctactttatgatgaaatattcacgtaaagcgggctttattattggtaatcttgccggtttaattggtgctttatttgctattgctggaatatnnnnnnnnnnggaatatattatcaaaatttaa

SEQ ID NO: 307304 - DNA, 429 bp, Proteus mirabilis
  misc_feature (413)..(422): n is a, c, g, or t
atgagtggcggtattattgctgctattattggccctaccttagcggttgttactcgtcaattctttgctaattatccttttattggtcctttcctttcacttacggtaatttatattttggcgtttattctgttgtggaaaattccattaaaaaaagtagttaaattagtagcaacacataaggaaaaatccagaagttatttgcaactttatcgtcagccactgttatttctagtcacaatagtaagtgcatgtggttatggtattttagtttatatgatggctgcgatcccgctatctatgaagcaaaatggatttgaatttgccaccattgcttttgtatttcaatgccatattttgggaatgtttgcgccttcatttattacaggtcaactgatccatcgatttggtgnnnnnnnnnntgattaa

SEQ ID NO: 307305 - DNA, 237 bp, Proteus mirabilis
ttgattagttcaacacatttattatccaatacttacctacctcatgagcgagcaaaagtacaaggaactaatgattttctgattttcttctttggtgcagttggaagcattacaggaggtgtcgccttttatctcatcggttggcaaaatacgaatatcatcagtattgtcattagcgtcattattttattgattgcgataaaactacgaaagtacttacctgttacaacacaatag

SEQ ID NO: 307306 - DNA, 1749 bp, Proteus mirabilis
atgagcacattattatctacacaaaatctgtctttccataataatcacggtttattattaaacgatatttctttagcactgattaaaggtgagaagattggtttaattggttataacggttgtgggaaaagtactttattaaaattactttcacatcaattatcaccaagttcgggtgttatttctgtcgctaatcaaacggttatggcgtatatagaacaacacttacccactgaattacagtcaatgactttaatggatgctgtacttcataaattacctgaagaatacagatcatctgaaggctggcgagctgaattattgctaagtgaaatgggatttaaacttcacgaaaaagatctccttgtttcgcaattaagtggtggtcaacacactcgtttattattagcgagagcgttaattattgagcctgatttattattacttgatgaaccaagtaaccacctcgatttacccactattttatggttggaaacatttttaaaacagtggcgtggtagcttcattctagtttcacatgataatacgttattagacaacgtaacgaattgcacatggattattcgtgataaatcgctatctatatttcggttaccctgctctcaagctcgagttgcacaagaagagcaagatatcagtgcacaacatcgctatgatgcacaacaaaaagagatagatagaatagcccaaagtgcgaaacaactcgcaatatgggggcacgtttatgataacgagaatttatctcgtaaagctaaacagatggaaaagcatattgttcgtttaaaagatgagcaaactgaagtgacgtctggaaatcaatgggtattacagttttctggtacggcattacgtgctgataggctctgcgaattaaatcaacttgctgttattcctgctgaaaatacacccgttttatatactgttgaaaatcagcgtataaaaagtggtgatcgagtagcaataattggggctaatggaacaggtaaatcatcattattaaaaatgatttggtcacttagtttagttgagataaatgaacaaaatgcaataaagctgcatccccgagttgaattgggttattacgatcaaaaaattgctcaattagttgataatgataccctttctgatgcattaaaaccttttgcaccattaacggatgaacagagaaaaatggcgcttattagtgctggctttgtttatacgcgccacgggcagaaagtgagtacattaagtggtggtgaacgagcgcgtttattgtttgttggcctgagtttagcaaactattctttattaatgttggatgagccaacaaaccatattgatatggaaggcaaaaaggcattatctgaacaaattagtcaatttcccggtggtgttttattagttagccatgatagggaattgattgaaaatagctgtaatcgtttttggtatattcataatggtgttttaacagaacatcatgatattgaagcgatttatcagcttattgctgaagaagaaatgccagaaactctgctagtggataaactcaataatttgcagaatatctcatcagttccattagtttcacatcatgatgatgatgaaaaactctttaagttaattgagctagaagaaaaattagaggccgatttagcacgtaaaattaaccatcaaaaacctgctttgcaagcacaatggaaattagagattaaccagctaaagcaagcacttaatttgatttaa

SEQ ID NO: 307307 - DNA, 948 bp, Proteus mirabilis
atgaaaaataataccgattttcgtttcatattagtgatgcgaaaaagtcgcctacaagaattaattgagcgttttaacacttggtcacaagccaaattctatttagaacataaccatgttgaggtaacagattatcttaatgaacataatctctatcaaaaacaactcacagaagctgagcttattttaaaatcatttggacgttttcagctcttggaaagaggattattgcctagttatcaattttcctctcatgatattgtagtggtaataggtcaagatggcctcgtcgctaatactctgaaatatcttaatcaacaacccgttattgccatcaatccagatccttcaagatgggatggtaagctcttgccctttgaaatagggcaattgaaagagattataattaatacaataaatcacaaaatgccttttaattcggtcacttttgcacaagcaaaaaccaatgatggtcaatcactgttagcggttaatgacttatttattggccctaaaagccacacttccgcacgttatatcttacaatggggagactctcaagaagtgcaatcctcatcaggcattattgtatcaacgggacttggctctacagggtggtttcaatctattcttgctggagccatggccatcaccggaaaagcatcacaccctcttttacaagggtttagctggagtgataaaaaattacaatttagtgtaagagagccatttcctagtagaacaacaggcaccgctttaacttttggcacgattgagccggactctccattgcaattaggatctttaatgcccgaaaatggtgttattttctcagacggcattgaagaggattatttacattttaatgctggctgtattgtgcaaatcaatatcgcagatagacaagggcaactcatcgcccctaaggggcgtcagcctattcaatga

SEQ ID NO: 307308 - DNA, 627 bp, Proteus mirabilis
gtgaaaacatgggttatttttggcgctggcggtaaaggtgttggcgcacatattgcagatattggcgttacacaacgacgccctattgtggctttagttcgttccgaagaggcagctaatcggttagaagaaaaagggatcaaaacagttatcggcgatgcgattgatgctaaggctgttgaagctgctttaacattggcaggaaaagaagcagacatcatttccacaatgggcggtgaaaatgattatttagctcatcgaaccgtaattgatactgcggagaaaatgggttttcagcgtatgttaatggtttcttcgttagggtgtggcgatagttgggtcgcgttatctgacagagcaaaagccgcgtttggtcaagctgtgagagaaaaatcattggctgaagtgtggttgcaaaccagtcgttttgattatgcgattgtcagacccggtggattactgaatggtgaagaaacgggtaaggctcagctttatcaatacgaagaaactcatggtttagttaatcgccgagatgttgcacgtttagtggcacaacttctagacgctgaccttttagacgatcaagtctatgccgtagttgaacctggtttagtgccttctaaataa

SEQ ID NO: 307309 - DNA, 489 bp, Proteus mirabilis
atgaatacagagttacaacaatttttaatgacagagcctgatggcacattggaaactattgcgacgcaatttaatacaacgttattagacgttgtaagacatttaccatcacgttcattaatgggtggtgagcaattcgatatagtgtgggataacgtcatgaaatggggtaatgtcaccacgcttgtgcatactcaagatgttattttagagtttagcggtgaattaccaagtggttttcatcgtcatggctattttaacttacgtggtaaaaaaggaatgacaggccatattaaagccgaaaattgccaatatattgcgatgatcgagcgtaaatttatgggtatggataccgcctctatcttattttttaatcatgaaggcgttgcaatgtttaagattttccttggtagagacgaacatcgtcaattgttaccagagcaattatcagccttccgtcaattagcacaacaattaaataaggaataa

SEQ ID NO: 307310 - DNA, 1770 bp, Proteus mirabilis; identical to SEQ ID NO: 297773

SEQ ID NO: 307311 - DNA, 459 bp, Proteus mirabilis
atgactaaattagcgcaattaaaagcggtttacgatgaattggctaaaaagcgattaagtgttggtttttttgaacacgcaaaatatcccgatggaacacctattgcttatgttgcctctattcaagagttgggctatccggctggtggcattcctcctcgcccatttttacgtccgaccatgaatgacaaaaagcaggattatagtcagttaatttttcgtgctgtgaaagcctctattaagggaaacatcacgctggataatgggctgacacaaatcggtgcgacggttgcgggcgatgtgaaaatggcaataaaagcagtcacaacaccggcactggatgattcaacggtcaaagcaagagctcgtcgacatagcaaaggcaaagccaccgataagccgttagtcgataccggtcaaatgcttcaagccgtgtcatttatcgtggaggataaataa

SEQ ID NO: 307312 - DNA, 516 bp, Proteus mirabilis
atgacggattatgaagttgatgtcgctattcgaaaacagctcttgttgcagttaaaagccgtcggtattgagatccccgttaaagccggtttccaatctaccaagcagggccgtgaagataacatggtgatgttttttcccatcaatgaaagtggcctcggttggcaagggcgaaaatataatattcaaggcaacaaagctaatcatcaagaaaaccagttatccgaaaatacgtaccaagttcaagcgttcgtgacgcaattaggcaattatacagccaaggatattaccgcgattgtcagaatgatcgccaattcattgacgtttgttgaagcactccggaaacaaggtattggcattcaacgtgcaaccggtattcgaacgccctattttctgaatgaccagggcaactacgaacaaaacccctcatttgatttcaatgtgacatttaatcgcacacttcatcctgatactaacgccgtgagtgcgttgtatcccgatatctatcgtatttaa

SEQ ID NO: 307313 - DNA, 267 bp, Proteus mirabilis
atgctaacactcagaaaaatgattgctgatgatgagtcgcccacgggtgtggtgacgagtgtgactatcgataaggtaagcgtgtcatttacggcaccccctgccggttcggattggtcgcattggtttaaaatgaccacctttggccagcagtttctagcgctaattaagcgttgtagtgtacctcaatacttcggtggtggcggtgagcgttctgcctttcgtggtgtaggagggcggtttacacgaggaggacgattacgttaa

SEQ ID NO: 307314 - DNA, 459 bp, Proteus mirabilis
atgactaaattagcgcaattaaaagcggtttatgatgaattggctaaaaagcgattaagtgttggcttctttgagtacgcaaaatatcccaatggaacaccgattgcttatgttgcctctattcaagagttgggctatcccgccggtggcattcctcctcgcccatttttacgtccgaccatgaatgacaaaaagcaggattatagtcagttaatttttcgagcagtgaaagcgtctgttaagggcaatatcacgctggataatgggctggcacaaattggtgcgacggtggcgggcgatgtgaaaatggcaataaaagcagtcacaacaccggcactggaggagtcaaccgttaaagcaagagcacgtcgccatagtaaaggtaaggccaccgataagccgttagtcgatactggccaaatgcttcaagcggttagtttcgcagtggaggataaataa

SEQ ID NO: 307315 - DNA, 372 bp, Proteus mirabilis
atgtttggtaacttaaatcgtattgcttcacgttatattccacagcaaaaggtgctttggtttcgatttaaagaacgggcacccgatgagcgagggaatgaccaaaattattattatgatcccgtagaagttcgtggcagttggcaagcggtcgatacccaagatgttcaatcaatgggattagatacgagccaagtgtaccgacgcctatatacctctcatgatattaaagctgtgcaacgaggtacatctcctgattttcttgtattcaatggtcgaaaatatgatgtggtgggcgatgcagactggtacgaacaagatggctggaaatcggtgatctgtatcgaggcgggtatttatgacggattatga

SEQ ID NO: 307316 - DNA, 516 bp, Proteus mirabilis
atgacggattatgatgttgatgtcgcaattcgcaaacaactcttgttgcagttaaatgaagtcggtattgagatccccgttaaagccggttttcaatctaccaagcaaggccgtgaagataatatggtgatgttttttcccatcaatgaaaacggccacggctggcaagggcgtaaatataacgttcaaggcaataaagctaatcaccaagaaaaccagttatccgaaaaaacgtaccaagttcaggctttcgttacccagttaggccgttattcagcgagtgatattaccgctattgtcagaatgatcgccaattcattgccctttgttgaagctctccgcaaacaaggcattggcgttcagcgggcaagcggtattcgaacaccttattttctgaatgaccagggcaactacgaacaaaacccctcatttgatttcaatgtgacatttaatcgcacacttcatcctgatacagacgccgtgagtgcgttgtatcccgatatctatcgtatttaa

SEQ ID NO: 307317 - DNA, 168 bp, Proteus mirabilis
atggttattgatgatattaaatatattcaggattatatatttttaacatcaatagatataaggcgttttgtaaaaaaactaatagaaactcaatatcctcaaataccggtattatcttatgatgagataacatctgatattgaaattaatgtattacaatctatttag

SEQ ID NO: 307318 - DNA, 306 bp, Proteus mirabilis; identical to SEQ ID NO: 180298

SEQ ID NO: 307319 - DNA, 252 bp, Proteus mirabilis
atgacaaatatcattctgtgtgatgtgactgccagcgtcagcgaacttaaaaacgatccggtggccaccgccagtgcccgcggcggctacccggtcgagataattgaccgtaaccaccatgttttttattgtgtgcccgcggctttgtatgaacaaatgctcgatgagctggacgaaaaagacctggtgcaaacgataacagaacgtcaaaaccagccgctgcgtgaagtggatctcaatcagtatctgtga

SEQ ID NO: 307320 - DNA, 1272 bp, Proteus mirabilis; identical to SEQ ID NO: 216672

SEQ ID NO: 307321 - DNA, 1890 bp, Proteus mirabilis
atgaattataaagaatttgcaaaacaaattctcgctattgttggtggcgaggataatataaagtcattagtacactgctcgactcgattacgttttacattacataatgaagataaaattgatccttcaaaagccaaagcaaatagtaaaatattatctgatgtgatgaagggaggacaatatcaactggttatcggtaatgatgttgataaagtatttaatgaactaacaaaaatgataaaaacaaataatactcctcatgataataataaagaccagaagaaacagtctatcgtaaataaaatattatcagcaattactggctctatcgctccggttatccctctgttagcgggtgccggtatggggaaagtgttacttattgtattaacgatgcttggttggttggataaaaatgaccaaacctattatatccttaactttatctttaatacggccttctattttatgccggtatttattggtttctcggcggcgaaaatatttaattgtaaccaatatttagctgctatggtctgtttagcgatggtcagccctgaatggacaagcttagttaaagccggtgagcctgtcgaatttatgcatattcctgtcgctttggttaaatattcatctcaactgatccctgccttaattactgtttggatgatgtcttatattgaacgctttattgttcgtattgtgccagaaatggttaaagtatttatggtgcctttattggtgattttagtttcgacacctattgcgttgattgcggtcggtcctgtcacttcatggttcgctcaattaattgctgatggggtgatcttaatccaagagcacactggttttattgctattccattattagtggctatttatccatggttagtatctattggtatgcataaagcacttagtcctgtcagtattatgttagtggagcaaaaaggttttgacccgattattcgtgtgatggcgctatgctccaacatgtctcaggctgctgcttctttagctgtttctgtacgtactaaaaataaaaccttaaaacaattagctttttctgccagtattaccgctttttttggtggtataactgaacccgctatgtatggggtgaacctcaaactgaaaaaaccaatgtacgcttgtatgattggtggtgctattgcaggattatttgctggtattgttaagttaaaagcgtttgtctatgtcactccggggttattaagtttaccaatgtggatatctgatacagataaccaagtagtaaatgcaataatcaccttattgattgccagtgtagccacttttattgcaactcttattattggttttgatgatcctactgatgacccaatccgtgacgaagaagaaaataataaacaagctgcatcaaccaacaaaaaaccacaaatagcgaatagtaaattacctgttgggttaatttcacctctgcaaggtaaaacggttgcactttcagaggttaatgatgaaacatttgcctctggcatcatgggacctggcatggcaattatccccacaacaggaaaagtgattgcacctgcagatggcgttgttgatattaccttttcttctggtcatgcgattggcttaacactggttaacaatattgaaatgctgatccatgtggggattgataccgttaacttagcgggacagcacttcacatgctgtgtcgttaaaggtcagaaggtgacaaaaggtgatacgctaattgaatttgatttagatgcgataatagccgcaggctatgatccaacaacgatgatcatcattactaatgatgatcataaactagacgttgttcagaccgataaaaaacatgtcgaccaaaatacagttttactaaccgtgggttaa

SEQ ID NO: 307322 - DNA, 1914 bp, Proteus mirabilis
atggatgatattaataaatatcaaaaaattattaatgaaaagaatgcggtagaagttgagttaaattcactatctaaccttgctaagctaaataaaacgcaaacaagaagacaagcaacattacaaagaaaattacagcgtattaatgatgctgagaataaattacctgcattacaacgtagcgttgatattcttgataaccctcgcaagtttagaaatgaacatcgtcgtttaacacgaacagcaaattcattaactcgccatgacagaattagacagtccgcattgaatcgcatgacacctttagagcgtgaagagttagatgctgcagcagatgatatcgttaataaaattatcggggcaccgtcaggcattgtacccagtgaactgatcccagatgggttagttaaacgtgctggttttacaaaagatagaacgcttaacattcctgatgaacgcattaaagactatctcgaatcagatgttaactatgtgatggaaaactatattcgccaagttgcgcctgaaattgaactcacggctaaatttggccgtgttgatatggataatcaaatcaaagcgattacagaggaatataaccaacttattgctgatgcaaccacacctaaagaacgcagtcgattagaagcacgaagagaggcggatctacgtgatattcgcgcgatgcgtgaccgtttattaggtacttatggcgcacctaaagatccagcaagtctatttgtgcgagctggccgtgtggctcgtcacgttaactttttacgtttattggggggtatgacaatatcatcgttacctgatatggctcgtccgattatgcaacacggtttacgtagtgcgttaaaaccattgggtaagatgctaactgatatcagtgctatgcgcattgctaaggccgatttgcgtgaaatgggtattggccttgaatatgcattatccattcgttctaaagtgattgctgaccttagcgatccctatagcagacgtagctatttagagcgtggtttacagtggtcatcacagaaatttggtaacttcacattaatgaaccaatatacagacacgatgaaaatgtggtctgggcttattactcaatctaaggtactgaaagcagcaaacactttagatgctggtggttcgttaagtaaacgagaaataaagaaactggctcatataggtattgatgaatcaatgctaaagcgtatagcagatcagtttaaacgacacggggaagacttagacggcatgttaacagggcatagccatttgtgggatgatcgtgttgtgcgtgaaactttccaagcggcagtattaaaagacgtaagaaccacggttatcacaccgggaattggtgatacaccattaatgatgagcagtgaactaggtaagattgtgatgcagtttaaaaccttcttctttgctactcacaatagagcgttggtttcaggcatacaatcaggtgatgcatcattttactatggagcattgcttcaggtagcacttggatccctagtctatgtcctcaaggctaaaatggcaggacgagatattaataccgaaccggctaacttagtgaaagaagggttagactggtcaggaatgatgggctggttaggtgagcctaacaacgtattggaaaaccttagcggtggtacttatggtatgagtgccatgtttggtgggccaccagcctcacgctatcaaagccgtaatgggattggtgcattattagggcctacatttgaccttggcggtgatattaaaaacatcacatcaggtgtattaaacggtgaatttgatgatagagaagtgcgatctgtgcgcaaactattacctttccaaaacttgttttatttgtcaccattattgaatcaggttgaagaacagatgaagtaa

SEQ ID NO: 307323 - DNA, 399 bp, Proteus mirabilis; identical to SEQ ID NO: 298188

SEQ ID NO: 307324 - DNA, 2190 bp, Proteus mirabilis
atgcctattactataactttaaaagataataaactttttacatatggcttaccaccaaagctaattgctaaacgggatgtcgtagatggtgagagtaaaaaaaatcaaataaaattgccattaaaatcaaaagataaaatattagcgataaaaccggtgttaaataaaatccaacttgtggttgataaaggtaataaaataaaaatatattactttgatcctctacatatttttgcattaaaagattatcattatgaaatcactcgtttaactcaagagccaccgttatctttttattcaatggttggagaaaataattataaaaactatcactcaggacagccattttctactcaaaaaataggtaattttagtgctaaaaatattccctttttttcgtcggctattgataatgcaagggttcactttgatagagcaaaacaacaatatgcattaaaaaaatatggtgcaatggtaaaagatatcgcgaaaagtcttgatcctggttttagagggatgttttctactataaaagctatagttaattctgctacattaccgagaacaattaaaacagatgctttaaatggtgtaaaaaaggtgattaaacatgattataatctgcttaataaatatattaccggaattaacaatggtaaatctcaaggtgaggttgtttattctttagtagaacaattaaatgataaagagagcattacaattagccagtataatgatatccgtgcattctttggtattagtgcatttcatttatctcaaaatattggtgtgagtgcgtttcttttagctaattttgcgaaaacacatgccctaacaatttcaaaaaataagcaagatgaagttgtattctcatttgtaaataaaatggatgcagggattgctacgggcttatctgctgggattatgaacaatgaacaaaaatggagagaaggggcgtttaattatggttttgtaacaccgttaatggccactgtgatactcgattatcattatgaaaaaaaatctaatttttcatttaaaattcaaccaaaagatttagtcgaatttattaatcaaggggtatctcttacagaaagtgaacttaaggataatgcaacgctggaatttaatagaacacaaaacgcgtcattaggtgttgaacttagaagtgaagtcagttttgatgtgggagtttctgctaatgaaaatatagaattaaatttaccgagaaatgcggttggtgctaatctctctttaaaaataataaatgtcattcacaatataaataaatttattggtcatggagagaccaaagcaaaacagttggaaaaaaatgttgatgttgagtattttagcggaagttttgaattataccgagatttaaaatttacaccttcagcgacaaaagcatcgcataatattcactggtatccattgacatcattgaaaagttttgaagtcatgttagaaaaaaaagttaattcactatttaaacatagaatttatgatggcaaaaaaagagtacttaaaataaataacctatttgataaataccctgttcaatacgatgttaaaagaagtataaataaacttgatcaggtttatttacagttggatgcaaataagaaattaaaaaacaaactaaatccacaattgatggagaatgatctttctctcaagagtgatgtaatagataactcaatagatctagtacacaataataacagagtacaacaattcttagctgatttaacagaaaagaaaaaaatactttcttcacagaaaaaaaataatatgaatgaaaaatttaagccatattttatttctaaatatcagctaaatagtgaggggagagtgcgttattcagtgcttgaaactcaactggaagagcttatcaatgaagtgaaaacagatgaaaatctaacagttaatgatataaaagataaattagataatttctataataatgcgaaacaagagttaaataatattgaataccagcttaattcaatagatgtgatgtctataagtgaactcgtcgataaagcaaaatcatttcctcttgcttttttacgattagaaagcaaaaagtctattatgcatcatcaagttaaaggtgaaattaattttttatatgataaatatgaaaagcaattggagaaaataaccactaattattattttcattaa

SEQ ID NO: 307325 - DNA, 705 bp, Proteus mirabilis
atggcgtggcatagcgataaatatggcttacgcaatgaataccgctgggcactttcagaagataatctttggcgagtgattgaaaacaaaacgagcgaaggcgaaagctatcgtcttgaatatgatgatatcaacctcacacgaaccgcttattggcacgatggttcaacctcattttggcaacttaatcatgatcaccaaattattcattataccgaccgtacaggcattaaaacggcgctaatttgggatgagtttggattaccttgcggttgtcgcaatgcgttgggtcatacacatattagtgaatgggacgcactgggccgactactcagcataacggatggtaatggtaaccaaacgcgttggcaatatcagaatgaacgcgagcgccttatcactgtattttggccggataacacagagtcgcgtttagcgtatgacagtttggggcgactggttgaagaagctcacttaggcgaccgagtcttcacatccgcaccacgcacaatattactcgactatgatgcggcgggtaaccttgtcaaacgtgagaccttaactgatcgctaccaatatcaatgggatagtatgaaccgcctattggtcgccagcaaacagcccaatcaacgtggtcttgaaatgggtttgcaagcgaatcaaagtccattttacctacgatgcacttggccgcattactcgtga

SEQ ID NO: 307326 - DNA, 228 bp, Proteus mirabilis
atgttttccctaagatattacttatataaagaatattatatgaataatttcataattagtttaaaagataataatgaagatagacgtaaacatatatctaatcaatttaattcaaaaaagatccctttcttattctttgatgctataaataagaataatttagatatttcagaacgtttaaatataatattgatgtggctggaatttttgaagacgatatttatctag

SEQ ID NO: 307327 - DNA, 498 bp, Proteus mirabilis
atggcaattcctaaatcagtagcaaacggcttaatttctggtgttgtcggtgaaattagtcatgcaggccctattcgcgctgtttctgcaattcttagttcagcagatgaaaagctgaatattttcggtcgcgcctatacctacaaagatgattcagtggaatccgttcaagtggggggaaaaggggcatttgcggggatcatgattaaccctaaagcctatcgtatcgaagaacaatttgctcgtaatggcacacagggcgaattcctgacaatgggggaagttttcgttgagctaaaagaagtggcaggaaaaatcaacgtaccggttgtcttcgatgaagctgacggctcgctatcttctaaagccaccattagtgccggtgatcgtgtcattggttttatcagccgacatcttgaatccacagaaagtgctcacttgggcattattcgtttaacagaaatcccatatccagcatctccaaaggaaggtgaataa

SEQ ID NO: 307328 - DNA, 228 bp, Proteus mirabilis
atggaaaaaataaaaaacaaacttataaaagcattatttattataacaataggattaatatcacaaaataaaccattaattgaaatcaccataataaataatgatattaaattttataacattgaaaccagtaaaaaaaacaaaataattaaggagatagataatcatttcatactcaagagtaatatggctaattttaatagccatattaagaaaaaatacaaataa

SEQ ID NO: 307329 - DNA, 879 bp, Proteus mirabilis
atgaaaaaaatagtaatcgcacttagtttgttattgttgccttttaacttaatggcaaaagaaaacaaaaataatgaacgctgggttattgctggaggctctataacggaattggtttatgccataggtgctggcaataaggttgtcggtgttgatgaaacaacgtcttatcctgaacaaacacaagcattgcctcatatcggatattggaaacagttaagtacagaaggcattctgtcattacgcccttctacttttgtgacttgggatgatgctgaacctagaatggtattacgccaactcgcacaacataatgtaaaggttatttctttaccaagaacacccgctacgtttgaattaatgcttaaaaatattcgtaccttagcggtttcattagataaacagacagaagcagaaactttgattagttcactgcaatctcgtttaacgacgatcacagctaaaaataatcacattaagcgcaaagtaaaagtattgttctttctttcaccaggagggggaattcctcaagttgcaggaaaaaacagtgttgcagatgccattttggcattagcgggtggagataatatcgccactcacgaaaattatcgtatctatagcgcagaagccattatcgcggctgacccagaagttatcgttataaccacacaaagccaacaaaaccatactggcggtataagatcctctgaaggattagcgtccgttcccggtgtctcaatgacacaagcatggaaaaatcaacgcattattgaaattgatcaatcccttattttgggaatgggacctcgtattgtggatgccgtggagttattgcatcaacaattttatcccgctgatcctgttaatgataataagtag

SEQ ID NO: 307330 - DNA, 1329 bp, Proteus mirabilis
atggatacaaccaaagctggttctatcgcacagggtaatacccaaagtgattacaaaacatggcgtaagtcagacacagtatggatgctcggtttgtatggtacagctatcggtgctggcgttctgtttttacctatcaatgccgggattggtggcttaattcctctgttgattatgttagtacttgcttttcctatgaccttttttgcacaccgtggtatgtgtcgctttgtgctatcaggtaaaaatccaggtgaagatattactgaagtggttgaagaacactttggtaaaacagcaggtgtattaatcactctgctctatttctttgctatttatcctatcttgttggtttacagtgtcgctatcactaatacggtagaaagctttattgttcaccaaatgcatatgacagcaccacctcgtgcgattttatcactggtactgattgtcggtattatgtgtatcattcgctttggtgaacaagctattgttaaagcaatgagtgtcttagtattcccattcgttgccatcttgatggtacttgctttatacctcattcctgaatggaatggtgccattcttgatacgctctcttttgatcacgcctcaacttctggtatgagccaaggcttgttagtaaccttatggttagctatccctgtgatggtgttctcttttaaccactcacctatcatctctgcttttgctgtggcaaaacgcgaagagtacggtgacaatgcagagaaaaaatgttcacgcatcttagcttatgctcatattatgatggtgatcactgttatgttcttcgtgtttagctgcgtatttagcttaacaccagaaaatttagcagaagcaaaagagcaaaacatcagtattctgtcttatcttgctaaccactttgaagcacccgttatcgcttacattgcacctttcattgcctttgttgcgattactaaatctttcttaggtcactatttaggagctcgtgaaggtttcaatggcttaattatcaaagggatgcgcggaattggtaagaatgtcgaaaaagatcgtttaaacaaaatcacagctctgtttatgttggttacaacgtggatcgttgcaacattaaacccaagtatccttggtatgattgaaacactgggtggcccaatcatcgcaatgttactgttcttaatgcctatgtatgctatccgtaaagtaccagcgatgaaaaaatatcaaggccatattagcaacgtatttgttgttatcatgggtctgattgcaatctcagcggttttctacaccttaggtaatactttcattaattatttctttaactaa

SEQ ID NO: 307331 - DNA, 903 bp, Proteus mirabilis
  misc_feature (884)..(893): n is a, c, g, or t
atgaaattaatagaaaatagcactgcacaattaaataagagaataaaagtcgtattcttaatcggctcattttctctatttactcaatcaatgccctctatatttgcagatgattatgaatttgatccttctttactattaggtattaaaaataacatcaacattaatcagcttcatgatagtaattatgtggagcctggtgattatgatgttgacatctacattaataatcgttttattgaaagaaaaaccgtgagttttcaattaaatgataagggtaaagtcacaccttgttttactcaaaaacagattgaggaaatggggctcttgctagatatcgagccaaatcaagataataatcaatgtttaatattgagccaatttaataaaaacatcgtagactcgtatgatgcttctaactttagaataacgattacagtgcctcaaattttattaaaacgaaaaccacaaggttatgtcaatgaagacgatttagatgcgggtaacaccatgttattcagcaattactctggtaattactataagaataaatcgaacggacaaacttcagactatggttttggtagtattaatatgggcgtaaatctaggaacttggcaatttcgacaacaagcatcttactcttataattcatcaaaatcgggaagtaacagtgaatttaattggataagaacttatctacaaaaaccattactgacattaaagtcaatgttagttgtcggtgatatttatacagcaggatcacaattttctagtctggcatttaaaggtattcaattaatgtctgatgaaagaatgttgccggattctcaaaaaggttatgcgcctgttattcgcggtattgcaacaacgactgctcgagnnnnnnnnnngctcgagtag

SEQ ID NO: 307332 - DNA, 1347 bp, Proteus mirabilis
atggctgaattaggcggttctagagaatccgcacaggctgatttatccgcgatggccaatgcgtttggtaacactaaagactcaatggaaaaagtacttcagacagcggacaaagtccaaggcatgagctttgataaagcgaagaaaacactggagggcatgggggtctcggacgaaaaaaccattgagttaatgatgaaagggcgcaaggaattagagcgcacaatgggtattcaaaaagagtattcaggcattagtaaagagagtattgaaagttcgattaaatttaatagtgctatggcgaaatttcaacagtcatcagggttgttgaggaatagctttttagaaatggtgatccccgctttatctaaaggattagagtggttaacaaaattagtcactttttgtaaggaaaacaaaaacattgtagtgggattttttactgctgttgcaactatattgatggggaaatatatccatgcaatgaagttggccagtattagtacatggacaacacttttccctattattgccatcatcgcggttattgcactattagctaccgcatttgcgattgtttatgacgatatcatgaactttatcgacggcaacgattcgatgattgggcgtattcttgaaaaataccctcagttgaaaattatcattcttgcattatgggaaacattcaaaaagctctttgaatatctaaaagttatcgttggtgttgtggcagatattgttgtcgctggttgggagctaatggcttcaggcttaaaagcttatgttaagtttctcattaattgtatctctgtcattgcagggtggggtaagtcctttgcgggtgtttttactacggtgacggatgccgtagtgggtgcgtttgaatggatgtgggagcaagtcgaaaaaatcattggttgggtaaatacagggcttgatgcagttaaaaatggttggaaatctgctaaagagtttttcgggttcggtgacgatgaagaaatcactgtcaatcaaaacgtagagcgtaacgtcaatgataatggtgagattgaatatgccattcctcaagaaaaaagccaaacgacacaacagccaccggttagacactctatcgctcaagccaatgcacagttagatgcgatagccaacaatgcgatgaacccgattacaagccaagctattagtaatcaatccaatgtgaagaatgaaagtaacgtaagcattggggaaatcaaggttgaaactcaagcaaccgatgcacaaggtgtcgcaagtggacttagcaatgcgctacaagatgaaatagctaatgttaatcaacaacattctagtggcttgggaggttaa

SEQ ID NO: 307333 - DNA, 528 bp, Proteus mirabilis
gtgcttacagaagtcaaaatctttgatttagagtcgttttctacactgtttgatagtgtgagtccgattcaagttaatgtgagagatgaacataaggcgacgcaatttcaagttgaaagtggtgaaactcgcagtgatcatgtgatcattaaccccgttgagattggtatggatttggtgttaacgggagagatgaaaaacatcttttcatcgatgcaacaagtttttgatgaacacaaactggttggtattcaaactcgagtaaaaacctatcagcccatgttattgacgggttttaatcatgatgaaatacccgacatgattgatgccataaaattgccactacggtttgttgagtggcgtactgttgagcctgaatacggagaattaccgcctcgatctacacaaaagccaacgcagtcatcaacggtaaatcgaggaaatgtacaaactaaagacgcggatactgagactaagaaaaaaggttcgttcgcaacacgtatcgcagatggtgattggagcttctaa

SEQ ID NO: 307334 - DNA, 528 bp, Proteus mirabilis
atgatcacagaggttaaaatttttgatttagcgtcgttttctacactatttgatagtgtgagtcctattcaagtcaatattagagatgagcataaagcgacgcaatttcaagttgaaaatggtgaaactcgcagtgatcatgtgatcattaaccccgttgagattggtatagatttgctattaacgggagagatgaaaaacatcttctcatcgatgcaacaagcttttgacgaacacaaacttgttggtattcaaacccgagtaaaaacctatcaaccaatgttattaacgggttttaatcatgatgaaatacccgacatgatagatgcgataaaactgtcgctacggtttgttgagtggcgcaccgttgagcctgaatacggagatttaccgcctcgagccactcaaaagccaacgcagtcatcaacggtaaatcggggaaatgtgcaaacgaaagacgccgatactgagactaagaaaaaaggttcggtcgcaacacgtatcgcagatggggattggagcttctaa

SEQ ID NO: 307335 - DNA, 1347 bp, Proteus mirabilis
atggctgaattaggcggttctagagaatccgcacaggctgatttatccgcgatggccaatgcgtttggtaacactaaagactcaatggaaaaagtacttcagacagcggacaaagtccaaggcatgagctttgataaagcgaagaaaacactggagggcatgggggtctcggacgaaaaaaccattgagttaatgatgaaagggcgcaaagaattagagcgcacaatgggtattcaaaaagagtattcaggcattagcaaggagagtattgaaaactcaattaaatttaatagtgctatggcaaaatttcaacaatcatcagggttgttgaagaatagttttttagaaatggtgatccccgctttatctaaaggattagagtggttaacaaaattagtcactttttgtaaggaaaacaaaaacattgtagtgggattttttactgctgttgcaactatattgatggggaaatatatccatgcaatgaagttggccagtattagtacatggacaacacttttccctattattgccatcatcgcggttattgcactattagctaccgcatttgcaattgtttatgacgatatcatgaactttatcgacggcaacgattcaatgataggtcgtattcttgaaaaatacccgcgattaaaagtcgttattcttgcattgtgggaaacattcaaaaagctctttgaatatctaaaagctatcgttggtgttgtggcagatattgttgtcgctggttgggatctaatggcatcaggcttaaaagcttatgttaagtatttgctgagttgtatttcagtcattgcaggttggggtaaatcctttgcaggtgtatttaatacagtcagtgatgccgttgtgagtgcgtttgaatggatgtgggagcaagtcgaaaaaattattggttgggtaaatacaggacttaatgcggtcaaaaatggttggaaatccgccaaagagtttttcgggttcggtgacgatgaagaaatcactgtcaatcaaaacgtagagcgtaacgtcaatgataatggtgagattgaatatgccatgcctcaagaagaaagccaaacggaaaaccaaccaccggttagacactctattgctcaagccaatgcacagttagatgcgattgccaataatgcaatgaatcctattaccagccaagctattagcaatcaatccaatgtgaagaatgaaagtaacgtaagtattggagaaattaaggttgaaactcaagccacagatgcgcagggaatggcatcgggcgtaaaggatgcattgcaagatcaactcgccgattttaatcagcaaaactcaacgggagtagcaaaatga

SEQ ID NO: 307336 - DNA, 558 bp, Proteus mirabilis
atgaaaatattaaaaacagagagacttatattacgaccatggaaactttctgatgcgtcaagtttgtatcaatatgcaaaagatgaacgcgttggcccaattgcaggttggccagtgcatagaagtgttgaagaaagtgccgaaattattcgcactatatttatgcgtgatgatgtttatgccgttacgttaattgatgatgatcttgtcataggcttagttggattatctttcgcaaatgagagtaatttcccgattggggataatgatgctgaagtttcttattggattggtgttccattttggggcaaaggtttaataccagaagccgtaaaagaaatcagtcggtatagctttgaaacactggaattagataatttatggtgtggctatttcgctgataatgagaaatcacaaaaaacacaagaaaaatgtggatttaaattccatcacgtcattgaagaacagtacgcagaatttttagatgaagtgaaaattgaaaatatttgccgcttaactaaagatgagtggattgaaatccaaaaacaagtctattaa

SEQ ID NO: 307337 - DNA, 846 bp, Proteus mirabilis
atgctgaaccaagtattgtcacaacttaatacttcaccgcaatatgccattatgggtgaaagtaatatgatgaatgaaataggttatcctttaccattatcctatatcgtagtcatgatttgcttagaagggagggcggtaatcaatattagttttcaaaaacaggtgatcaaagcgaatgatattcttattttaggcgatgatatgatggcggttttgagtcgaaaatcagcgaattttcgcttattctattgttttctcgataaatcttttgcttcagaaattgcttattctctttcaaatactttatttgcttttctccatgacaaccctatttgccatccacataaagaacaatatgaagccttaaatagatggattcaacaattaacacatatagatagcagttattctgaacacagaaaattaatgttaaaaaaccacttacaaaatctcttttttgctattactgaatcaatacccgctcatttctctatcgccaaaaaagaatttagtcgtaaagaaaagctctgctggcagttttgggaattgattggcaagcattgtttagcacatagggaggtggctttttatgcaaatcagcttaacattacaccgttttatttatctcaaataacaaagcaattctttaatgatgcgcctaaggctttgattaatcgtcaagttatccttgaaataaaggcgttattaatgcgcacttcgctgtcggtaaatgaattatcagtgaagctccattttgatgatccctcttatttatgccgatactttaaaagagaaacgggtaattctttatctggttaccgtaaacaacaccaacgacaataa

SEQ ID NO: 307338 - DNA, 480 bp, Proteus mirabilis
atggaattagaacctaaagggtatcaactaataatatcaatgccttcagcccataatattagccctattatcgcaaaacgtttagcaaaaaaatttaatgccacatatttaactgatattttaagaaaaataacagtcgataatgcttttcaacttctcgataaagcagatattaatattgaagaggctaaaagtcttagtttcaaaattaaattacaagcaaaagaagttggacttaaaggagggttttcactaaaaagtatccctactgaatttaggaatatatttccaccatttgttttaaacacacaagcatcatccaatactgaaaaaatcagaatattacttgtcgatgatcttatggctacaggaacaacattaactacagctagggatatcattgcacaacagtatccaaatgccattatacatgctatctgcctattcagttcaataaaaaaacaaaacaaaaaaacttga

SEQ ID NO: 307339 - DNA, 210 bp, Proteus mirabilis
atgggattaataattcaagagcaatgtgttattgttgatcataattgccccgactggctaataactcagtctgaagggaatccaactattgattatacagatggcttaaaagtttatgctatttttaaaagacaattcatttcaggtaaaagaagacgtaatagaaaacaacgtcaactgggggataattgtcctttaaaatatttctag

SEQ ID NO: 307340 - DNA, 927 bp, Proteus mirabilis
atggatacgttgagccaactcttatacctttctcaagggcaattgcaattagatgtgttttgtcaaatgaaaggacatttttccttaccgcatgtttcatctgttgaacatgaaactatttttcacttagttctatcagggcagtgttatgttcagattgaaaaatcagcccctatagttttatccgaaggtacttttttaatgttaaacagaaggcaatcacataccctttggagtggagaacgagatatagaacctcccccttttttgcataaaaataatggcttcttacctgttaagtacacaaaatctgaagatcagactcaacatgttgatttgctttgcggacgaatggcttatgctaaaggaagcgggttactattattaaatgggtttcctgatatggtagtggcaaatttggtggaaatgccagggctaacagtattgaatttatttagccagttgcttcgagaggaagccattaatgcaaatcaaggggcggctgcgatattaaatgggcttgctcagactttattcgcttttgcattacgtgtttatgggcaaaaaccagatataaactcaagttggttagcattattagctgaacctcggttaagtcgtgtatttaattctatgttaaatgaaccacaaaaagggtggacacttgattctttagctaatgtcgcttcaatgtcacgagcgacttttgtgcgtcaatttaaagcaacggcgaatacgacacctggcgaagttctacaatccattcgtatgctaaaagcactttcattattacaacaaaataaatatacattatcagatatcgcagaaagagtcggataccaatctgaagctgcatttagtaaagcatttaaaagtgtatttaattgcagaccagggcagtggaagaagcaacagagtaaagtgtaa

SEQ ID NO: 307341 - DNA, 1404 bp, Proteus mirabilis; identical to SEQ ID NO: 32307

SEQ ID NO: 307342 - DNA, 909 bp, Proteus mirabilis
atgagtttacctgatattcatcgtgtgcaatcattttttttgtcgttgcaagatagtatttgccatgctattgaaaatatagaccaaaaagcaacctttcagcaagataattggcaaagagaagctggcggtggtggtcgtactcgagtgctcacccaaggtgctatttttgaacaagcgggtgttaatttttcccatgtttatggagatgccttgcctgcatcagccacggctcatcgccctgaattaagcggtcgtcgttttcaagcaatgggcgtttcattagttattcaccctcttaatccttatattcctacttcacatgcaaatgttcgtttttttattgctgaaaaagagggagaagctcctgtatggtggtttggtggaggctttgacttaacgccttattatggatttgaagaagatgttatccattggcataaagttgctaaatctgtgtgtgatccctttagccaaaattattatgctcgatataaaaaatggtgtgatgactatttttatttaaaacatcgtaacgagccgcgtggtgttggtggtctattttttgatgacttaaatactcctgatttcgatcactgttttgaatttgtacaacatgtcgggcagggttatctggatgcctacttgccgattgtcgaaaaacgcaaatctataccctggggagagcgtgaacgccaattccaactttatcgccgtggccgttatgtcgagtttaatttggtttgggatagaggcacgctatttggtttacaaagtggcggacgtactgaatccattttaatgtcaatgccaccattagtgcgctttgcatatgattatcgccctgaacctaatactcccgaagctaagctgtatactgattttttaattcacaaagagtgggtatag

SEQ ID NO: 307343 - DNA, 354 bp, Proteus mirabilis
atgggttttgctatttttttactttctggctgtgctacgccagaaaaatggcaagtaaatatgaaaaatcccacacctttagatatcgctaaaaatctatgtatgcaagaagcaaaacaacgctaccctgagcattatttgagttcaacgccaaattatagctatccttcttcttcaacgataacagtagatggtaaagaagttactattcctaattcaaattatcattcctattctcgttatgatgccaatgaagcagagcgtaaacagtattttgatatttgtatgagaggagaggggtgggaaaataaaaataaagtgactggattactcgcctttttatttaatgactaa

SEQ ID NO: 307344 - DNA, 555 bp, Proteus mirabilis
  misc_feature (397)..(406): n is a, c, g, or t
atgcactttcagtatggcgaaacagagataaacacattaaaaaaacgtgataagcgcttagccaaactcattgaaagaataggagaaattaaacgtccattaacacctgatttatttacagcattagttaaaaacattattgaacaacaaatttcggtttctgctgccataaccgttaatcagcggttactcaatttatgtgacggtatttacacaccagaacgtatcgcaaaattatcagaacaagagatacaacagtgtggaatgactatgcgcaaagctagttatattatcggtattgctgacgccgttatttcagaaagattagatttaaataaaattcctgagatgacagataaagaggttatcgatactttaattcaactaaaaggtatannnnnnnnnngagacttggctattcaacgtggaattatgcgtctatatcgccataaaacattagataaagtacgcttcgaacgttaccgaaaacgctattcaccttatggttccacggcatcgctttatctatgggcattatctaaagaatcagagtga

SEQ ID NO: 307345 - DNA, 1158 bp, Proteus mirabilis
atgttagggccattagccgccgcgaaattaagcttgtcaattttaggcattaaaggcggtagtgcgctcacactgttattaaaaccgataaaattattaggtagtgcatttttagggttgggtaaagccatgttagctaaccctattttgttggttattgccgctattgcggctgctgtttatctgatttataaaaactgggacaccattggcccctacgtttacaaggtatgggataccgttaaaagatatactgctatcgcatggcaagcgctaaaagatactattaagagtgcatgggaggccatcaagtatatattctttaattggacaccgcttgggctcattattaaacattggaattcgatagtcagttacacccaaacaacatggacgatgataaaaactaaaatttcagatgcttgggaagggattaaaacaacacttaaaaacggttggaataatattgttaagtctgtacaagaaacgtgggaaacgataaaaaccacgatatcaacaaaatggaatgaaattgtcgaagacaccaaagcattaccggctaaatttttgcagtttggtagtgacctgattgatgccattattcaggggatcaaaaataaatgggcggactttaaaaatagcattggggaattggcaaccgccgctaaggaagcactcacccctgagtttatgaaaagtaatgatccgaaagtgcagtctgcgttagattcgtacaacagcaactttgccggtatgtatgattccggcggttatattcctcgtggtaaatttggtattgcgggagaaaatggcccggaaattgtcgaaggccctgcgaatatcaccagtcgtaaacacactgcgatgttagcggctgccgcattatcgttaggcagcgccttttcgttacaggcacaaaatgccccgttgcacccacacagtttgcccgttgaaaactatcgtcctgctccggctaatgtgaatattcaacaacagcgttatcaaggcgcgccggcacattatgaaattaatattcatcctcaaccaaaccaatccgcgcaagatattgcccagcttgttatcgcggaaattgagcaccgtgagcgtgaaaaacaagcacgattaaatagccgttatcaagacagtgaggtgtggtaa

SEQ ID NO: 307346 - DNA, 441 bp, Proteus mirabilis; identical to SEQ ID NO: 305472

SEQ ID NO: 307347 - DNA, 564 bp, Proteus mirabilis; identical to SEQ ID NO: 305471

SEQ ID NO: 307348 - DNA, 345 bp, Proteus mirabilis
atgaatatcgcagaacttatccgaaaaatacaaaacttgatccgcactggcgttgtgattgatgtcagtgcggaaaaagggtgtcgagttaaaacgggcgacaatgaaaccgactggcgcccgtggcttactgcacgtgctggtaactcgcgctcatggtgggcgcccaatgttggcgaacaagtgctattgctatcaatcggtggcgatttaactacctcgtttgtgttgccggcgatatttagtgatgatttttcagagccgtcaacctcattaaccgcgcatcgtcatgagtataaagacggggcagtaattgaatatgagccggcaacacaaacgaggtag

SEQ ID NO: 307349 - DNA, 981 bp, Proteus mirabilis
atgtcacgccataatccatttcaaacagtaagttgccgacctgatctagaaaaaacagcccaaaaactcgacttaattgtcagttgtgatgtgtatttaagtgaaagtgcatcttatgcagattatctgttaccagaaagcacttatttagaaagagatgaagagatttctgatgtctctggtttaaatccagcttatgcattaagacagcaagttgtcgaacctattggtgatactaaaccaagttggttaatttggatggaattaggaaaaaaactgggattagcgagttattttccttgggaaaacatgggagttcgtcaactttatcaagttaaaggggatgaaaatctctataaagagatccaccaaaaaggctatttatcttatggtattccgctacttttacgtgaaccatcctatgtaaaagcctttgttgcacaatacccagatgctatcaaacatgttgatagtaacaatatgatggaaaaatctctttcttttaaatcaccaagtggtcttattgagatctattcgcaagagttagaaagtctattagagaattatggtattcctcgtttccataacttcccattaaaacaaaaagatgaactctattttattcaaggaaaagtcgcagtacataccaatggcgcgactcaatatgtacctttattagcagagctaatgtggaaaaatcctgtctggttacatcctgatactgcaaaaagtcatggaattaagcatggtgatgagatcattttagaaaatagcgtaggcaaagagaaagcccatgccttaattaccacaggtattcgtcctgacacagtgtttgtctatatgggttcaggctctaagaccggcgaaaaaacgccagcaaccacaaatgggatccactgcagtagtttattacctcatgaaattagccctgtttcaggcactgatgtacatacttcaggcgtcaaaattagtctggcttaa

SEQ ID NO: 307350 - DNA, 231 bp, Proteus mirabilis
ttgatttcagttaaaccttcaaactcattggcattaggtgaaaatgtttatgataaagatagaaatattgttggcatggtaggacaaagtaaccagatttatgtcagagtcgaaaataaaaaagggacactaactgtcggtaaagatgaagatagttgccaaatcaattactcaataccagaagaaaaagaagacgataaactcattttattatcaggtcaatgcttatga

SEQ ID NO: 307351 - DNA, 225 bp, Proteus mirabilis
atgaagcctaattcaaaaatacttattattgaaccggttatttttaaaaagaatgtacctgatatggctaaatatatggatcttctatgcatgtctgcatttcctgaatcaggtgaacgtacagaagatgaatttattgctttactagatcaagcagatttgaaaatcaataaagtgattaaaacaggaacatataactcaatactagaagttgttattaaataa

SEQ ID NO: 307352 - DNA, 615 bp, Proteus mirabilis
atggccattatgtccgccacggattatgaccgaaccaatgcgacaacaaactatatgtatcgtcaatttggtgtcacgttcccatcgcaaatcacgaccgatatcgatgcggatcgcttagataaactacgggtgaactattacggagaaacggctgtatcgggttcacatatcagtttttatcaacgtggcttcttatgtggtggggttgctaacccattagatatgagtgtccatgctaatgagcaatggttaaaagcctacatcgcgcaacagtggtttagtttacttatggccacacgcggagtacccgccaataaagacggtgaagcacgggcaatgatggtgattgcaggggtggtaactaaggcgattaataacggcactattctagcgggaaaaaccttaaccgatgtgcaaaaaatcgcagtggcagacgcttctggtgatgatttggcatggcacgatgtacaaaacaaaggttattggtacaacgctcaaattgtcgaaaacacaggcccctctgatttacccgagtatgtgatgaaatacgtattaatttacggtaagggcgactgggttcgtaaagtcgaaggctctcacaacttagtgtaa

SEQ ID NO: 307353 - DNA, 498 bp, Proteus mirabilis
atggcaattcctaaatcagtagcaaacggcttaatttctggtgttgttggtgaaattagtcatgcaggccctattcgcgctgtttcagccattcttagttcagcggatgaaaagctgaatattttcggtcgcgcctatacctacaaagatgattctgtggaatctgttcaagttgggggtaaaggggcatttgcggggatcatgattaaccctaaagcctatcgtatcgaagaagaattcgctcgtaacggtacgcaaggtgaattcctgacaatgggtgaagtttttgttgagctaaaagaagtagctggaaaaatcaacgcgccagttgtgttcgatgaagctgacggttcgctatcttctaaagccactattagtgctggtgatcgtgtcattggttttatcagccgacaccttgagtcaacagaaagtgctcacttgggcattattcgtttaacagaaatcccatatccagcatctccaaaggaaggtgaataa

SEQ ID NO: 307354 - DNA, 705 bp, Proteus mirabilis
atgagttcagctgcttgtatggacaaagatattactaaacgcctacttgatggtgccggattagcggttgcgccatttattactattatggcgcatcaaattaatgatattccttacaacgaaatggttcgtcaattaggacttcctttatttattaagcctgcaaacctaggttcttctgtaggaattagcaaagttaataatgaagaagaattcaacgctgcattagcaatggcttttgaatacgatcttaaagtgattgttgaaagtgctattgtaggtcgtgaaatagagtgtgctgttttaggtaatgaggatccagaagttagcccttgtggtgaaatcgtattaaacgatgctttctatgcctataatacaaaatatatcgatgaagacggtgctagagtcgttgtccctgcggtaatggaagaaaatacgagtgtgaatattcgccaagttgcattaaaagcataccgtgttcttaattgcttaggtatggctcgtgtagatgtgttcttaactcaagataatcgtgttgtgatcaatgaaataaacacactacctggttttaccaatattagtatgtatccaaaattatggcagagtgcaggtttaggctatcaatcattaattactaaattaattgagttagcactagatcaccatagaaaaacggctgttttaaaaacgaagtgtgaactttaa

SEQ ID NO: 307355 - DNA, 342 bp, Proteus mirabilis
atgcctctttacgcatattgcaccttatcaaatgaccagaactataccgtgaaagacgggaaagtgtttattgccggtcaagcgaacgtgatgaccaaacacatgtacacaccacgtggccgtgtgacggaaatttctgacgagcaatacaaacagctcaaagaaaatcacgttttcaatcttcattgtgacaatgggtatattaccgttgaagaacgcaaagaagatcccgaaaaagtcgccactgatatggaagcgagcgaccaatcagcccctgatacccctgaatcattagaggctgaaaagttagacgttcctaaaaccaacaaaaaaggtaagtga

SEQ ID NO: 307356 - DNA, 600 bp, Proteus mirabilis
atggaagaaaagcgcaattcagtgactgaatcattagaacaaggccgtgagcgagtgggttactacgggtttaatagccctgaaacacgcgtctttggtttgatgaatgagcctaacttacccgcctatgaaaccgcaaaaggcaaatggaaaggcggaacatttgcggatatcactgctgatattactgatatgttctcgcgtattgaaacgagctctggcggtattatcaaagatgatacgccaatcaccttaacattaccgttgggctttcgttctgctctgaatgtggctaatcctgtcgcacgcggtgaaacagtcaaacaatggataaatgaaaactatcctaatatgcgtctggttttctctcctgaatttgtcggcgcaaacggtggggctgatgtagcctatatgttcgcagatagcattgatgatggttcaacggcaaccagtgcggtgatccttcaagtcgtgcctgtgaaataccagttattaggttcactcaaccaaattaaagggtatatggaagatgcaaccaatgcgactgcaggtgtatttgtgacccgtccgtgggcggtgacacgcttaagcggtatttaa

SEQ ID NO: 307357 - DNA, 267 bp, Proteus mirabilis; identical to SEQ ID NO: 180192

SEQ ID NO: 307358 - DNA, 483 bp, Proteus mirabilis; identical to SEQ ID NO: 216767

SEQ ID NO: 307359 - DNA, 417 bp, Proteus mirabilis
  misc_feature (399)..(408): n is a, c, g, or t
atgagtattagtcgtcgttcttttattaaggggatgggtataggatgtgttggttgtacggtgggaagtttaccaccaggggccctcgcacttaatccagtaacatctcttaagggtcagtctaaattaacaccaagtttgtgtgagatgtgttcttaccgttgtcctatagaagctcaggttgttaataacaaaactgtctttatccaaggtaaccgaaattcacctcatcaaaaaactcgagtctgtgcgagaggaggcagtggtgttagccttatttatgatccgaaacgcattgtaaagcccatgaaacgcaaaggccctagaggtgccggagaatgggaagttattagctgggaacaagcttatacagaaattgccgaaaagatggcaagcatnnnnnnnnnnaaattctaa

SEQ ID NO: 307360 - DNA, 729 bp, Proteus mirabilis
atgcaagatagagcagatgaagcacaaatagcattaaaaattattcaaaaaaaatttactcatacagatattaaagttggttatttaggattttcacaggctggatgggttatccctattgcagcgacgcaatctaaacctgatttttccgttattattggtggagctgtgaattggcgagctcaaggcgtttattatcagcaagtacgtttaaaagccgacaatattgatgataatgaaatttctcgaagagtctcagagcaactgcaacaaaatgatcgtgtgtttggtattaatggtaaccatgatatttcagcgcaaggagatatgtctgacgatcgtttctattttgttgttcaaaactatttaagtgattcatctcaatatttaccgcacatgaatgggcgggtactggctatgtttggtgagttagatcttaatgtcgatgctccaaaaaacgcatgtttatatagaacactattaggaaatcatgtagataaaacagtcaccctattccccaatgcttctcatggtttattaaaagcgcctttctttaattaccagttagataatcaatggccttggtggaagcagatgcttttcatttatcaaggacaagatagttattccccagatgctttaaattacttaacatcgtggatcactgaagagacgacaatatcttctgattacattgattttaaatgtgaaaataggaatacagtgtaa

SEQ ID NO: 307361 - DNA, 750 bp, Proteus mirabilis
ttgcgtattaaagctaacggcaccaagtacgcaaaccccttacaaaatgaatgcacagttagcattgatggattaaacgcccacactcgagattatcttctcactgaaaccagcccttatcataagggcaaacaaactcgccgtctttaccttgaagtagggcgcgtcaatacgggattatttcgtatctttaccggggatattgtcagtgcagaaattgcctcgcctcctgatgtcacgctaaccattaaggctaaaaccaataacgccagctcaggtgatattgtttcttccagtggtggcgccatgcagaaaatgagcgagatcgcttcatcggtggcgaaggattgcaaggttagattggactttcaagctaccgataaaaatattgctaattggtatttttgcggttcagcgttacagcaagtacaacgattgcaggaagcgggaaacgttaaagcctttattgatgatgatacgttgtttgtcaaagatgataaccaagccttaaaagggcgcttgcgcattcttagcatgaaatcaggcatggtaggtatacccaaagccactgaaaaagggttgtccgttacctacttaattgatggcgcctcagaactaggagggatgctacgacttgagagtaaatttaattccgcacttaatggtgactatattattgaacaactgaaatttgatgttgcgtcacatgatgatcctttcttttatcaggctacctgtaaacgagcataa

SEQ ID NO: 307362 - DNA, 768 bp, Proteus mirabilis
ttgcaatggtatgaaggattgcgtattaaagccaacggtaccaagtacgcaaaccctttacaaaatgaatgcacagttagcattgatggattgaacgcccacactcgagattatctgctcactgaaaccagcccttatcataaaagcaaacaaactcgccgtctttaccttgaagtaggacgcgtcaataccggattatttcgtatctttaccggtgatattgtcagtgcagaaattgcctcgccccctgatgttacgttaaccattaaagccaaaactaataatgccagttcaggtgatattgtttcttccagtggtggtgccatgcagaaaatgagcgagatcgcatcatcggtggcgaaggattgcaaggttagattggactttcaagccaccgataaaaatattgccaattggtatttttgtggttcagcgttacagcaaatacaacgactgcaggaagcaggaaacgttaaagcctttattgatgatgatacgttgtttgtcaaagatgataaccaagccttaaaaggtcgtctgcgcattcttagcatgaaatcaggcatggtaggtataccgaaagccaccgaaaaagggttgtctgtgacttatttgattgacggtgcctcagaactagggggaatgctacgacttgagagtaaattcaattccgcacttaatggtgactacatcattgaacaactgaaattcgatgttgcttcacatgatgatcctttcttttatcaggctacctgtaaacgagcataa

SEQ ID NO: 307363 - DNA, 396 bp, Proteus mirabilis
atgaatgctgcggagcttattcaagcaagagagcaactacaaggcaatgatgatttttatcagtctaaagtggtaaagcattatcgcaatgatggtctttcatttgatgagcgcgtcagtggtatgaataaaacagccgaagttagggctgatttattgagtaagttaaataaaaatagtgatgatattttgattggtgagtttcttgattatttaagaaatgaaaataatcgtatatatcagatgatttattaccttgctgagatagaaaaagaaaagaacggaatagattatttattattaaagaggaaagataaaataaaaatcattaatgcacttcatcaaataaaagtattaagcgcattaatcccgaataaattagcaatgcctatttaa

SEQ ID NO: 307364 - DNA, 345 bp, Proteus mirabilis
atgagaacattttcaatcgataaaaataatgatctctttatcggccctgatggaaacctccaattcagtgaaaaagacgatgcggttaaaaacctttgtcagcattttgctaaagcggttcgtggtgaaatgttacataaaaaagataaaggcattccgttctggccaacaacctttggtcgccaagctgatatcccgatgtttgaaacggcatttagacaacgtatgagcgaaattgaagaggtggttgaagtgacccattttagcgccacagtcgagaacggtgaattgaagtaccaagcgacaattcgcacgatatacggagggtttacattgaatggctga

SEQ ID NO: 307365 - DNA, 573 bp, Proteus mirabilis
atgtctgatgcgttagccgattttgctttaacggggaaaggaagctttaaagattttgccaatgcggtgatctccgatatcactcgaatggtgatgaaaatgctggttttcaaagccattgaagcaggcgggcaggcaatgggctttgatatgggatggatgagcaaagggcatgcttatggtggctatacggggcatggcgggaaattcgaacctaaagggattgtacatggtggcgagtttgtttttaccaaagaagcgacggctaaattgggtgtcggcaatctctatcgcttaatgcatgcggcgcaaggttatgcttcggggggctttgtgggggcggtcgcagggcgaataccgattacaccgcaaccgacgttagcccgtgcaggcggggtgcaaatgacggtcgttaatcatattacggtgacaggaaatggtgacgctgtacttgcgcaggcaatgaaagaagccgcacaacaagggacagaagcaggcgcacagaaagctcacgcgatgatgttacaagactttcaaagtaatggcgcagcacgcagaacattaggagtttaa

SEQ ID NO: 307366 - DNA, 423 bp, Proteus mirabilis; identical to SEQ ID NO: 298890

SEQ ID NO: 307367 - DNA, 459 bp, Proteus mirabilis
atgttaattaaaccgaaagaaattacgatcaccgatgctgatcgtgaagagcacacctttatcattagccgattaccggcaacgattggacgtgaaattctggcgaaataccctttatcgaatgcgcctaaaattggcgactatgaagtcagcaaagaagccatgttaaagatgatggcgtatgttgctgtcgaaaaagaagggcaagagatttatttgaagaccagcaccttaattgataaccatgtgcctgatggtgaagcccttattcgtctagaactggaaatgttgaaatataacaccagttttttcggcaaagacgggagccaaggtttcctccaattcctgctcaacaaaatcaccggttcactcccgtcgattataaaaacgctgatggcttctttgccgtcatcatctcagccggtttcgccacgctcaccgaactcaaaacgtcaatag

SEQ ID NO: 307368 - DNA, 264 bp, Proteus mirabilis; identical to SEQ ID NO: 305155

SEQ ID NO: 307369 - DNA, 237 bp, Proteus mirabilis
atgtttaagcgtttagccactgcccgttatttgcgcatgtcagcaaatgataaaggtgtcaccctcttttttgcccctcaagtggcgggcattgctgcggtgcatcattacggtttaaaagagcgtgtgcggggtaagtcattagaaattcaatatcctgaaagaaagctattaggcttttcaccggaggatattaaacatatcgaaaatcaattacttgatttcctttctcgttaa

SEQ ID NO: 307370 - DNA, 246 bp, Proteus mirabilis; identical to SEQ ID NO: 304737

SEQ ID NO: 307371 - DNA, 387 bp, Proteus mirabilis
atgaaaattacacaccttgatcatttggtattaacggttgctgatattcagatgacctgtgatttttatcaccgcgtattaggctttaacgttattacgtttaaagaaggacgcaaagcactcacttttggttctcaaaaaataaatcttcatcaattaggaaaggaatttcttcccaaagcagcaaaaccaaccgccggttcggctgatttgtgttttttaacacaaacaccgttatcagagattattgagcatttaaatcagcaaggtgtagagatagaagaagggccagttcctagaacgggtgcaactggcgctattatgtcggtttatttacgtgatcctgataataacttgcttgaagttgccaatttaattgaagaataa

SEQ ID NO: 307372 - DNA, 342 bp, Proteus mirabilis
atgcctctttacgcatattgcaccttatcaaatgaccagaactatacggtaaaagacaggaaagtgtttattgctggtcaagctaatgtgatgacaaagtacatgtacacacctcgtggccgtgtgactgaaatttctgacgagcaatataaacagctcaaagaaaatcacgtttttaatcttcattgtgagaatggctttattaccgttgagcatcgcaaagaagatcccgaaaaagttgccactgatatggaagctagcgaccaatcagcccctgacactcctgaatcgttagaggctgaaaagttagacgtccctaaaaccaacaaaaaaggtaagtga

SEQ ID NO: 307373 - DNA, 315 bp, Proteus mirabilis
atgtttttcccagacaccatcaaaggatgggcgatagatgggaagaacattgatgctttggtgatccaatcaatggatggttcagtctgtttctctttgcatagcgataaagtggtgctggaaacccctaagtatgaagtcaatgcccctgaaaccatatttactggcaacgtcacagtgaacggtaattacgcggtaaatggtaatagtgattcacaagggggaactatgcgacataacggaaaagatatcggctctacgcatcaacacagtggtgttgaaaccggtcatggaaatacaggagcgcctctatga

SEQ ID NO: 307374 - DNA, 315 bp, Proteus mirabilis
atgtttttccccgacaccatcaaaggatgggtgattgatggaaagaatattgatgccttagtcattcaatcaatggacggttcggtttgtttttcattacataaagataaagcggttttagatgcgcctaaattcatttctaacgcaccagaaaatgagtttaacggtaacgtgacggtaaatggtaatcatggcgtaaacggtaacagtgaatcaaacggtggcacgatgaaacataacggaaaagatatcggttctacgcatcaacacagtggtgttgagaccggtcatggaaattcaggagcgcctctatga

SEQ ID NO: 307375 - DNA, 183 bp, Proteus mirabilis
atgcaaaataaaaagaagataaggacagtttaccttctttttatttgtgataaagataagcgttattttttattaagtgaaagttttacattgcctttaggaacacaactacatgcgagtattctgccagaacgttttatggcacctgcttttaatgcattgacatcaccttcatctaattga

SEQ ID NO: 307376 - DNA, 411 bp, Proteus mirabilis
atgaatataaaaacaagaaagaaacaacaaataaatgcaatatacttttttttatttggtttcttatactaccttataagcccagtagtttcattatatttctttgacaatagctggtttgtcgcaattgcaaaacaacatgtagaattacaagaatatgggttaatttatttttttatatccaccttatgcctgctaatttttactctagcataccttatatttagcaatttaaaaattataaaaatcaacataggtgaaaaagaaaaagaacataaactactacctttaataatttttattataatattcttattccttttttttacaatagtaaaatcatattactctggagttaatttattttctggatataatgaggggtataatctgtctcttatacacatctga

SEQ ID NO: 307377 - DNA, 240 bp, Proteus mirabilis; identical to SEQ ID NO: 103781

SEQ ID NO: 307378 - DNA, 1218 bp, Proteus mirabilis
atgaaaaatgttgcgataagtggatgggaacttaatttaccttcaatagtaaattttgaacaactttctgaacaactcttattaaaaagaacaattaaaacagagaaatacttctctgatgattattttgtagaatattttaaatttaatcataatccggcggtgatcccctatcaaaatattcccaatgatcattttgaaatattaacgcgattaattcataacagtttaaaacgggctaatatcaccctagaaaagcttcgcgcttcacgtaccataatgtatcttgcaggtcacgggcctagagccgattttatggattaccaagggttttatgataaaaacgatgccgaagatgttcaatattctccgcagataaaatcactccatgcagcctcttttgcacaggatgaattagcgaataaattgtgggctgaatatcagttagattttccacctatccctatctattgtgccagtaattctgcgttaatggctgtgcatataggacataatgaaataagccaagatatggcggatattgtaatagtattgtcgtggaatagcttacttttacaagatatagcctttatggatagccaaggcatgttagttgaagcgcacgctcaacctttgagtaaatacagtgatggggtcaccttatcagatggttatgccgtgatgattttagaaagccaacaacagataaactcgagacaatatcttgcacctgcttatatctatcattccgtttttatgcaaagtaatgctgaacggacaatgggaggcacattatttaacttttatacaatatcaaaagtgatttctcagcttctcgatcttagtcattatttaccaagtgatattggtgctatttttattcatggtaatggttcgattattagtgataaagctgagacggtagctattactaacacctttaaacaacccatccctattattagctataaagggcagataggttatatttctaattgctctggtattattgatttaatgattatagctgattcattaaaaaataatcgattgatcccctcgacttcacattatccaatagatgatggaatggaggttaatttcctcactaatcaagagggtgtgaactatagcgctaaacctattttaaaaatcggcttaggtatggatggctctattattgccatgttattaatcgcaaatggagagcaaggatga

SEQ ID NO: 307379 - DNA, 1035 bp, Proteus mirabilis
atgaggcgattattaccctatgatgctattaatttggccgcttatgctttttttgagccacaggagccactgatcccttttattccttcatggtataacgtatgggaatctcatatgttacgtttagcgggtaaaaaaagcgtaggaaaaagttggagtttccaacgctatggggtcaatcatgatatgtatctacgtgaaggaataagaaaaacaaattgtcgtccttacctatctgcaatagagcatgtggtcgatcatgctgttggtcaattagatacaaaatcacaattcctcttaaaaaaggagcgaaatggactgatttatattgatgcatggggagagctaactgctttcgagcagatagatagtttaagagatgtgttcactcttaatattattcctagaaatatcgtaaaaaaatacagtataaaaaatttctcttgcaaaataagaggtgaacgtaatggtatgatgtcggcactattattagcacaaaaacttattaatagtgatttacttgataatatatttatttgtggtggttttcgggctgtaccaattttatcttttagtgaaatagaaagacaacctataaccttttttttcaagcctaatacgttggaaaatataaatagtattgaaagagtcgcctgcattattatcaataaaaaacagtgttcagatatttcgatttctatcaatcattatttttctatgagtaaaaatagaaaaaaagcaataaagcaattagttaaaaattggcaccgttgtattaataaacagacgggttcaatttatataactgcgttactgacttataaatatatttctatacttgaaaccgcattcacagcgttacctgttaatcttaattgctattttttaaatcgtctttatggtgatagtgggtttatcacaccggctcttatgttcgatcatttacaaaaagcagcagatagtgcctctcattaccttttgagtgcgtttgatggagaaaatggtgtttggctggttgattgttggaaacaataa

SEQ ID NO: 307380 - DNA, 1566 bp, Proteus mirabilis
atgcgcttagaagttacctgtaaagatcgcatcgggttaacccgcgaattactcgatctgcttgtattaaaaaatatcgatttgcgtggaattgaaatctttcctattggtcttatttatctaaatttttcgcaaatcgattttaatatatttcaacctttaatggctgaaatcagaagaattgagggggttatcgatgttcgtactgtggcttttatgccatcagagcaagagcatcgagctatgtggacactattagaatcagtacctgtccctgtcttttctattaataccaaaggtcaaattaagttattaaacccagctacacggcatctgtttgaattagatgaaaatgataaaaatgaaaaatcttttaaccaacttatacctaactttaatatccatcgctggttagaacaaaaagatcctcatgctgaaattatctccatcaaattaaaaaaacaacattttgatatggagattgtgccaataaaactgactgatgataatcagtttaatcattgtgttggtgcgctcattttattgaaatatcgcggaataattcatgagcatccgaaattaattgttaatgataattcggggtttgaacaagttattgctgttagcacccccatgaaacaattagttgaacgcgctaagaaaatggcaaaaatggatgatcctttattattagtgggggatacggggacgggcaaagatctatttgctaaagcttgccacttattaagtcctcgagccagagagccatttttaggtcttaactgtgcctctatgcctgatgatgtggttgaaagtgagttatttggttatgcggcaggtgcatatcctaatgctatcgaaggtaaaaaaggcttttttgaacaagccaatcgaggcactgttttgctggatgaaattggcgaaatgtcgccacaaatgcaaattaaactcctgcgttttttaaatgatggtactttccgtcgtgttggggaagagcacgaagttaaagttgatgttcgaataatttgtgcaacacaaaaaaacttatgggaattagtacaaaaaggactatttagggaagatctctattatcgacttaatgtattgacattaactctaccaccgttgcgggaaagaaaagcggatatcatgccgttagcactgcattttattaatcaatattgtttagagcagaaagcatcaaaacctgttatttcccctgatttatctgcttatttagtacaatatggctggcctggtaatgttcgccaattaagaaacacaatttatcaagccatggctcagttagtaggcaatacattgcgacctcaagatatcgccttgcctgagcatactgcggatactttatttgatgaagatttgcttgaaggctcgctagatgaaatgactaagcgatttgaagcttctattttaaggcgtttatatcgtgattatccaagtacacgtaaactggctaaacgtttaggtatttctcataccgcgatcgcaaataaattacgtgaatatgatttaacaagtaaaaaagcggataaaacagagaaataa

SEQ ID NO: 307381 - DNA, 405 bp, Proteus mirabilis; identical to SEQ ID NO: 296475

SEQ ID NO: 307382 - DNA, 885 bp, Proteus mirabilis
atgtcttatatatcaagagaaaagatagattacttgtccattggtcatcgactgcgtgcttatcgtattgcctcctcattaaaagctgaagatgtagctgaaagtttagggatctcccgtgccgctgtctatcgattagaaaagggtgaaatcgttaaaattgagacattagataatcttgctcgattacttaacacctcattaagtagcttattaggtattaatacggagtattactctagcgctaatggtttttttgaacgaatgcgccaacttgaaacgcaatcttcccatatttatacccatttcgaacccttttcttatttattaacctctgattgttatgataaaacgcttgtcgaaatgttaacagaagcctctcctgaaaatgcgctaacaaagaagcaacaagaagttttatctattttaaaagagcgtaaaaagcatcaatcattacactcaccgcatatttataatctaattagccagcagcaaatcgaaaaatttctttatgttggtatgctaggctctgttaatgtaagtaaagccattcaacaagaaagaaaacaacgcgcaaaacaagaaatcagccatttaattgaaaagttagagcaaaaaaatagttatcttaatattgcgattatttcagatacgatgccatctttaacctttcaattgttttatcaaaacaaagcacctctctctttagcggttagtccatttcgtttaggtgaatttcctaatgtaagtacgggtattgcgacagtatcttcatcaacagaagcaatatttcaatatcaatctctgtttgatacgttatgggcaaaagcaataaaaaatgatgatgccattacacgcttaaaagagattatcagtcattattga

SEQ ID NO: 307383 - DNA, 1257 bp, Proteus mirabilis
atgactcaaccaattacagcaacagacttttcaattaatgatatgaaaacattaattgaaacaatgcaaatttataaaaaagataaccatgacaaagggataacacgtattgcctatagcgaagaagatgaagcagcccatctctatcttgctagtgtaatgaaagaggcaggccttgaagtctatcgtgacggtattggcacactctacgctcgcttaccggggcaagatagaacattacccgccgtaggaacaggctctcaccttgataccgttccccaagggggcgcttatgatggcgccttaggagttattgctggtttttatgctttgatgcaatacaaaccacaacaactgaaacgtgatctagagttaattgtattccgagcagaagaatcgagccgatttgggttttcatgtatcggaagtaaagtgctaacaggaaaaattgaccgtactcgatgggaacaaaatagagatgatgaaggtaataatttctttgatgttttaaaatcccttggttatcagcatgaaaacttagatcaatgtttacttaaatcagaccgttatagtgcatttgttgaattacatattgaacaaggtaaacgtctagaaaacgatcaaaaaacaattggaattgtcaatggtatcgctgcgccaacacgcttttcagtcaccgtaaatggccatgcagaccactctggtgcaacgccaatgtatcaacgtcaagatgcgttagtggcgagtgcgggtattattactgatatcaatcatgctgcctgtacggaagcggtatacggcaccgtaggtaccattggtaaacttaatgtcataccaaactcgatgaacgttattccagggcaagtaaaattctccgtggatattcgtggtattgatacagacagtattcaacgtgttgtacagcgtttaacaaacagtgttgagaaagcagaaaaagattttggtgtaaaaataatagtgcaacctatttcggctgaatcaccagtaaaactggatgactcaatttgccaagttattgaaaatatttgtcaaaaacacgatatcaattatatgactatgttaagtggtgccggtcatgactcaatgaatatggcatctttatacccgacagcgatgatttttaccccctctgttgcggggattagtcatcacccagatgaatttacggagtttagtgatattgcaatagctgcagatatcttagcggaaacattaggtgttctagctaatcaataa

SEQ ID NO: 307384 - DNA, 1386 bp, Proteus mirabilis
atgaacatcaaacaccttgcgatagcgacttgtatcggcattgccgtgccgacaattgctcacgccaatacaaatgaattatcgatagaacaacgtttagctcgactagaagagagaacgttagccgctgaaaaaagagctgagttagcagagcaacgtgccgctaagttagaaaatgcgttaaaacaaaatcaggcgcttaataacaatctatcacaaactagcgaaactataactgcgccaccatcatcgctgatagaaacaaataccggttatggaaaactcaagttatatggtgatgttgaatttaatacagatattgcaagtaaaaaaggtcagctaacctccattaacatgcgctcaggtaaagaaaaagactatggcgattatgataaatgggggatcaatgggcgtatattaattggcttagacggagagcgtctgttagataataaaaattatgcaggcttcactgttcaaccactggcaaatattgatggtaaggtatcacttgatgatgccgctttttattttggtaaaaaagagcgttggcaatttaagttaggtcgttatgaagcttatgacatgttcccgcttaatcaagatacttttgttgaatattcaggcaacactgcaaatgatacttatagtgatggttttggttatatctacatgatgaaagaaggtcgagggagaagcaatagcggtggtagcatgatgtttaatagccaatataataattggtattttgaaactaatttattaattgaagatggaacgtctatttttgctaacaaggaatatcacggaaataaactatataataataaaaatgttatttattttcgcccagttattgcatggaataacaataattttaaagttgctgtagccttagaaaaaaatattatcaataatgcttatggttatgatgataaaaaaacgggtgaatttagagatcagtccaaacgcaacggttatggattaactttaggctggagcaatctacaacaaaatcctgaaaatggtgtcacaataaattggaataccgcttatttagacgctaacgatgagaacgactttacaacaggcactaatattttatggcgtaaattacaattaggctatatctatgcccataataatattaagtcatatactattaacagtgatgatgataacaataatgatattatatttggcccaggaaaatataatatccacactctctattcctcatatgaattacctaatattttagatatggataattttaaaatctatttaggtgcatattattctgttattaatggtaaagatattgaaatagaaaatagcgataaagatcgttatggtgtaagagcacgttttaaatacttcttctag

SEQ ID NO: 307385 - DNA, 1422 bp, Proteus mirabilis
atgtcgatacctcaaaacaaccaagccattgaagagttaattactcttgttggaggttcagataatgttattagcgtttcacactgtctaaccagattacgttttgttctgaatgatcccaatcttgctgatatagataaaattaaaaaaatatcttttgttaaaggctgttttaataatgcgggtcaatttcaagttattgttggtatggatgttgatatctactataaattattaattgataagctttcattaaaagctaaatctaaagatgatataaaatctgatgcgaaaaagaatatgggatcctggcaaaagctgattgccaatttagccgaaatttttgttccattattacctatcttaatttgcggcggtttattattaggattaagaaatgttattggcgaaatgcctatatcagataataaacccctcacttatttttatccttggttaacaccaatatatgattttctctggttaccttgtgaagccatcttccattttctacctgtgagtatttgctggtcgagtgtaaaaaagatgggcggtacacctgcactaggtatcgtactaggtataaccttagtttctccacagctaatgaatgcttacaatttaggttcacaaattcctgaggtttggaattttggtttatttactattgagaaagtaggttatcaagcccaagtgatcccttcgattttagcgggactatttctgggatggtttgagactaaattacgtcgttttatccctgattacctaaaattagttattgtgccgattgtaacccttattgtcgccgtttttgttgcccatgttattttaggccctatcggtagaagcataggtgatggtctcgcccaactgatcaagtttttaatgttaggtgattttgcccctattggttcaactatttttgcctttttctattcccccatggtgatcaccggcttacatcacacaacgttagcgatagatttacaaatgactcaaagttatggcggtacacctatttggccgattatcgctctgtctaatattgctcaagcatccgccgttgtaggcattattatcgttagtcgcaaattaaatgaacaagaaattactattccggcagctatctctgcttatttaggtgtgacagagccggccatgtatggcgtcaacttaaaatatggctttcctatgctgtgcgccatgattggcgctgcgctagcgggtttgatttgtggattaaataatgtgctatctaatggtattggtgtcggcggattacccggtattttatctatccaacctacttattggttagtttatttattagcaatgattgtggctattgtcgtccctattggattaaccattctggtctatcgctataaagaaaaagcaggcaccttgcaagtcgattaa

SEQ ID NO: 307386 - DNA, 969 bp, Proteus mirabilis
atgacagatactaataaaaaaaagttaacaatcaatgatatagccaaactttgtggtgtgggcaaatcgactgtttcaagagtacttaatcaagatcctatggttaatgaagaaacaaggaaaaaagttaactcaattattgagaaatataaattcacgccgtcaaaatctgcacgagcaatgcggggatactctaatcgttcttttggtattatcgtcactcgcctggattcttatgcagaaaatcaagcggttagtgccatattaccgatcctttatcaaaacaacattgatcctattattttagaaagccaatttagccaagccaaagtagaagaaaacttaaaaatgctcgcccaccagaaaatcgatggcgtaatattatttgcattttcagggatcaatgcggctaacttagcaagttggaaacaaaaaatggttgttatagcaaggccactagaaggttttgtttccatttgtcatgacgatgaacgagctgttaacgctttaatgcattatttccatcaagacaaacattatcaacatataagttttatcgggatccaaattaatgatgaaacaacgggtttattacgttatcaaacttatcttcaatattgccagcaacatcaattaatatctcaagctcaacttggtgaacttaattatcaaagtggctatttacttgccaaacaagcattagcaagcaagcctcaagctattttatgtgcgaccgactctctggcctttggtgtacaaaaatatttagccgaacagaaaatagatcatattgaggtggcctgcatcggtcgtaatgatctactcacctttttatttcctcaaactaaattctatcgattaggttttagagaaagtggacaagaagctgctaacatattgatacaaatgctagaaaaaaatattcctgcacaaaaaatcattatatcaagtcatgacttaaacccatga

SEQ ID NO: 307387 - DNA, 225 bp, Proteus mirabilis
atggacaccattaaaggctatcttaatgacggcattgtgattggcgggctggttgtggctgcgacggcttttatcgtggtggccattgccgcggtcaccacgttcaatgaagtgcgcgaccaaaaggctggctggggtaaattcggtacaattattgtagtcggtgtcgtcctgattgtggcggtcgtctggctggccggaaaatccgccactattattttttaa

SEQ ID NO: 307388 - DNA, 864 bp, Proteus mirabilis
atggaaaagagacattatcaacttattgaacaagcctgccgttttattgaagaaaatcagggtgatgtttctcttgccgacatcgccgcacatattcaatccagcccatattatttccatcgacgatttaaatctataatgggaattacacctaaagagtatgcgaatgcttatcggcacaaactaattaagaaagcattagctggcgataaaacaattacagatgcgatatatcaatcaggctttaatgcgaatagccgattttatgaaaatgcgacagccatattaggtatgacgccaacccattggcgcaatggtggacaaaatatcgtgattttttttgctgtagggatctgctcattaggccatatccttgtagctcaaagtgaaaagggcatttgtgcgataacacttggcgatgatcctgcgtgtttattagatgaattacaaaaacaatttcctcaagctgaacttgttggtgcaaaccaagagtttgaaaaattgattgcccaagtcattggttttgttgaactgccaacacaacctttggcattaccacttgatattcaaggaacagtatttcaacaaaaagtttggcgggcattattagatattccttttggttgtaccatgacatatcaagaaattgctcaaaaaattggttcgccaaaatcttatcgagcagtggcgaatgcctgtgcatcaaataaactagcagtggcgatcccttgccatcgagttatcagacaaaatggtgaaatatctggatatcgttgggggattgagcgcaaagaaaaattattacaaagagaaaaatcccttcatcatcagcatgatagattggctattagcaagagcgattaa

SEQ ID NO: 307389 - DNA, 549 bp, Proteus mirabilis; identical to SEQ ID NO: 306758

SEQ ID NO: 307390 - DNA, 252 bp, Proteus mirabilis
atgagtggaagatctacaagcattttggcaactatattatttataatttattctcaaaatgtatattctgtagagtttaacttagatgttgttgactctaaatctaaagataatattaactttgctaggtttagtgaagccggttatattttaccgggtaaatatcagcttaacttagtacttaatggacaagggatcggttcatcaacattctaccaacatggaatgatggaaaatgtattgacttattaa

SEQ ID NO: 307391 - DNA, 597 bp, Proteus mirabilis
atggttgttgttaatgattatttgaagacagtttcgagtgattatagtagtatttttatgacaacattaataaatactgctgaaaatataaatttcggtgaaaatgataatggtctttttattgatgaatttatttccatagagaaagttaatttgattttagctgctactttttttggagataattatcttgcaagcgcttctttctttaatggtattatgcataaaaagaaactagattactttacaatagtctcattgttattctattttagaaatagaaaaccctatcaagaacttaaacgtattgttgagattagaattaaagatttgctatgtcctggtatggatttattacagtcatcggaaaaggcacatttatttttggatgttatgtcttgcccatttgtttcaattgagacaagacgatttttatacagaaaatatctcaaaaaatatgagcaaaatataaatagaacccattcggatattgagattgacctgcaatttatgctcaaaatttattggtttgtcaagtgggatgagttagatcttgtaaagatgattgagaaaaaagaattgaaagaaagttattaa

SEQ ID NO: 307392 - DNA, 924 bp, Proteus mirabilis
atgaaatatcattccttattaaaaaatttattttatgcaacattttccatcatggtgttaaattttagtggcgtcactatggcaaaaaacaccatgaatgatatttatgttattaatttatcctcaaataatacagtttgtggtgtaaaaattaatgaaatgctagtaatggataataataaatttcgtgaaggtcattattccaccggtcaaaatatctctagtgtgcttgaaaatgggaaaaataccttaggtataattatgtttaatggatcggtttttactggtgaagaaaaacttacccctgatatgtggtgtgaagtcgaacttaagaaattatctgcaaacggcgataacaccttaatatcgggacttagattaaacggaagtagcgatgggaaaatggtggtctctgataaatatcaaaataacagtgagcatatctattttggtggtcccagtcgaaaaagtgaatttgatgttttagaagcaaaaaaccaatttaatatacaaggcctcccccaatggcaatgggaaaaagcaactcccgttactgaagacgatattcctaaaattcgtgctttttatggcgaactacgacaagcatttatcgataaaaatctagataaattaaaaactatggggaaaatatcctgggaagaaatggcctatgccgataatggctctcctgatatcttttggaaatcgcttaattttcaagaacgattagaacaaggatataaacccaatactattaattgggatgaatatacttttgttacttataacgacaatcgagtctttcgctatgaggttggttttagccgattatcccctattgaattaatcaactctgaaggaagaaattatttttataatccttacctttctattattgatgggaaagtgactattgtccgataa

SEQ ID NO: 307393 - DNA, 141 bp, Proteus mirabilis; identical to SEQ ID NO: 300062

SEQ ID NO: 307394 - DNA, 339 bp, Proteus mirabilis
  misc_feature (324)..(333): n is a, c, g, or t
atgcaaaatgtgttgttaacgttatggcctttatttgcgttaattgcgctaggcgctattttaagaagaaataaagcatttgaacctgcattttgggtaggggctgaaaaattaaattattttttactctttcctgcattacttctcaatagcttggctaatgctcctttatctgatcctcaattacctcaccttgctggggctattttctcagtagtcatcattaccactattttgtgtgttatttttaaaaaaataaccggctggtctgctggccgctttggtgcgatcgttcaaggcaatattcggtttaacacttatttnnnnnnnnnngtttag

SEQ ID NO: 307395 - DNA, 279 bp, Proteus mirabilis
atgtttcctacccatctatggaatacatcaacacataaagaaataaaaaaagatttttttatctatggtattagattattttcaactggtagcaataatttgatttgcccaagtaaaataggtgagatgaggagtgaaactaaaaagaccaattatgacttaataatcagcagtggtaacaacaataaaataaaagaactaaaaaacatgactagtctttgtgttgttatgctctcagaagatgctaagcaatgggataatttttttgaaaaagaataa

SEQ ID NO: 307396 - DNA, 201 bp, Proteus mirabilis
atgactggtacagtaaaatggtttaacgacgataaaggctttggctttatcacacctaaagatggtagcaaagatgtatttgttcacttttcagcaattcaaagcgatagctttaaatcactgaaagaaggccaagaagtatcattttctattgaaaatggtgcaaaaggtccagcagctgctaatgttatcggtctgtaa

SEQ ID NO: 307397 - DNA, 801 bp, Proteus mirabilis
atgctagaaggactgggatattattttactgaacaaaaaaatggactaagtctaaaaacaaaaatagttaaatatattcaaatattattatataaaatagcatttcctttatcaaatgggttgattctactaaataatgatgacaagaaggatttaattgaacgctataaaattaaaacggaggtatttatttggggggggattggattagaccttaatcaatataagaaatcagatataattattaatgataaaatttcctttttatttataggtaggctattaaaagaaaaaggaatatttgagtatattcatgcggccgaaaaaataaaaaaatcatattctaatattgaatttatagtattaggtgatatagacatggataacccaggaagtcttacaaaaaaggacttggacaatttaatagaaaaaaatattataacctatcctggacatgtggataatgtcatagagtggttaaataaaagtcatgttttcgtactaccgtcatatagagaaggattacctaggagtacacaagaagcaatggcaataggtcgagccatcattactactgacgttccagggtgtcgagacactgtttctaataaaaaaaatggattgcttgttaaaccatggtcatctgatgaacttgcatctaaaatggaatatctaattaagaataaatctgaaataataaaaatgggtaataatagctatagttatgctcaaaaaaatttcgaccaaaagataacaaataaaaaaattttaaattatatgaaaatcacaaacgaaaaataa

SEQ ID NO: 307398 - DNA, 369 bp, Proteus mirabilis
atgagtttgttatttacgcctaataaattaggacctcatcaattagacaaccgtattattgttgcaccaatgtgccaatattctgcgcaagatggaatacccacatcttggcatacaatgcactatgggcaattagcattatcaggtgccgctttagtgattatagaagcgacggcggtagagcctcgaggtagaattagttataaagatctcggattatggtctgaggaacatggtcgcgcattaaaacagcttattagcgatataaaacagcatactaatgctaaaataggtatacagcatggctcatgcggggcgaaaagcatcaacatcgttgccatgggaaggtggaaaatcattggctcctga

SEQ ID NO: 307399 - DNA, 1026 bp, Proteus mirabilis
atgataaaaaataatgacttacctgcttttatgacgcaagtggttattactgaacccggtggcgttgataaactgcaattagaaaatagcccattaccgtcattgccccctcattatatgttggtaaaagttaatgcagcgggtgttaatcgccctgatatttttcaacgtcaaggtagttatccaccgccagccgatgcatctcctatattaggattagagattgctggggaagtggtgaaattaggtgaacattgtacaaaatgggcaataggtgatcgtgtttgtgctttagttgctggtggcggttatgctgaatattgtttagtccatgaagatatcgctttaccgtcgcaaggattaagcgatattgaagcggcagcattacctgaaaatttatttactgtttgggcaaatctatttcaactcggtcagttaaaagcaggggaatcggttttgatccatgggggcacttctgggattggctctatggcgattatgttagcacacaatcttggttgtgaaatttacacaacggtaggttcaaaagaaaaagccgaagttgcccaaaaattaggggctaatcatgttattaattaccgtgagaaagattttgctacagaaattcctgtattaactcaaggtaaaggcgttgatgtcatacttgatattatcggcggcgattatgtggaaaaaaattatcaagttgcggcgaaatttggcagagtgatccaagttggcatgatgaaaggggcccctaaaaacttaaatatgatgccactgatgcttaagcgattaattcatacaggttctaccatgcgttctagaacgccagaagaaaaaacgcatatagcacaagaattaaaacaacaagtatggccgttgattatcaaaggtcaaattaagcctattattaatgcggtcttttctttacaagaagttgccaaagcacatcaattaatggagtctggtgacttaattggtaaagtagtgcttgagattgatatgaataaatcactggtgtag

SEQ ID NO: 307400 - DNA, 1590 bp, Proteus mirabilis
atgtctaatcctatttttcagcaagaagttgctcgccgtagaacttttgccattatttcccaccccgatgcgggtaaaacaaccatcactgaaaaagtgttgttattcggacaagctatccaacgtgcaggaacagtaaaagggcgtggctcaaatcagcatgctaaatcagactggatggaaatggaaaaacaacgtggtatctccattaccacttctgttatgcagtttccttacgctgattgtctagttaacttacttgataccccagggcatgaagacttctctgaagatacgtatcgtactttaactgccgttgactgttgtttaatggtcattgactcttcaaaaggggtcgaagatcgtacccgtaaattaatggaagtgactcgattacgtgatacgccaattttgacctttatgaataaattggatcgtgatattcgtgatccgatggaattaatggacgaagttgaaactgagctaaaaattgcctgtagtcctgttacttggccgattggctgtggaaaactgtttaaaggggtttaccatatcttaagagatgaaacctatctttatcaaacaggccaaggtcatactatccaaaactcacgagtaatcaaagggttggataatcctgagttagatgaagcgattggtgatgatttagccgttcaattacgtgatgagctagagttggtgttaggtgcatcacatgagtttgatcatgaagctttcttagcgggtgaattgactccggttttctttggtaccgcattaggtaactttggtgttaatcacatgcttgatggtttggtgaagtgggcgccagcgccaatgcctcgtcaaactgatatgcgagaagtgacagcggctgaagagacattcacgggttttgtctttaaaattcaagctaatatggatcccaaacaccgcgaccgtgttgcttttttacgggtggtgtcaggcatgtatgataaagggatgaaactgcaccaagtacgcacgaaaaaagatgtggtgatttcagatgcattgacctttatggcaggggatcgttctcatgttgagcatgcttatcctggtgatattattggcctgcataatcacggtaccattcaaattggagatacttttactcaaggtgaaatgttaaaattcaccggtattcctaacttcgctccggaattattccgccgtattcgtctacgtgatccgctaaaacaaaaacaattgttaaaaggtctggtgcaattatctgaagaaggtgcggtacaggtgtttagacccctagctaataatgatttaattgttggcgcagttggggtgctacagtttgatgtcgtggttgcacgcttaaaaggtgagtataacgttgaagccatttatgaatctgtgaatgtatcgacggctcgttgggttgaatgtagtaacgaaaagaaactcgaagaatttaagcgtaaaaatgagcaacatctggcattagatggtggtgataacttaacttatattgcaccaacgatggttaacttaaatttaacccgtgaacgctatcctgatattgagttccatcaaacgcgtgaacactaa

SEQ ID NO: 307401 - DNA, 1236 bp, Proteus mirabilis; identical to SEQ ID NO: 28546

SEQ ID NO: 307402 - DNA, 1530 bp, Proteus mirabilis; identical to SEQ ID NO: 28545

SEQ ID NO: 307403 - DNA, 1689 bp, Proteus mirabilis
gtggtcttgcttgatggatcgcggggcttagaaatccatgccgcccatgccgcccatgccgccgcccggagcggccggctcttccttcttcggcgcttcggccaccatcgcttcggtggtgatcatcaggccggcgatggacgccgcgttctgcagcgcggagcgcgtgaccttggtcgggtccaggatgccgaactcgatcatgtcgccgaactcgccgttggcggcgttgtagccgaacgcgccggtgccttcggcgacgcggttcagcaccacgctcggctcgtcgccggcgttggtgacgatctcgcgcagcggggcttccatcgcgcgcagggcgatcgcgatgccgtggttctggtcctcgttggcgcccttcagctcggcgatcgcggccttggcacggatcagggcgacgccgccgcccgggacgatgccttcctcgaccgccgcacgggtggcatgcagggcgtcttcgacgcgcgccttcttttccttcatctcgacttcggtggcggcgccgaccttgatcaccgcaacgcccccggccagcttggccacgcgctcctgcagcttctcgcggtcgtagtccgaggtggtctcctcgatctgcgccttgatctgcttgatgcgggcttcgatgtccgcggtgtcgccggcgccgtcgatgatggtggtgttctccttcgagacctgcaccttcttcgcgcggccgaggtcgttgatggtcgccttctcgagcgagaggccgacttcctcggagatcacggtgccaccggtgaggatggccatgtcctccagcatcgccttgcggcggtcgccgaagcccggggccttgaccgcgcagaccttcacgatgccgcggatggtgttgaccaccagcgtggccagcgcctcgccctcgacgtcctcggcgacgatcagcagcggcttgccggccttggccacgccctcgaggatcggcagcaggtcgcggacgttcgagatcttcttgtcgtgcagcaggatgaacggatcctccagctcggcctgcatcgactgcgggttgttgatgaagtacggcgacaggtagccgcggtcgaactgcatgccctcgacgacgtcgagctcgttctccaggcccgagccctcctcgacggtgatcacgccttccttgccgaccttgtccatggccttggcgatcagctcgccgatgtcggtgtcggagttggccgagatcgaaccgacctgggcgatctccttgctggtcgagcagggcttggagatcttcttcagctcctcgacggccgaggtgacggccttgtcgatgccgcgcttgaggtccatcgggttcatgccggcggccacggccttcatgccctcgcggatcagggcctgggccagcacggtggcggtggtggtgccgtcgccggcgttgtcggaggtcttggaagcgacttccttgaccatctgcgcgcccatgttctcgaacttgtcggccagttcgatctccttggcgacggacacgccgtccttggtgatcgtcggggcgccgaagctcttctcgagcacgacgttgcggcccttcgggcccagggtcgccttgacggcgttggcgagcacgttcacgccgcggaccatgcgggcgcgggcgtcttcaccgaaacgaatatccttggcagccattgcggaattacctcagttctgtga

SEQ ID NO: 307404 - DNA, 411 bp, Proteus mirabilis
gtgattgcgggttgggatgcggcgaagcggcgggctcagcccagcacggcgaagatgtcgtcttccttcaccaccaggtactcggtgccgtcgagcttgacctcggtgccggcgtacttgccgaacagcacctggtcgccgaccttgaccttcggcgcgcgcacgttgccgttgtcgaacaccttgccctcgcccacggcgacgacctggcccttgatcggcttctcggtggccgaatccgggatcacgataccaccggcggagaccttctcttcctcggtgcgcttgatgacgacgcggtcgtacagcggcttgatgttaatcgccgcgcatatcttcctcgtggggctacccatcgcctttatcgcgcgccgccgcgaccgtgcgcgcgcgcaaaaattcgccgcctga

SEQ ID NO: 307405 - DNA, 903 bp, Proteus mirabilis; identical to SEQ ID NO: 28542

SEQ ID NO: 307406 - DNA, 336 bp, Proteus mirabilis
atgactgacgagttgggcaaaactagagatagttttatagtcaaggcttggaatttagttatttcttttattgttggtctttctgctttttttattcttagattgataatcttaattacattaaatttaatagcaacttctaataatgtggcaacaatacaaacaataggtgggataatggttgtgctatctattggtattgctgctatctatactaaaattcttaactcaagtggaacgcttgaaagccgaaaacgaaaaaagatcattacggttattgtagggggagtttccttgtacatttctactgtacttctgcatattcctgttttttag

SEQ ID NO: 307407 - DNA, 321 bp, Proteus mirabilis
atggtaacaaaaattatcataaaaggattttatcgaccaaatgaattagccataacatcactagatagtcatgctaagaagataacctttaaaaaagtaggtaataatgtgcaagtcaataacccaacaccttattattttacggtatcaaatttaaaattcgatggcaaaagttatcaatcagcaaatgcacctatggttgcgccattttcgtcactcaatttagctatagataaatcaattaaacaggttagttggcaatatattgatgattttggtggattatcaaatacatttgaaaataaaataattgtggagtga

SEQ ID NO: 307408 - DNA, 945 bp, Proteus mirabilis
atgggaggatttgaacgtttaagaataagttctcaaagtttgaaacgtcattggcggacatcagagttatttaatattgctctttctggtaatattggtattcgtactaaaaaatttggtttacagctttacgatgcattaattgaaggtggggtttctgaaaaaaatgccaaaaagtgggttgggttaattatagaacaatatggaaaaataaagaaagattctattgaaacagaacaacttgttcatattagccatttagagaaatctttggcatttgatttaattaatttacttataaaagagcaaagagagccaacaaagcaagaattagagagtttaaaaacaataaatacctcagtagatattgcgttgtttggtagaatgttagcttcagcaccgaaatataatattgaagctgcttgccaagttgctcatgctattagtgttcatagtactgttattgaagatgattattttacggctgtcgatgatttaaataatggtgaaacagatactggctcagcacatattggtgaagcaggatttgctgctgctcttttttatagttatatctgtattaataaaacgcaattaattgagtctttagacggtaatgaagagctggcaaataaagcaatccaagcattaactgaagttgcgattaaagtttctccaacaggtaaacaaaatagctttgcttctcgtgcttatgctagctatgttttggcagaaaaaggaagttatcagccacgctctttatctgttgcatttctaaaaccaattgatgatgaagatatggaaaatgcggctattaatgcattaaagtttagaatggagaattttgacaaagtttatggtacttgtgcagagtctcgctatcaacttaatgcagtacaaggggaaggttccctttctggattattacaatttgttgcagagtaa

SEQ ID NO: 307409 - DNA, 474 bp, Proteus mirabilis; identical to SEQ ID NO: 52832

SEQ ID NO: 307410 - DNA, 426 bp, Proteus mirabilis
ttggcaggggggataaatttatatgcttatgcgccaaatccattgacatgggtggatccgtggggttgggcatgtggaaaaattgatggcaatattaatccaaaagatgttcgatatatgcaaagttctataaaaaaccaaacgggggaatatactgtgttaggtaatgctgattctttgcttaatggtactttgaaaccatctgatttaccgccgattaaaatatggaaggatgatcttggtaaaatatggactttggatcatcgtagattagcaactttcaaattggcagggcttgatagtgttccatttaaatgggcctcacctcgagaagttgctgatcagatgtggaaaatgacaacaaaaacagatggcaaatcggtcattcttaaattgggtaatggaataaaaaaagtactggagtga

SEQ ID NO: 307411 - DNA, 243 bp, Proteus mirabilis
atggatactaaaaaaataaatactagggaagactttgttcaatttcttgagttattatcttcaaatgcaagagataacctgaatgagtgggagaataaagacttaccatcatattttgaatcgatgatatcttgggttgaagatatggatggatattatttaaatcagaaattgcctattccagaaaatgttaactggaaatttattgcagatattttaatggctgcaagagtttatgaataa

SEQ ID NO: 307412 - DNA, 777 bp, Proteus mirabilis; identical to SEQ ID NO: 121845

SEQ ID NO: 307413 - DNA, 435 bp, Proteus mirabilis
atgcctatgctaaatcgtcatatattatcatttatattttgcctatttggattatttcttattatttatagcgcctattcattaggtgattttagtgaatatggtgcggcttttatgccttcactaattggtggaggaataattattttttcattattagatatttttgcaaaaaagcagcaaatggatacacctttggtgacatggcatgaaataaaatttgtgttattaattattggtatcattctattttatgtgttttttgctgaataccttggttttattgttacgggatttattgttattgcaccattaatgatgaaatacgcaaaagtaaaaccgatatttagttttattatttctgctggaattgtattaggcgtttactatttatttaccgctgtactgttagtaccgctacctcaattattttaa

SEQ ID NO: 307414 - DNA, 1473 bp, Proteus mirabilis
atgataaaatcggccattaatcataaaaaatatattctatcatcgtggttaagtttattacttgttggatgtattgatactagcgattatgggaaatactcagcacaacaaccgatgccttataataatacaaactatattgcagcttctgagcaatacctcgccacacctcagcaagagcaaaccactaaaacgagctatggattggccgagcttatcgatcttggtcagcaaaataatcctgaaacacggattgcttggttattagcgaaaaaatcagctaccgatattggtatggtagaaagtacttatttgccgattattaccgcaacggcattggcaggttatcaaagaggaaaagtagatttacccgccaatccaattgttgatgatattaaaacatcaaacagtgcttttattccagcgttaacctttagatggcttatttttgacttcggtaaacgaggagctttagccgatgctgctaaacatgcttctttggcaacaaaccttaattttaatctgatgcatcaaaaaataattcatgatgtttctgttgcctattttagttatggtgcggcccttaaaaaagtcactcttacccaagaggcactgcaaagaagcaaagatattttatatgccatagagcaaaaacgtgcgcggggattagcaaccgtattagatgttgctttagccaaacaacaagttgcccaagtagaattacaacatgtgttagctaaaggtcatgaaaaagatcaatatcagttattactgtctgcaataggtgtctctccctttgaaaagataaaagtgaattatgataatgacgcgcgcttacctgatgatatttccccattgactcacgatgtgataaaaaaagcgttatcacaacgccctgatattttagctcactatgaattagagcaagcggcattaaaaacggcacgctctgttgaatctgactattttcctaaagtgtatctcgccggtgctcttgctggtggttcggggcattttgatgttcaggggttacctgaaattagccaacgaacttcatcgtcgaatattttaattggcgtgagtattcccttatatgaagggggcatgcgtcagtcgcgaatgagcaatgctcaatcagatatccaattagcacaagaaaatttgcgcaaaagccaagatacggcaatcaaagagatctctctcagtgagaatgcgttaagatcggcccttgaagcaaacaaagcggctaaaaatctcgttgataccgcacaattaagttataccgccagtgtcgatttttttaacaatggactaggtacagtaacggagattaatactgcagaaattgcactattaaatgcgcagctctcacatatagatgcttatacaggctcattaattgccgcagtagatttagcctttgctttaggggatattgatcagggcttacctaatatacaccttgataaatag

SEQ ID NO: 307415 - DNA, 2091 bp, Proteus mirabilis
atggctaatttggcctcattactccgcttgccgggaaattggaaaagttctcagtggcagatactggcagggccagtacttattttgcttatactgtcaatgatggtactgccattgccaccttttctattggacttattgtttacctttaacattgccctttctatcatggtgctattagtggccatgtttactaggcgcacattggactttgctgcctttcctacaatactcctgttcactacattgttacgcttatcgcttaacgttgcatcaacacgtattatcttgatggaaggacatacaggctccgcggctgcagggcgtgttgttgaagcttttggtcatttcctcgtaggtggcaattttgctatcggtatcgttgtttttatcattcttattctgattaactttatggttatcaccaaaggtgcagggcgtattgctgaagtaggcgcacgctttgtattagatgggatgccgggtaagcagatggctatcgatgctgatttaaatgctgggatcataaacgaagaagaagctaaaaaacgtcgtaaagaagtctcgcttgagtctgacttttatggatctatggatggtgcaagtaaattcgtccgaggggatgcgattgctggcttaatgatcttggtaataaacgtcgttggtggtttagtggtcggtgttgcacaacataatatggcacttaacgatgcggcaagcacttacaccttattaactatcggtgatgggctggtggctcaaattccagcactgattatatcaacagcggcgggtgttattgttactcgcgttgcaaccgatgaagacgtcggtcaacaaatggtgacgcaactctttgataaccctcgtgtgctgatgctaaccgcgggtgttttaggattgctggggttagtaccaggtatgccaaactttgttttcctcttctttacggcagcattagcaggattaggatggtatatcttaaaacgtcatagcagtcctcaagtgcaacaacaaaaagagttggaacaagttgaaaaacaaaatcgggttgttgaagcctcttgggaagatgtgcaattagaagatccgctgtcaatggaagtaggttatcgtcttattcccatggtcgataatcgccaaaatggtgaattattaggtcgaattagtggtattcgcaaaaagtttgcacaagaaatggggtatttacctcctgttgtacatattcgcgataatatggaagtgaaaccttcctcctaccgcattttaatgaaaggggtagaaatcggccatggcgaagctcatcctgggcgttggttggccataaaccccggtaatgcagtcggaacgctagaaggtgataacactcaagagccggcatttggtttacctgcggtatggattgatgacagtttaagagagcaagcacaagtacaaggctatacggttgtggcggcaagtacagtgattgcaacacattttaatcatgtacttaaccaatacgcagcagagttatttggtcgccaagaagcgcaaatgctatttgatagggtaagcaaagaactaccgaaaatgacggaaaatatgatccccgatatgctgtcattaacggtgttacataaagtattgcaaaacctgttggcagagcaagtgcctattcgcgatatgagaaccatattagaagcacttgcagagcatgcacctgagcaaaaagatccggcagaattaacggcggtagttcgtgttgcattacgcagggcaataacacaacactggtttggtgataaagaagagatacaagttatcggattagatgcgggactagagcgtctattattacaagcgatgcaaagtggggggggattagagcctggccttgctgaaaacattgaacaacaagccttagatgcggtacgtcgtcaagagatgtcagggggcgtgccagtactcttggttaaccatgcactacgttcgctgttatcacgctttttacgccgtagcttgccacagttagcggtattatcaaatatggaaattagcgaaggtcgtcatattcgtatgacatcaatgattggtggacaaaatcattaa

SEQ ID NO: 307416 - DNA, 858 bp, Proteus mirabilis
atggcagcattaggtaagattgcaggtggcgtaggggtattacttgcactccgcgacatgtcagaggcatttcatatcggaaatagggctcaagggatgtcaaatttggttattgcattaggttcaataatcttaatatgggcaactggaggatgggctttatttgctggggcacttattttggggggagttatttctagtcaactcaccagttggagtcatttggaaactttgctaaaacacagcttttggggaaatgaagaaagttctaatttttgggataatgatagaccaacaccgatagaagaacaattaaaacaatatataaaagaatttgaattctatgaacaaaaagggctaattgaattacaagagttttataatcttttttatacggctaaaatgactcaagaaaaaataccaaatggaaaactccgcttatcttttgaatttactaattttatcccagggatttcagaggtatattttcattttgttacagaggttggttatcacagtggtttggcagaagaaatcaaaacacctagttcagcttatgttctaaataaacgaaaagacctcttagaaattagcgaacaattaaaaatggcaagtgaaaaaggtgattggaaccctgaaacaggtatatttaaatttagtttggaagtacagtctcaattagtaaatacatattctgcttttggtgcacatcctaatagccgtataggtattgaagatttatattggtattatcaagtcaatcccgaggtaacaacaccgatgcgttatatcaattgggggggagatacccaagaaaacaatcggcttttaggctttataagcagtgagaatatctaa

SEQ ID NO: 307417 - DNA, 840 bp, Proteus mirabilis
ttggaaagccagcttgaattgtcggtggatcaacaacacaccgttagaatattacaaatcacagatacccacctttttgctaatgtggatgataccttgttgggaattaatacctatcgtagctatcatgcggtattggacgcgattaaacagcaagggttatcgattgatttgattgttgctactggggatttagttcaagatcaatcctttgcagcttatcagcattttgctgatgggattgcaagattaccttcaccttgtgtgtggttacccggtaatcatgattatcaaccagcaatgattgatgctttaaatcaggcaggcattctgtcggcaaaacaagtgttaattggtgaacattggcaattgttattattagatagccaaattcaaggtgttccccatggcgagttatctgactgtcagttagattggctaacacgctgtctagaaagccacaaagaaagagatactgtgatcttattgcatcatcatccaatgccttctggctgtacttggttagatcaacatagtttaagaaactctcaccagttagctgagcgtgttaaaggtcaccctcaaataaaaatgatgttatgtggtcatattcatcaagaaatggatgaaatgtggaatggtattcgcttattagcaacaccctctacctgtattcagtttcgcccgcattgtactaatttttctttagataccgtttcgccaggttggcgctatttggagttatcattatctgcacagggtaagaggaatattgatactcaagtacatcgtctagcgggtaaagatttttgtccagatcttgacgcggatggctattaa

SEQ ID NO: 307418 - DNA, 300 bp, Proteus mirabilis
  misc_feature (271)..(280): n is a, c, g, or t
atgaattatatctctattattctttctgatactgatatcaccattaaatatctttcagaaaaaagccattattcatttaataccacaaatagccattaccttgattggctaaatatggctaaagctattaatcataaatttaactctgctcaaggtggtttgatatattcgacaagtaataaatcggatagcgctattattaaaaccattgataataaagtaataaatttatcaaatttctttactcaaatatttaataaaccttttattnnnnnnnnnnccttttatttatatcaataa

SEQ ID NO: 307419 - DNA, 864 bp, Proteus mirabilis; identical to SEQ ID NO: 307388

SEQ ID NO: 307420 - DNA, 1419 bp, Proteus mirabilis
atgtcattaaaaacaagctctcttccttttaaaacgctaattgatcgtcaagttcacgatcaaattatgcaaaaagccgttgctaatgcgcaagaaactattggccgtaatcgtcaaaaaatggttgatgaattaggacactgggaggattggcgggatagagcggcgcagatccgtgatcatgtacttgctaatttagatgcctatttatatcaattatctgaaaaaatagaacaacatggtgggcatgttttctttgctcaaacgaaagaagaagcctctcaatatattctcaatattgcaaaagagaaaaaagccaaaaaaatagtcaaagccaaatcaatggtgacggaagaaattggcttaaaccctgtattagaaaatgcaggtattaatgttattgaaaccgatttagccgagtttattcttcaacaagcaaaagatgccccatctcatgtagtggtccctgctattcataaaaatagagctcagatacgtcaaatatttcatgacaaactgggttataacggctcagatacaccagaagaaatgacgcgttttgttcgccagaacattagagacgatttttttactgccgatatcggtattacggggtgtaattttgcggtagcagaaacaggttctgtttgtttagtcactaatgaaggtaatgcacgattaagtacaacattacccaaaacgcatattgcggtgatggggatggaacgtattgcacctacttttaaagaggtagatatcttaattaccatgctggcccgtagtgcagtagggttacgtttaacgggctataatacatggcttactggccctaaagagaatgacaacgttgatggcccagaagatttccatcttgttattgtagacaatggccgctcgaagatcattggttctgaatttaaagatattttacgttgtatccgttgtggtgcttgtatgaatacttgccctgcttatcgccatattggggggcaaggatatgattctatctatccaggccctgttggtgccgtcttaacgccactacttggtggatataaagactttaaaaacctgccttatgtctgctcattatgtactgcttgtgatagcgtttgcccagtaaaaatacctttatcaaatcttataaagaaacatcgtgaagtcatggtagagcaaggtataacaccgacaactgaacgtaatattactcgagtattcaattatgtgaaccgtcatcctatgttatggaaagttgggatgaatatgggagcacatgctacaaaatggtttattaaagaaggtaaagcgccattaaatatcggtgcaataaaagcatggacagaggcgaggaatttacctgaaggtgatggtgaaagttttcgtagttggtttaaaaaacaccaaaaagaggagaaataa

SEQ ID NO: 307421 - DNA, 381 bp, Proteus mirabilis
  misc_feature (267)..(276): n is a, c, g, or t
atgatgatatcagaaatcaccaaactgaaacgaggacgcccccccaaaaatcatagtcctaatacagatgtaaaaaatatagttattcaaagtggtatagaaatgtttgctgaaaaaggctatatcagttcagacatttgtaagatattagaaaaagttggtatcccgaaaggatcattttattattactttggtagtaaagaaaaatttggtttagtcgtcatccaacattatgacaactttatttctaagcaactaaataactannnnnnnnnngtcttatactgcattacctttccccaaaagactattagcattttgtcacatgataaaatcagaaatggaaaagtatcattggcaacgaggatgcttagtaagtaa

SEQ ID NO: 307422 - DNA, 642 bp, Proteus mirabilis; identical to SEQ ID NO: 299969

SEQ ID NO: 307423 - DNA, 555 bp, Proteus mirabilis
atgaaagcattttttcctttatttgccctcgctacaggagcatttgccataggagccaccgaatttacacctatgggattgctacctaatattgctaatggactgagtatttccatagcaaccgcaggtggattaattactggttatgctgttggggtgatgattggtgcacctattatgacattaagtcttggcaaattaaccaaacgtcatgcattgggattattgttattattatttattgcaggaaatctattagccgcacaagcagatagttattggagcttaatgatagctcggttgatcactagcctaaatcatggtgctttttttggtatcggctctgtcgttgctgccagtttagttgaaaaacataaacaagcctctgccgtcgctgctatgtttatgggattgactatcgctaatttagtcggtgtacccttagtcacttggattggacaacaatatggctggagattagcctttatattaatttcaggtctgggtttttattaccctaatcggattattaatgtttttacctgttatgcctaa

SEQ ID NO: 307424 - DNA, 1554 bp, Proteus mirabilis
gtgctatcagataaattaaataaaccttttattctaagcagcgcagtaaaaaaagagcggatcagtggaaaatttgatatttcttcacctgaagacgcctttgaattaatggtaaagcgtttgtcattactttattttaatgacggagaatctatttatatttatcgcgataatgagatacagcaacagctatttcaagtgaaaaatatcagcttgagtaaactgaaagagtatctacaagatgttggattatatgatctccgctacccattacgtgcaggtcacgatcagcgtactttttatctctcaggtcctcctatttatattagcttagttaaggctgctgctgagcttttggataatgatgtacaagaacaaattaatgaaaatatcaataatcaagttccaaccggaagctctcgttatggcgatgagtttgtgcagatatttccattaaaaaacacttttgtacaagatagaacctatatattacgtgatgaaaaagtggttttaccaggtataacaacggttttgcaacagctatttatgccatcgggagagaaagaaaaaacagtcagaagagcgcgtgagattatcgaagataatgataaatatcaggatgataaaattaccaacgatatacaagatactcattcaccgattatcactcaaatgggcaaatataatgttgaactcgttcctttacctggatcaaatagcctgttggttaaaacgagtcgagaaggtttagctttagttagctcacttatttcacaattagataaaccgaaaagacaagttgaattgtcattatggataattgatatttctaaaagtaaagccgatagtttgggggtgaattggcaggggagttatggctcgggtaaaaatacatttttctttaataccgctagtttaagtgctgtatctggttttagttttttaagtaaaatcaaagcactcagtgaggaaggggaagctaaaatggtttctcgtcctattttgttaactcaagaaaatacccccgccatatttgataataacaccaccttttatacacaaattaaaggtgagcgagttgcttcattagaatctacaacattcggcactatgatcagtgtattgcctcgtattagtaatactaaccaagagattgagatgattatcaatcttgaagatggcgccgagaaaaaaagtgatgatgaagatagagaagaagggattgaaaaattacctgttattaatcgcacaaatatcagcaccgtggcccgagtttctgaaggcggtagtttattaattggtggatatacacgagaagataacataaaagcagaaaacaaaattccttttttaagtgctatacctttagttggccgagcatttagctatcagtcagataataataaaaaaatggtgcgtatttttatgttacaaccgcgtttattagataaaactgatacgcacggattggactctttaactgaacacccatttttaccgatggataaaaaaacatctcaagcgctaaaacaaattcaggcatttatgaggtga

SEQ ID NO: 307425 - DNA, 249 bp, Proteus mirabilis
atggatccatcacatcaaaaatactattctttacttatttctagccaatttacgtttattggcactatagctagttgtatcactcttattaaagattattgccaaaatctagatgtcctaacgtataagcttacctttctaaaaaaattaaaaagcaaattaaatcagttagatagtaatattatatcaataatattactaggtttaataatgtccacactctcttttataacaattaaaggaaattaa

SEQ ID NO: 307426 - DNA, 747 bp, Proteus mirabilis
atggatattcctcgtattttcactattagcgaaagtgagcatcgtattcataaccctttcacaccagagaaatatgccaccttaggtcgagtattacgaatgaaagaaaactggcaaattcttgatctcggaagtggctctggtgaaatgctatgtacttgggctcacgattacaatattacaggtattggcatcgatataagcccgttgtttactctacaagcaaaatctagagcagaagagttaggcgtcagccatcgagtacattttatccatcatgatgcctcagattatattagtgataaaaaatgtgatatagcagcatgcataggagcaacttggattgctggtggtgtaattgaaactatcgagctactagcaaaaagtattaaaacaggtgggcttattcttatcggagaaccatattggcggcaaattccaacaacacaagagatagcacaagcttgtggtgcttcatccatatcagattttttaactttatctgagcttgttatctctttcgacaatcaaggatacgatctagtcgaaatggtactggcagatcaagagggttgggatagatatgaagctgctaaatggatgactatgcgccgttggcttgacaaaaatagtgccgatgattttgctcaagaaattcgaacagaattgaccatagcccctaaacgtcatgttagttttacacgagaatacttaggctggggggtatttgcattaattgctcgataa

SEQ ID NO: 307427 - DNA, 918 bp, Proteus mirabilis; identical to SEQ ID NO: 299964

SEQ ID NO: 307428 - DNA, 258 bp, Proteus mirabilis
atggtgttatgtgaagcttcttcttatggtattttttgtattagctctaattgcccaaccggtcctgaagatattataacgcctgaatcgaatggattactgtacccagtaaaggatgtagctagtttagctaatcacttacaaagtattattgatgggcgtttattgcctaagcataatgaaataaaaaatgctattactaaatttaatgatgaaaactttgcaaatcgtttattatctgcattaaagttgagttga

SEQ ID NO: 307429 - DNA, 864 bp, Proteus mirabilis
atggaaaaatcccgcacaacattagaccaatggatcaccttacaagctgttgttgattacggtggctttgctcaagccgctgatgtgttacataggactcaatcatcaattagctatactatcaataagttagaacaaaccttgggtatagaaatactttctttagaaaaaagacgcgcagtattaactactgagggagaactattgctaacactttctcgagaagtgacagaaaaagcattatctctagaaaaaaaggcaaaaaacatcaagattaacaataagttaaaaattaacgtactaattgacccaatgtatgtcgctgatctttttttaaataaaatctcacaatttattaagcagaataaacagtatgatattaatatttataggaattctctcagcaaatcagaaattttagcgcaaaaagaatatgatttaattgtgtcaccttattatattaaatcactgcaacctattgttttagaaagcattacaactaccttagtatcacatccagatagcccattacagaaactacaagatgaggaattattacaggaattacaaaggcatagctgtatttctctttctcctgattcacccgatactgataatcaggcccaagtcattcaagttggctctgtagagacagcaattagcttaattcagcatggtttaggttatgcacgtctcccccttatttttattcaagatgaattgaataaaaaaacaataaaacaattaataacgcataaaaaagagaaggaatataaattctatttatatttgaataaaaattcatttattaatgaaaacttgcaaagtttattatcaacaattagctattcaacaaatatctaa

SEQ ID NO: 307430 - DNA, 492 bp, Proteus mirabilis
gtgactcactcccattaccgtgagtgtcagacgacgttaggatatatccgtgcaagattagctgatggttttcatttcgaagaattgatattaataatcgattatttaacagctaaatgggtcaatgataataagatgcaggactatttaaggcctaaaacattatttcataaaaataattgtactgaatatcttgataaagcgaagaaatggcatttaaaagggaggccagcatatcgaaatgggcaatgtttaaaacccggggaaataccgattgaaattgattatgcagaaagagacagtacgtttaatttactatttagctcagcgtggaagcccaaaacagcacttcaaattctagctaaaaaaatggctttacagcgtggtttagggcatatgcatattcacaaggctaggtctgtttggaaagaaatttggtatcagtcggcccaattaattgctcgttcaacaattacagataagatcgcataa

SEQ ID NO: 307431 - DNA, 468 bp, Proteus mirabilis
atgaaagaaaatattgctgtaaaatcgatagaaaacatatggcaagacccacaatgtttttgtataagtgaatttattagagatgagtttttttattatttcaaatgtttagatattgtatcaatgaagaaaggaagtatagtcgatgcagaatatcttggttgttttaatattgaaaacatgttggcagtaaaacatacaagatttacaaaaacagaaatttatcctgtggatatagaccatgattataaatgctactattatgaggttaatgactccaattggttgaataatatattgaatgaaagaactaaaaatgatagtgattggaataaatatgatactaatacctataaacactttattttggaaaataaagaatattgggtagaagttataggaagtaatttgattttttctaaaaaagaaaaggatgaggctaaattagtactttgggatactatttaa

SEQ ID NO: 307432 - DNA, 756 bp, Proteus mirabilis
atgttaataaatgatataaaaataagtggcgataaaaatattttatcagggaatttattattcatgtgcattcctttaaatgatgaatatccaataagaatatacgatgataaaacgactaaaattataaagggaaaggcttttatttataattcaaaaaatgaaaatgttatttttcaatcagaaaatcagtcatggcgtattgaaaagagatcattttttatttgtgccagattattggcatttattgattatgctagagatttttcaaaaatgacagcagttggcactaattttgatattaatcaacaaattttttatataaaagaggggagtggaacattagaacatctgattattaatgaggcactgaaagatgaaagccaattagaacctctttttgtgacaataagacacagtgaaagttactggcttatattacatctgattagttatttggatgagaaaaaaagcaatattgcacaaataggtgaacgatatggtgtatctgggacacattttagacggctgtgtaaacgttatttaggtaattgtggtaaaagtcaattacgttcatggcgtgcggcatcttctattttgacaacgctatcaacagatgaatcattgactcagattgcagtcgataatggttttagttcagcatctcatttttctaatgaaattaagacattatttggtattacaccaactgaatttcggcgaattggccaatatctttatgaacataaaaaataa

SEQ ID NO: 307433 - DNA, 504 bp, Proteus mirabilis
atgttacatcaagatatgatcaataaactcaatgaacagctgaatcttgagttttattcagctaacctttacctgcagatgagcgcttggtgcgatgataaaggatttgatggcgctgccaaatttttaaaagcacattcccgtgaagaaatggagcatatgcaacgcttatttgattatttaagtgatacaggtgctatgcctttgctagggactattgaagcaccacccgctgaatttttatctttatctgatttatttactaaaacttatgagcacgagaagtttattacagctgaaattaataaactagctcacctagcaatgacaacacaagattactcaacatttaacttcttacaatggtatgttgctgaacaacatgaagaagagaagttatttaaatctattctggataaacttgctatggtcggtgatggcggtaaggcattgttcttgttagataaagacttaagtgctctttctacatccgcacatatttaa

SEQ ID NO: 307434 - DNA, 198 bp, Proteus mirabilis
atggactgttcatccttttcttccactataacaggggctaatgtagcaaataattttatttttgaatgttcactattagacaatgaaaaaaccatatttcttctaacaagcacttcatatttagtagataatggtgctatctctatttctaccagcttccaattacaccatcctcctccatcaataggcacgatatag

SEQ ID NO: 307435 - DNA, 213 bp, Proteus mirabilis
gtgcaagtcaataacccaacaccttattattttacagtatcaaatttaaaattcgatggcaaaagttatcaatcagcaaatgcacctatggttgcgccattttcgtcactcaatttagctatagataaatcaattaaacaggttagttggcaatatattgatgattttggtggattatcaaatacatttgaaaataaaataattgtggagtga

SEQ ID NO: 307436 - DNA, 249 bp, Proteus mirabilis
atgtataaaaagcatactgcaacagctaaagcattacacactacctttcaacaaaatcatgagcagatggatttgccatttttctatacttatccacttaattgttgccaaggagcatcaataatattaacgtatctgtttttatatattcatctaaatactgaaattaatattgttaaagatccctctcgtaaaaatgaacatcattattatcattggcttgaagttgataaaaaattattgatttaa

SEQ ID NO: 307437 - DNA, 363 bp, Proteus mirabilis
atgacttttaaacccggtgaacgcgtcagccattttgaatttggccaaggtgttgttatctcggcagtgggtggctacgcccgtgtcttctttccccagggtgagcgacaagtacccgtcagcaccttggtggcggcacttagccataatgagcgcgtggtagccagcattggcacccatacagatagtgacacgaaagcctggctctcctggaaggcgcatgaattaccccttcaggattcagccagctcgctgacttcagccaagattgatttgctaccccaccaggcggtgctgactcatcgggttgcctgcgcgagcccacgagacggactcctatctcgtatgccgtcttctgcttga

SEQ ID NO: 307438 - DNA, 219 bp, Proteus mirabilis
atgtctctaatttacacattacattcaatgggtatttcatcatgctgtttgaattggagttgtcagccaaaacaagatctacaactaaaaaaagttttccctttgatatcaaaaaatcatactattattatgatgctagccatagggtatccaaaaaataaaaataatatctgtgtttcaccacgacgcccactatatgaaatttatacaaggttgtaa

SEQ ID NO: 307439 - DNA, 168 bp, Proteus mirabilis
atggcaacaaagggaactagaagcattatcaatgctaaattggaattaaattctccaaaattatttggggtgacttggtttgctatatatatttgggttatgaatgtcaataatgaactaagtaatgaactacttaaaagtaatagtattgttctaatcattgcttaa

SEQ ID NO: 307440 - DNA, 336 bp, Proteus mirabilis
atgaatagctataataagtacaccgaccttcaaattaatgaattagttgctacaaggttaaagaagaaatgcttattaacggaagaatctgtattagcttatatggatagcggctatcggactttcgccccatgcaataaccctactgacgcaatgccgattattattgagaataaaatttcattacgctccccaaccataactgatagatggaaagcggagtttgtagatgagtacggcaactatgttggatatattagagctctcaataaaaacccactgcgcgcatgcatggaagttttcttgatgatgaaggatgcggagaatgaaggctga

SEQ ID NO: 307441 - DNA, 315 bp, Proteus mirabilis
atgaaaattgaacaatctcaagttactaagcttgaaataacaggtgtagaaaagcacgacccaatcagggtttatttggaagatgataatcaaggccatggtcgattaattataactgaatgggatgaggcttggacttctttttggtcttctatgtctggttcattaattgattttattatcagaaatgataacgggtatttaattagctacctttctccaaaaccattaggtgtgagaagcattgcatataaacgactcgattctagattaaacgctgttcgtgaagcattaaagcaaataaaggtggagtga

SEQ ID NO: 307442 - DNA, 258 bp, Proteus mirabilis
atgggccctaatggctgtcctgttgtaggtgatagaacaacgatggttgccatgctggctcatactgtaaatgaagaaagtcaggtgttagaagccatgtcaaatgcttacttaatatctgccgcgcccgaactccttgaatcattaataactcttgtagcacaagtggaattattttatagcaaggaaaaggacgactatcttccagagtacaaagcagcaaaattaacaattgcaaaagctctaggtaagccttaa

SEQ ID NO: 307443 - DNA, 234 bp, Proteus mirabilis
atgacagataaaacaggtggagcagcttttccagttccagcaacagagttacatggcactaccacaggcatgagtttacgtgattttttcgctgctaaggctatgaatgctgatttatcaaatagtgatgaatctcttgctggttatggctctcaatttactgatgctcagttagagagctttgcagcattctactaccgcatggcagatgcaatgttaaaggctagggggtga

SEQ ID NO: 307444 - DNA, 192 bp, Proteus mirabilis
atggtaattgtagcaataaaggcattagttttttttgttgttatatcttcattgtctgcggtctttgcatggctctttgctggcagagaggttccgttaaaaacgtcaatgaagtggacgtatagcgcatttgcaggactggcaattatagttggcgttactgttggcttacttaacttgctatttctttaa

SEQ ID NO: 307445 - DNA, 318 bp, Proteus mirabilis
atgaaatttgaagatttaacaaaagcatctcaagaatcggctcgtgcggttctatcagtcatgctagttgatagttatcgacgcaattttaaattaactcgtgatgatattttagaattaggtcatagagttagaaaggcatttgtgaccttggagagtgaagaacctaaagctgaattatgctctggatcgggtatgtgtagtgacttgcatcctgatacctcattaagtgttggagggcttggcattcagcaaggacatggaattgctatgagtggagataaagcaaatcagttaagaaaaaaaggaatgctttag

SEQ ID NO: 307446 - DNA, 243 bp, Proteus mirabilis
atgaaaattgaatgtcctatatgtaaaaggcttttcagcccatttaagcctaaagagcacattgataaatatcattcatctgcaaatgatatggagttgataaaaataagggatgcaagaagaaaagctttaggtgtcgaaaagccagtaaagaataagcattacctcctaaaaaacacttacaagcatgatggctcaccaccgatgcaaggtggattaccatcgctaggcaagaaaagataa

SEQ ID NO: 307447 - DNA, 318 bp, Proteus mirabilis
atgtgtaactttcacggctacaacaacgccagattacgcagaatggaacgcagaaaggtattgcaggaatcttacgagataactaaaagcttaaaagcagcaatccatggcgaaacagtaaaagaagaaacaaagcgtcctactttatcgttaaaacgcaaaccaattagtcgagttgagaaagcaatttcaattcgtagcactaaagtttatgactcagtagataatacttgcttgccaaattctagtatttactcagctaaatatagaaaatctggtacgctgttagaatctggagaagtcactgcgagagcctag

SEQ ID NO: 307448 - DNA, 165 bp, Proteus mirabilis
atgactacagaacaactcgcagaattaaaacgtattgcactggaaaaacaccgtgaagctgaaaaggccatgtatgcttatgcaaaagagtgtgacggcgttgagcgcatggaagcatttgaagcatacgaaaatatcagaacagcaacgcgggttcgcggatag

SEQ ID NO: 307449 - DNA, 300 bp, Proteus mirabilis
atgactgaagacagatattacgattacttggttattggtggcgaacatgacggtatggttctcaatggccctcatctaagggaattggaaatcacgtgcggagatcaaccaatgctaaatctccgctcccgaggcagtgaggctgaaactataaccacgagaactgtttcatatcgagtcattgaacacataaccgacagcggtctccactacttcattgcatctaatgaggatttaaacggacgaaatgatgatatcaattccaagataaacgaatcagcgattgcaccaataaactaa

SEQ ID NO: 307450 - DNA, 291 bp, Proteus mirabilis
atggcgaacttacgcaaagaagctcgaggtcgtgaatgccaaataagaataccgggtgtctgtaatggcaattctgaaactgtcgtcttggctcattatcgaatgtctggtatttgcggtgccggaataaagcctaatgatatttttggcgcttgggcgtgtagcgcctgtcacgatgagtcagataggcgcactcactacgtcgatgctaaatacgcaaagcaatgtcatttagaaggtgttattcgcactcaggacattctcatcaaggagggtaagattaaggtatga

SEQ ID NO: 307451 - DNA, 147 bp, Proteus mirabilis
atgggtattgtctggactgcaaaaggtgcaagaaattcatatttctcgatagtgattggcgcctttattcaatatcactatccagatagtagttgggctataatgcctgtaatagcaattctacttggtttaaccatcaaaaaataa

SEQ ID NO: 307452 - DNA, 3330 bp, Proteus mirabilis
atggcaaatgtaggcgaaatcgtttatcaagttcaaatggatgttcggcaattgcttacatctcaacagcagttagagcaacgccttaatcgtatggatagtagttttaacagaacgtctcagtcggtaaataacactgagcgttcaatgcagtctctgtccaaagttgcggcggctctgactggttatttatcggcttcaatggttgctagttattctgaagcatggactgagttgaacaacaaactatctaactcagttcgtgcaagtgagtcacttattgatgtcactcaacgagtatttgatatctctcaagcaacgcgatctagccttgatgccacagcaacactatacgcacgattagagcgagggacgagagaatacaatacatcagcagaagacttagcaaaattaacatccatcatcaaccaaggttttatcgtctccggtgctactgcgcaggaagcagaaaacgccattattcagctatcgcagggtatcgcttcaggtgttctccgtggtgaggaatttaactcagtagcagagcaaggtagccgtttgatggttgcacttgctgactcgatgggtgttggtattggtcaactccgtaagatggcagcagaaggcaagctaactactgatgttgttgtgaaaggtttgctctctcaaggtgatgcgatcggtaaagagttcgctaaaactactcgaacaatgtcacaggcatttcaagaggcagggaacaacttaaccaagtttcttggtgaaaacacaacaataaagacatctattaacgtattcagtgatgctgtaattactgttagtaaaagtttggatgaacttagttccgtcttgacagtaatcgctgcggtggttggttcaagatatgttggcgcattagctatggctaccaagtcaaaaattatgatggcagcagcttctcgtcaagagtcagtcgccacactgcaatcagcgaaagccagcgagtatgctgcaaatatgtcagtcaggaaggctcaggcagatttagcatctgctagatctgccgttgctctcgctcaagcagagtataacgttgcgaagggaactttagcggaagcaaccgcacttgataacttaattgctaaaaaaacattggcttcaaaagctgcaataacattaactcaagcaacccaagcgcaagcggcagcaatggcaacatcagcagcggcggcaaggtcagcgtcattgtccatgggtttattgcgtggagctatgggaatgttaggcggacctgctggtgtggctatgttagctggtgctgctatatattacttttatcaacaatcaaaagaagctagagaagaatcaaataagtttgctgacgacataagaggtcttacggaggagtataaaaaattctctagagcagcaaaagaagcggctatagttgaggctaaaaaacacttagaagtcgctgatgaagaggctgcaaaacttaagtacacgatcagtttgattgaaaaagagattaaagaattaaatgatggatttgatttatttgggttaaatgctgataagtcagctaaatttacagaccaactaaaaacggctgttgctaatttagaaaagcaagaggaaagaaggggtaatattctctataaaatagagatgatgcagtctgatttaaatggaacattaaaacaaggagcagatcttctgcagagagagtcatccatattaccaaacgctaaagatgcttggaatgcttatggtttctctatcgagcgagcaacccgacaaaagaaagaatttaatgcacaaagcttaataatggagtggtcagacaaaggacttgacttgagaaaatctctagagagagaagctaaattagctaacgcaaaaagtgagattgacaaaagaaagctacaagttgagttttacgcagaagataatggattgtcagagcaagagatagcatcattaactcagtatgctatagctgctcaagaggctcaagatgccgctgccgaacgtaacaaaacaaccaaggaatcaaccaaagccacagatgctgcttatgaagcactaaagcgccagagagaagaaattgagcttttaaacaaaggttacaaagacggatctcttgaaatggctaagtatgatgcggttaaagcattgggtgatacggcatctcctaaacagattgaaaaagcggagcaactcgcagaagaaaaatacaacattgagcgtaatctagcagataagaaagccgcgcttgagcttgatttagttgccaaggctaaagaatctcacgataaacagttggcagacttagagcggataacaaaagatgatgtatctctcactgaacaggcagcaaggcgtaaggctgaaattgaggcggaatatcaacaaaagatagccgaaataaaggctaataacgctgtatcaccgcaagataatttaaaagcacaagtagaccctgttcagcaacttaaaaacgaacacgagcgtaaacttgcacttataaaagagtacgaaaaccaaaaggttttaactgagcagcaaagtttggagttaatgaatgccgccaacactcaatatgagcaagaccggttaaatgctcaatgggagatatggcgcaatcagagccaagccaatcaattcttagctgatgggttggacgcattaggacagcgctctactaacatactcacagggctattaacagatacacaatcccttaatgatgctttccgtaatgtcgcattaaccattgtagaccaagccgttggcgctctggttcaaatgggtatgcaacaggttaagaatatggttatgggtgaaagtatggcgacagccgctcaagcatctgcattggctcaagctgcggcagcacaagcggcttgggcgccagcggcgttaagcgcatcaatagccacattaggcgcagcagtagcaacgggaacatcatcatatacggcggctatggcggctagtaaaacgatggggttggttgctggcgctcgtaaaaatggtggccccgtaaatgctggctctatgtatagagtgggtgaaggtggtaagcctgagatattcaaagcatctaacggtagtcagtacatgataccgggtgataatggtcgagttattagtaatcgacaaatgggtaaaggtggtaacggtgtcaatatgggtgatatgcactttacattccaagttcaagcacctaatggcatcactcaaaaggaagcacaacagatacagcaaatggtgagaggtacggtttatgacgtgcttggtaacgaaatgcgtagcggtggtgctttggaaaaagtaagaagttggtaa

SEQ ID NO: 307453 - DNA, 240 bp, Proteus mirabilis
atggcccctacaggattcaatataaagacgcatgatattgattataaacatcttaatttcattcaattttgtatcatgcccccaattatgccccctttttattttgttactcacaaattgagaaatttagattttagtttttccaaaactacctgtattgcaaaaatatcatcaataggatttatagttgcaaataatgaaatatttcatcgtgctcagctaattttctatgcacaatag

SEQ ID NO: 307454 - DNA, 324 bp, Proteus mirabilis
atgcgctatattccctttactgtgaaaagtgaatcatattctaaactatcctctttgattagcaggaactaccccgaacttttcgaagtagctcaactgaattataaatacgagattatgattcaatctgtgttcatttttttctatttaccccaccatcatcaagccacttttgaattaatgatttacggtatttggctggtcagtttaaaacagggagaggaaattcatgcttcttttttagtcgccataatgccgtacgcttcagtcctaaccatttgtaaacatcagtttctagtattaaatctgtatcattcattttaa

SEQ ID NO: 307455 - DNA, 411 bp, Proteus mirabilis; identical to SEQ ID NO: 298166

SEQ ID NO: 307456 - DNA, 279 bp, Proteus mirabilis
atgccacaaataaaatataataacgagataacaagtatcataaaagagagacgaaaagtttttctctctattgggctatttaccgctttaattaatatattaatgttagtcccttctatttatatgttacaaatttacgatcgagtattaccatcaggtaatgaaatgacactattgatgctaacaatcattatgttagctctttttatctttatgggaggattagaatatttatactgcagcttaccgagaaaaattaaacaaaatagcgaatattaa

SEQ ID NO: 307457 - DNA, 408 bp, Proteus mirabilis
atggatgcagttaaggatataaaacccaatgatattattgtgatatatagaactacagatatcgaaggtcaagctcattatagatctgtggttacatcagtttgcatagtggaagatgtaaagaatattgatgatttcaaggatgaaaatgattttatacaatattgtataaggtactcagtatttgaagaaaaagtactttctgatttttatagaaaaagaaaatttccttatatcataagttttacatataatttggcattacccaaaaggcctaatagggcatctcttatagatgatgtaggtattgacagaaaagcatactggggtatattaaaaataagtgataagcaattcaatgatattctgaaattaagtgaagccgatgaaagtattattatcaattaa

SEQ ID NO: 307458 - DNA, 390 bp, Proteus mirabilis
atgaaagtattattatcaattaagccagaatttgtatctaaaattttagaaggttctaaacgatacgaatttagaaaaggtatttttaaaaatgagtcggtaacatcggttgtgatatattccactttacctgtgggacgagttgttggagagttttatataaaaagagttcttcaagacaagccacattcaatttgggaaaaaacaagctcacattctggaattagtaaacatttttttgatcaatactttcaagaacgatgtaccgcctatgcaattgagataggtgaggttataaaatacgacgatcctatatcactgaaaaagttcagcgaaatagttggaaaaaaaattactgccccccaatcttattgctatttgccatcttag

SEQ ID NO: 307459 - DNA, 879 bp, Proteus mirabilis
  misc_feature (794)..(803): n is a, c, g, or t
atgagcacattattatctacacaaaacctctcttttcataataatcacggtatattgctgagtaatatttctttggccctcactaaaggtgagaaaattggtttaattggctacaacggttgtggaaaaagtacactattaaaacttttatcacaccaattaataccaacagatggctctattactatcgccaatcaagtcattatggcttatgtcgaacaacagttaccaagtgagctacagtcaatgcgtctcattgatgcggttcttcataaattacctgaagagctacgcatatctgaaagttggcgcagtgaattattattaagtgaaatgggatttaaagccaatgaaatcaatctattagtctcacaattaagtggtggtcaacatactcgtttattacttgcgagagcattgattttacaaccagacttactgctattagatgagccaagtaaccacttagatctaccgactatcttgtggttagaaacatttttaacacagtggcgaggaagttttattcttgtttcacatgacaataggttgttagataaagtgaccaattgtacgtggatcattcgtgataaaaccctatctgtttttcgcttgccctgctctcaggcaagacaagagcaagaagcacaagatatcagtgcgcaacatcgttgtgatgcacaacaaaaagagatagatcgtattgcacaaagtgcgaagcaattggccatctggggaaaagtgtatgataacgaaagtttgtcacgtaaagccaaacaaatggaaaaacaaannnnnnnnnnaagacgaacaagccgatgtaacagaaggcaatcaatggacgttacagttatcaggaacaatattacgggcagatag

SEQ ID NO: 307460 - DNA, 192 bp, Proteus mirabilis
atgatggagctatgggttgcaagccataaaaaggttgtttaccttcaattgcatttaatgcagcttgcagtgtttcctcgccatacatacgagaaaaagcctccatatattgtgcaggctcacgctcatgctcttcacgtaggagtaaaagattatgcaggcaacgataataattttgacgcgctggtgtaa

SEQ ID NO: 307461 - DNA, 627 bp, Proteus mirabilis
gtgattgctgctggaaatgaagaatactttcctgccaccaatgcgcttgttaagcagaaaagccgtgttgaatcactacaaaatgttattttacaacatcaatttgttggtgaaagaacaattgtttttgccaataaggagactttatttagttatcaaagtggtcatttatttattgaagggattgctcagcggctaaatatgcctatttatactgtgacggataacagtgttatacttgaaaatgaatacattatggtaaaaccgacgactgaaagtcagtttattggtcaccctttacttgctgatacaggtgcatctaatacgctacttactgaaacagtacctaatgagcctaatacaatgtctaataggcaaagagtagatattgaaaataaaaactatgctgcagaaatctatcaattcgtctcacacaattacactaattatagagataatcaagagtttaagttaggttatcagaatgagattagcactatttttcctgactattctgacaatatgaccattgctgatattttaaattacgtgcaattattaggaaagtcgatcaaattaaccttaaatatcataaagaaaaacttgcagagttcagtgataaaataa

SEQ ID NO: 307462 - DNA, 990 bp, Proteus mirabilis
atgagaattagttcaatttatacacaatctgtaggaccattagctgatggtgttattaagttagaagatgattggtctaatgagattgaagctcaagttttatttaccggtaataatggttgtggtaaatcgactttattacggggcatagctattttatgggaagcattaggtatttggctaagtactgaacaaccgttagctccagcgagcaatacacgaaaatggttagaacgttggggagggatcgctattatttttgaagattttaatctttcttctgatgataagattaaattatattttccatctagtgaaaataaacataatgataatctgattgagacctataaatatttagggaaaagacgtattcaatcactttataatgaattggatccagaattatctattcctaatattgtctatttagatgcagaagcgcgtaaatgggtaaatccaacagcaacgagaaaatcattatacccagacgatcttaaccaagcatggctcgcgacttatacggtgactaatgattggaatgggcaaatagaaacttcactgtttaatttaaaagcgacactgcctaatgaataccctaacatgataaagagtttaaattactttttttcagataaaagaattgatagtgaaattcttccaggtacacgtcaacagattattttatcaaatggaaggcaacatacgtttgatgagttaagttctggcgaacatcaaatacttattatgttatttacaatccaacgttggctaaaaccaggaggaattgtattaatagatgaacctgatctacatctacatccttctgttatcgcacctctcttagcggctatcgaaaatattgtgactaataagaaagggcagttaattttaacgtcacactcaacagaagtttggcaacgctatgaaaaatttggttcacgtattgatcttactttgctaaaaggatcggtgaatgtcgaaaattga

SEQ ID NO: 307463 - DNA, 1050 bp, Proteus mirabilis; identical to SEQ ID NO: 305938

SEQ ID NO: 307464 - DNA, 528 bp, Proteus mirabilis
atgtccaaatcctcttctgttttcgataattacaatctagaacttaggaagttaaaaaaagaaaacaagaagttacataagtctttagaaaaaattaagttatcaggaacagatgctcaaattaataatgcaaagcggaaatatcaagcggcgaaacgtaattacaataaaattatagatcctttgcgatacatgaaaaattaccaggcaactttgaaaagaagaaataggtcagagcaaccaaactatatttttgcagatgagagggagtggcgatttgttccggatatagaaatgtcaaagggaaagtcactgatcgttgctggacaaaacatagtaactcaagatgacaagagaaagtacaacgaagaatatgaaagcatcaggttgcctttttctcaaaaggatattaaatatataattgttaagcatgaaagtgatgttgaaaagatgatggattttctgtgttcaaaaaatatattgtttccaagggttctttcaaccgaattgatagcgaatgatatgtaa

SEQ ID NO: 307465 - DNA, 270 bp, Proteus mirabilis
  misc_feature (217)..(226): n is a, c, g, or t
atgtcacgtagcttatacccaactaccttgtttcattttactaaagagttagaaaccttatttaagatacttgaatcaagcaattttcgaatttctttcgctaaagaatttatacaaggcccgcacacaaatagaaatattgccataccgatggtttcattttgtgatattaggctaacacagcttaatcagcatactgaaagttatggtcattatnnnnnnnnnntggcatcggattatccaaaagttgggcaaatgaaaatgggctaa

SEQ ID NO: 307466 - DNA, 555 bp, Proteus mirabilis; identical to SEQ ID NO: 301358

SEQ ID NO: 307467 - DNA, 1497 bp, Proteus mirabilis
atgtttttatttaaaaaagctgttatcgctttgtcaattaatatcgcattagtttcttcggctctggcctgcacaacgttattagcagggagtgaagcaactaatgatggctctttgattgtagctcgtagcgcagatagtgatgctttaaaagcacaacattttgttattcatccagccaaaagcaatcagactggcatttatagcactcaagcccatcatggcgctaataactttacttatccactacctaaacactcattacgttataccactgtacctaattggaaaactcaattgcatggtgcaacgggttttaatgagctaggcgttggggtgagtggtacagaatccatttttgcctcacctaaagcattggcgttcgatccttatgttgaagatacggggatcactgaagatgatattccagatattttactctcaagggcaaaaactgcccgtgaagcaattgaattactggggaacatcatcgaaacacaaggtgcgggagaagggtttggggttgccgtcgttgataaaaatgaggtgtggtacctagaaacaggtacaggtcatcaatggatggcgcaaaaactaccaaaagataaatattttgcgacgggtaatcaagggcgtttacaggcttaccatacagatagtaatgataatttaggttctaaaaacttagttgagtttgcaatagaaaaaggactttatgatcctgccactgatggcgaatttaatttttctaaagcctatacgcgtgatgatgaacgtgatctcacttataattacccgagggtttgggttatccagcaacaatttaacccttctctgaaacagaatgtggcagatggtcgtcaatttgcgcctatgctgacaccggagaaaaaagtatcagtagaagacgccaaagcgatgttacgcaaccattttgacgatacagaacatgatccttataccaatggattgaatggcaatgaaccatggcgaccaataagtgtgtttcgtacttatgaatctcatgtgatgcaagtaagacctgaattaccgcaagagattggtgaagtgacttatgttggtttgggaatggctgatctaaccgcttttgttccttattacagtggattaaaagcatatccgcaacactatgctattggaacagataaagcagataatgactctatctattggaaatatcgtaagttacaaacattagtaatgacagattatcctcaatttgctcctattgttaaaaaagcataccaagaatgggaagctaaaacagcattagaacaaaaagaaatggaggctaactatttgtcaatgagtaaaaagaataaagcagcagcggataacatgctgaatgaatttaacttacgtgtaatggctgatgcagagcaactaactgaaaacttaactaatcaactctttactcttaaaactaaaaatatacaagatgggatcttttttgctaatcaatctaaaaaagattaa

SEQ ID NO: 307468 - DNA, 426 bp, Proteus mirabilis
atgaatacaatacaatgtggtgaaaacactaaacaagattgcgttattcaaaaactctcttatttttatccgcaatatcaaatattagaaaataaccaaaaagctttatacataatcagaaataatgcgctggtattacaaaactgcacaaatacaataactattaacaaagatcagattattttcttacaacaaggaaattataccataaaaacgctaggcaatgagccttgtgaaacaatttatattcctctttctgatgatttcttaagaaatttcatgtcaaaaaatagtgatattctcagtaatatcgatcttcacaaaattgtccagatacttttactcaattacgtattgaagaaatgctcattctattactttcttccgagcaaggtgccaatcttatggcgttactacgccaattaa

SEQ ID NO: 307469 - DNA, 348 bp, Proteus mirabilis
atggcgttactacgccaattaagtcataggcaagttgatcgcttgaaaatatttatggaaaaaaaccatctaaaaaattggaagctaaaacagtttgctcgcgagtttggtatgggtctcaccacatttaaagagttatttaatcatgtttatggaacatcgccaagaacatggatatgcgaaagaagaattatttacgcacatcaattattattaacaacagaaatgagtattgtcgatatttctatggagtcaggattctctagccaatcttactttacacaaagctatcatcgacgttttaatatgacaccgagtaaagcgagacatcttaaattaaaattataa

SEQ ID NO: 307470 - DNA, 1122 bp, Proteus mirabilis
atgtctttgattgatgaaataaacaacgctaggctacaagttcatgcagattcataccctatgtcaataggagagcttgtaaacttatatattgatgaagaacttgaaattcatcctgaattccaacgggtttataggtggacacctgaacaaaaaagtaagttaatcgagtctatattgttaggtattccattaccatctatttttgtatctcagagacaggatggtgtatgggatgtcgtagatggattacaaagattatcgactatattttccttcatgggggaattaagggatgaaaatggagataaattaccagcgttagaactattatctacaaaatatttaccttcactatcaggaaaagcatggaataaacctgatgataaaagtaatgaattagatcttgatattaaacgagtttttaaacgagaaaaaattgatataaaaataattaaacgcgaaagccaagatgataccaagttcgaattatttcaaagattaaatactggcggatcaaagttatcagatcaagaagtccgtaattgtatgctgcttatgataaattcagatgcatttgagtggttacaagaaatatctaaaaacgaagacttctatacaacaactcctatttccaatagattagaacaagaaagatataatcaagaattagctttacgttttataattcaaagacattatagtgaaccattacgtaaactacattcagatgtaggcccatacttagatgctgaactaaatcgtattttttctaagaaagccactgttattgattatcagcatgaaaaaacaatttttgataaaacattttacttattgaataaatctcttgaagataatgtcttcaaaaaatacaacccagaaaagaaacggttagaaggtcccatatcaatcccagtttatgaagctttatccacagctgtttcgttttatatagaaaagaaccctagctatattgaatcagagctaatagaaaaaataatatctgccagtacacaaatatcctcacattctgattttatcaatatcttagaaaaaaacacccgaccactagatagaatggtcgcaatgattaatctaggaaaggaattaattcagtga

SEQ ID NO: 307471 - DNA, 522 bp, Proteus mirabilis
atggttactgaaagtgccatgcgtaaggcttccaatgcacaagctatagcggaggctacaaccactggcgcagcaattacaaatgctatggctccggcagcagcgacaaccagtattgccacgatgggctctgccgccacatggggtatggctgcaatggcaacagctattcccgctatgattgcgcttgctggtgctcgtaaaaatggtgggcccgtaaatgctggctctatgtatcgagtgggtgagggtggtaagcctgagatattcaaggcatctaacggtagtcagtacatgataccgggtgataatggtcgagttattagtaatcgacaaatgggtaaaggtggtaatggtgtcagcatgggtgatatgcactttacattccaagttcaagcacctaatggcatcactcaaaaggaagcgcaacaaatacagcaaatggtgagaggtacggtttatgacgtacttggtaacgaaatgcgtagcggtggtgctttggaaaaagtaagaagttggtaa

SEQ ID NO: 307472 - DNA, 675 bp, Proteus mirabilis
atgaaaataggaacaagaattagagaactaagaaagaaaaaaggattaacaatccttcagctggccaccgctattaatagcgatgtgggtaacatttctcgccttgaaagaaatatacaaggctacacagaaaacactttagtaaagatagctgaagcactaggcgtatctgttgctgatttatttactgaaaattcaccagagccagatagaatagaactgattggtaagataccttctggtttagttcaagttcgaggtgaggcgttcttgggtgttgatggcgctgttgatatgattgaggaccacaacggctggctaaaaatatatagtgacgatgctgatgcatacggcctaaaagttaaaggcgacagtatgtggccacgcattcaatctggtgaatttgttgtcgttgaaccaaacaccaatgtcagatctggtgatgaagtatttgttcgcaccgttgaaggacacaatatgattaaaatcttcaacaagacaagagatggtgactaccagtttaccagtatcaataactcacataagccaataactttatctccaggtcaagttgatactatgcattatgtatcagctatagttaagcctacaaaatatattgataaatgcgaaggtgaaacaaagctaacccttgttccaccattgattgactag

SEQ ID NO: 307473 - DNA, 627 bp, Proteus mirabilis
ttgcaacataaagcttatcatcctgagcatgccgtaatcggcagcacaacgccattagaaatttctgctaatcatgccgtcaatgggcattctatctgtgagatcccagaaaatatgcaaattgcttattttgccatgggctgcttttggggcgttgaacgcctattttggcaacaacccggtgtttatagcacaagtgccggttatagcggtggtgtaacagaaaatcccacctatgagcaagtttgccaaggccgtaccggtcatgcagaggtcgttcgtgtggtatttgatccgacccttatcagctatcaacaattattggctattttttgggagaatcatgacccttcccaaggtatgcgccaaggtaatgatattggtagccaatatcgctcggccatttataccctaaccccagagcaatatgcacaagctattgagtcaaaacaacgttatcaacaagctatcaatagtgaaggggcacataaagagatcaccactgaaatacaacctgccggacctttctattttgctgaagattatcatcagcaatacctatttaaaaaccctcaaggttattgtggacttggtggcattggtatctgttttccaccggcaaactaa

SEQ ID NO: 307474 - DNA, 1374 bp, Proteus mirabilis
atgcttaatagtttactcattgtgcttttgctgtgtgccattagcgcctttttttcgctgtctgaaatatcactggcggcctcccgtcgtattaaactcaaacagttggttgacgaaggaaatatcaacgccgctcgtgtattaaaaatgcaagaaacccccggtatgttttttaccgtggtacaaattggtcttaacgccgttgccattttggcgggtattgtcggtgaatctgctttttctcccgcattaaaagatctcttttcccgctttttagaagcacctctcgcgcaacaattaggatcggtctgttcatttattatcgtcacatcgatgtttattctgcttgccgatttaactcctaaacgtatcggcatgatcaagccagaagtcattgcactgaaaattgttaatcctatgcgtttttgtctcgccttattccgccctttagtttggttgtttaatggcatggcagatcttatctttaaactatttaaaatcccgatggtaagaaatgaagatattacatctgatgatatctttgcgattgtcgaagccggtgcagtagcgggggtattacgtaaacaagagcacgaattaattgaaaatgtctttgaattagaatcacgtaccgtaccatcagccatgacaccacgtgaagatgttgtctactttgatcgcgaagagacagaagaagatattaagcataaaattgccactcagccccactctaaattcttagtttgtgaaggggatattgaccatattattggttatgtagattcaaaagagctactcaaccgtgtgatcaatgggcaaagtctcaacctcaaagaaggtgtgcatatccgtaaagcccttattattccggataccttaactttatctgacatgctagaaagctttaaaacctcaggggaagattttgccattattctcaatgaatatgcgatggtgatgggcgttatcaccttaaatgacgtgatgaccactttaatgggcgatctgattggcccaggtcaagaagagcaaatcgtcagtcgtgatgagcattcatggttggttgaaggtggaacacctattgatgatgttatgcgggcattagatattgatgatttcccggattctagcaattacgaaaccattgctgggtttatgatgttccgtttgcgtaagatccccaaacgtactgactatgtgaagttcgcaggttataaatttgaagtggtggatattgataactataaaattgatcaactgcttgtcactaaaattgatgatattccgccagtaaaaccggttttgcaagaagcaatacctgctcctcaaacaacgtcagaagtgccttttgagcacgaagagcataaagcctaa

SEQ ID NO: 307475 - DNA, 207 bp, Proteus mirabilis; identical to SEQ ID NO: 295825

SEQ ID NO: 307476 - DNA, 561 bp, Proteus mirabilis
atgcacaaaataaccttggctgcacttttgcttagcacatctacatgggtatttgcccataatattactgaagaaactctcctaccggcgatctctgtgagtgacaaaggggagcttctttatgatggtgccaaagataaatttagctatcaaaattggaatagcggactacttagtggcaaagtacgcacaattcaacatatcgctggacgcagtaaggctaaagagatgaatgcgccactgattgaagccatcaaacaagccaaatttccacaaaatagttatcagacaaccactatcatcaatactgatgatgctatctttggtactgggccttttgttcgcggtagtgttgaagacagtaaaaaagagtttccttggtcacaatttattgttgatgctgatggtgtagcgcaaaaaggttggggactagaaaaagagagttcagcaattattgtgctggataaacaaggaaaagttcgttttgtcaaagaaggtgtattaagtggtgcagaaataacttccgccattaaccttatcaatgacttaattaaagaatag

SEQ ID NO: 307477 - DNA, 741 bp, Proteus mirabilis; identical to SEQ ID NO: 305173

SEQ ID NO: 307478 - DNA, 2958 bp, Proteus mirabilis
atgagtgaactgactcatgatggtgtagagcgccaaccgctccacttatttacggaaaatgcctatctcaattactcaatgtacgtgattatggatcgtgcattgccttttattggcgatgggttaaagccagtacagcgtcgtatcgtctatgcgatgtctgaattaggtttaaacagcagtgctaaatttaaaaaatcagcacgaacagtgggggatgtattaggtaaatatcatccccacggagatagcgcctgttatgaagccatggtgttgatggcgcaacccttctcttatcgttatccattaattgatgggcaaggtaactggggggctccggatgatccaaaatctttcgcagctatgcgttataccgagtctcgcttatctaaatattcacagatcctgctaagcgaattgggacatggtactgttgattggatcccaaattttgatggcaccctgcaagagccaaaaatgttgcctgctcgtttacctaatattttattaaatgggacaacggggattgctgtcggtatggcaacggatattccgccacataatgcgcgggaaatcggccaagcattaaccatgctattagataatcctgatgctgggttatctgatgttatgcaatatgtacaaggacctgattatccaacagaagcggaagtgatcaccgctcctgaggatatcaaaaagatttataaaacaggacgtggttctattagaatacgtgctgtttggcaaaaagaagagggttgtgcggtgataacagctctccctcatcaagtctctggtgctaaggtacttgaacaaattgctgcattaatgcgagcgaaaaaattgcctttagttgatgatttacgtgatgagtcagatcatgaaaatcctactcgattggtgattgttcctcgtagtaatcgcgtcgatttagaacaagtcatgtattacttatttgtaaatacagacttagagaaaagttatcgcgttaacctcaatatgattgggttagataaccgtcctgctgtgaaagggctattaaccattttaaatgagtggttagtttatcgccgtcaaaccgtaaccaatcgtttaaaccatcgcttagaaaaagtattacgccgtttagaaattctaaaaggtttattaatcgcttatctcaatattgatgaagtgattgagatcatccgttatgaagatgagccaaaagccgaattaatgcgtcgttttgcattatcagatattcaagcagaagcgattttagagttacgtttacgtcacttagctaagcttgaagagataaaactgcaagctgaaagtgatgaactggaaaaagagcgcgacagtattgaaaaactgttaaattctcctcgccgtctcaatacgttattgaaaaaagagatagaggcagacgctaaagagtttggtgatgaacgacgttctcctattcgacctcaagaagaggcgaaagtggttaatgaacaagatatgttgccatcagagcctgtgactattgtgctttctgaaatgggatgggtgcgtagtgcgaaagggcacgaaattgatcctagtaccatgagttatcgtgccggagacagttatcatagtgcggtacggggtatgagcaaccagccagtattgttccttgattcaacgggtagaagctatagtttaagtcccaatgacatgccatcaggccgtagccaaggtgagcctttaaccggtaaattgaccttcccacctgacgccagcgtaaaatatatgttagcgggagccgctaaacaggagtatttactggcaacgaaagagggttatggctccgtactcagttatgaagagatggagacaaaaaataaaaccggtaaagggttgttaacggtttcagatgaaacagaattgctagcgcctttcttagtcgatgcagaaaagaaaaacaatcaacattggttagttattatcaccgataaaacacgtattctggcgatatctgcagaacatctaaatgagatgaataagaaaggtcgaggcactcgcttagttgcattaggcaaagagcaaagtgatgttatcgaacaaatcgtgttaatagcaaaaaatgaagccctcacatttactgttgatggtcaacaacaaacattaaaagcagaagagattagctattttagtggtgatgttggcgatgagcctatcccattaaaacatcttcaccctgaagcggttaccgtgatcatgtccgaaaaagggcttatccgttgccaaaaaggccataacattgatgcgaaatcagtgggctttaaaacaggggatgattattttgatgcagttgaagggatgagcaatcaagcggtacatctgattgataccacgggtcaaagttatactgttgatgttgacgcattaccatcaggccgtagtaaaggtgatgatttaacaggacgattaaaagtccaaaaaggggctcaattacgtcatgtagtgatgggggaaagtagcgataagatcttaatggcatccgacgctggttatgggtttatctgtagtattgatgacttaacctctaaaaatagagctggtaaatcattattaacattacctgaaaatgcattaccattaccacctcaacgcttaaatgatgaattgagtgatttgatcatgatcattactcagggtgggcgaatgctgatttttgaagcctctgagttgccaactatggtaaaaggaaaaggtaaccaaatggtttctattcctgcttcacaggctgcaagtggtgaagataaagtcgcttggttgcgggtattaccagaaaatgccagtgttacattgcattttggtaaacgtaaactcacgatgtcgatgaatgaattacagacatttaaagccaaacgtggtcgtcgtggaacctcgctccctcgtggtgcacaaagtatcgatcatatagatatcgaaactcattaa

SEQ ID NO: 307479 - DNA, 1419 bp, Proteus mirabilis; identical to SEQ ID NO: 303644

SEQ ID NO: 307480 - DNA, 1020 bp, Proteus mirabilis
atgaatatggaaaaattaattatatatagtgtaaagcataatgcttccgatctgcacctttgttgtggcgatgtgccacgattacggatcaatggcgtactttatcaacaaaatcaatgtaaacctattacttctgatacgctattcaaatggataacaccttatctgaccacagcgcaattgcaattttttggtaaggaggggcaagttgatacggcgataactcttgctgaggggcagcgcttacgagtgaatttatttcgccaacaattagggatatccgcagtactaagagtgataaattcacaactcccgacattaacatcactacgcgtaccaaaatcaatcactgcattattagataatgtttctaatggactcattttagtgacgggagcaacagggagtggtaaatcatccacattagcggcgatgattgattatctcaatcagcataagcgtcagcatattcttactttggaagcgccaatagagtttatttacaccaataagcaaagcattatccaacaacgtgaaatagggcgcgatgtacaaaatatagcgagtgcaatagaagctgcattacgccaagatcctgatgtaattatgctaggggaattaagagatctagaaagtattaaaatggcattaattgcggctgaaacggggcatttagtactagcaacattacatacacaaggcgttgttcaaacgttagagcgtgtcactaatgtattttcatccaatgaacgacaatggatctcggcacaattagctgggagcttaaaagcaattatttctcagcaattggttcctgcaacacaaggcgggcgtgttgctttgtttgaagtgatgtatatgacgcaggggattgcacatctgatcagagaagggaaatatcatcaagtgacgacattaatgcaaactgggtttgaatatggcatgcaaaccttcactttaagtcgccaacaacgtcaatatgaaggtttgctcaatgagcacatcaatgaagaaaattaa

SEQ ID NO: 307481 - DNA, 417 bp, Proteus mirabilis
atgtccccaaaagcaaaatcatggctttggatgctggcggttattatttcagaaacctcagcaacctcgaccttaaaaatgtttgataatagtgaaggaataacaaagacattattattaggattaattattgttctttatattgtttgttattattcattatctcgtgcagttaaaaatatcccagtaggcttagcttatgccacctggtccggaaccggtatcttagttgtatctactttaggtatggcattttacggtcaacatcctgatacggctgctattattggtatggcagttattgctagcgggatcgtcattatgaatctgttttcgaaaatgggttccgaagaagagtcagaagaaacgacggagttatcaaatataaaacagactgtatcgtcagtgaataaataa

SEQ ID NO: 307482 - DNA, 186 bp, Proteus mirabilis
gtggaagatagatggttatccgttgatgagattgcagactatctcggaataaagcgagagacagtctacaagtggattgctgagaaaggtatgcctgctcacaaaataggacgtctttggaagtttaaaaagactgaagtcgatatctgggtacgcgaaggaaaagctggcgaaaacaatgagtaa

SEQ ID NO: 307483 - DNA, 3069 bp, Proteus mirabilis
atgaaaacagttcgtaatgcctgccagttgcaaccgaaagctttagagataaatgttggcgatcaaattgaacagcttgaccagattatcaatgatactaatggagatgagtattttaaaaagacctttattacagacggatttaagacacttctatcaaaagggattgcgcgcctagcaggtaaatctagcgatacagtgtttcacctaaagcaggctatggggggcggtaaaacgcacttgatggttggctttggtttgcttgcaaaggattcatctctcagaaatacccatatcggagcgatgccgtaccaatcagattttacttcatcaaagattgcagcctttaatggccgaaataatccccacacttacttttggggagaaattgctcgccaactaggtagagaaggtgtatttaaagaatattgggaatctggtgccaaagctcctgatgaacaagcatgggtgactttatttgaagggaatgagccgatacttattcttcttgatgaaatgcctccctattttcactactacagcacacaggtgcttggtcaaggtactattgctgacgtagttacacgtgcattttcaaatatgctaacagctgcacaaaagaagaagaacgtatgtatcgtagtctcggatttggaggctgcatacgatacaggtggcaagctgattcaacgagctttagatgatgctacacaagagcttggacgtgctgaagtttcaattacaccggtaaatcttgaatcaaatgaaatttatgaaattctaaggaaacgcttatttttagcgcttcctgacaaaagtgagatttttgagatcgcctctatttacgcatcaagacttgctgaggcagctaaagccaaaactgttgaacgtagtgctgaagctttagctaatgatattgaatctacttatcctttccatcctagcttcaaaagcatagttgcgctcttcaaagagaatgagaagttcaaacaaacgcgtggtttgatggagttggtttctcgattgttaaaatcagtttgggaaagcgacgaggaagtatatttaatcggtgctcaacactttgatctttcaatccacgatgttagagaaaagctagcagaaatatcagagatgcgagatgtcatcgcacgcgatctttgggattcaaccgatagcgcgcatgcacaacttattgatttaaatagcggcacccactatgccaagcaggtaggtacaattttgctaacggcaagcctatcaacagctgttaattcggttaaaggtttaactgagagcgaaatgcttgagtgcttgattgatcctaatcatcaaggaagtgattacagagctgcatttgcagagttagccaagtcagcatggtatatgcatcaaactcaagaaggtcgaaattattttagccaccaagaaaacctaaccaaaaaacttcaaggttatgcagataaagctccagagaataaagtccgagagttgattagttttcgcctagaagaaatgtaccgtccagttacaaaagaggcttacgataaggtactgccacttcctgaaatggatgatgcagaagcagcactgaagtcctcaagagcactattaatcataagcccagatggaaaaaatccaccaggagttgttgctaatttctttagaagcttaattaataaaaataatatacttgttttaaccggtgataaatcatcaattgtaagtattgaaaaagcagcacgacatgtttacgcagttacaaaggccgataatgaaattccaacctctcatcctcaacgtaaagagcttgatgaaaagaaagcccagtatgaacaggactttcaaactactgttctgaacgttttcgataaagtattattccctggcaatagtggagggcaagatttgctgcgctcaaaggcgttagatagcacctacccatcaaatgagtcttacaatggtgagcgacaaataatcaagacgttgacgtcagatccaatcaaactatatacgcaaatcacagaaaactttgatgcgttgaaagcaagatctgaatcattgctatttggaactcaggatgaagctcgtaaaaccgatttgctcgataaaatgaagcaaaagacacagatgccatggctacctagcaaaggttttgagcaactttcaatagaagcttatcagagaggtgtttgggaagatcttggaaatggatatatcaccaaaaagcctaagccaaaaacaacagaagtgattgtaagtgaggactcatcacctgatgattctggaactgtacgtttgaagatcgatgttgccaatgcaggaaacagccctcgaatacattatgcagaggatagtgaagtttcagaaaatagtcccgttttaggggaaaatattttggcaaccaaagctttgcgtgttcaattccttgccgttgatccaactggaaaaaatctcacagggactcctacgacatggaaaaatcgactaaccattcgcaatcggtttgatgaaattgctagaacagtagagttgtttgtagccccaaaaggaaacataaaattcaccctcgatggctcagaagccagaaatggtgagtcatacaatgaacctattcagttatccgatcaggaaactacagtgtatgtttttgctgaatgtgacggattagaagagaagcgtaacttcacttttgcggaatctggttccaaagagatccccattgtaaaagacaagcccgcgatcttagtgagtccctctccaaaacgaatggacagctcaaccaaaacctatgaaggcctaaaaattgcacaggaaaagggcatagaatttgagcaagtaagtctaatggttggatctgctccaaaagtgattcatttatctttgggtgagatgaaaataagcgctcaatttgttgaaacggctttggctcatttgcaaagtattcttagtcctgaagcacctatagtgatgacttttaagaaagtatatacaaagacaggtcatgatttggagcaatttgccaagcaattaggaattgaaattggaaccggtgaggtcgaacaacgatga

SEQ ID NO: 307484 - DNA, 588 bp, Proteus mirabilis
atgagtaaaactgttgacttcggtgcaccgcctgattttggcatgcatcacttttatgtcgagatcccaacagctcctcgtgatgcaattgttatttacgaggactatggcttcgatggtgacgaatctcgtcgagagaccgtagaacgacgccttattttagcaagagagttatggaccaaaattcgtgatgatgcacgcagagacttcaacagccgcttaaaagtaaaaaaacaaagcgcaggctcttggtctactggacgagtgaagttagatagatttttagggcgggaattgtgcgtacttggttgggctgcggaacacgcaacaccagacgagtgttcagtaatttgtcaaaaatggcttgctatgcggccagaagaacgatggtggctttatagtaaaactgcctctgaagccggcaagcacgaccaaactcaaagaggttggcgaaaggctctctactgcgctctttcagacggtagcaatattaagttaggtgttaaaaaaaagcctaaaacaaaaaaaactaagcatgatgaagaaccacaaggtcttttcgacttcatggaaaaaggagatatttaa

SEQ ID NO: 307485 - DNA, 2847 bp, Proteus mirabilis
atggcattacaaccttacgaatggaaggataaaccagctctgattgagcgcctttttccagttcaaaaaatttccgcagaaagttttaaagaacaaagtgctgttcaaagcaaggctctgacagctctaggaagctactggaaggggcgtaaaccacttattctcaataaagcttgcattcttggagcgctcttgccagcaacagatgatgggcttaaagaccttgaaatctttgagttgttgatgggaatggacccagagtctatgcaaacaagaatcgaagaaactctgccagtatcgaaaaaggaaagtgttggtaattacctaaaacttccctaccatgatcaagttagagcagggaaaaggccagaagaaattggcgaatcactgttttctttaatttgggggcgtgtaaatacacacttaggcacatctgcaaggtctatacctgagttggttgaggaaatggggattgcacgctttggacgaagaccaaaagtcgctgacgtcttttcaggctcagggcaaataccttttgaggctgcccgtttaggttgtgatgtatacgcctctgatttaaaccctatagcatgtcttttgacttgggggagctttaatatagtgggagctaactcagagcgtcgaaactccataagaaaatcccaattgagtgtggttaaggctgtatctgagaaaataagtgccttgcaaatagatactgatggatacggttggagcgcaaaagcatatttgtattgcgtggaagtaaaatgcccagagtctggatggatggttccactccttccgacaatgatagtcagtgctagtaagtttgttgttgttaagttagtgccggatcatatcaataagcgatataaaattgacacttactattgtgaagataaacaggagatggagtcactctcttcgggtactgtcgacagtggttatctagttcattccccagatggcattaataaatatcgtgttagtattaaatcggttagaggtgattacaaagaaggaaaggagaacaaaaatcgtctaagaatgtgggaaaaagatgactttatacctcgtactgatgatattttccaagagcggctctactgtatacaatggatgaaaaaaaagccttctggaaaacagtttgattatgagtttagagctgttacggatgaagatttggctcgggaaaatacggtaattgaatatgtcagtcaaaatttgtcacgttggcaagctgatggccatgtgtctgatatggtaattgaggcaggtgataaaactgacgagccaattagaacacgcggctggactcactggcatcatttatattctccacgtcagatattaatgcttgcattagtgcatgaagaaatcaaagagcaacccaataattctgccgagctagagatatttttctctcgcttattagattggtctaccaaactgtgtcgttacggtactggtgcttctcgcgaatcgattgcgcagaccttctataaccaagcattaaataccttttacaactatggagttcgacccttttcatttgcctcaacatacttattagaagaaacatataattacccagtaaattttgagacaaaagtcaattctcatccagctcaacacattgatattattaatgatatttatgtcacagatccaccttatggcgatgcagttaagtatgaagaaatcacagaattttttatagcttggctacgtaaaaatccaccaaaagaatttgctcattggacttgggatagtcgtcgagcaatagcaattaaaggcgaagacgatggttttcgaactggtatggtggctgcctatcgccagatggcgcagaaaatgccagataatggcctacaggtactgatgtttactcatcaaagtggaaccatatgggcagatatggctaacatcatatgggccagcggcttgcaagtaaccgctgcttggtatgttgtaacagaaactgacgctgctattagagggggggctaatgttaaaggaactattattctgattttgcgcaagcgtcaccaggcattagagacttttcgtgatgatttggggtgggaaatcgaagaggcggttagggagcaggtcgaatcattaatcgggttagataaaaaagttagagatcagggatctgatggtctctatacagatgctgatttacaaatggctggttatgctgctgctttgaaagtactaacggcatactctcgaatcgacggtaaagacatggtgactgaagccgaggcaccacgacaaaaaggcaaaaaaacttttgtcgatgagttgatcgattttgcagtgcaaacagcagttcaatttttggtgcctgttggttttgagaaaggcgaatggcagaagcttcaagcggttgagcgcttctacttgaaaatggctgaaatggagcacctaggagcaaagaccttagacaactatcaaaactttgctaaggcgttcaaggtgcatcattttgatcagttaatgagtgatgcctcaaaggccaattctgcaaggttaaagctatctgttgagtttaaaagttcgatgatgtctggtgatgctgaaatggcgggtacactattgagggctttgctctatgcactatatgagctttctaaggatattgaggtcgatgatgttttgttacatttaatggataattgcccaaattatcttcctaataagcaaatactggcaaaaatggccgattatattgcagaaaaacgcgaggaattgaaaggtacaaaaacttttgatcctgaacttgaagcgagctgtgcccgtgtccttgctgaagcaattcgaaaccaaaggttgtaa

SEQ ID NO: 307486 - DNA, 2721 bp, Proteus mirabilis
atggcgattcggcgattttcttcacgcacagaaaggttagataaggaatttttagctgaatctcttaaaggagcttctaagtattttcgcattgctggatattttagaagctcaattttcgagctaattggtgaagaaatatctaaaattccagaagtgaaaatcatctgtaattcagagcttgatttagcagattttcatgtggcaacaggacgcgatacagcattaaaagaacgatggaacgaagtagatatagaatcagaggcgttacttaaaaaagatcgttatcaaattctcgaccaattactacagtcgggtaacgttgaaatccgcattgtaccaagagagcgtctgtttttgcatggaaaggctgggtcgattcattatagtaatggatctcgcaagtcctttattggttcggttaatgaatcccaaagtgcgtttgcccataactacgaacttgtatggcaagatgatgatgaggaaagcgctgactgggtcgaacaagagttttgggctctgtggaatgatggtgtcccattacctgaagcgatactcgcagaaatcaaccgcattgcaaatcgtagagaagttacagttgaagccttaaaacctgatgaagttcctgctgctgcaatggcagaggctcccatatatagaggtggtgaacaattacagccatggcaacgctcctttgtaactatgttcctaaaacatagggaggtttatgggaaagctcgtttgttgcttgctgatgaagttggcgtcggaaaaaccttatctatggcaactagtgcactggtaagtgctcttttagatgatggtcctgtgcttatacttgcgccttcgactcttaccattcaatggcaaattgaaatgatggataagctgggtgtacccgctgctgtatggtcctcacagaagaaggtttggcttggtgttgaaggacaaattctctcgccgcggggtgattcttcatcaataaaaaaatgtccttatagaattgcgattatctctactggtctaataatgcatcaacgtgaaagagctgattttgtaaaagaagctgggatgctactcaaaaatcgctttggaacggtgattcttgatgaagctcataaagctcgtgctaaaggtggtttaggtgaccaagcatcagagcctaataatctaatggcatttatgcaaagaattggcagacggacccgtcatcttattttgggtacagcaactccgattcaaaccgatgttcgtgaactttgggatcttcttggcatattaaatagtggagctgagtttgttctaggtgatgctttatcaccatggcacgactatgaacaagctattccattaattacgggtaagactcaggttacatcagaggcggaaatatggacttggctaagtaatcctctacctcctggaggtgaacactatattgtccaacaaattcgagattatttgcagattgatagcaaaacctttatttgctcccatcatttcaaagatcttgattatatgattcaacatctctggttgtcagaatgccttatccctgacttttttaagaaaaataatccagttttgagacacacagtactcagaaagcgcaagcaactggaagatgatggactgcttgaaagagtaggtgttaatacgcatccaatgatgagaaatttaggacaatatcaatctcgatttgttgggctgggaataccgacaaatacacctttccaagtcgcatacgaaaaggctgaagaatttagtaagctacttcaatctcgaacacgctctgctggttttatgaagtcattaatgcttcaacgaatttgctcaagctttgcgtcagggttgaaaacggctcagaaaatgcttcatcatacgttgtcacatgaagacgaggatcttgtcgaggatgtagagcatattctctctgaaatgacaccagcagaagtttcctgcttaagagaaatcgaaacacaactttctcgttcagaagctgttgattcaaaacttaacactgttaaatggttcttaactgagtttaaaacagatggtaaaagctggctggagcatggctgtattatttttagccaatactatgacacggtagagtggatagcaaaagaactcgcaaaatccttcaaaggtgaaattgtagctgtttatgctggtgttggtaaaagtgggcttttcaggggggatcaatttaacaacgtcgagcgtgaactaattaagtctgctataaaaactcgtgagattagactggttgtagctaccgatgcagcgtgtgaaggtctaaacttacagacgttagggacactaataaatatagatttaccatggaatccatctagattagagcaaagactaggtcggatcaagcgtttcggtcaggtgagaaaattcgtggatatgcttaatctcgtttatagtgaaactcaggatgaaaaggtctacaacgtgctatcagataggcttcgtgatacatacgatatatttggtagtttacccgatacgattgatgatgactggattgatgatgaggaagctcttaatatacgaatgaatgaatacatacatgaacgtaaaaaagcacaagatgcattttcgattaagtatagagcaagcttagagccagatgcaaatctttgggaaagatgtgcatctgtactttcacggaaagatattataaataaacttagtgagccatgggaataa

SEQ ID NO: 307487 - DNA, 639 bp, Proteus mirabilis
atgctgaatatgctgaatatgctgaatatgctgaatatgctgaatatgctgaatatgcacatagctgtaacggcttccccatgcctaaaatcggggattatttctgttttaatcacgaatttagaaaaatataacgaaggtgaactggttggtgagtggcttgaacttccggcaacctcaaaagagatcgaacactgtttagtgaggattggcattgatggtattcgctatgaagagtattttttgacggattatgaatcctcaattgatggcctttcgtcctacatttcagaatatagccttttagatgagttgaacgagttagccacgcaattagccatgttatcgcctgatgagattgacctttatcaggcggcaattgaaatcggttattcaacgagttcaattcaaggtttaattcatttagcggataatttagattctatccagcaattagagggggtcaataatgaatatgatttaggttattactggatagaagaaagtggttgttatgatttagcacaacttggtcacttatcacactactttgattatgaacgctatggacatgatgtttgtattgaacaagggggagttttttatggtgggggatatgtttatcatacgtgcgggtag

SEQ ID NO: 307488 - DNA, 1269 bp, Proteus mirabilis
atggctcttactgatgctaaagtcagggctgccaagcctttggataaatcgtataaattaacagacggtgatggtatgcacttgatggtacataccaacggatcaaaatattggcgtttacagtatcgttttggcggtaagcaaaaaatgttagctctgggtgtttaccctgatatttcactcgcagaagccagagagaaaagagatgccgccagaaagttagttgctaatggttttgatccaagtgaaaaacgcaaagaagtgaaagaagagcagcaaaaagaatttaatacattcgagaaggttgcacgtgattggcatgcaaccaataagaaatggtcggaagggcatagccatagagtcctcaaaagccttgaggacaatatctttgcggctattggtaaacgcaatattaccgaactaaaaactcgtgatctactcgaacctattaaagcggtagagatgtctggacgtcttgaggtcgctacacgtttacaacaacgtgtgacagctattatgcgttatgccgtacaaagtggtttaatcgactataaccctgcacaagatatggctggtgcagttgcgacaggcaaacgagttcatagagcggcattagagcttaaacgcctacctgagttcttacaacgcatcgatgattataagggaagacctttaactaaacttgcagtcaaacttaccttgttagtcttcattcgttccagtgagctgcgttttgcacgttgggatgaaatcgattttgaaaatgctatgtggacgatccctgctgaacgcgaagcgatagaaggcgttaaacactcacatcgcggatcaaaaatgcggactacccatttagtgcctttaagccgacaagctattgagatcttaaagcagatctatcaattcagcggtaatcacgaactgatctttatcggtgatcataatccaagaaaaccaatgagtgaaaacactgttaacaatgcattacgtgtgatgggctatgacactaagacggaagtctgtggacatggtttcagaacgatggcttgtagctcgttgattgagtcaggcttgtggtcgaaggatgcagtagaaaggcaaatgagccaccaagaacgcaactcagtaagagctgcttatattcataaggcagaacatatcgaggaaaggcgactgatggtgcaatggtgggctgattatctggatgcgaatcaggagaaaacaatatctccttttgactttgccaaattgaataatccaatgaatcactaa

SEQ ID NO: 307489 - DNA, 249 bp, Proteus mirabilis
atgaataatgaattaagtaatgctggtgtcaaacgagaagaactcccgacatcattaatgtttgtaagcatagtacataatgatacatctattatgtctgattattttggtttacttgcagatttaacaaaactaatagctagtacacaagaagataatcaaattattgtctatcacacatggggggatcacgttgcccccaaattaggcagtgcattaataaactataaagtaaacgaagcatcataa

SEQ ID NO: 307490 - DNA, 177 bp, Proteus mirabilis
atggcaaaaatagtagcagaacgaaaagtgaagcaacgtaagtggcaaaggaagtctgacgttgccaagattgatttatttcttgatgagcaagaattagaaatgcgtcaaagaaattgtgcattacgtagactagaagagagccttatgctatcggtgaatatctttcgatgttaa

SEQ ID NO: 307491 - DNA, 165 bp, Proteus mirabilis
atgaataagcaaaaggaacaatcaagacaacaatttaaaaactgcattgaagaaaattatccagatgcttgtgaaatggctgagtatgccatgtggttggtatggcgagcatcgcgagaaaagtgtgtactcaataccaaaaacagattaaaaacaaaatgttga

SEQ ID NO: 307492 - DNA, 972 bp, Proteus mirabilis
gtgaaaataaatagaactgtcgccattattggcgaatgtatgatagagctaagtggccaaccttttttgccacaacaacagcgttttgggggcgatacattaaatacagcactgtatttagcgcgcctcattcctacattacatccgcaatatataacaggtttaggcactgataattacagtgccttaatgcaaaaagcatgggaaaaagaggggatcaactgccagtcagtgatcaccattcccgaaaaacttcccggtttatatgccattgaaattgatacttgtggtgagcgtagcttccattattggcgtagtgatgccgctgcacgttatattgcaacggacaaccgttttgcaacacatctagataccttgcccgacgatagtgttatctatcttagtggtatttcactggccattttaacgccgaaaggaaaagaagcgttaatcacgcaattaatccgccttaaacagcgagggctcaccttaattgtcgattcaaactttcggcctcgtttatgggatctaatacctcatgcgcaagagtggttcgaaaaactatatcgactcagtgatatcgctttagtcaccggagatgatgaacaagctctctggcaacaacccagccttactgagcaaaaaattgtcgaacgccttcatcaatggggcaataaaaacgtcattgttaaactaggagcaaaaggggctttctggtctgatggtgaaaataccggttatatctgccccaaaccgatacagcatgtcatagacactacagcagccggggattcttttaatgctggttttattgctgcatggctacaaaactaccctttgcctacatgttgtttatggggaaatacattagcaggattagttatccaacatcatggcgccattattccccataacatcactgattcattctattcactcatcaaggataaccatgagacagtcaattgttga

SEQ ID NO: 307493 - DNA, 759 bp, Proteus mirabilis
atgtcaaaatttttagcagtaattagatgtggagataattcacttcataaaaactgggttaatgataatgcccaatttgatgtaattcttagttattttggtgaaaatatcccttattctttagataatataaaatatgtacaccactttaaaggatcaaaatgggaaggattatacgatttattccataaccatccagagttatgggctgattatgattatatctggttgcctgatgatgacttagacagtaccgtagaaaatatcaacttattttttgaattaatgcaaaagtatcaattcgatctttgccaaccagcattaacgaataatagttactattcctataaagacttactacaagaaccggatttaatatatagagaaactaattttgtagaagtaatggcgccctgcttttcaaagaaaatcatttctaaagcatatcaaacatttaatgaaaataaatcagggtggggattagatttttattggcctattttatttaaagaagaaaatattaaagttggtgttatagactctacaccaatacatcatacacgaccagtagggatagcaggccatggaagtagtgataaaaccttatcgcctttaaatgaacttcatcaattattagacaagtattcacttgaaatacctacgtttgtagcaacttcacttctaacccaaaaagggaaaatgatacaaaaaggcagtttcagctattctttaagggagtttatgaaaaaaagaaaataa

SEQ ID NO: 307494 - DNA, 687 bp, Proteus mirabilis
atggaaaaatttctaaccgcgacttctacatttattgaaaaatcaacagatacgaaatattttcttttatttactagctttttaattttaacggatattgctttgttgaatacaattaatatctcaatattgcaactgacatatgctgatatcacaaataagttagctataggtgtggttctggtttatatggcattatttcttttttatgtttcaatattaatgcctgttgtttcttatgttttgtttgaatttattaagtttgcttcaccacggtttttgaagatttttccagatgtaaatgaagggaaacttaataaagagggatatatatctatagacattctaaaaaatgaggctgtattagaaaataatagcgtaaagctaaatttgtatttaaagcaagaaagtaaaaataatgatgaattgaggctgtaccagttagcttttacctgtttgattacaagttgtctttctttcatgcttgttcccaacggcactagtactcttttaggttctatatttacgtatgggctaatatcagggaactcctggaatatactcgtttctgtatcaatgctacttttaatggggtattgcatatttttagggataggtggatattgcttgtatcgcttcactgatagatatgtttacttgatgaataataaacatgtaaacccatag

SEQ ID NO: 307495 - DNA, 738 bp, Proteus mirabilis
ttgttagcattacaaaatcttgcttatcaagcggttccagcctatccgttggatatcttggtcgcggaaagccaggggatgattggttatatgatgatgcagaaaatcaaccaaaataatcctacgcaagcaattactacagtaatgactcgtgtttctgttgatattaatgatgaggcttttagagaaccgagtaaatttattggccctatttatgaggaagcagaaaaagaagaattaataaataaatatcaatggacatttaaaaaagatgggcaatattatcgccgtgtcgtaccttcaccagcacctcaaaaaataattgatatagaggcagtaaagcttttattagataaaggtcatattgttatttgtggcggtggaggaggtattccagttaataatataaataatgaatttattggtagtgaagccgttatagataaagatttaacagcagctttaatttctcgtgagttaaatgcagagcactttgttattttaacagaggctgatgccatttataaaaattggggaaccccagaacaagctgctattcgtgaagcaacaccagaagaacttgcaccaatggcagtggctgatggcgcaatgggaccaaaaatcatggctgtcagtgattttgtaaatgccacaggacaacaagctcatattggcgcattacaaaacattcaacaggttattgaaggtcagtctggcactttaatttataagtcttaa

SEQ ID NO: 307496 - DNA, 561 bp, Proteus mirabilis; identical to SEQ ID NO: 305428

SEQ ID NO: 307497 - DNA, 2922 bp, Proteus mirabilis
atgaaaaatatcgtaatacctacctcgttaagctgcttttttttacttttttcccattcaacatggtctgaaaccaatatttcacaaaccaaacaacgaattatcgaccaacgtaattattggttagatgagatcaaaaatggtgttatcacaactagccctcaaaaaggatcgagaaccgccgaattagatagaataatcagtaataattatcaagccattaccggcaaacgtagagaacttgccgaagcggataaatcacagtctcatacttatgtgttgaatacctatgctaatattttatttggtgataaggctaaatcgatcaactttagcgatattcaagcttatcaagatctcaataaattacatagcacaggcacctatgcttatgatacaaacaaaaaaagagtacgctcgatagattttatcttaaaagaactttttttacgtggccgaccttatcaagtacttgataaagaaggtcattatcttgataactacaccactataacaggctcatcttatcccagtggtcatacgtggaacggatacaaacaagctgcagtgttatccatcttattccctgaaaagggcagtgaaatgtttgccagagcaatagaatatggtgaaagtcgagttattgtcggggcacacttcgcaacagataccattgcatccagaataggcaattattacctgctgtcacaaatgcttgcagatgatgacaccacccgcacttttgtagagcttgccaaagaagtccgccaaaatgttgctagccaatgcaaaaatcaacattgcttaacgacctcgacaacaatcactaacgatgaaacaggttattacgcaaccaaagatccagaacctgcaccacgcattacccctaatgaaataccaacatctgccaacgctttactgcgtttacgctttgcctatttaaccagagagcaacgacaatctatcttagcgagtaccacctacccgagtaattcattggctggctgggctgcaaacaaagatgatccaaacgccaattggggattaattaatctcccgaaagcctataatggccctacttatttctacaatcattttattgttaatcaaataactaatgaatttgactttgctgaatttggtcaacttgatgaatggaaaaatgatattagtgggcctggcaaattaatcaaacaaggtaatggcaccttgatcttatcaggcaataaccattttgctggcgttgaagttaatcagggtcatttactgctcactggtgaaaaccactatgcaaaaaattcttccattaatggtggtacattgcttcttgaaggaacactaaacactttactagatgtcaacaaaggagcattgctattaaatggtgggagcgttgattctcaagtcaatatcaataacaaagggatactttctggtaaaggaaaaattaataagctggccgtttattcaggaggcatcgtatcaccgggtcattcaataggtacaattaatatagatgatactgttatttttaattctggtagcaactaccatgttgaaataaattcacaaggtgatagcgataaaataatcagtttgggtaccgcgacactgaatggtggaatggttaatgtatcgcttgaaaatagccaaaatctgctaacaaaagatgatgttcaaagtttatataacacaaaatataccattttaacggcagatcacggtgttaatggtcaatttactgatgtaaatccaaactatctttttttaggtaccacactgtcctacgataaaaattcagtaatactaaatgtcggaagaaataacaccgccttttcaagtgtggctaaaacaaaaaaccaactatcaatcgccaatgcgatagacgcattacccttgggacatcctatttatgaaagcattataagaatggatacagggaatgatgcccgctctgcctataatcaattaacaggtcaaattcatgcggatatcttatctaaccaactcaacaatagccggcaaataaaagaaacactcctctctcagattaaaaatgcagaaataattaatagagagaaagaaagtgcagataacaaaggtcatgtttgggctaaaattctctctaattgggaaaagacttccaatgatggcaatgcaaatagctatgatgcttccacctatggcgtactattaggtgcagatcagcgggttagtcacgataaaatgctgcttggtattgcaacaggggtcaccaaaacctcactatctggtgataacagtcacgcaaatagcgaaaattaccacttatcactctatggtggctatgattttgacacaatcgcgttacgtgctggtgcatctaatacctttcatcgtatccatacaacaaaatcggtcaactatggtgtacagtcagataaaaataaggcgaattacaatgggaacactagccaaatttttattgaagcagcttatcccatcaccctctcagatacacaattagagccttttgttaattttgaatatgccaaaacgaaaaatgctaccattaacgagcaaggtggacgagcagccttacaagcccattcgcaaactctagagtcaaccacctccactacagggctacgtttaaataaccaatggaaatttaacagtaaatcaacggtttctctctatggtgagctaggctggcgacaccaatataacgatgtagaacgagggatccatttacgtttcacacaaacccagcctacatttatagcaaatagtgttgatgctgctcgagatgcactggtggtaaaagctggaacaactatccaaatcaatgagacatcaaaagtctcaattggatacagcggactagtggcaagaaatcagcacgataatggtattgatatgaaactctctatcgcgttctaa

SEQ ID NO: 307498 - DNA, 1380 bp, Proteus mirabilis
atgtcagataatgtcatctcctctatcggcaccaatcaaactggtgttaataaccgtgttcaattacgcaaaacattgacgctaatgcaagtcgtcatgatggggttggcatttttacaacctatgacgatttttgatactttcggtattgtatcaggcataaccaatggtcatgtggcaacatcatatgctattgcgttaaccgctattttatttaccgcagtgagctacgggaaattagtcaagcgtttcccttcagcaggctctgcttatacttatgcacaaaaatccatgagcccacatgttggttttatggttgggtggtcttcattattagactacttatttatgccaatgataaatatcttattggctaaaatttatttacaagccatattcccaggcgttgatccgtggatctttgttgttgcgttagtcgcgttaatgacattttttaatctacgcggaattaacgttgtggctaacttaaataccgttattgttgttattcaagtagctgtaatggtggtatttgttggtttattaattcatggcgtatataacggcgaaggtacaggggagttatggactttccgcccatttgcgtcagtagatgctgaattaatcccaatgataaccggcgcgacaattttgtgcttctcgttcttagggtttgatggcattagtaccttatctgaagaaacacccaatgccggtaatgtgataccaaaagcgattttcttaactgcgttaatcggtggtttaatttttatcgctgtttcttattttttacaattatatttcccagatatttcacgttttaaaaatccagaagagtcacaacctgagattatgctgtatgtagcaggggccttgttccagtctattatcttagtgttttcttgtgtgacggtattagcatcgggtatggcggctcacgcaggtgttgcgcgtctgctgtatgtgatgggacgtgatggtgtattccctgaaaaagcgtttggttatgttcatcccaaatggcgtacaccagcatttaacgtactgttagttggctttttagcgctaggggcgatcttttttgatttagtcactgctacagcgttaattaactttggtgcgttagtggcatttacctttgtcaatttatctgttatttcgcagttctacattcgtgagcgtcgtaataaagggttaatggatcatattaactatcttatattaccgattattggtgccgcgacaatgggggtactgtgggtaaaccttgaaccaggctctatggaattaggactgatttggggggcaattggtatactttatatggtgtggatcactcgtcgattccgtcgacctatgcctcaaatgccagagaaataa

SEQ ID NO: 307499 - DNA, 3057 bp, Proteus mirabilis
atgatcccacgtatatcgcaagcaccgcaagtcagtgaactcacaaccgaatttttaaatacactccgacaaaatggttttacaggtgatatatcgagcacttatgccgatagactcactatggcaacagataacagtatttatcagttgctaccacaggcggttatttttcctcgttctacagcggatgtgactattgtagcacgtttagtggatgaacctcgttttcattccctctctttgacaccaagaggtggcggaaccggcactaatggtcaagcgttaaccgagggtatcgtggtggatttatctcgttacatgaaacgtattattgagataaacccagaacagcgatgggtaaaggtagaagccggtgtgataaaagatgaacttaatctgtttttaaaaccctatggtttcttttttgcgccagaactgtctaccagtaatcgtgcgacattagggggaatgatcaataccgatgcttcagggcaaggctctatggtatatggcaaaacctccgatcatgtattaggcgtcagagccgttttgctaggcggagaattgcttgaaactcgcgcgatggacagcgctttagctgaaactattgcgaaagaagattctgctgttggtcggatatatcaaacggtattatcccgttgcaaagcacaacgtcagcttattctcgaaaaattccctaaactgaatcgctttttaacgggctatgatttacgccatgtgtttagcgatgacatgaagcattttgatcttacgcgtattctaaccggctcagaagggactttggcctttattaccgaggcaacactcgatattacccccattccaaagcagcgcagtttagtgaatgtgaagtatgactcatttgattccgcattgcgtaacgcgccgtttttagtaaaagcaaaggcgctttctgttgaaactgttgactccaaagtattaaaccttgctcgagaagatattgtctggcattccgttaatgcattgattacggatgtgcccgataaagatatgcaagggctaaatattgttgagtttgccggtgatgataaaacactgattgcctcacaagtggaggatttatgtcagcgcttagataagctgatgaataatggcgaagggggcgttatcggttatcaggtttgtgataacctcgccgatattaaccgtatttatgccatgcgtaaaaaagcagtagggctattaggtaatgctcaagggcatgctaaacccattccttttgttgaagatacctgtgtgccaccagagcatttagcggattatattactgaatttagggcattacttgatagttatcagctcaattacggtatgtttggtcatgttgatgctggcgtattgcatgtgagacctgctttagatatgtgtgatccgcaacaagaacaactcatgaaaaccatttctgatgagattgttgcattaacggcgaaatatggtggcttactatggggggagcatggaaaaggctttagagcgcaatatagtccagaattctttggcgaaaccctttatcacgaattacgtcaaataaaaacggtgttcgatcctcgaaatagacttaacccagggaaaatatgtcctcctcttgaggttgaggcgccaatgaaacaggtcgatgctattaaacgcggcacatttgatcgaaccattcctgtatcggttcgcgaagattttcgcggtgcattagagtgtaatggtaatggattatgttttaactttgatgttaaaagtccaatgtgtccttctatgaaaataactggacaacgtattcattcacctaaaggcagagcgacattagtcagagagtggttacgtctacttacagagcaaggagtaagccctcagcagttagaaacaagtcttacaaataacaaacctagcttacggggattgattgaaaaaacacgcaatacatggaaagctaaacgtggagaatatgatttctctcatgaggttaaaatagcaatgaatggttgtttagcctgtaaagcgtgctctacacaatgcccgattaaaattgacgtgccatcatttagagccaaatttactcagttatatcatcaacgctatctacgtccgctaaaagatcatattgtggcaaatgtcgaactcaccacaccgttaatggcaaaagtaccaagtctgtttaatttctttattaagcaaccattggtgcaatcgttgagtaaacgtactattggtatgatagatctgcctctattgtcatctccgacattaaagcagcagttagctggacatagcgcgttaacgatgaccttggaagagttagagcagttatcagaaaagcaacgaagctattatgttatcgtggtacaagatccatttaccagttattacgatgctaaagtagttgctgactttattaaattgattgaaaaaattggttttaaacctgtgctattgcctttttcacctaacggaaaagcacagcatattaagggctttttacagcaatttagtaaaactgcacaaaaaacagcaacgatgcttaatcgagttgcacagttgtccattccaatggtaggagtcgaccccgctttagtcctttgctaccgcgatgaatatcgggagatattaggggataaacgcggtaactttaaggttcaactggttcatgagtggctaaatcagttagtcagtgagccgattgagatctgcgaagatgctgaaaaatggtatctttttagtcattgtactgagtcaacggcattaccgcaaagtatgcaacagtggcaagcgatattccaacgttatggtcaaccacttgaagtggtaactacggggtgctgtggtatggcgggcacttatgggcatgaagtgaataactataaaaattcattgggaatttatcaactgtcatggggaaatgcattgaaaacactccctacagcacgttgcttgagtaccggatattcttgtcgtagccaagtaaaacgtattgataatattgagttaaaacatccactacaggcgcttttggagattatgcaatga

SEQ ID NO: 307500 - DNA, 858 bp, Proteus mirabilis
atgtctgagattgtgtatttaaataaccaatttgtacctaaagaacaagctaatatctctgtttttgatcgaggtttcttatttgctgatgccgtttatgaagttaccgccgttattaacggacaattaattgattttgaagggcattttcaacgtttacagcgctcttgcaaagcattatcaatgcctttttcattaaccaaagagcaattaaaagagatccacgggcaattgatagataagaaccatctgcatgaaggacttatctatttacaagtcactcgtggcgccgattcatcacgtttttttgatttcccgtcttcatcagtcgctcctacattggtgctatttgttcaacactcaacggtggtaaatcatcctaatgcaagcaaaggaatttctgtcgtaagtgttgaggatattcgttggcaacgctgtgatattaaaacggtggcattacttgctgcatgtctagctaaacatcatgcgcatcagcaaggtgctgatgatgctatttttatcaaagagggttatatcaccgaagggagttcaagcaatttctttattgttaatcagcaagatgaaattatcactcgcccattaagccaagatattttaccggggatcacgcgacaagcgattattcagttagccaaagagcaaaaactcaccatcattgagcgtttatttacactcgaagaagcgaaacaagccaaagaggcttttattagttcagcgacgaccttaatttggccggtgatctccattgataatgaaaaaataaatcaaggtaaggtaggggcgttatcacaacgcttaagagagatttatcttgagaaagccggtgttaaaccatag

SEQ ID NO: 307501 - DNA, 1113 bp, Proteus mirabilis
atgtctttcttattgatcttgaatagtctttttattatttactcgatattactttctcgtggtgtttatcttgattgggaaatacacggttttgctgattggctaaaatcgttaggtatattgaaattacttgatattcctaaagtgatgttagcgagtgcacttattttgctctctttctttatgtatatgggggcgcggattgcgtggtgcgtttcattaatattattagtgacgatcgtttttttagatgtcgcggtttatcaccaagctggtactcaagcctatacttcattagcattagccattgtattggttatcagccggcgtgcttttcctcatcatagtttaaccagtgccggttttgttgcttttatctgtacgatttcgctactgtgtttctctatgttaggcagcctctatattggtgatgaatttaaaccacatatcacaacgttaatggatgctttttacttttccattgtctgtatgacaacactcggttttggcgatatcgttcctatctcaagtaatgcgagaatgtttaccctaacagtggttattttggggatcactgtttttacgacttctattgtttatgtgatgggatttttggctcgtggtactcgcgatattgtgaagaaaaggatcgctaaaatgcatgatcattttattattattggctcttcaatgttggcagcacaattagagaaagggcttagagagcaaggtaaaccggttattgcgatttgttcggataaaaagcaagccatgtatgataaagaagccaatattattgaaggtgatccaaccaatgtaaaaacattacaaacggcaaatattcgccaagcgagttgggtggcgacgttatctgaaagtgatgcggaaaatacctttattttattaactattcaagagtgcccagatcttcaagcgaaattaatcactatcattaataaagatgagaatagagaaaaaataagtcgattacgtccagatatgctgttgtctttagcttcgttaggcaaagaaattatgatgaaagtcctttgtggtgaatctattaattcgtctgatgttactgatttattaatcaataaatatttaaaataa

SEQ ID NO: 307502 - DNA, 2127 bp, Proteus mirabilis
atgacccactctatagaacaactcgattatcacgccttaaatgccatgctcaatctctatgatgagcaaggcaatatccagtttgataaagacaaattagccacccaccatttttttcgtcaacacgttaatcaaaatacggtgttttttcatgatctaaaagaaaagctcgattttctggtgcaacaacactactacgaagcacaagtattagagcagtatgatttcccgtttatcaaacagctttttaagcatgcctatagcaaaaaatttcgctttcaatcgttcctaggtgcatttaaatactacaccagttacaccttaaaaacctttgatggtgagcgttatctcgaacgctatgaagatcgtgtttgtatggttgccttaaccctagcacaggggaataccaaactcgccactcaccttgtcgatgagataattagtggccgtttccagcctgcaacccctactttcttaaattgtggaaaaaaacagcgtggcgaattggtctcttgttttttattacgtatcgaagacaacatggagtccattggccgagcagtcaattctgcgttgcaattgtcgaaacgtggcggaggtgttgctttcttactgactaatttacgagaagcaggagcccccataaaacgcattgaaaaccaatcgtctggcgtagtaccggtgatgaaaatgcttgaagatgccttctcatatgccaatcaattaggcgcaagacaaggtgctggagcggtttatctccatgctcatcatcctgatatctatcattttctagatacaaaacgagaaaatgccgatgagaaaatacgtattaagacgctttcattaggtgtcgttattcccgacatcacctttgaattagctaaacgcaacgaagatatgtatctattttcaccttatgatgtagaacgagtatatggcgttcctatgtcagaaatcagtattagcgaaaaatatactgaaatggtcaacaatgcagagatacgtaagaaaaaaattaaagcacgggcattttttcaaactttagctgaaattcaatttgaatcaggttatccctatattatgtttgaagataccgtcaatcgcgcaaatccgattgcgggccgaattaatatgagcaatttatgctcagaaatcttacaagtaaatagtgccagtgaatacaatcctgatttaagttatcgacaaattggtcatgatattagctgtaatctcggatcaatgaatatcgctatggcgatggactcaccagattttgcgcataccgtaaatgttgccatcagagcactgacgagtgtggcacaaatgactaaaatagaatctgtaccttctattgaaaaaggcaaccaagcatctcatgccattggtttagggcaaatgaacttacatggttatttagcccgtgaagggatttattacggttcagaagaagggcttgattttaccaatatctatttctataccgtaacatactatgcccttttagcctctaaccaattagcgatagagactaaacagcgctttaaagggtttgaacagtcaaaatatgccactggggagtattttgataaatatttatcaaaacagtggttacctaaaacccaaaaagtccaccagctatttagccaatccaatattcatattccaacccaagaagattggcaaaaacttaagctctcgattatgactcacggtatttataatcaaaacttacaagcaataccgccaacaggatcaatctcttatatcaatcactctacatcgagtattcaccccattgtggcaccgattgaaataagaaaagaaggtaaaatcggtcgggtttattaccccgccccttttatgaccaatgaaaaccgtcatttttatcaagatgcttatgaaattggcgcagaaaaaattatcgatacctatgcccaagcatcacaacatatcgaccaaggattgtcgctaacattattcttttctgatgaagcaaccacaagggatgttaataaagcacaaatttatgcatggcgtaaaggtataaagaccttgtattacattcgtattagacaaacagcattagccggcacagaaataaaaggctgtgtttcatgcgccctttaa

SEQ ID NO: 307503 - DNA, 1257 bp, Proteus mirabilis
  misc_feature (1238)..(1247): n is a, c, g, or t
atgattattttaagtaatgagctcgcccataattattttcgcttattaagccatagtgataaacaaaatattctctctattattgctgaaaaaagtagcaatatagtggatgtggtcactaataatcataatcatttgcaaattagttttgtgaattcacgttatcagaatgaagatgtggcgatttgcgtattagtagatatcagcgctcgtgttaaaatggaacgctctctacaaaatatggcaacggccgcagaacaagcaaaccaagctaaatcaatgttcttagcgacagtcagccatgaattgcgtacaccactgtatggcattattggtaacttagaattattacaatcattgacgcaaaatgaagagactgccagattattaaaaacaatggataactcttcatcgctgctactcaaaattatcagcgatatcctcgatttctcgaagatagaatcgaaacaattaaaaattgacgttaagccattcaattgtcgccaagttgtctcttttgttatctctaactatttgccgttaattgctaaaaaagatttagctatttactgctttattgagccggatgtacctaaaatcgttaataacgatccggttcgtgtccaacaagttatctctaatctactaaataatagtattaaatttactacgacaggatgtattactttgcacctgtatcgagatgaatattatctctatttcgatattcatgataccggcagagggataaatgaaaaaatgcttcatcagctttttgaacccttctttcaggtctcgcaaaatacagaaagtgcttcagaaggtacaggattaggattagcgatttgtgaaaaattgattaacttgatggatggtgatatcagtgttgtttctcaagaaaatgtaggtagtcgttttactgtgcggatccctttatatggggcactaaattcgagtgatggacaaaccaaatataatctctataaagagagtactattcgctgctttatcagtattaaaaatctttatctagaaagctttgttgaacgatatttaagttatgtgggcttacattgtcaattattcacggaagtgactcaggtctctgagaatgattttattatcaccgatcatgatgaatgtttagataactcttgccaatttatccgtatttatgaacactattttgagcctgcaaagaaaatctctgagaataattggttatgtagtacatatannnnnnnnnngtacatataa

SEQ ID NO: 307504 - DNA, 882 bp, Proteus mirabilis; identical to SEQ ID NO: 305259

SEQ ID NO: 307505 - DNA, 246 bp, Proteus mirabilis
atgaaacgaataacattatcagaatggaataataaatatttcgccaaacctagaagtccacggcaattatctcgctatataaaggaaggtaggttataccctgctccagaaaaggttggtagagaatatgagttagagccgtggacaattctaacaaatgacaaaatggtaagggaaccgcaatatttaatggagaaaattaatgggcagaagcagaagtgcaaagaacaaggggctaccgcctaa

SEQ ID NO: 307506 - DNA, 1026 bp, Proteus mirabilis
atgataaaaaataatgacttacctgcttttatgacgcaagtggttattactgaacccggtggcgttgataaactgcaattagaaaatagcccattaccgtcattgccccctcattatatgttggtaaaagttaatgcagcgggtgttaatcgccctgatatttttcaacgtcaaggtagttatccaccgccagccgatgcatctcctatattaggattagagattgctggcgaagtggtgaaattaggtgaacattgtacaaaatgggcaattggtgatcgtgtttgtgctttagttgctggtggcggttatgctgaatattgtttagtccatgaagatatcgctttaccgtcgcaaggattaagcgatattgaagcggcagcattacctgaaaatttatttactgtttgggcaaatctatttcaactcggtcagttaaaagcaggggaatcggttttgatccatgggggcacttctgggattggctctatggcgattatgttagcacacaatcttggttgtgaaatttacacaacggtaggttcaaaagaaaaagccgaagttgcccaaaaattaggggctaatcatgttattaattaccgtgagaaagattttgctacagaaattcctgtattaactcaaggcaaaggcgttgatgtcatacttgatattatcggcggcgattatgtggaaaaaaattatcaagttgcggcgaaatttggcagagtgatccaagttggcatgatgaaaggggcccctaaaaacttaaatatgatgccactgatgcttaagcgattaattcatacaggttctaccatgcgttctagaacgtcagaagaaaaaacgcatatagcacaagaattaaaacaacaagtatggccgttgattatcaaaggtcaaattaagcctattattaatgcggtcttttctttacaagaagttgccaaagcacatcaattaatggagtctggtgacttaattggtaaagtagtgcttgagattgatatgaataaatcactggtgtag

SEQ ID NO: 307507 - DNA, 885 bp, Proteus mirabilis
atgaggcgttttattagggtagatcttcctcctgaacctatcattaatgataaatgtgttaggaaacgcctcaaacaaagcctttgtgatagctgttcaaaagtctgtcctgtggacgctatcacttttagtcttttgaacgttgaaatagataatgagcgttgtttccaatgcggtaattgtctatttacttgccctgttgatgctatagaaaatatctccccccatgaacgtagctttcaagataatctattagtcattaatcatgatgaaccactggccagtattgaagagcttttggtttggcatcgacaatatcaaatacgcggtatgaaaatagcggaacccttggttgataagtggctgccgatactcgcacaacttaatttgcaattaaaaatcttacaagagcctatttggcaattagttttagtagagcctgaaccggtcgatagtggtcgtcgctttatgctatttcgacaaaaattagatgaaaagccacttaataaaggtcacgtaaaaacaggattaaatgcaaggaaacagctttatccgcaagatagctggttccatattcaattagataaagaaagttgtattctttgttctgcatgtgccaaggtgtgtgatgaaggtgcaatcacaatcgaagataatcgctttatcattgatgaaaaacgttgcaccggttgtatgaactgccaagttgtctgttttccaaaatcaataaaagtcgtagaacaaattgctaaaaatagcacaccgacacactaccattattatgatgcacaatgtgataaatgccgccttgctttttttgcttgggagcctaatgccaccttatgtccgatttgtactcagcatcaaaaacagggatggctataa

SEQ ID NO: 307508 - DNA, 1497 bp, Proteus mirabilis
atgaataaaactattagtgaacatgtagatgtcgcgctcattggtgctggcattatgagtgcaacacttggcacacttcttaaagaactagagcctaatttaaaagtcgcaatgtttgaaagacttaatgattgtggtcaagagagctctaactcatggaataacgcgggaacaggacatgctgctaactgtgagctaaattatacgccaccaaatcctgacggcaccgttaatatcagtaaagcgttagaagtgaacaccgagttcgatttatcgcgccaattatggtcttatttagtaacaaaaggaaaaattgccgatccgcgtgattttattcatgcttgccctcatatgagttttgtttggggtgcagataacgttaaattccttcatcaacgctatcgccaaatgtctgccaatcactgttatgaaaatatgcaatacagtgaagacaaacagcaaattgaagattgggcgccattaattatggaagggcgtgatccgaatcaacagcttgctgtcacccgagtagctactggtactgatgtcgattatggcgcattaacacatctattagttaagcaactttctcaacaagataattttgagttgcactataaacatgatgttattgatatcaaaagaaatgagactggtggttggaatatcgaagttaaagatctcaccacccatgataaatacctcattacagctaaatatgtatttgttggtgccggtggacgcgctatcgatttactccaaaaatcaggtattccagaaggtaaaggctacggtggtttccctgttagtggtatttggctacgttgtgatgaagataaaatcagctctcgccatcatgccaaagtttatggaaaagcagatgtaggctcaccaccgatgtctgtcccccatcttgatactcgtattattgcaggtaaacgctccctactctttggcccttatgctggattttcaagtaaatttttaaaacacggctcctatttagatttatttgagtcaattcgccccagcaatattgaacctatgctagatgtcgcgaaagataactggtcattaactgaatatttaattggtcaagtattacaaacgtcagcacatcaatttgaaatgcttaaacagttctatcctcaggctcaacatgaggattggcaagaagctgttgcaggtcaacgagtgcagattattaaacccgcagctaaacatcatggcgtattagagtttggtactgagctaattagtagcgcagataaatcattttcagtgttattgggggcatcacctggcgcttctacagcagcatttattgccatcaatatcattaaatcttgctttaaacagcaacttgaaaatgagggttgggaagatcgtcttaaaacaattattccaacttatggtattgatctcaaaatagatgccgatgcttgtcgtaatattcgtgcatcaacggctaagatattaaaattagaaacaccttag

SEQ ID NO: 307509 - DNA, 1578 bp, Proteus mirabilis
atgaataataaacctgagattgagccttatttctcacattacaactctcccgtcatgcgattggcgaaattaggctacctttctgcactggcctataatgctgataatgtttttaacaaacattcacccatacaaaaacagcaagagcaaaaaataactcatgatttgtgtaaactaatcggttttgagccagataaagcatttggacatattaccaccagtcatgtttttgcttgttatgaaattttgtgggctttgagaaatttaaaaacactgccgatggcgattgcacgtcatccaaaatcaagagatctggttgcagataaaaaagcatttgagttatttaatatgtctatcactgatattttatccatcagtgaacagctatatgagcgagatatttttgatgatgtcagccatttaacttgtcgtggtacaggcatgacaagaacgatgcatttaggtaaattactagtaccgatataccgcttcgaattttggaagaaggcgatggatatcttggggttaggttatgataatctcattgccttaccaatagatgaagagtttaaaacagatatagctaaaacgcgtcatattgtgcttcgtctaatcgagcagggagagccgatactcggtattattggcgtgttaggctcatcgacatacggtagcattgacaaacttaagcctcttttcgaattacgtgaagagtgtgaaaaacaacataacaactcattctatattcacattgatgcatcccaattaggctatatgaaaagcctgtttcttgacgaaaataatagcatcatcccttataacatattgtgcgataaacttaagcaagaagcacctttacttgagttaacctcagatatttatgatagttttactcagctatcaagagctgattctgtttcttttgagccatttcaagcgggattttctccttatcctacggggattgtttgtataaaagatgctcgattaagccgttttctcgctaacccgccaaaactgtgcccagaagaggggaatattcccgatgaaatcgatgggatccaatcagcacctgcagttgcatcaatgtgggggatccatcagctatatgcttttaatcattttgggtatgggcaatgcgctcaaaatcaatgggaagctagagtaaaactggaacaacaattaaaacaagagaacgaatttgaaaaatcgggtatctcttatgctattcatattttgccagtttcagattttaataaacttacttttgccattgcaattaaaggcaaccaatgtttaaaaatacaaaatcagctaaataatgctatttataaaaatttagaaataaaaagccaatataagcaagatctcaacctattagtgctgtgtgctcgtaatagcgatgatatacctgctcagttttgtcaacaatgtcatttaggtaaagatgaatggaagcaagttaaccacttaagtcttttacaattaacgataaaaaacactgacaaatggggtgaagagcatattaaagcagggtgcgactatattaaaaaagttgtcctatctgcattaaaatag

SEQ ID NO: 307510 - DNA, 507 bp, Proteus mirabilis
gtgattaaatcgaaatattataatttatatgcagatgtttattttaacaatgattattatattatagtaaatatttctgggtgttatatccattttacggactttaaatatggatataagattttatctaatgatatcactaatgctgagttaggttattattcaaaaaattttttaatgaatagtaggaaaatagaaagtaactcacaagaatttcatgagatgtatactgataaaaaatcttatcctgaatggataaaaaaaattgtcaaagagtatggttataaaaataaaacggctctatttgaaaatatgaatttgtgtagtttaagtgttgtgggtaatgaaattatcattagacctcaaaatcatttacgtatggatcattgggtaggtgagggaatatctgatagtgcaattattacattaaaaaccaattgtagtgacgaggttttaggtgcttcaataaaaaaagcttttacacgttgtattagcagtagagtttaa

SEQ ID NO: 307511 - DNA, 1308 bp, Proteus mirabilis
atgtcattaacaaaaattgttatagtcggtggtggagctggtggattagaactagcgactaaattgggtgataagttagggcgcaaaaaaaaagcagaaattacccttgttgatagaaataatagtcacttatggaaacctctgttacatgaagttgccacaggctcattagatgatggtgttgatgcattaagttatctcgctcatggttataaccatcactttaattttcaattaggcactttaacagggcttgatcgccaacataaaaatatcactttggctgctatttatgatgaaaatcaagagctattagttccagagcgtcaactcgattatgatattttagtcatggccttaggcagtaaatctaatgattttggcaccccagggatcaaagagcactgcatctttttagatagcccacagcaagcacaccgttttcataatgaaatgctcaatttatttttaaaatattcagcagactccaacgcagaagctgaaaatcgtaaagtaaatattgcgattgtgggtggtggtgcaactggagtggaattatctgccgaattacacaatgctgttcgccaactcaatagttatggtttaaaaaaattagcgccatcagcccttaatatcacgcttgttgaggcgggtgagcgaatattacctgcattacccgtgcgtatttcaagtgcagcacatcaagagctgactaagttgggtgtgcgcgtgatgacgaaaaccatggtaacaagcgccgatgaaaaagggttaaataccaaagatggcgagcatattgatgctgatctgatggtttgggctgcggggatcaaagccccagactttatgaaagatatcgctggattagaaaccaatcgtattaaccaattagtcgttaagccgacattacaaacaacattagatgatgcgatttttgcgattggtgattgtgcatcctgtccgcgaaaagagggaggttttgttccgccaagggcacaatccgctcatcaaatggcaagccgttgttatagcaatattttagccatgttaaagggtaaaacgttaaaagaatatgtgtttaaagatcatggctcgttagtttcgctctctaaatttagtacggtagggagtttgatgggcaacttaatgaaaggcgatatgatgatagaagggcgtattgcacgtatcgtttatatttctttataccgtatgcaccaaatcgcgttacatggttatcttaaaacgggtttgatgatgttagttggatcaatcaatcgtgtgattagaccaaaactaaaacttcattag

SEQ ID NO: 307512 - DNA, 759 bp, Proteus mirabilis
atggatgcacaactgtataaagagtttaaaattatagaaaaagcgttttggtcagagatatgtgaaaacaatattcgtattggtgatcatacccactgctttatgacaccgatggacgcgcctatttttaattttatctaccttcgccaaggcgctagcgaaaatactttccaacaagcaagtacgctgttctcctcgcaaaaaaaaggtcacatgctggttctgccggaatctctgttgcctgaatttgaagagataataaaaaaagcaggttatacgggtgacggtatgacaaccgctatgtatctctcattgtctgatgcgacttatcccccctataaaaataacccgtgcgatattattttaactaaccatgatcttaaacagtgggcgcaaccattgaaaaccgcctttcctgttggtgacgatacgataactaatgaatatattcgttatcaccaaaaagcgttagataatggtgcgacgatccttcattatgcattattagttgcagggcagcctgtatcatcattaacgctgacattacatgataaactagcaagatttgacgatattgggacggatattgcctatcaaggcaatggttatgccacacatttaattactcacgtattagagttttgtcgagagcaaggtgtcgagcgttgtttcttagatgcgtcagcggatggtctagcgctatatcgtaaatttggttttaagccactttttaactatttaagctttattaacgaataa

SEQ ID NO: 307513 - DNA, 1125 bp, Proteus mirabilis
atggaacactttactaaaaaatcgttatttacctgcgataaaactaatgaaaatctccctaataaaccgggtgtaataacacactgccaagatctagcatctgacttagggttaagcgaagcttttgcgcaatacacaatatcttatacttcttgtgacagtgttcatggagaaattatccgtgaagatactggggctgtttttattccgaaaagtcaggcacctaaagatggttggcctgtcattgtatggaatcatggtacggtagggatagcgccaacttgtgctccctcattaacgcctaaaaatagtcgcgtatcgcaatatttaaatacttggctatcccttgggtttgcgattgttgcaccagattatccaggtttaggctcatcagggttgcatcattatatggatgaaagagcaacagcatggagcgctttggatagtgcaaaagctgtcttgaaaggtgggttttcgctaagtaatcgctttatctttatggggcaatctcaaggggctcatgctgcatttgcctctgtcggctatcagcctgaatatgcaccagaattaaatatcttaggtgcgatagtgacagggacgccttattttagtgataatctacttgaaaactttattagtgatggtgttcaagatgaaggtgatagaaagctaccttacgcgatgtacttatatctttctgctgctgataaaaatccaaacttaaaagtggaagattatttccaagaattagcaataccttatgttgaaaaagcgaaaacgctttgtatcagtccattaagtcaattagtaatggataataaattaaacgcatcaaatagcttaaaacctaagttttacgagctattagagcaagaagcgtcaagtttaaattatagaaaacttcttgttgataagcccgtatttatagggattggtttagaagatattcatgtgttaactcgttggcaacaagagtttgcaagagatgtattggaagcaggcacaaatgcatatgtatatgaatatccgaatattggtcatttagatgtatacaatgtctctttgcgaaattcagtgccttttgtatttgaactgatgaaaaatgagcatagcaaaatagactaa

SEQ ID NO: 307514 - DNA, 504 bp, Proteus mirabilis
atgttacatcaagatatgatcaataaactcaatgaacagctgaatcttgagttttattcagctaacctttacctgcagatgagcgcttggtgcgatgataaaggatttgatggcgctgccaaatttttaaaagcacattcccgtgaagaaatggagcatatgcaacgtttatttgattatttaagtgatacaggtgctatgcctttgttagggactattgaagcaccacccgctgaatttttatctttatctgatttatttactaaaacttatgagcacgagaagtttattacagctgaaattaataaacttgctcacctagcaatgacaacacaagattactcaacatttaacttcttacaatggtatgttgctgaacaacatgaagaagagaagttatttaaatctattctggataaacttgctatggtcggtgatggtggtaaggcattgttcttgttagataaagacttaagtgctctttctacatccgcgcatatttaa

SEQ ID NO: 307515 - DNA, 714 bp, Proteus mirabilis
atgcgtaaagtcacacttactcttagtgcaattgcgttggcgttaagtttaaatggcgcagcaatggcaaaagttcatatgccagaagttgttagcccaggggttactgttactgaacttgcacatcagcaaccaattaaatgggtttctgttgcagaaattgaaaaaagcttagaaggccaagcaccaatggcggtaggttttgatattgatgacaccgttctgttctcaagcccaggcttttatcgtggtaaactggaatattctccaaacgatttcagttatctgaaaaacccagaattctgggaaaaaatgaacaacgaatgggataaattcagtatgcctaaacaagtcggtatcgatcttgttcagatgcacttaaaacgcggtgatactgtttatttcattaccggtcgtacacagactaaaacagagactgtgactaaatatgttcaagaaggtttaaatattcctgcagacaaaatgcaacctgttatttttgccggtgaccaacctggcgcaaataacaaagtaagctggatgcgcgatcacaaactgaaaatttactacggtgatgcagatgctgatatcgcagcagctgatgagctaaatatccgagggatccgtatcttacgtgctgctaactcttcttaccagccgttacctaaagcgggacaatttggtgaagaagtggttatcaattcagagtactaa

SEQ ID NO: 307516 - DNA, 651 bp, Proteus mirabilis
ttgtggtttccattaaaaaatagttttgcagtaaatgtaggtaatataacagagataatatcttctgatgaaagtactcttgctaaagaaattgaaaatacagtaaatacggcaagattagtcaatttgacaatagaaaaattagactcaccacttgaaaatgggaaagttattccggttactgatcccaatgaaattttatcaacaccggctaatctgattcttcccggtcatgcaagtgatgtatttaaaattatttatcaagggcctaaggatgataaagagcgttattatcgattaaattggaaagatgatcctattgctgaaaatggtataacacaaagctcaaaatcagcgacagcaacaacatctgcaactattagtacaattttagtggttgcacccagaattgagaattttaattatcagtatcatgataataaagtttctaatatcggtaatagttcatttcgtgttgtggcttcaggcccttgtctagcagaaaaacaacaatatggtgtggaggggatgtgtcgcgagcgttattaccttatgccacatttagccgttaaattacaacttgtcgatctcacaaataaaaaatctagcgtaggcatttggcacaaaggagagttcattgttgtcaaataa

SEQ ID NO: 307517 - DNA, 282 bp, Proteus mirabilis; identical to SEQ ID NO: 305898

SEQ ID NO: 307518 - DNA, 498 bp, Proteus mirabilis
gtgatttggctgaatggaggatatggtgggataggaggagatgattatttttggacaccacaaccagttgaaaatgaccaaacaggagcgacgtttcgtgatcctaatatggtactcatgataccttcttttcgtggtgaaaataccaaccctggtcgctatgaaatgttttatggtgaattagaagatttagactcagctagagaatatttagcgtcattaccttatattgatcctaaacgtatttacgtagtaggacatagcactgggggaacgagagcattattggctagtgaatacagtgataaattcagggcaatattctctttaggaggaatacctgatcttaaactacgcacagaagggcggatgatggttgaattaccctttgataaaaacaacgaagaagaatttaatgtccgctctgtataccgctatattaaatcaataaaaacaccaacattttattttgaaggtcatgattatttttggaattaa

SEQ ID NO: 307519 - DNA, 525 bp, Proteus mirabilis
atgaaactgatacctttgttactctctggactactctttacatcggttgccagtgcggcgagcttagatgttacgttaaaagaagccttacctacaggggcgggtgatgatattggtgttgtcactattaccgaaaccgattatgggctgttatttacgccaaaacttactgggttaacaccgggtgttcatggttttcatatccatgctaatggctcttgtgagccagatatgaaagatggaaaacctgttccagcattaaaagcgggtggtcatcttgatcctgaaaataaaggtgttcacttagggccttataacaaagaagggcatttaggtgatctacctggtttggttgccaatagtcaaggtgacgctgattatgccgttcttgctcctagactgactaagcttgatcaaattaaagataaagccttaatggttcacgttgggggagataactactcagataacccagaagcgcttggcggtggtggtgctagaatggcatgtggtgtgattaaataa

SEQ ID NO: 307520 - DNA, 555 bp, Proteus mirabilis; identical to SEQ ID NO: 295951

SEQ ID NO: 307521 - DNA, 633 bp, Proteus mirabilis
atgtcacacaaaactgcagaccaagagtggctggtagaacaactaaaatatattgcacagggcattggtaaaacattatcgcctttttgtgaagttgtacttcatgatctgaccgatagtgaaaataccattatggttattgaaaataatctatcaggtcgaaaagtgggggatagagcaactgagctaggtatggcaaggattgaatcgtctgattttccacaaattgttgcaaactatcctaatcagtttcctgatggtagaacagctaaaagtacatcgattggtattaaagataaacaaggcaattatgttgctgctttatgtttaaatattgatatatcgatgattaaaggtttacaaatggtattaaatcaattttcgactcttgaagagggaaatcatatcattgaaacttttagctcagtaacagaagattcgttgaaaaaacgtattgatgaattttctgcaacttattcagtgacaccaagagcattgaaaccgcatcaacgacgcgaattgctattgtgtttacaggatgaaggttatctttcacttcgcaaagcaatggagattactgcgcaatacctcggtgtttcaagagcaacagtgtataacgatttaaaagaatga

SEQ ID NO: 307522 - DNA, 327 bp, Proteus mirabilis
atggatagtagttcaagcttctctggctattatggacgctatacttcaatcgctaatattaatgcgaatgccactatctcaaataaaaatacctcatcatttggtttttctgctaatgggggcttaacgattaccgctaaaggagcagcacttcacccagatggatttaatggtggtactcgcttattagttgatactgaaggtgttgcaggagtaccagtcgatggtggccgtgtaacaaccaataattggggttatggtgttgttactgatattaatagttattatcgcaatgaaacaacgatcgatttaaccttcattaactga

SEQ ID NO: 307523 - DNA, 294 bp, Proteus mirabilis
atgcgttggttttttattacctttgcattatgcggctcaggatttgcgttattatttgggattattatgagccaagcactttctccctttagccaacgagccggcgttgcgagctctgtgctgggtatttcacaattaagtttttcttcactttatatttgggtaatggggtggattgaagtatcctcaataaatatgttggtggttattttatttatcagttgtattgtaggtactctttttctatgctttcctcggttcacagaacaaaaaaaggttaaatataatgtctaa

SEQ ID NO: 307524 - DNA, 252 bp, Proteus mirabilis; identical to SEQ ID NO: 305467

SEQ ID NO: 307525 - DNA, 183 bp, Proteus mirabilis
atgtctcattatgaggaagtgattaagcaggttgatgaggccattgccagtgctagcatacaaacgatgaacgaattgctggtggaattaggtaaagataacacaatagcttttgctcagcgttatgaacagcaagagcgtctacgcacggctatttttcatcatggtgaaaaacagcgttaa

SEQ ID NO: 307526 - DNA, 666 bp, Proteus mirabilis; identical to SEQ ID NO: 301254

SEQ ID NO: 307527 - DNA, 342 bp, Proteus mirabilis
atgatacagcaattaaaagagaccctttcaccgcttgtcgatggaagggttttttttcaggtattacccgaaggcaaagggcgttatcccgccattgtgatccaatttgccagtatcacacctaacagtgcgctggaggatgcggatttagataactatcgcgtgcaacttgatgtgtatgcgccgcagccacaaccccttatggtcttgcgtaaaaaaattgaggctcagattgttgaagcgatcccatttgcacaacgggtgaatgctgtctttgggtatgaagcggatgtcaaattgcatcggcttgttcttgaattaatgatttcatcagataaataa

SEQ ID NO: 307528 - DNA, 456 bp, Proteus mirabilis; identical to SEQ ID NO: 304000

SEQ ID NO: 307529 - DNA, 1023 bp, Proteus mirabilis
atgcaactatttaatgacgacgcactatctgtattaaaaacactacctgataacagcattgatttaatcgccacggatccaccgtatttcagagtgaagtcgtgcgcatgggataatcagtgggataatgttgagtcgtatctgtcttggcttgatgaggtattagctgaattctggcgggtattaaaacccaatggcagtttgtatttattctgtggttctaagttggcatcagatactgaactgcttgttcgcgggcgatttaatgtattaagtcatattatttgggctaaaccatcaggaccatggaaacggcaaaataaagaaagcctgcgcgccttttttccttcaacagaacgaatactttttgctgaacattatcaaaaaccagtcacagctaaaggttctgagttttcgttaaaatgtaaagaactaaaacaaaatgtatttaagccattgattgattattttagaaatgctcatttagcactgcaggtgagtgcaaaagaaatagaccaagcaacaggtaagcagatgtgcagtcattggttcagcaatagtcagtggcaattacctagcgaggaagactataaaaagttacaaacactgtttacacacattgctgataaacaagaaaaactatcaccgttatcccgccagtttaccgagttagagcgtgagcaggttacattacaaaaagactaccaagaattaataaaagaatatgggttattaaggcgaccattctttgtaactgcagatgtgccttacactgatgtgtgggcttatccacctgttcagtattatcccggtaaacacccttgcgagaaaccatcagccatgatggaacacattattcgctcaagtagtcgcgaaggggatctagttgctgatttctttatgggatcgggtgcaacactgaaagcagcactaaaacttaatcgaaaggttttaggtgtggagcttgagagagagcgatttgaacaaaccgaacaagaaataaaagcgctaacttgtaagtaa

SEQ ID NO: 307530 - DNA, 1032 bp, Proteus mirabilis
atggacaagaactttgaatatgaaagaacttataaaagccgtcctcatgttgtactacttggtgctggtgctagtgtggcagcaattccaagaggcgacaaaaatggaatgaaaacttctgtaatggatggttttttagaaaagctaggaatgagtgaagttatcgcagatttaaaccttgtcaccaaaagttgtaatttagaagatatttactctgaaattgctgaaagagatgaatatgcagatgtaagaggcgaactggatactaaaattcggaactacttcagtgagtttaaaatccctgatgaacccacagtttatgactttctactcctttctttaagaaaaaaggatttaattgcaacattcaattgggatcctctgctacttcaggcttatcaaagagccgtcaaaattactaccgatttaccagatttagcattcttacacggcaatgtcttggttggatattgtatgaagcatccatttgggggaaatttagacaatagatgcccagaatgtggcgagtattttttgcccagcaggcttttatatccaattgcaaagaagaattacaatgatgacccttttaccaaggacaattggaatacactaaaaaactacttaagtagagcgtacttagtgaccatttttggatatagtgcacctaagaccgatgttgaggccattgatatacttaaaaatgcttggggtaacattaacaaaaggaacatggaggactttgagtttatagatatccaacaagaaaatgcactgatcgatacgtgggaagattttgtccatactcatcattacacatataccaatgacttttttaattctagcttagctagatttcctagacgtactactgaggaattgtttgatcgtacacaaaactgtatctggacatctcctaaaacaccattctctgaatcaatgacgttctctgatttgcataatatcattggcagtttaatcaaagaagaaaatgaacacaaagacagctatataactctaaaagacaggtaa

SEQ ID NO: 307531 - DNA, 996 bp, Proteus mirabilis
atgaattataataaattatttcttatttctttatctttaatttattctgcaaatgttttttctaatacggatagcctatcaccaatggataatctatctccatctatgacttttagcccaccagtaattagcccaagcccattaccaacaggtaacccttcacaattaggaaatggttctatggtagaatcaagtgtaggtattcccccaacatcaacaactcatctaccacaaccaccattaataggttatggcgcaccaacaataggtaatacatcaggatataggacacaatttccaaatacagatgctaatccaattaaaacaattaaagcaattaaaacataccttgacatgactgatcatgcaaccgatgatcataataatttgataggtggatacatttcagcctttatttctatttctagaccttctacatctacatcatctgaaaatactgtagtcagcctttctaaacctttttttgatcgtatgtctaaagcaatagatgttgattctgatgaagatggaagtatgttagtggataaaagtaaaaaggatatcgctcgtactatgtcttcttatttagaaaatctagaagcagactttttagaaacaatgaacgatgaaaatactagtgaggatgaaaatactagtgagataagactaacacagatggcattattacatcagatacaagattttaaaaatattgttgacgaaagtatagaaaaaggtacctcttttactattgttgcaaatcaagatctagaaacagcagaaccattaactgaaatccaaatgattactaagcgattatcgcaaccagtaacacgagttgatattgctaatgcatatgttttattatcaggaaaaatagataatgaagttggagctatagcgaatcaacaacaaagaactactgaaacgttaactttacaggataataaaattactaaagtagaaagtgatgtaaaaaaaatgaaggtaatatag

SEQ ID NO: 307532 - DNA, 1473 bp, Proteus mirabilis
atgataaaatcggccattaatcataaaaaatatattctatcatcgtggctaagtttattacttgttggatgtattgatactagcgattatgggaaatactcagcacaacaaccgatgccttataataatacaaactatattgcagcttctgagcaatacctcgccacacctcagcaagagcaaaccactaaaacgagctatggattggccgagcttatcgatcttggtcagcaaaataatcctgaaacacggattgcttggttattagcgaaaaaatcagctaccgatattggtatggtagaaagtacttatttgccgattattaccgcaacggcattggcaggttatcaaagaggaaaagtagatttacccgccaatccaattgttgatgatattaaaacatcaaacagtgcttttattccagcgttaacctttagatggcttatttttgacttcggtaaacgaggagctttagccgatgctgctaaacatgcttctttggcaacaaaccttaattttaatctgatgcatcaaaaaataattcatgatgtttctgttgcctattttagttatggtgcggcccttaaaaaagtcactcttacccaagaggcactgcaaagaagcaaagatattttatatgccatagagcaaaaacgtgcgcggggattagcaaccgtattagatgttgctttagccaaacaacaagttgcccaagtagaattacaacatgtgttagctaaaggtcatgaaaaagatcaatatcagttattactgtctgcaataggtgtctctccctttgaaaagataaaagtgaattatgataatgacgcgcgcttacctgatgatatttccccattgactcacgatgtgataaaaaaagcgttatcacaacgccctgatattttagctcactatgaattagagcaagcggcattaaaaacggcacgctctgttgaatctgactattttcctaaagtgtatctcgccggtgctcttgctggtggttcggggcattttgatgttcaggggttacctgaaattagccaacgaacttcatcgtcgaatattttaattggcgtgagtattcccttatatgaagggggcatgcgtcagtcgcgaatgagcaatgctcaatcagatatccaattagcacaagaaaatttgcgcaaaagccaagatacggcaatcaaagagatctctctcagtgagaatgcgttaagatcggcccttgaagcaaacaaagcggctaaaaatctcgttgataccgcacaattaagttataccgccagtgtcgatttttttaacaatggactaggtacagtaacggagattaatactgcagaaattgcactattaaatgcgcagctctcacatatagatgcttatacaggctcattaattgccgcagtagatttagcctttgctttaggggatattgatcagggcttacctaatatacaccttgataaatag

SEQ ID NO: 307533 - DNA, 1764 bp, Proteus mirabilis
atgacgataaaacagacaattgggataaaaaaaatcgctagtttgagcttattactgctcttttttctactctcttcttctgcgattgccaaagagtggactattggtgtgttagcgttgcgaggcgacgcctcaacacaaagacattggcaaccgcttatcgataccttagatcaacaaatacccacagatagctttctgctgttaccacttaacttgtcagaaatgaagcaagcagtggcagacaagagagtagattttctattgacgaatccagcgcaatttgtccagcttgatagtgcatatccgctacgttggttactctctttacgctcgggttatgagccggataacacaacaagaaatgtgattggtagccttattttggtgcgcaaagacagcgcaatcacatcgattcatgaattagtcggaaagcgtgttggcgccattgcaccagatgcctttggtggatatctgttaggttacaaagcactgcgtgaagaagggattgatcctgagcaggattttacattacgttttagtggttttccggctgatgcgttactttacttattacgtgatggcgatattaatgcagcgatcatcccagtttgcttattagaaaatatggataacgaaggtcttattaataaagaagattatcgtccattattaaattattctaccaatacttcttgtttaaccagtactccgctctatcctaattggtcatttgctgcattagatactgttcctgacacattagtggataaagtgacacgaacattgctcaatgatgaaagcgacgccatgaaatggggggctcccgcttctcattctcaagtggaaaatttactccgagaagtcaaccaacacccaaggcagcgacaactttggcaagatgcgaaaatttgggctatccagcaccgtgttattattggattatcattgggtgccattatcttactggttttcaaccaaatctggattagttatttggtcagaagacgtagccatcaattagaacaagcgcatatccatttaagagagcaaaaagaggcattagaacaagctcagcgtttaaatattttaggtgaaatggcgtcaggctttgctcatgagcttaatcaacctctttctgcgatcaaaagttatgcccaaggtagtgcgatccgtctagaaaaagagaacaaaaatcatccattactccccgcgttacgacagatagaccagcaagcccaacgtggcgcagatattattcgcaatctacgtttatgggtaggtaagcaatcagcaaatagtgatacagtgccactgtcagaacaaaatattgcccaatgtattgaacatatttggcggttattacgtattgatgaaaaatatccacaagtgactctgatcactaagattgataaacatgataccctatacttacctgaaacattattagagcaaatattatctaatttgatcaccaatagcctacaggcgggtactaaagtgctacagataagcacccataaagcgccagataggttgttaattgtgatcaaagatgatgcgggaggaatgagccatagccagcttgaacaacctttctccccttttcaaaccaccaaaacagaaggtcttggtttaggtttggtgatttgccaacgcttattaaattcacaaggtgctgatattcacatagaaaatcaaaaagataagcaaaataatgttggattaaaaatcacccttattttccccaataacaataattag

SEQ ID NO: 307534 - DNA, 1992 bp, Proteus mirabilis
atgccatcacgattaagttgggttcgttatcaagaaaatttagttaatcaatggcctttggcaaatattacacaacaagcaggcacattaacctatcaatataaaccagaagataaaaaaacagatttattactgcgtttatggggaaatttaacgttaggacatactaatactaggggaggaaaaccaagagagcctaaaatggttgattttagagctagcagaaatacaaggtgggatccctctattgatacaggctttttagatacagcttctctatatcaagataataatcgttatggtgttgatttttcatcgttatttaaattatcgcctcagttttctatttctttttccggtcaatatcaattggaaaaattagacagtcatgagcttgaacttcccatgggttttgatttcgtgaccgaggggcgagcagggcaacgtcatgaagtcaatttagcgttagccacagattggaaaccattaccctggtttgcgatgaatattggcggtaaatatcattactatcatctgacggatacctttttaaataataaacggaagaatagggttaaaaattacgagaaaacagcccctatccgcggttatctgatctcttatcgacgagtattaaccccagaagagtatttactctatcgcgcggttaacaaaattgatgtcgatactttacctgacgagttaaaaaattaccgaaattctgctgagctgagtaaaaaaattagagactttcaacaagcggttttagtttaccctgaaggtggcgctttgctagaggaaatcaaggagcaggttgctaggccatatcttcagagaatacagcatgatatggagcatgaagattttattcgtaataaccatggaaagatgcaaataaaaaacgctaaagccatcccgatgaaaagagagtttagcctttggttatttgatgaaaatggcgtactacttaagagtaagaatattttacttaatggttttcttgatatggaggaaaaagtccctcatccagtgacgggtgagttagtttatcgctttgaaaaagatgttattaatcctcaggcattttctctatcagaagatattcaagatccctacgcactggagcctagctatcagcatggcgcattttcccctttaatctctgccaccctttatgccaacgatatggtgcgtttttatggccgttatactgagcaattgcgtttgcctaacttatttgaagataccagtggtttttcaggctctaaagctcgctattatggttttaagttaaagccagagcgtgccaaaagcagtgagtttggtgtggttgttgattttacgcattggttgaatatagagcgccacgctgatattaaaattaattactttaaaacgaacattgaaaatgtatttgatagagatgctaattggcaaattagacagttagaaaaacaaatattagaaggtgtagagttacaagcccggtttgataatggatttattttctttgataccgcattagtgtatagccataaaaataaagtctgtgatgaaaatgctttttatgagcttgatgcatcaggattatcgggtattaaaaactgtatgacagggggataccctggcggatttttgcgcacctcaatgcagcctaaatactcagttaacctacatttaggcacgcgctggctaaatgataaattagaattaggtagtcgctggctctattcatcagaagttgaaaataaagatgagaaatggcttaaagaaaatttacctaatagctattttggcataaataataatccgatgcgttgggcaaaagtatttactattgatgcttatgcaacttatcaatatagccccaatttatcttttgaaataacaggaagtaatttattaaatgaatattacattgatccgctgacccgttctggtatgccggcaccaggaagaagtttgcgattaggtgtaacagcccaattttaa

SEQ ID NO: 307535 - DNA, 159 bp, Proteus mirabilis
atggctattatttgccatgttataaaaaaaacaacaacacaaagaattattaaatttattaataaattacatacagttaaaatattaactcccattgatcagtttgttaaagttgttgaatacactcgccaatttcctgaatcattgatcacggcataa

SEQ ID NO: 307536 - DNA, 987 bp, Proteus mirabilis
atgagcattaacgtaggtgaggtcattgctgttcgtgggacacagattacgctgcgaatctttgatgagtctagtcttgaaacaatgttctatgacggaaagaaatacaagggtgtttcgatatgcgagtatataggtattaaacgtggtttttgcctaattgtttgtatagtcgagggggagtatttagatgaaaaaagattcgaatttgacgacaacaagattcagtatatccgaaaagtagaagctaaacctattggttactttgaacagaatcagttcaaagagggcatcaagttaatgccgatgataaaagatgaagcttacctgcttaatgagtcacaagtaatcaagatctttagtcaaacaaacgatgggagattcaaaattggctctatgcttaaagaagaactacccgtttcacttccttgggagaaaattttcaacagtcatattggcatttttggcaacactggtagtggtaaatcaaacactcttacaaggctttatactgaactgtttcgtaactttgaagataaattagtgggtaaaagccagttccttctcgtagatttcaatggagaatacactggtgaacagcttataaaaaaagctgaaaataagaagtccttcaacctgagcacaggaaaaagagaagggcaaaaactgcctttagcaagcgatcatatatggaataccgagattttggcattgttgtttcaagcaaccgcaaacacacaaacaccattcattaatcgagtaattgagaagcgcaaaaatcagctaaagaacaatgataatgttaaagatttcgtcataggtacattctatttatgtcttgttaatccagctcaaaataaagagtctttgattcacctaaaagttatcgccaaacatcttcagaatgatgctcttataaataaactgaaaaatttcatttggtttgataagcatcaagcttatctacatctatttcgtttaaaatag

SEQ ID NO: 307537 - DNA, 1209 bp, Proteus mirabilis
atggcaacaagcatacatttaacagaaatctaccaacgtaaactcaattttcttattggttccggcgcttctagtggcttgttccctactctctggttaccgctaatagattcggatgatgaaactaaaaatgaaaccattgagacactagcaactaagcttgacaagcttgcggagaaagactcacgatataaaaatcatcatacattactgtttatgtactactacgaacggatcattaaaccaatatatcagttcaagaccagtgatgtacaaacagtacaaaaacatcaatgcactggtgcccccagttgtaagacatgtaaggaatttgatacaaaaaagaatgtattaataaactacgaagctttcattgaatctattattcgtcttctgcagcagaagaaacatttcgagaaacgttgtaacctctttactacaaattatgatggttgtatccctctgattgctgatgagttaatcaaaaaaggacatttagagttccatttaaatgatggagctagcggttttatcgaacgaaccctctctgctcgaaatttcaactactacctatgccaaactggtgtatttggtagaaattcgtctgatataccacaaatcaactttatcaatctgcatggttctggctattggctgaaatcagaggacaccattaaagtcgattataacaatctcgaacacacagttgtgatcccagaaacggctaaagaagctctagaacagtttgatgagattattaaccataaggataaaaaaacaacagatctaacagaaagtcaatttgaattaaatgaaaatgaccgagatgcgttttggaatacatacaataagctacccattgttaaccctacaaagtggaagtttcacgaaacagtctttgaagagcactactaccaaatgctgcgattgcttagctacagtttggaagaacagaattcagttttaattagtttcgctttttcattcgctgatgaacatattcgcaatctagttaaacgttcattctctaatcattcactgcaagtgtttatttgttgcttcaacgaaaaagagcataaaactatgcaggagttctttggtggctataaaaacgtaaccttaatccactttgaagaaaaagttttagattttaccgcgtttaacactgacgtgtttaacgcagaaatcttaagggacgtgacactatga

SEQ ID NO: 307538 - DNA, 456 bp, Proteus mirabilis; identical to SEQ ID NO: 298194

SEQ ID NO: 307539 - DNA, 516 bp, Proteus mirabilis
atgaaatcatgtattgttaattgttggtatcataatgatttcgaatcagaggctatgtggaagttatattctgatagtggaaaaggaattgccatcaagactaacgttacttctctggttaattctttaagtgaaaacgatgaactttctttaaggctaggtaaagtcaaatattttaatttttttgacacaaacttaaaacatgaagattgcttagtggatggttcaacgtctccattattgaaacgtaaagaatatgagcatgaaaatgaagttaggctttatctagttcctaagcctgaagattggtatacatatgaatcaattcctttttttctagatgttaatgtatcgactttaatcgaagaaatatatatatctccttatgtaggagaaccatttacttctagtgtttataaaatatgtgaattatttggaatccctgaaagtaaaataaaaaaatcgaaacttttagatgattataaagaagcgatgagaaaatttattgaggattaa

SEQ ID NO: 307540 - DNA, 1389 bp, Proteus mirabilis
  misc_feature (855)..(863): n is a, c, g, or t
atgatggattttataatacaactagccattatattagtttgtttattttatggagcaaggaaagggggaattgcattaggtctattaggcggagtggggctggttattttagtctttgtttttaatttacctccgggtaaaccgcctgtcgatgtgatgttagtgattattgctgtcgtctctgcatctgcaacgttacaagcatcgggtggtttagatgttatgttgcaaatagctgaaaaattattaagaaaaaatccgaagtatatttctattgttgcacctctcgttacctgtaccctgactatattatgtggtactggacatgtggtttataccattttgcctattatctatgatgtatcgattaaaaataatattcgtccagaaagaccgatggcagccagtaccattggttcacaaatgggaattatcgcaagtcctgtatctgttgcggtcgtcaccttagtggcaatgttaggtaatgtcacttttaatggtaagcatcttgagtttttagatttattagcgattaccattccatcaacctttattggtattttagccattgggatttttagctggtttagaggtaaagagttagataaagatcagcgcttccaagattttatttccataccagagaatcatgattacgtttatggtgatactgcaacattgttagataagaaattaccaatgaaaaattgggtagcaatgtggatattcttaggtgcgattgcggttgttgctgtattaggtgcattttctgaattacgtcccgtatttaataataaaccattatctatggtctgtctcttatacacatctgacgctgccgacgaagaggatagnnnnnnnnntattcaaatgtttatgttattagcgggcgcttctattattattatttgtaaaactaatccctcacttatttctaaaaatgaagtttttcgctccggtatgatagccattgtggcggtctatggtattgcttggatggcagaaaccatgttctctgcacatatgaaagaaatagaagctgcattaggacaattagttcgtgagtatccttgggcttatgccgttgtcttattacttgtttctaagtttgttaattcacaagccgccgcattagccgcaatagttcccttggctttaggtattggtattgatcctgcctatattgttgcttcagcaccggcgtgttatggctattatattcttcctacttaccccagtgatttagccgctatccaatttgaccgttcaggaacaacacgtataggtcgttttgttattaatcatagctttattttaccgggattaattggtgttactgtttcttgtatttttggctgggtatttgctgctatgtatggttttttataa

SEQ ID NO: 307541 - DNA, 408 bp, Proteus mirabilis
gtggatccgtggggattacttgatgaaaacacctttattcattatacggataaagctggttttgacagtataatgaaaactggtgttttgaatcctaatagccaagggaaagtctatgtaaccgacatattaatgatacctgatgatgttacacgaaatctcctcatcaataatcctaagtatgtaggacgtggtgattatgcgattatatttaaagttgattctgtgcaactgaataatattaataaagtttctgaatttgagtatattcattcaggtaaattgaaaatgaaggaaatcttacatgccggaaaaaacccatattctattgtgtcacatatagattatgaaacacgcaataaaatgactaataaccaactcaatgctaggagtaaatgcggtggttga

SEQ ID NO: 307542 - DNA, 1491 bp, Proteus mirabilis
atgccaatgatttttattggtgcttataaaatgatgggacaagcccgtctaagaatagccgatcatttacgaaaaatcccgattggctggttttcttctcaacgcagtggtgatcttgcatcacggcttactgctgatttagagatcattgaaaatatctggtcacatttcttaggaatgtttatcagtactttagcgatgcctgtttttctctcactattcttagtatgggtagattggcaactcactttaattatattattttctattccaatcgctctgttcgcattatccataagccataaaataatgttaaaagctgcacaacaggcagctgatgctaatgccaatgtacaatccgaattactcgattatatccaaggaattatggttattcgtagttttgggcgacttggtcctgcatggaaaaaactaaaagcagccttagaaacacaaaataaaacccaaatagttctagattccaagcctgccccttggattgcactttatggttttattcttgaatcaggttttattttattaatgataataggaacaagccgtttaattagtggctcactttctccttctcaattcgtttttttccttgtattagcactccccatttatcgacaattctttgatttaggattatccagtatgttgttaaattatgcacaaaaatcattacaacgcatagaagaagtaatgaaagtggttccactttctgagcctaaatatactcaattaccaataagaacagatatctattttaacaatgtaagctttatttatccttataatagtcaattaacattagataatatatcttgctgttttcctgaaaaaagctttactgctattgttggccctagtggctcagggaaaagcactttactacagcttatttctcgtctatgggatgttaaccaaggtgaaatattgctagatgatattaatattaaccaaataaattccgataaactctgttcatatgtatcttctgtttatcaagatgtcgttttattttcaggaacaattaaagataatattttaatgggaaaaacagatgctcacgatgatgaaataataactgcagctaaattagctaatgcacatgagtttattatacaaaaaccacaaaattatgatactcctattggttacggtggtatgttactctcaggtggagaacgtcaacgtctttctcttgctagaactttattaaaaaatgcaccaattttactgatcgacgaagcaacatcgagtatcgattgttcatcagaagtattaattcaacaagctttatcattgttatcaaaagataagacaatcattatgattgcccatcgattaaatagcattaaaaatgccgataacattatcgtaatggaaaatggaaaaatagcagaacaaggaaaacatgctgagttacttgcaaaaaatggcttatatgcacatttatggttacaacagaaagcgttatgctaa

SEQ ID NO: 307543 - DNA, 1467 bp, Proteus mirabilis
atgaagtacttgcaactcacaaaaacacagtttcgcttaagtgatacactctgcttgcatatcgatgatttaactatcaatgaaggagaaagttgggcattcgttggtagcaatggtagtggtaaaacggcgctcgctaatacattatgccaagaggggattttattatcgggtgagcttattaataggtttactcgtccgattaatctctcttttgaaaaattacaaaaaatgatagaggaagagtggctgcgtaacaatacagacttattaagtgaagatgaggatgatacgggattaaccgtggctcaggtgatccaaatgcaggtaaaagataatgatcgctgcctgttattagcaaaacaatttggtattgatgcacttttatcaaggcgttttaaatatctttcaacgggagagtctcgtaaggtactgcttattcagttattgatgaataaacctgatctattaattttagatgagccttttgatggtttagatattgactctcgtcgtacattaagtgagttactttcatcactacatcaacaaaagctaacgattgttcttattttaaatcgctttaatgatattcctgattttgtgcaaaatgctggcttattgattgactgtaaactcgtggcacaaggtaaaaaaagtgatattttatcagactcagtaattgcgcaattatctcacagtgaaacacttgaaaatctgatcttacccgcctcagactccgttgatgcagttcctaccttaccaccaacgctttcccctattatacttaaggatggcgtggtcagttataatgataaacctgtgctccatcacttaacctgggaagttaaaccacaacaacattggcaaatattaggtcctaatggcgcaggaaaatcgaccttattaagcttaatcacaggagatcatcctcaaggctatagcaatgatttaacactatttggtcgtaaaagaggcagtggtgaaaccatttgggagatcaaacgccatattggttatgttagtaatgccttacatcaaagctatcgcgtctcttcaagtgtgaaaaatgtgattatttctggttttcatgactctattggtatttatcaagccgttaccgataaacagcaaaaattagcggatgaatggctaacactaattggtttaactgcactcgctaaccatccttttcactcactttcatggggacaacagcgtctagtattaattgtaagagcattggttaaacacccgacattattgatcctcgatgaaccactacaaggattagatacaaccaatagactattagtacagcgctttattgatatcatgataagccatagcaatactcaactactgtttgtcagtcatcatcaagaagatgcacctcactgtattacccatcgactgatttttattaaagaaggagatatctatcgttaccaacaacaaccctgttaa

SEQ ID NO: 307544 - DNA, 1449 bp, Proteus mirabilis
atgtttaaaaacctatttgttgttttacaaaaaattggaaaatccttaatgttaccggtatctgtgctacctattgccggtatcttactaggggttgggtctgcgggactatcatggatccctgtctctgtttctcaagtgatggcagaagcggggggatcggttttctctaatatgccactgatttttgctattggtgtggcgttaggttttaccaataatgatggtgtctcagctcttgcgtccgtcgttgcctatggcattatgtcaaaaaccatgctggtggtggcaccttgggtcttaggattatctcctgatagtgttgaaatacaacgtttaactgatacgggggtactaggtgggatcattgccggtattattgccgcatcaatgtttaaccgcttttatcgtattaaacttcctgagtatttaggcttctttgcaggtaaacgttttgtacctattatttctggtctgattgcgatttttgtcggtattcttttatcctttatttggcctcctattggtactgctattcaacgtttttctgagtgggctgcgtatcaaaatccagccgttgcatttggtatttatggtgttgttgagcgtgcgttagtgccatttggtctgcatcatatctggaatgtaccattccaaatgcaagtgggtgagtatgtaaatagcgcaggacaagtgttccacggtgatattccacgttatatggcaggtgatccaactgcggggatgttatcaggtggcttcctatttaaaatgttcggtctacctgcggccgccattgctatttggcatacagcacgtcctgaaaaccgtgtaaaagttggcgggatcatgatttctgcggcattgactgcctttttaacagggatcacagagccaattgaattctcatttatgttcgtagcacctattctttatgttattcatgccattcttgccggtttagcatttgttatttgtatcttgttaggtatgcgtgacggtacaagtttttctcatggtttaatcgactttatcgtattgagtggcaatagcagtaaactgtatctattcccaattattggcatactttatgcgataacttattactctattttccgtttcttaatcgtgaaactaaacctgaaaaccccagggcgagaagtagaagataaaaacgcgaaacaagcggataaaagtgcgatgggacaatctttagtcgctgctttcggtggtaaagataatatcagtagcttagatgcttgtattacacgcttgcgtattggtgtaaaagagattgataaggtcgatcgtgatgagctgaaaagactgggagcggctggtgttgtggtggttggatccggtattcaagcaatttttggccctaagtctgataatttaaaaactgaaatggatgaatatattcggtctataggtacaactgaaaaataa

SEQ ID NO: 307545 - DNA, 651 bp, Proteus mirabilis
atgatgtatcacattatacctgtgacaaattatatgcaaaattgcacccttatctggtgtgatgataccaaagaagcggccattgttgatcccggtggtgatgtcgaaacattaattgcagaaattgaacaacgtcaattaaagttgactaaagtgctattaactcatggtcactttgatcacgtagcaggaacggctcaaattgttgagcattttcatgtgcctgtttatgggccacataaagatgataacttccttattgaagatttagaacaacagtgtcgtatgtttaacttccccagtggaaaatcttttacgcctgatcaatggttaaatgaaggggatactgtcactattggtaaaaccattactttgtcggttttacattgtccgggccatacaccgggccatattatttttgttaatcaccaaaataaacttatctcgatgggagatgtattatttcgtgaaagtattggtcgtactgatttccctcgtggtaatcatgccgatctgattgcctctatcaaaaataaagtattaccactaggtgatgattatctatttatccccggccatggccctatgtctaatttaggtcatgagcgtcaatataatccttttttacaagatgaaatacccatttggtaa

SEQ ID NO: 307546 - DNA, 912 bp, Proteus mirabilis
atgaaaatagaattagccaaaagccttgaattaaatagaaatattacagcagaagaagctgataatttattttcaaaaaaaataataacatcaaaatatctttttgaatgtactgaacctgattgtcatgcccaagtaacttgtgccaatcttgataaaccaaaccgattacgaaaaagagttcctcattttaaatttgtttctgaacatagtgatacatgtaaaatagggatcaatgaagaaaatgaatttcgtagaataaaaaaaatgaaagaagatccagaggctcttccttttattctcgatgatattgttgagcttgatctctcaacaccttataaaactaaatttcatgatatcccttcatcaaaagaggaagatggcatcaacaaacgcttaaaaacaaaaaatattgatggcgaaaatagtaataaaacacgtcattcaaaaaagcgtttatcaggactcgttaatgattttatcgataaaaaaaatttctttctcaatattgcagaaggaaagatccatttaagagatttcttcatttatattaatgataaaaaagatctaagcgaatatgtagatgaacctcgaatatacttcggtaaagcttgggttaagcgtatagataattattaccttgtccgttttgataaaaaaatgaaaaaaggtgacttaatttgcaagccaacattttttatttctgaacgtcttgtaaataaatcagagtataaaagaacctctcggcaagaattagataaaatagcactatcaacaccgccaaaacctctttatttatttatatttagtgaattaccacctgtaaaaatgaataatggtgattttatcaatttcaaattagatgacttaacatacttatattacaaaacatggggtaaaaaaagtgaatga

SEQ ID NO: 307547 - DNA, 282 bp, Proteus mirabilis; identical to SEQ ID NO: 28147

SEQ ID NO: 307548 - DNA, 492 bp, Proteus mirabilis; identical to SEQ ID NO: 305739

SEQ ID NO: 307549 - DNA, 618 bp, Proteus mirabilis
atgaaaaataccattgtaaaagatctgaaaacactggaagagatttatggtcaacctgccgaaccatcggtcttaaaagaagtggattttattcaccccctttatcgcccttatattgaagctacaccatttgttgcattagccacttatagtgctgatggtatggatgtttctcctcgtggcgatgagcccggttttattcatattgaagatgaccatactttattattacccgatagacgtggtaataaccgcattgatagcatgcgcaatttgttaattaatcccgcgattgctttattagtgctagtccccggcattaatgaaacattacgaattaatggtcatgcggaaattttaatagatgaagaaacactcgcacgctttaaatataacaatgcactacctcgttctgtcttgcgcatccatgttgagcgcgtatttttccaatgtggtagggcacttattcgttcaggtttgtgggaaaacaaatatttagctgataaatcaactattccagcaccgggacaaatattgaaatccatttctcatcaacaatttgatggtgataaatatgatgcacaattgcctgaacgtattatgaaaacattatattaa

SEQ ID NO: 307550 - DNA, 579 bp, Proteus mirabilis
atgtttaagaaggcgttattgagtttaactgcaggtgcattattatttaatgctagttcagcattagcgactgattatcaaattgataaacaagggcaacatgcttttgtgcaatttcgtatccaacacttaggttatagctggttatacggcacatttaaagattttgatggaagcttcacttacgataaagaagatccttcaaaagataaagtcgatgttgtgattaaaacgggtagtttagatactaatcacgctgaacgtgacaaacacttacgtagtgctgatttctttaacgtcagtaaatatcctgaagctaagtttgtctcaaccaaagtgactcgtgatggtgaaaattatacggtgacgggtgatttaacacttaatggcgttacaaaaccaatttcactaaatgcaaaattaattggtgaaggtactgatccgtggaaagggtatcgcgctggttttgaagcaacaggtaaagttaatctgaaagagtttaactttaaatcagatttaggaccaaaatcgcaagaagcagaattaatcatctctgttgaaggcgtgaaaaaaaattaa

SEQ ID NO: 307551 - DNA, 387 bp, Proteus mirabilis
atgttactttcattactgcatatcaagtcaacacatcaaagccattttatagacgctagctcacttaaactaggcacaaaagatgaacatgcaaaggtttctgcattgttaataggcccaacgtatcgaattacaccttctttggctatctacgcccaaatggggcctaaaaaattaaaatatcgagttgataaaagttattcaggcgttgcggtaaccgataccattatcgtcgacaccaccaatgtgatgtttcaagcgggtattgattatagccttagaaaaaatgtaggcattaatcttggctatttacattcagatactgagtcaaacaaacataatattagactaaatagtatccaattatccctaggctatcgtttttaa

SEQ ID NO: 307552 - DNA, 252 bp, Proteus mirabilis
gtgaatgtcttagaaaatttccctgtactgctacctgcaattagtttaatatcattaattccagagaaagaacaatcacgacaagaaattccattaggattagctataaccactgtcgccttttttccttgtaactcaagctcacctcttagagttgaaacatctttagaaacaacctcattaataattaattctgcttcagcattattttttaatgataaaccaaaatcaccaacatcaagacgattataa

SEQ ID NO: 307553 - DNA, 255 bp, Proteus mirabilis
gtgaagtttgttgtagcgttaaactcaccttcagcaattgttccgtttgttgctttcttagcccaagctgtatacatcagcgtattatcattattacccagtgcttgtaattcacctgcttcattgaatttaaccattgaaccagttgttgttcctgaaataacaatagcagtccctgtattaccagttgttgctaactcttctgttgcaccagtaatagtatttccattaaaggttacttttacgcctttataa

SEQ ID NO: 307554 - DNA, 261 bp, Proteus mirabilis
atgcgtttaaaatcaattaatgcttttgtgttatccttgttagtaagtccattttatgtttgcgcagatttaaatatggacttcttacatggaggagttcaactgcaagctgctggtgtatttgatgaaaataccaattatcctgctgggcattatattgttgaggttattttcaatcgaaaattaattagtaaaaaagaattaattatctcaccagaagataatgaaaatttatgtttaaaaaaagattggattaattga

SEQ ID NO: 307555 - DNA, 195 bp, Proteus mirabilis
atgaccgagacagaacaactcttagagaacgccttgaacaccttgttacaacagcaagagatcgttatcagcaatttatctcagcgtgtcggggaactcgagacacagaacagtcagttagccatgcaatacagggaaatcagtcaacagttagcgactttaaccggactgctgaacaggtatcagaacggctga

SEQ ID NO: 307556 - DNA, 483 bp, Proteus mirabilis
atggcaatgacactaactaaaggtgaaattgttctatttgcgttgcgtaaggctggcgttgcttctgatgcgacgctaactgatgctgagccgcaatcggtagaggatggtattcatgatctggaagatatgatgtccgaactacaaataacatttggtgatttgggttataagttttcactagaagatgagcagccaacaccaggtgatgattctggcttgcctcgcaaatacaaacaggctatcggctaccaattgctactccgaatattaactgattacgggctagagccaacaccaagacaagaggcatcagcatcttcttcttatgatgcattattacttgatacgcttaaggttccatctattgataggcgtggggatatgccagttggtcaaggtaataaatacacagctttaggcgtagataactattacgtcgagagggggtttaatgccacaggtaaagattccactggctag

SEQ ID NO: 307557 - DNA, 192 bp, Proteus mirabilis
atggaacgtaaaagcgttttcgcatgggctaacaatgataatggttatgtacaagccgtaattgtggctagtgattttcctgtatttaaggaacttggcttcgtcgcttcggttgatgagattactaaaccagaagtaaagaaatctaaggcaactaagaaggcagaaacaaatggcaatgacactaactaa

SEQ ID NO: 307558 - DNA, 1272 bp, Proteus mirabilis
atggctaataacttagattcaaacgtaagtcagattgtacttaaaaagtttttaccgggctttatgtccgacttggttttatgtaagacagttgatcgccaattactggctggagaaatcaactcaagcactggcgaaagtgtcagctttaagcgaccacatcaattcagctctgagcgtacggctgatggtgacattactggtaaagcaaagaatggtcttatttctggtaaggcgactggacgcgttggtaattatatcactgtcgctgttgagtgggctcaaattgaagaagccttaaagctaaaccagttagaccaaatcttagcgccaattcatgctcgaatggtcactgaccttgagactgaattagctcaattcatgatgaataatggtgcattgtcacttggcactccaaactcaccaattgccaaatggtcagatgttgctcagacggctaccttcttgaaagatatcggcattaaatctggcgataactacgcagtaatggatccgtggtcagctcaacgtctcgctgatgcgcaaactggcttgcatgcatctgaccaattagtgcgtacagcgtgggaaaatgcacaaattccgggtaactttggcggtattaaggctctaatgtcaaatggcttggcatctcgtgagcaaggtgattttggcggaacactgactgttaaaacagctccaacagtggattacactgctattaaagattcctatcagttcactgttactcttactggcgcaacagcaagcaagactggattctttaaagcaggtgatcaggttaaattcactgcgacacattggttaaatcagcaaagcaagcaaactctgtataacggttctactgctatcagtttcaccgccaccgttcttgaagatgcaaactctgatggtactggtgatgtcactgttaaactttctggtgttccggtgtatgactcagtaaacaaacagtacaacgcagttgatcgcaaagtagcggcaggtgatgaggttgtggtgattggtactgctaagcagaagatgaagcctaatctgttctttaataaaatgttctgtggtttgggcactatcccgctgccaaaattaaacagcattgattcagcagtggccacatatgaaggtttctctatccgtgtacacaaatatgctgatggtgatgctaacaagcaaatgatgcgttttgacttgctgcctgcctatgtgtgctttaatccacactttggcggtcaattcttcggaaatgtctaa

SEQ ID NO: 307559 - DNA, 900 bp, Proteus mirabilis
atggaaaacgaactgatcattgatggtcaggcaatgcctatgtctgaaaatcaggaatcacaacagcaggaaaatacagatcaaccaacgcaagttagtgagaataataccgctaataatgccgaggttgtcactggtgatttagctgaagtaaaaccagatcagagtgtcgaacaggagcaagactactccttgcaaatcggtgatgaagaaatctcgttaactgatgacgatgattcaattgaggggaagcaagctccacagtgggttaaagaccttcgaaaaggatttaaagatactcagaaagaaaaccgtgagctaaagcgccaacttgaggaaattacagccaagcaaacgcaagagccagcgggtaatcataatgatgaaatacctcagaagccaacactagagtcatgtgattggagtgaagaggcatacgagaaagcattaactgattggtatgagaaaaaaagccgtgctgatcagagtaaaaaagccaaggagaaagagctgctcgactataaggaaaaaatccttaagcgactggaagatcataagcaacgagcatctaagttacctgtaaaagattacgctgagatggaagagattgtcactaatgaagttccaatcatccatcaggaaatcttacttagagctgccgatgaaggtactgagctaattgcttatgcacttggtaagaataaagaattgcgccagcggcttacagctgagaaagacccaatacgtgcagcattcctacttggtcagcttagccagaaagttaagttagcaccaaaaccaaagaaagcacctaaacctgagccggaagttaaaggtggagcgggaagcgtcacgactgatgaattaaacaaactgtgccccggcgcaattattgaataa

SEQ ID NO: 307560 - DNA, 2166 bp, Proteus mirabilis
atgctcaggtttgaccgtgcgcactcaccgcaagaagatgtgagagcgaaatgcgtcgaagcaacacggtttgcacgagtgcccggtggtcaatgggaaggtgcaacctcagcgggcactaaactcaatgaccactttgagaaataccctaaatttgaaataaacaagatagccactgagctaaacaggattatcagtgaatatcgcaataaccgaatcacagttaagtttagaccaggtgataaagaagccagcgaagatttagccgataagttgaatggcttgtttcgtgctgactacgaagaaactgacggtggtgaggcttgtgataatgcgtttgatgatgcagcaacaggtggatttggttgctttaggttaacaacaaacttggtcaatgagttagaccctatggatgacaggcagcgaatttctatcgagcctatttatgatccgtctcgttccgtgtggtttgaccctgacgccaagaaatatgacaagtctgatgcagaatgggctttttgcatgtactcgctatccaccgagaagtacaaggctgagtacaaaaaagacccagcaacgttagatgtaggcattgatagatcatgggattatgactggtttgattctgatgtggtttatatcgctaagtattatgaggtaagaaaagaatcagttgatgttgtcagcttccgaaacccaattacttcagaggttgttacatatgacagcgagcaacttgagcaggttggtgatgaattaattgatattggctttgttgaggttgctcgaagaacagttaagcgccgtcgagtttatgtgtcagtggtcgatggtgatggattccttgaaaaggctcagagaataccgggtgagcacattcctttaatccctgtttatggtaagcgctggtttattgatgacgtcgagcgagttgaggggcatattgcaaaagcaatggatgcacaacgcctttataacttgcaggtgtcaatgcttgctgattcagcagcacaagaccccggctcagttcctattgttggcaagcaacagattaaagggcttgaaaaacactgggctgatagaaattcaaaaagacctgcattccttcctctgaatgaaataaccgataagcaaggcaatgttattgcgccagcatcagcaattggttatacgcaaccacagccacttaatcaggcaatggctgcactgttgcaacaaacaagcttagatattcaggaagtaactggtgctagtcaggcaatgcagcaaatgcctagcaatattgccaaagagactgttaatagcctcatgcaccgatctgacatggcatcatttatctatctggataacatggctaaaagcttgaagcgggctggtgaagtatggctgtcgatggctagagagatatatggatcagatagacaggttcgcgtagtcaatgaagatggaactgacgatatagcgttaatgtcagtgacagtaagagataaacaaacaggcgaaattgtagccatgaatgatttatctactggtcgttatgatgtcacggttgatgtaggaccatcttatacagcaaggcgtgatgccactgtttcagtgctgacaaatcttcttgctgggatgcttcctcaagatcctatgcgcgcagttgttcaggggattatcttggacaacatggatggcgaaggccttgatgagttcaaggagtacaaccgcaatcagctactcactcaaggtgtcgtcaagcctcgcaacgcagaagaagagcaaattgtcgctcaggcacagcaacaggcgcaacagcctaacgctgagttattggcagcgcaaggtgtgtacttgcaaggacaggcagaagtccagaagacgaaaaacgaagagctctccatccaggttaaagcattccaagcacaaacagaagctagggttgctgaggctaaagttgtacagcttcttgcatcagcagatagcacaaagcgcgctgaaattagagaggcgcttaaaatgttacataacttccagaaggaacaaggcgactcattacgagcagatgccgagttaattctaaaagcaacagatacgcagcataagcaaagcctagacgttgcgaaaactattcaatcacaaaataaccaacagtctcctgcggacttctcgcagagttaa

SEQ ID NO: 307561 - DNA, 1434 bp, Proteus mirabilis
atggacagggagcagaaagttgagcttcttaggctccttgaagaaaaatcccgtcgcgcaaatgtctaccgttataaaacctattacgaaactcgttacccttggcagaagaaattcattgcactaagtatagaatattcacaggttgcattgattgcagctaaccgagtcggaaagactgacacagctacctatatcgacgctattcatgcaatgggtgattatcctgacgattgggaagggtataagttcgatcatgcaccgcttatttggtgccttggttactctggtgaaaagtgtagggacttattacaagcgcctatcattggcaggaaaacagataacggttggcaaggtggattaataccgagtgagttaattgtcgatactgagccaatggctggtacgcctaacgctgttcgttctgcatatatcaggcataaatcaggcgacttagcaaagattcaattctggtcatactcacaaggacaacatgcattgatgggtgacagcgttgattggtttcatattgatgaagagccaaaagaccccactatttatccgcaggtattaacccgtacagctacaggtgataaaggtcgtggtgggcgtggcatcctaacatttacaccagagaatggtagaacagatttagttatcagctttatggattctccatcgtccgctcaaacgtgcatgaatgttggatgggatgatgctccacacttgagcgagaaggtaaaagaggatttgctggcctcattcccgccccatcagcgtgacatgcgcacaaaaggtattccgatgcttggtcatggtcgtatttatgacttaggtgaggattatattaaatgtgacccgttccctataccagatcactactttgttattgatggcatggattttgggtgggatcacccgcaagctcacgttcaattagcgtgggatacagaaaacgaaacgttctatctaacccgtgcttacaaggctagacaggtatcacctgccgaggcattcagcggagttaaacagtgggctgaaaatgttcctactgcgtggcctaacgatggattgcaaactgagaaaggctcaggcctgcaacagaaatcatattatgaagaggctggcttcaatatgctgcttgatcctgctcagtgggaggatggtagtaggtcagtagagccgggcttatttgaaatatacgacctcatgaggcgtgggaaatttaaagtattctcaggacttcgtgacttcttcgaagagtacaacttctatcaccgtgacgagaaaggcaagattgtaaaagttcgtgatgacatcctggatgctgtcagatacgcatacatgatgcgccgttacgcaatcagatacgctgatatacggaatcctcctgaggaagaagatatctacgttccatcatcttctagttggtaa

SEQ ID NO: 307562 - DNA, 225 bp, Proteus mirabilis
atgacagaaattacagcacagaatcaaatgcgcttagagctattacggttagttggcaatgataccgcggcggctcaagcagctatcgagttcgtaaaagacgatgcactcaagtttgagttattcaaagacgcatacaaaacatgccagacagaagctcagtttgtagcgcgagcacagaaagccgctcgtgatgctcagcaagcactagatttattcacatag

SEQ ID NO: 307563 - DNA, 156 bp, Proteus mirabilis
atgaatcttacgctaagaaaccggttaaagctgtgttttgaaatattaacagtaagaagtctgcataagcatcaagcgcaagagaagcaactatctacatttcagcgaggttatgcagctggaatgaaagactgtcagttggatagcaaaaagtaa

SEQ ID NO: 307564 - DNA, 225 bp, Proteus mirabilis
atgagtcagactttaggtcaaaaattagtaggcgttagtttcaatcctagcggaaatatcatggttgatgccgtaaagcaaaatgcagcagatacaattgatttaattcaggacagtatgcaaagagctacatcagaagaagcactgatgatccacaacgaggccgtgcgtcgcattatggacgctcaaatgtgggcggtgaaagctatcacttggaaagattaa

SEQ ID NO: 307565 - DNA, 696 bp, Proteus mirabilis; identical to SEQ ID NO: 306641

SEQ ID NO: 307566 - DNA, 345 bp, Proteus mirabilis
atggaatgtgcaaaaaatatcaaagtagagtgctcatcaaacgaattgatgaccttctatctaaaagaaatgtattcagtcggtaataacggactcgctaaggcgctaggaatacacccatcaaaatccagtcgagataaagccagaatattcgatttagcttgccagttggtgagtaagttcggattaccccctgattcggtaaacatcagtgagaagccaacgaaagttgttcttgaaggtgattacgcagaaagggttattcaggcccttgaagggaagggaaagattaaaagaaaagccccagcggacactgaggcttctcaacaaatggacttaatttaa

SEQ ID NO: 307567 - DNA, 186 bp, Proteus mirabilis
atgaaccaactagctttacgtgaatatgtcaaggagcatggtcaagataagacggctaaagcaataggtgttactcaaggcgctatcagtaaagcgctaagagaagggagaaatattctcttatcacaaacggaaaatggcattaaagcaatagaaataaagccatttccaagcactaaaaaataa

SEQ ID NO: 307568 - DNA, 726 bp, Proteus mirabilis
atgaacaaaaagaaaccgctatcagaagagcaactggcagatgccagaaggcttaaatcaatctattcctctaagcgcaagacgctagggataaatcaagaagacatagctgaaaagctaggtgtcaaccaaagtgctgtcagtcattatttaaatggaattaatccattaaacccgaacgcagttgctacatttgcaaagatattgaaggttgctgttagtgatataagtccgtcaatatctaaacaaataatgtctctggctcaatcggtagatgatgaaatcgaatatgtaggcacagtgccttcaggaatggttcaggtgcgcggtgaggcattcttaggtgttgatggtgccgttgatatgatcgaggctcacaatggctggctgaagatatacagcgacgataaagacgcctacgggttgaaggttaaaggtgacagtatgtggccacgcattcagtcaggtgaatttgttgtggttgagccaaatacaacagtcagatctggcgatgaggtttttgtgcgtacggtagaaggtcacaacatgattaaaattttcagcaaaactcgtgatggagactatcagttttccagtataaacaactcacacaagcctataactttatcaccagatcaagttgacaccatgcactatgtgtcagccatcgttaaaccaattaaatatatagacgcttgcgaaaaaacaggccgagcactgttttaa

SEQ ID NO: 307569 - DNA, 156 bp, Proteus mirabilis
atgacaatgtttgaagttcaactttttgcatacggacaacactttcattttatcttcattcaagctgaagatatggaggatgcagaagagcaagtaaatattctaaattcggttgatggtaatgttagctttcggctgactggtaacaagaaatag

SEQ ID NO: 307570 - DNA, 240 bp, Proteus mirabilis
atgacagataaaacaggtggagcggcttttcctgcaagcgggcgtccagatatgcagtttgtagcgcaggaaggcatgacattgcgcgattatctagctgctaaggctatgcagggtgatttagcttctcagagtgtaagtctcggtcacttttcaaatgacgcttcagatgagtcactagtaaatagagctaatttctactaccgcatggcagatgcaatgttaaaggctagggggtga

SEQ ID NO: 307571 - DNA, 195 bp, Proteus mirabilis; identical to SEQ ID NO: 298995

SEQ ID NO: 307572 - DNA, 900 bp, Proteus mirabilis
atgaatactaaaataaaagtcgctattgtgggctatggcaatattgggcgctttgcactagatgcagtacttgcagcacctgattttgagttagtgggggtggttcgccgtgatagtcaaaatatttcagatgaactgcgaaatataacagtaacaaatgatattaaaagcttaggtaaggtggatgttgctttattatgttcaccaacgagagccattaaagatttggctaaatcgatattgagcttaggtattaataccgttgatagttttgatgtccacagtgatatcgttgcattaaaaacagaactggatgaggtggcgaaaaagcataaccgtgttgcagtgatttcagcgggttgggatccgggttcagactctattattcgtaccttaatgttagctatggcacctaaaggtattacctacactaattttggtcccggtatgagtatggggcatagtgttgccgctaaagctattgatggtgtaagagatgcgctatcaatgactattccattgggcactggtgtacatcggcgtatggtttatgttgaattagaaacgggtgctaactttgcacaggttgagcaagccattaaggccgacagctatttctcatctgatgagacgcatattaaacaagttgatagtgttgatagcttaaaagatgttggtcacggagtacaaatgacccacaaaggagtgtcaggcaaaacacacaatcaattatttgaatatgctatgcatattaataatccagcattaacatctcaatttatggtttctgcagccagagcaagtatgaaacaacaagcgggtgcctatactgtgattgaaattccccccgttgattttttagcaggggatttaactacattaatcgcaaaactggtgtaa

SEQ ID NO: 307573 - DNA, 633 bp, Proteus mirabilis; identical to SEQ ID NO: 307521

SEQ ID NO: 307574 - DNA, 393 bp, Proteus mirabilis; identical to SEQ ID NO: 304083

SEQ ID NO: 307575 - DNA, 930 bp, Proteus mirabilis
atgagtagatataatgcaatacagcgatttaatctctgttttcaacaacttgaaaaagaaatcaatgctcttaccgattttcttcgtcagttaaagcaacttccttctgcggtttttgaattacctgaggtaagtaaagaagatgaacatgatgagataacaaatgttacagtgtcacctagttatgatctcgatgctttagaactctctttaaaattaatgaccaatctctttatctatgataatgccccacatgtcagtagcaagcgtgcgatacgtttaccgggggtactctgttttagtgtcagcaatcctgtatttaagaatgtaaaaacacaagtagagagcattaattcattaaaaaaacaactttcagatattgtgacgaaagagtctggtatttcgaaagaagaacgttttgattttgtccataatcagctaaaaggcttaattacacttaatgcttatcgcaccctcaccctactttctgatcctgatacagtacgttttggctgggccaataaaaacattataaaaaacttaactcgtaatgatgtgttagctcagctagaaaaaagtcgagaagccaatcgcgccgtacctccttatactagtgaacaatgggctgaacgtatcgataaagagataatgaccctttcacaactcccggaaaatgccaaattaaaaattaagcgtccagtgaaagtccaacctattgccagagtttggtattcggagcaacaaaaacaggtacaatatgcttgtcccctaccattattagctttctatattgataaaaagtcagactttaagcccataataggtgaattagctgattatgatgtgaataatattcaaattcgccatcgccctaaagccaaaaagttacaattaattattccacgcttacatttatatcttgaaaaataa

SEQ ID NO: 307576 - DNA, 1398 bp, Proteus mirabilis
atggcagccactcgcattgaaaaagactcaatgggacaaatcgaagtaccagctgaccagttatggggagctcaaacgcagcgttctctagaacacttccgtatttcagtagaaaaaatgcctgttgcactgatccacgcgcttgctttaaccaaaaaagccgccgccggtgtcaatatggatctcgggttattacctaaagaacgtgcagatgcaattattgctgctgctgatgaagtgctggcaggtaaacacccaactgaattcccattagcaatctggcagaccggttctggcactcaatcaaatatgaatatgaatgaagtgttagctaaccgtggtagtgagatactaggtggtatccgtggcatggaacgcaaaattcatccgaatgatgatgttaacaaaagtcaaagttcaaatgatgtgttcccaacggccatgcatgtcgctgctgttatcgcattacgtcaggatttactgccggaattaaaatcattactgaaagtatttaaagagaaagcagaagctttccatgatatcgtcaagattggtcgtactcacctgcaagatgcgacaccacttacattaggtcaagaaatctccggttgggcggcgatgcttgagcataatatcaaacatatcgaagattcagttcctcatgtgtgtgagcttgcgttgggcggaacggcggttggtacaggattaaatacacatcctgagtacgcagttcgcgttgctaaacgtatcgctgaattatcaggtcagccatttgtcacggctcctaacaaatttgaagcattagcaacctgtgatgcactggttcattctcatggtgcgttaaaaggtttagctgcctcattaatgaaaatagctaatgatgtacgttggttagcatctggccctcgttgcggtattggcgaaatttctattccagaaaatgagccaggtagctccattatgccaggtaaagtgaacccaactcagtgtgaagcgttgaccatgctgtgcgctcaagttatgggtaatgatgttgctatcaatatcggtggtgcttcaggtaactttgaactgaacgtatatcgcccaatgattattgataacttcctacaatcagtgcgtttattggctgatggtatgcgtagctttaacgagcattgtgctattggtattgaaccaaaccgtgagcgtattaataaattattgcatgagtctttaatgctggttacggcattaaatacccatatcggttatgacaaagctgcagagatcgcgaagaaagctcataaagagggcttaacgctgaaagaatctgcactgaaactgaactacctgacagcagaagaatttgatagctgggtacgtccagaagatatggttggtagtatgaaaaaataa

SEQ ID NO: 307577 - DNA, 1125 bp, Proteus mirabilis
gtgtatcgattagtttcactttactttattggcttattttatcccgatagcattcgagataaaacaaaagtgcattttgatatcaaaggcaacacctttaccgccacacaaagcgtattagtccagtcaggatgggaatcattaggtaaagacagcgacgaagaagaaacagaagagccagaaaaactcgactttgatttatcaacgttaaaatttaatgataatggggtgtgtgaaacagctaacgtggataaaaagcccactcttccacctaaatattttactgcttcaacactccttgccgctatgacacgtgcggcaaaatttattgatgatcctgaacttcgaaaaatacttgaagctaaagacgaggggagcactgatcaaggcagtattggcacagaagcgactcgcgcagggatattaaaaaaactctccgaaaatacgggattaatttcgattgaaaaagaaaaaggctattcagagcttgtttggaaaacaacaaagcaagggcaagagttttgcgctgctctgcctgatgaaattaccaagcccgatatttcggctcgatgggctgaaaaacaagccttaattaaaaaaggggaactgaccgttgctgactttattaaagaaacagacagctatattaaggagttgattgccgaactcgacgctaacggaataaatatcacagctaacggtacaccttgccctgtttgtcaaaaggggtttttaatcaaacgtaaggggcaaaatggtttcttttggggttgttcatgctatcctgaatgtaagacggcatttcccgataaaaatgggcaaccagttacagaaaaacaacctaatgagggcgcagtagcacgtttaaatgtcatgtgtccgtcatgcagtaacgaaataattattcgaccaaaaggatacttctgtacaggatgtgaatttaaaatatgggctgaattttgcagtaaaaaactcacacagaatcaagtggaaaaactcattaaagatggaaaaactgccgttattaaagggtttaaaaccaaagcagggaaaacatttgatactgaacttgttttagatgataagaaaacagggaagataggtttccctgaaaagaaaaagtaa

SEQ ID NO: 307578 - DNA, 564 bp, Proteus mirabilis
atgacggagttcttcgacacgggcctgctgctgggccagcagccgctcgcgcaagatcgtcggcggtgtgggtggcatgccgccgtcgaatgggctttcccggcgcagatgggcgatgtgggcggcgcggatcatgatcttggacggcacacaaccgacgttgacgcaggtgccgccgatggtgccgcgctcaatcagcgtgacctgcgcgccttgctcgacggccttcagtgctgccgccatcgcggctccaccgctgccgatcacggcgacttgcaacgggcgctcgccgccgctgcccttgtcggcggcacccatccagccgcgcaccttgtcgaacagcccagtgcggttgtcggtcggcggggcatcggcgagcatcgctttgtagcccaggccagccacggcggcggtcagtgcgtccggcgctgtgcctggatcaagggcgagctgggccgcgcccttggcataggacactatggcagattggacgccgggtactttttccagcgcttccttgacgtgcgccgcgcacgagtcgcaggtcatgccggtgatttttag

SEQ ID NO: 307579 - DNA, 1245 bp, Proteus mirabilis
atgttttcagaagaaagacgacaggaaatctatagcattattagggaacagaaaaaagttaaagtggctcagctagcggaaagattcaacgtcacattagaaacgatccgcagtgatttgaaatacctcgaaaatgaagggttgatcaaacgttgtcatggtggcgccatactagggaaacaagaaataaaaaagatcagtaaatttagtgatagttttgatatctcatgcttactacacgatttattgatcgtcaaagaacataaaaagaaaacaccagaaggtaaagtgtgtgtattaggctcttttgtggtggacattattgctaatgttgatgcatttcctcgtgtaggggaattggtaaattcaaaaggaaactcaataggtccgggtggaaaagggacgaatcaagccatttctgccagtttttctgatgcaaaagtgcatttaattaccaaagtcggtgaagatcattttagtaagtacgcttataaatatttgcaagagagcggtattgattcatttactatttttcaaacagaaatagagccaacaggtagctcaattagctatttagcagataaaacccaaaataatattacggctacctatttaggcgcaaataacacttttaccctgcaagaggtcgatatctcactgccttatattagtgaagctgacgtgttattactgcaaggggaaattaatattgatgctaatgtgaaagccgcttcttttgctcattctattaataaaaccgtcatacttaatgtcgctccgtatagtgatgatttaaaacaactttatttatatgtggattttattacgttaaacgcttaccaagcttcagattggtcaggtattgaaattaatacgattaatgatgccaagcaagcagtagagattattgccggtaacgaaaagaaaaaagtgattatctacatagatgaattaggcgtggtgtattttgatgggaggaatacttttcatattccgccactaccttctctacgtgttgatacgatggcagcaacagatgcttttaatggtgcatttgcctcaaaaatagccgcaggaggcacaatgccagaaagtgttttatttgctagcgctttcttgtctgcatttatagaacaaaaaggggtgacttcaatgccttcactatcacaagtacaagcacgtcttaaattaagaattgaagatattcgaccacaagtaatctgcaatgagaaaaggtgcatataa

SEQ ID NO: 307580 - DNA, 336 bp, Proteus mirabilis; identical to SEQ ID NO: 294439

SEQ ID NO: 307581 - DNA, 927 bp, Proteus mirabilis; identical to SEQ ID NO: 294438

SEQ ID NO: 307582 - DNA, 1014 bp, Proteus mirabilis
atgtcctcattgtcccctgccagcgaagttattcttcgtcatctagatcatttcgcagacaggcacgtactcatagcaggtgatcttcaagacacgctagcattacaaattcaggccaaaagtgttagagcctatacaaatcaatatcaccagtggctaccgctactcaaatccatgggtgataatgcattttttggtttagcggcagatcaatcattcgtaaaatattgcgacactttgatttatttttggcctaaaaataagaatgaagcaacttttcagttacgtagcttatgtgcaagtttatctgtcgatactgaaatcttcatcgtcggcgaaaaccgtagtggtgtaaaaagtgctacggaattaatgaatggtatagcaaagctaaaaaaaatagattcagcacgtcgttgtagcctcttttttggttcactaacctatcaaacactctttgatcgaaataactggtggcaaacttatcgttatgacgatttaacggtgatggcattacccggtgtttttagtcaaaccgcattggatgaaggcagccgattattactctctacatttgatgatgcaatggtaggtgacttactggatatggcctgtggttgtggggtgattgccactgtattaggcaagaaaaacccgatgttaaaactcacactctgtgacgtcaatgcagctgctatttcatccagtattgccacgttaaacgttaatgaattagaaggacgggttattgcaagcaatgtctattctgcggtagaagaaacttatgattggatagtctctaatcctcctttccatgatggcttaggtaccagctatcaagctgcagaagacattattcgtctcgcgcctaactttttgaaaaaaggcggtaaactgcgtattgttgccaatgctttcttaccttatcaagatattcttgatcacgtgtttggctctcatgaagtgcttgcatcaacaggtaagttcaaagtttaccaagcaaccaagaaatag

SEQ ID NO: 307583 - DNA, 411 bp, Proteus mirabilis; identical to SEQ ID NO: 298166

SEQ ID NO: 307584 - DNA, 960 bp, Proteus mirabilis
atgaaacccgttgtaatactttatcaaccgcttccagaaaaactgcaacaaaaattatctgccgttgctgaggtaaaacagtttaacgcgctctctctcgattgtgccgattttaaagccaccctcgctcatgctgaaggattgttaggcgccggcggtaatatcgataaacactttattgaaagagcaccaaaattaaaagccgtatcaacgatttctgtcggttatgataatgtggatgttgccgcgctcactgaacgtcatatcaaattgatgcatacacctacggtattaactgatactgtcgctgatacaatgatggcgcttgttcttgccgtctctcgtcgtattcctgaactagccgataatataaaacaaggtttatgggtaaaaagtattacgccggattggtatggtactgatgttcaccataaaaccatggggattattggtatggggcgtatcggtaaagcattagcacaacgcgcccacttcggttttgatatggatattatttaccattctcgtactgaatataacgatgttaaccagcattttaatgctaaattttgttccctagagatgcttttacaacaagccgattttgtctgcattactttaccgctaacgccagaaactcatcatctgttaagcgcaaaacagtttgcattaatgaaagctgacgcctatttaattaatgccggacgcggtgccgtggttgatgaaaaagcattaattaacgcattagagcagcgacaaatagctggagccggattagatgtgtttgagcaagagccactgccaacctcttcaccacttttaaccatgaaaaatgttgtcgccttaccccatattggctctgcgactaaagagactcgctatgcaatggctgaatgtgccgttgacaatctgattgctgcattaaccgataatgtaaaagaaaactgtgttaatttttaa

SEQ ID NO: 307585 - DNA, 882 bp, Proteus mirabilis; identical to SEQ ID NO: 305259

SEQ ID NO: 307586 - DNA, 654 bp, Proteus mirabilis
ttgaaaccgtcaaacagttcaaaatgcactgttctgaacgggtcaaaatggcctgatcttacagagaatacaacagagattacttcagagagtacaacagagactaactcttcttgtcaggttcctactgaacccgacaacgctcctgaaaaattaattttggattatttcaacaaggtgacaaattccaaatatcgtgaaggaaaaacaacaacagggcatatcaaggcgcgattagcagaaggatttacctctgaagacttgatattaattacggattacctgacagctaaatggcaaaaagatcccaagatgcgtgattacttacgccctaaaacattatttgttcctgaaaactgtattgaataccaagataaggcgatcaaatggcgtgatgcagggcgtcctgaatgtgtgaatggtcgttggttaaagcctggagaagtttcagtggaaattaacacggttgaacgtgatgaaacttttagaaaaatgttcacctcaggctggaaacctgaaaatcgtattcaagcattagcagtcgagcaagcaaagaaaaatggtcttggccgtatgagtgaagttgctggtttagcttcattccgtggtatctggaaacaggcgacagaacaagttgcactggaggctaagtga

SEQ ID NO: 307587 - DNA, 639 bp, Proteus mirabilis
atgattgattacgcactgaaattacaggagttaaaaagccaacctgctcataaattaaaagaaattggtgaccaatggcaatcaccagataacctttactacggtgtcaactctaaatatggaccgtttactttagatttattcactgatggtcaaaacagtaaatgcccgcatttctataccgttgaggacaacgcactcactcaagattgggctgaaaaactgaaagagatcggcggttcagcatttggcaatcctccttactcgcgtagttcatatcacgaaggccagcctttaacaggtgttggtcacatcatgagtcatgcattagctatgcgtgaacaatacggtcggtatgtttttttattaaaagcagctacatcagaaacatggtggccagaagaagctgatcacgtttgttttatccgtggacgtattggttttgacgttcctgagtggtttgttcccgcagatgaaaaacagaaaccaacgggcgcattctttgctggagcaatagttgttttcgataaaacatggacgggtaaaaaattcgattacattcatcgtgatgaattagagcaaattggcaaagcatttattgagcaaatgaagtggctggcgtcgagaggtgttgcatga

SEQ ID NO: 307588 - DNA, 1770 bp, Proteus mirabilis
atgaaacctgccatgtcacaaacatttattcccggcaaagatgccgcactggaagactctatcgctagctttcagcaaaaattaactcagttaggttttaacattgaagaagcttcatggttaaatcctgttcctaacgtttggtctgttcatattcgtgataaagattgtccgttatgttttactaacggcaaaggtgctactaaaaaagcagcattggcttcagcattaggcgaatattttgaacgtctctcaaccaattatttcttttctgatttctggctaggtgctgatattgcagaaggtgagtttgttcattacccaaatgaaaaatggtttccactgacagatgatgatgctgtacctgaaggcttattagatgcacgtttacgtcaattttacgatcctgaaggtgagctatgtggcagtgaactggttgatttacaatcaagtaattcagaacgtggtatttgtgccttaccgtttattcgccaatcagataaaacacctgtatatatacctgttaatatcattgcaaatctttatgcatctaatggtatgtcagcaggaaatacgcaaaatgaagctcgagtgcaagggctttctgaagtgtttgaacgctatgtcaaaaatagaattatcagcgaaagaattagcttgcctaaaatcccccatgaagttttagctcgttatcctgctgttattgaagctattacgacattagaaaaagaaggcttccctatttttagttttgatgcatctttagggggacaattccccgttatttgcgtcgtgctgtttaacccacaaaatgggacttgtttcgcttcttttggtgctcaccccgattttggtgtggcattagagcgtactgttactgagttattgcaaggccgtagccttaaagatctcgatgttttcaatccaccgagttttgatgatgaagaagtcggtgatcacactaatcttgaaacccactttatcgactctagtggtttaattagttgggatctgtttaaaaaagatgcagactatccatttgttgattgggatttcagtggttcaaccgaagaagaattccacacattaatgtcactgtgccagcaatgtgatgcagaagtgtatattatggattataaccatttaggggtttatgcttgccgtattttagtccccggcttatccgatatttatcctgctgaagatctgcaactagccaataacattatgggtgtccattggcgtgacaccattctttctttaccaacaagtcatggcacaaaagaagagtacctctcacttattggccaatttgatgaagatggcttagatgactttactcgtatcagagaaatgattggtattgcaccgggtaaagataatggttggagtcatttacgtgtaggtgaattaaaatcaatgttagcactcgctggtggcgatttagaacaagcattagtttgggttgagtggacacaagatttcaacgcatcattatttacaccagcgcgtcaaaattattatcgttgcctgcataatcttttactcctacgtgaagagcatgagcgtgagcctgcacaatatatggaggcattttctcgtatgtatggcgaggaaacactgcaagctgcattaaatgcaattgaaggtaaacaacctttttatggcttgcaacccatagatccatcattagcgaatttgcctgttcatcaatctttattagccgcgtatgaaaaattacaacaagcaaaacgtcaatcgaataaataa

SEQ ID NO: 307589 - DNA, 639 bp, Proteus mirabilis; identical to SEQ ID NO: 25154

SEQ ID NO: 307590 - DNA, 846 bp, Proteus mirabilis
atggcaaaaaataccatgaatgatatttatgttattaatttatcctcaaatgatgcaggttgtggtataaaaattaatgaattattagtctcggataatacaatggcagccgaaggaagctattctactggtcaaaacatatctagtatattagccaatgggaaaaataccttaggtataattatgtttaatggatcggtttttactggtgaagaaaaacttacccctgatatgtggtgtgaagtcgaacttaagaaattatctgcaaacggcgatacctccttaatatcgggacttagattaaacggaaataatgatgggaaaatggtggtctctgataaatatcaaaataacagtgagcaaatctattttggtggccccagtagagatagtgaatttgatgttttagaaggaaaaaaccaatttaatatacaaggtctcccccaatggcaatgggaaaaagcgactcccgttactgaagacgatattcctaaaattcgtgctttttatgccgaactacgacaagcatttattgataaaaatctagataaattaaaaactatgggaaaaatatcgtgggaagaaatggcctatgccgataatggctctcctgatatcttttggaaatcgcttaattttcaagaacgattagaacaaggatatagacccaatccaataagttgggaaaaatatattcttagtacttacttaaatcaccgtatttttcgttacgaagctggatttgaacgcttatctcctattgagttagttagccctgaagggaaaaattatttttataacccttacctttctattattgatgggaaagtgactattgtccgataa

SEQ ID NO: 307591 - DNA, 252 bp, Proteus mirabilis; identical to SEQ ID NO: 297228

SEQ ID NO: 307592 - DNA, 588 bp, Proteus mirabilis
atgggtgataaatattattccaactcgggtattattttttatttatgtcatttgttgtgtaacaaaatacaaggcactttgaccattacaagccaagaaagtattggctctcatttccgtatcgtacttccataccagcatatagatacagaagagcgctcttttgacatattattagagggtataactgcaaaactcgccataaaaaaccctgaaatagaaaaaataatctgccaacagcttgataaatatggcgctacatactttgataaaaataaagagaatctttactcagaatacgatatcatacttagagacactccggataataatcctgaatcagcaacagtattattagttagctctattaccggatttgaaaaaatagcaagaaatttaataaagtgtaactataacttcggtgatccattaattgaggctattacttatttgattgaagaaaatgaacaactttctctcgaaacaactcaaacgagtattcgtaatgagaataataaccttgatcatcacgaagtaattcctgtctcttatacacatctgacgctgccgacgatctactctgtgtag

SEQ ID NO: 307593 - DNA, 483 bp, Proteus mirabilis
atgaccttagatacacaagatagtatctatattgcattgattgaccatattcaagccagcattgaacggtataaagaagggacttttataagaaataaaatattgtgggagataaaaaatttttatagtgaagagtttgatattggtctttatggcttaaaattaattaatgatagatttaacatttcaatgccagaagatgaagcaggatttattgcattacatatcgccagtattagaacaaacgataatattcagcaaacctacaaagtgacccactttatccaaagcattactaatatagtcaaatattatttaaatatagagtacgacataggatcgttaaattatcgtcgttttgtgacacaccttcgctatttctccatccgattattttcacaacctgaaaatgatcacgaacctttagaaaatgagttactcgatataataaaagataagtacctgtctcttatacacatctga

SEQ ID NO: 307594 - DNA, 960 bp, Proteus mirabilis; identical to SEQ ID NO: 112414

SEQ ID NO: 307595 - DNA, 363 bp, Proteus mirabilis; identical to SEQ ID NO: 112413

SEQ ID NO: 307596 - DNA, 255 bp, Proteus mirabilis
atgttcactgaacaagaacaacaaataaaaaagctattggatgtaaagttcttttccatagcgctctggtctgcgataaaaatcgcagtcgcagttttattgattatgtattttgagttcggcttgtatgttgtcatcggctacattctttacgcattagagcgaacaatgcatttaaaacatattaataatcaacaaattgacttacagctaaatatcattcaccggaaacttgatgaacttagcaaaaagtaa

SEQ ID NO: 307597 - DNA, 5775 bp, Proteus mirabilis; identical to SEQ ID NO: 112398

SEQ ID NO: 307598 - DNA, 399 bp, Proteus mirabilis
atgagagatatgcaggaagttttatcacgctggggggcgtggtcagcgaatgagggtaatagtgtggattactcatcaatagctgcagggtttaaggggttagttcctagctctagacgttctagagatgaatgttcagattccgatgggttaaaaataaataaggctgttttgcatcttagaaaaagtaatagctatttattccagcttgttattatgtattacgtcaaaaactaccctttacgttcaatggcaacaaggctgggtatatcacacaatgaagtggctaaacgattacaaactgcagaaggttttattgatggctgtttatcggtttctaatgtgaaactagatatggataaaataattcaaaaagaccatatttatatgcttgcgtaa

SEQ ID NO: 307599 - DNA, 828 bp, Proteus mirabilis
atgtctcaattagacggtagtgctatttcgcaaattcaaaatatggcagtggcttcattaagtctcgaagcaatagagaaatctctttgccccgccattgttcttccaaatgaatttaaagtgagtagtttggaaaatttacaagaaggtcgcttccgtttccgtggtgaaatgaaaacaaccagtatcagtgactttgttaaatactcaatcaaaaatgcaattgatgaaggtattagctgctttattgatgccgatgaaatgagtgccaaaactatttttaatatcggcacaattggtgagcctggtcatgctgataatactgctcttgtgaaattaaaacaaactgccccattcgcagcactattaaaaattgatggtgttaaacatcgtcaaaaagaattagcggaatggttagaagactggcgtgattatttaatggcgtttgatgctgacggcaatgttttagatatcaaacaagctatttctgctgtccgccgtattacaattgaatcaacacgctctgctgaacatgaagatcacgattttagcgccaaacgttcagtattagaaaatgttgaagcaagaagcaaagatgttatgcctactgcattccagtttacctgcaccccatatgacgagttaaaagaacgtagtattaaattgcgttatagcgtgcttactggcggtgatgttcccgttttagtgctccgtattgtccaacttgaaaaccttgaagaacaaatcgctcaagagtttcgcaatctactttgtgatgaatttgatgaaagtgatatcgaaacattcattggcaagttttcagcttaa

SEQ ID NO: 307600 - DNA, 696 bp, Proteus mirabilis
atgaaagagcgtggaattatttttaatgctgaaatggtgcgtgccattcttgacggacgtaaaactcaaactcgtcggatcataaaatccgtaccagcaactcataattttcatggctgggtaacgtcaagcacacacgcaaaagatgaaggaaaggcttgctgggctatcgatgattcaccgctactcaaagaacctattcgccttaactgcccgctaggtaaagttggcgatcgtctttatgttcgtgaaacgtggagtgtagtcagtcatgagtttgatgatgatggattgatgattgattatgttcctgatagaccaactaaagctgtgcatgaaatgccgtatggtcatggttatttcactggacatgtcatttactctgctgatggtgatttcacatggggtgacgatgatggttgtattgatggtcgttcttgctggaaaccatctatacacatgcctcgctgggcttcacgcatcacgttagagatcaccgatgttcgtgtagagcgtttaaaggatgctggcgataccgagtttaaagctgaaggttaccctttagatcgtgaattaactggcggtagtatggacccgttttgctggtttcgtaacctctgggattcagtgtcacctactaactttaaatatgcagataacccgtgggtgtgggtgattgagtttaaaaggatttaa

SEQ ID NO: 307601 - DNA, 156 bp, Proteus mirabilis; identical to SEQ ID NO: 304992

SEQ ID NO: 307602 - DNA, 306 bp, Proteus mirabilis; identical to SEQ ID NO: 18020

SEQ ID NO: 307603 - DNA, 141 bp, Proteus mirabilis; identical to SEQ ID NO: 296516

SEQ ID NO: 307604 - DNA, 1674 bp, Proteus mirabilis
atgaccatgaatgaggcagatgcccgcccaacgaactttattcgtcaaattattgacgaagatctggctaccgggaaacataatagtgtccatacccgtttccctcctgaacctaatggctatcttcatattggccatgcaaaatcaatttgcttaaattttggtattgcacaagattatcaaggtaaatgtaatttacgttttgatgatacgaatccagtaaaagaagatgttgaatatatcaactcgattcaaaaagacgttcagtggttaggtttccaatgggatggtaacgttcattactcctctgactattttgatcaactgtatcaatatgcgattgagctgattaacaaaggcttggcttatgttgatgagttgagtgctgaagaaattcgtgaatatcgtggcacactcaaagagccaggaaaaaatagcccttatcgctctcgtagtgtagaagaaaacttagcgctatttgaaaaaatgcgtgcgggtggctttgaagaggggaaagcgtgcctacgtgcgaaaattgacatggcatcaccatttattgtcatgcgtgatcctgttctttaccggatcaaattcgctgaacaccatcaaacaggtaacaaatggtgcatttatccaatgtatgattttacccattgtatttctgatgcattggaaaatatcacacattctttatgtactttggaattccaagataaccgtcgtttatatgattgggtgttggataatatcactattccttgccaccctcgtcaatatgagttctcacgtcttaatcttgaatataccgtcatgtctaagcgcaagctaaatcagcttgtgacagaaaatattgttgatggttgggatgatccgcgtatgccgacaatttctggcttacgtcgtcgtggctatacggctgagtcaatccgcgaattctgtcaacgtattggtgtgaccaaacaagataacaacgtggaaatggcatcattagaagcttgtattcgtgatgatttaaacgaaaacgcacctcgtgcaatggctgttatcgatccggtacgtttagtgattgaaaatatgccagaaggtgaagagattttaactgcgccaaatcacccaaataaaccagaaatgggaactcgtgaagtaccatttagccgtgaaatttatattgatcgtgcagattttaaagaagaagccaatcgtcaatataaacgtctggtattaggtaaagaagtccgtttgcgtaatgcttatgtcattaaagcagaacgagttgaaaaagatgaacaaggtgaaataaccaccatttattgtacttacgatccacagacgttaaataaagatccggctgatggtcgtaaagtaaaaggggtgatccactgggtcagcattccacatgctattccagcagaaattcgtctttatgatcgtttatttagcgtaccgaatcctggtgctgaagaggatttcttatcaaccattaaccctgaatcattagtgatccgtcaaggttttgtggaagcaagcttaaaagatgcggctattgaaaaagcgtatcaatttgagcgtgaaggttacttctgtgctgataagctttcgacagcggataaactggtctttaaccgtactgttggtttacgtgatacttgggcgaagatttcgaaacaaggttaa

SEQ ID NO: 307605 - DNA, 1494 bp, Proteus mirabilis
atgcctcatgtggcggccaggacggccagccgggatcgggatactggtcgttaccagagccaccgacccgagcaaacccttctctatcagatcgttgacgagtattacccggcattcgctgcgcttatggcagagcagggaaaggaattgccgggctatgtgcaacgggaatttgaagaatttctccaatgcgggcggctggagcatggctttctacgggttcgctgcgagtcttgccacgccgagcacctggtcgctttcagctgtaagcgtcgcggtttctgcccgagctgtggggcgcggcggatggccgaaagtgccgccttgctggttgatgaagtactgcctgaacaacccatgcgtcagtgggtgttgagcttcccgtttcagctgcgtttcctgtttgccagccggcccgagatcatggggtgggtgctgggcatcgtttaccgcgtcattgccacgcacctggtcaagaaagcgggccatacccaccaagtggccaagacgggcgcggtcaccctgatccagcgttttggatcggcgctcaatctgaatgttcacttccacatgctgtttctcgacggtgtgtatgtcgagcaatcccacggctcagcgcgtttccgctgggtcaaggcgccgaccagcccagagctcacccagctgacgcacaccatcgcccaccgggtgggtcgctatctggaacggcaaggcctgctggaacgggatgtcgaaaacagctatctggcctcggatgcggtggatgacgacccgatgacacccctgctggggcactcgatcacttaccgtatcgctgtcggttcacaggcggggcgaaaggtgttcactttgcaaactctgccgaccagtggtgatccgttcggtgacgggattggcaaggtagccgggtccagcctgcacgccggcgtggcggccaggaccgatgaacgcaagaagctcgaacggctgtgccggtacatcagccgcccggcggtatccgagaagcggctgtcgttaacacgaggcggcaacgtgcgctaccagctcaagacgccgtaccgggacggcaccacgcacgtcattttcgaaccattggatttcattgcaaggctggccgccctggtaccgaagcccagagtcaacctaacccgcttccacggggtgttcgcacccaacagtcggcaccgggcgttggtcacgccggcaaaacggggcaggggcaacaaggtcagggtggctgatgaaccggcaacaccagcacaacggcgagcgtcgatgacatgggcgcaacggctcaagcgtgttttcaatatcgacatcgagacctgcagcggctgcggcggcgccatgaaagtcatcgcctgcattgaagaccctatagtgatcaagcagatccttgatcacctgaagcacaaagccgaaaccagcgggaccagggcgttacccgaaagccgggcgccaccggctgagctgctcctgggtctgtttgactga

SEQ ID NO: 307606 - DNA, 1215 bp, Proteus mirabilis; identical to SEQ ID NO: 25147

SEQ ID NO: 307607 - DNA, 822 bp, Proteus mirabilis; identical to SEQ ID NO: 25148

SEQ ID NO: 307608 - DNA, 1494 bp, Proteus mirabilis; identical to SEQ ID NO: 13713

SEQ ID NO: 307609 - DNA, 2163 bp, Proteus mirabilis
atgaaattgatcatagaaggtctttctcttacaacccagttattaggcacacatttatctgtggctacactgactgcacatacaatccgtactacaaagatgggaattgatttttcatcactggttgaatatctgaaaagtgaaggatttgaaaatacattatcacaacgattattagatgatattccctctctagctatgccagtattattattattaaaaaatgaagagagtgctgttttaaccgaagtttcatttgatgaaactggacaacgtaaatataaaattcagcaagtagatggtttatctatatggttaacacaatctgaattaagtgaaaaatatttaggttattgctggttcattaagccacgtattacagaagatgttcgttcagaattgcctgaatatacgatgcctaaagcatggttttttaaagttatatggcgctttaaaaaatattactatcaaatcattctcgctacttttgttattaattttttggcacttgttagttcattatatgtcatgaatgtttatgacagagtaatacctaataagtcatatcaaacactctgggttttaagtatcggggtaattattgcaatattatttgaatttacagctaaaatgctccgaggccggttaactgatattgctggtaagaaagctgatttaattatcagttctgctttatttagaaaggtcacaaatcttaagttacaagaaaaacctatatcatctggctcctatgttaataatttacgagattttgaatctgtccgtgattttatgacgagcgcgagtttattaacattagttgatatgccttttttaattttatttgtatctgtaattgcgcttgttggaggctatttagcttttgtgccacttacgataattccattggttattattgtcggacttttagctcagatccctttatccaaatatattaatgaatcgatgaaggaatcatctcaaaggcaaggattagctgtagaagcgattgaaggcatagaaacattaaaaacgaataatgccatgaattgggcgcaaaagcgttgggattattacacagcaaaaacagcatcttcatcaatgaaagttaaaaacatcagtaattttgttatttattttgcagtaatgatgcaacagttaaatacgatatttttagttattattggtacttatttgattcatagcgatgatcctgcaagtaaaattacaatgggggcgttaatcgcaacggttattttatctggtagagcgttatcaccattaggacagattgcggggttagccgtgcgctttcaacaggcttgggtcgcattaaaaggtgttaatggcattgttgagcgaccatcagaacgtgaaccatctaggaaatatattacgttaaaacaaataaatggaaatataaaattccaaaatgtttcatttgcttataaccaagatagtagcagtatagtgaaaaatttatcatttgaaataaagtcaggtgaaaaagttggaatacttgggcgtattggcagtggtaaatcaacgactttaaaattagcagctggattatatcctgcagagcaagggagtatcacactagatgatgtcgatattcgccaaatagatcctcattatttgcgtaatcaggttttgttattagaacaagagccaaggttatttttaggtagtttaagagaaaatcttgatttagcccgtatggatggcttctctagtgatcaagatttgattgtggcactgaagcggtttggtttggataaagttattaaaaagcatcctaggggattagatatgtccttgggagaaaatgggttaggtctttctggtggacaaaaacaaattgttgctttggctagaatgacgttgagaaatcccaaaattgttttacttgatgaaccaacaacggggcttgatcaatattcagaaattcaggcattaaatgccatttcagcatggtgtcgctcaaagacattattggttgttactcatcgacctcaggtactgagtattgtcaatcgaataattgttgttgataacggcaaagttgtgatggatggtcccagagatgcggttttacagcagttagctaaaaatgaaacagaaaaacaaataactgctcactcaaaaaaccaaaatagataa

SEQ ID NO: 307610 - DNA, 450 bp, Proteus mirabilis
gtgagcaaacaacattggaaacagcttaacaacatcagatattcgctctaccggatggagcgaccttcactatcgccccgcttttcagccgctttgctcgcagccatcgcaacggcgctcgttgcgggcatggtgctgttttggggagcttataccgcgtgcctgatcggggcgggcgtgggtattgcggtctaccagttcgcgccactatcgaagtcgtgggctgagacactggataaccaattgacggcctatgatccggtagacgtgcaggcctatgcagaactgcaaaacgtgacccgttcacttggcaggctcgatcttggcgaggtattccgatggttggacagagaacgccaagcccttagttacagtcggccagcggcatcacaaggcccacaatgtaaattcatcaacaagcaagtccgccaaaagcgtgacggtgagtag

SEQ ID NO: 307611 - DNA, 2016 bp, Proteus mirabilis
atgactacattggtaatcgtggaatcaccgaacaaagtaagcaaaatcagcacgattctcggcgacggctacaaggtcatggccagcgttggccatgtgcgtgacctgccgccgaaagagctgggcatcgaaccgccgtctttcgagctgacctatcaaccgaccgagcgcgggcaaggcgtgttggccaaactcagggctgccgtcgcacaggccgaccgcgtgttgctggccaccgaccccgaccgcgaaggcgaggcgatttcgtggcatcttgccgacgcgctgcgcctcaagaatcccgagcgcgtgacgttcacggccatcaccaaggaaaaaatacttgcggccttcgctgcgccgcgcccgctcgacatgcagcgcgtacacgcacaggaagcccgccgggcgctcgaccgcatcattggctaccgcgtcagcccggcattgtccgatgccaccgggcagcgccttggcgcggggcgcgtgcagtctccggccgttcgccttgtcgttgaccgcgaacgggccattgccgcattcaaggtcactcagcactacggcgcagagctgattttcgagaatgacgacagcaccaaatggaaagcacagtgggacacgaaaccgcatttgccagagggcgaaagctacctgctggattccgcgctggccaagctcgccgccgccgttcgcaacgtatcggtcgccgaatacgaggacagcgagaagggccgggcacctgccgcgccgttcaccacctcgacgttgcaacaggccgccggtcagcgtctcaaattgaagcccaagcgcacgatggagctggcccaacgcctttatgagcaaggcgcgatcacctaccaccgcaccgacgccccgaacatggacgacgaaggccgggcagacattgccgcctatgcgcaaggcgcaggtctgccgctggccgagaagccgcgcaagtggaaggcgaaggagggcgcacaggagggccacgaagctatcaggccgacccatgccgccgatcttgaatgcggggagaacgacgacgagcgggcactgtaccgactcatctggcaacgtgcggtcgcgtcccagctcgccgatgcgacctatgccgtccgtaccgtgcgcctcaatggtgacgccgagggcacaccggtatcgttcaaggcgaccggccgcaccctgctgacgccgggttggctggccgtctacgccgacgatgccgaggacgaggacagcgaaccagacgaagccgccaataatccgattccggcgctcgccgtgggcgcggagctggtagcggctgacggccgcgtactcagcaagaagaccaagccgcctgtccggttcaaggaacctacccttgtcgccgaaatggaacgcctaggcatcggccgcccgagcacctacgccgcgatcctcgacaacatcacgacccgcgaatacatcgtggccgacaagaaaggctatttgcagccgtcgtctatcggcgaagtagtgcgcgatggtctggtagaccgcttcgcgtttatcgacctcgactacacccgaggccttgaggaacagctcgaccagatcgcagaagggcaggccgactaccttggcgttgtgtcggccgcttgggccgcgctcgatgacgagctgggcaagctggaatcggccgacctgccagttgcgcatccgtgcccgacgtgcagcaagccgctgcgccggatcaaggggcaacacgggttcttttgggcctgctcagatcgggaatgcaagaccacgctgccggacgccaaaggcaagcccggcgagcgcaaggccccgccgccgccgaccggcattgcgtgcccgaaatgcggcaaggagctggcccaccgtgtcgggacgagcaagcccgtcaaacgcggcatgaagccccggccgtatgacttctatagctgcaccggctttccgaaatgcgatgcgaagtacaacaccggcccggacggcaagcccgtgttcggtgatgacgagaagcccgcaggctga

SEQ ID NO: 307612 - DNA, 759 bp, Proteus mirabilis; identical to SEQ ID NO: 296415

SEQ ID NO: 307613 - DNA, 813 bp, Proteus mirabilis
  misc_feature (775)..(784): n is a, c, g, or t
atgcatttaaatccgttaaaaatatcaataagcccttcgtcactcccctgcactcaacctttaacctgcattgaatatgaggacttaaaggatgggatgttagatatgattaatcgcaacagtaatatattacccactgttgtggatgaatttaatcaacaagatccgcttaatgcgcctattatggtgggtgaagtggtcgtgggtcatatcattggtctaatacctgttgttgggggagtactttcaaaaattacttccgcgctttttggcctcatgaataaaaatatgaaagatagctcgttagctgagcaaattattgcccatgtctctcgtattattgatgctaaaatcactgataacaatataaaaatcattaaactcaccacagaaggtattagcgacgtttatcaattattttcagattctctcgctcgttaccttgaccccaatgtgcattattcagaagaacaattacgagatttacgggaacaagttcttaaccgttttgatgatgtgatttcgacaattattgctcaacaaccattagtattaaatttagcacaatcagcaggattgcccttttattgccactgttgcgcactttttgtcgccgcccattgcgatatattaaccaataaagaaaaacttgctctggaagaggattatttcaaaaataatctaaaaacattaagaaatagcattgacaaatttaacgccaatattcataaagcgatttatcagcagacctcccaagtttttaaagatgattatnnnnnnnnnntgattataataaatgtaatacttttttag

SEQ ID NO: 307614 - DNA, 684 bp, Proteus mirabilis; identical to SEQ ID NO: 300360

SEQ ID NO: 307615 - DNA, 1401 bp, Proteus mirabilis
atgtcatttactaaatcaatgcttgcactcgctgttatggcggtttcttttactagtcacgcagccaaacaggctgatttaatgattgtcgatggcacagtgttaacaatggacgcacaaaatcaggttatcgaacaaggaacggttgttgtaaaagaaaataaaattatcgccgttggggggcctgagttaacacaagaataccaagccaacaaagtgttagatgtggatggtgatatcgtgatgccaggattaattaatacccatacacatgcatcaatgacggtttttcgctctttagccgatgacgtgccagaccgattacatcgctatattttccctttagaaaataaaatggtgtctcgcgatatggttcgcgtgggagcaaacctcgccaatgttgaaatggtaaaagggggagtaactacctatgttgatatgtattattttgaagatgaagttgctaaaacggttgataagatgggaaatagagccatcttaggtgaatcagtgattaattttccggtggctgatgcacaaacccctgaagaaggcattcaatatgctgtcaattttattaatgaatataaagatcacccgcgcattattcctgcctttgcacctcatgcaccttataccaataccacagagaacctgcaaaaaattgctaaactctcggtagagcttgatgcccctgtgatgatccatttagcagaaaccgatagagagaaagaagaaattgcaaaacgaaccgatggtaaaagcccagttcaatatatggcagatattggcgctttaaataataaagtcattgccgctcatgcgattatggttgatgagcaagatattgatttattaaaaaaatatgatgtaggtgtggctcataatattagtgctaataccaaatcagccaaaggtgtttcgcccgttgttgccatgctagaaaaaggtgttcgtgttggtttagggactgacggtccaatgtcgagcaatacactcacaacgatgaatgagttaaatttagtaggcaaaattcataaattagagaataaagatcgcgccgcaatgccaccattaaccgtcgttgaaatggcaacaataggctcagccaaggcattacatatggaagataaattaggctctttagaatcgggaaaacttgctgatattattgttgttgatactaaagctcctaatatggtgcctatgtatagcccatatgcagcattagtttatggtgcgaatggaagtaatgttcgtcataccattgtagatggtaaaattttgatggaagatcgccaactgttaaccgtagatgaacaagcgattatcagtgaagctcaaaatttcgcgaataaagtacgccaaaccgttgttgatagtggtgaagtcgttaaatag

SEQ ID NO: 307616 - DNA, 723 bp, Proteus mirabilis
atgcataatcagatattaaaaaaactgccacaaatagagcaaatgcatcaaataaaactactttatgttgctgaaagtggaagccgtgcttggggcttcgcatcaacggatagtgactatgatgtacgtggtatttttatacggcctcgcaatgcatatctttcaattgataaacctaaagaaacatttgagtggatagaaaataattggtttgatgtaggagcttgggatattacgaaagcattgcatctattacgtaagtcaaatgctatcttatttgagtggttacaatcacctattgtttatcaacaatatgctggtatccaaaaagaattatttgagttggcacaattatattatcaaccccaaatcattgttcatcattatagagggatcgcaaaagccgttagtagacatcattttgaagagagtcattcaagtaaagcgatagatgagcccataaaaacggggaatatcccaccgatggagcttaatcagctaataaatatattaaccacagatgagcaaataattattcgagagttagtgagctttaaagcagataaagatgaacactttacttggctaccaaccgataatatgcaaaaactgatcacttttttatggcaagaaacagcaactcaattagcgaaacgcaccgtaccagatagtgaaatattaaataattggtttaggaaaatacttgatgaaactgaccattga

SEQ ID NO: 307617 - DNA, 897 bp, Proteus mirabilis
atgaaagccacctcagaagaagtccaagtttttattgcagtggttgaaagtggtagttttacacgtgctgcagaaaaattagcattagccaattctgctgttagtcgtacagtaaaaaaacttgagtcaaagctaggcgttaatttattaaatcggactacgcgacaattgagtttaacggaagagggggagcattactttcatcgtatgcaagttatcttacaagatatgaaattagctgaagatgaattaattaatacacaaaaaacaccacagggtctattacgtattgatgccgcaacgccggttgttttgcatctactggtgccttttattaaacaatttcagcaaaaatatcctcaaataatcctctctttagtttcatctgaaacatttatcaatcttattgaacgtaaagtagatatcgcgattagagtcggtaatttaacggattccagtttacgggcaaaaccactattgaatagttatcggaaaatcgttgcgaccccggactatctcgcccgttatggacagcctaaaatcgcagaagatctgcttgaccatacttgtctaacttttactgaaccagtatcactaaacacatggcctattgagcgagataatggacaattattagaagctcctatgggaatatcgtcgaatagtggagaaacgataagacaattgtgtctcgaaggtaatggtattgcttgcctttccgattttatggtggttaatgatatcgaaaatggtcgatttatcgaattattccccgataagctgcaacccatcgcaatgccttttaatgccgtttattatagtgaaaaagtggttagccaacgcatccgtgtatttattgattctctgagtgagtatattgctaaaaaagtaggttaa

SEQ ID NO: 307618 - DNA, 417 bp, Proteus mirabilis
gtgaatgatgaccttcttgccgttctcgccgatcaggttgatggcgtcgttttcggcgatgtagtaggacagcgggatgaacgacgccgcgccgttgtcgatcacgaaattggtgtcttcctcaacaacctgctcaatcaggcggtcgaaattacgctcgatcagcgagccgttttccatcagctcaaggcgctgggtgttgaatgccttgtaaccggcgagggtggcattgaccggatcggtgtccactgctgtgaccggcaggcccttgccgtcgatgtactggacgagcagggacgagataaaggacttgccgacgccgcccttgccttgcagcgtgaaatgaacctgacgggcgagggtgttcagggccggagtggttacgtcgttcataggtgcgatgctcctttcagatga

SEQ ID NO: 307619 - DNA, 369 bp, Proteus mirabilis; identical to SEQ ID NO: 18041

SEQ ID NO: 307620 - DNA, 378 bp, Proteus mirabilis
atgcaggtgatcggtgtcgatatggacggccgacactcgttggtggtcgccgaagccgatggcttcgcaaagctcatcctcgatggcgtgcaacacttcaatgtcgggccgctcaccgggcgggaaggaatagacaaggtgataggtcttttccgtcttcgacctagtgttggccccctgcgtggccaagatcaggattgcagcatcggcggggtcgtccgtgccgcagttggtaacgcggtagctggcgaccttctcgcccttggtggtgtcgttcgcggtgtccagaatgtagtcggccgtgcgttcccagctcgtcgggtcgatgccgcccttagccgcaaccatgtacctgaccagcttggccgggttcgatga

SEQ ID NO: 307621 - DNA, 915 bp, Proteus mirabilis
atgtcatctcagttcaatggacttatcccttccaattctttatcttcgtttaatatagaagtgattaaagaacttctgctctggatcgaggtaaatctagaaaagccgttattacttgatgatgtagcgataaaatcaggttatacaaaatggcatttgcaacgggtgtttaagcaagcaacgggcttaacattagcctcttatattcgtggtagacgactgaccaaagccgccactgaattgcgcttaactaaacttccggtattaactatcgcactacgctatcaatttgattcgcagcaatcttttacacgccgctttaaagctgtttttggcgttactccttcggaataccgtaaagttgatgtgttgtgtagcgacaattttcagccccccatcaattttgaagttaccgacctccctattccaaatattatcgagctacctgaaagttttctttatgttattcaataccaatacttttgctctatcgaggatattggcaaactacatgaagatattcgtcatcagttttggaatgattttttgttgtacacagataaaaactttacggaaagtagtgtgttaatttcttatcagccaaatacattacgtaaagataagatccagattgattatgaaattggcctaaacaatttagatcactttaccagaccccgtggttttagaaaaaaagcgattgcaggcgggcgttatgttcgtttccaatttaaaggcacgttagaagaatataaacaatttgccatcaagatctacttttatactttaccggctttggggttatgtcgtcgtttagggccagatattgaaaactacatttgtatagaaacagatagcgacattatggaactaccaaaaacactggaaattgattattacgttccaattcattaa

SEQ ID NO: 307622 - DNA, 180 bp, Proteus mirabilis
atgatttattctatggtggtgatggcaatgatttattttatggtggctctggaaacgatgttatatacggagaattgggaaatgatgtgctctatggtgatgatggagatgatatgcttattgattattatggtgctaatatgttggatggtggtaagggtaatgatcggatctgtgtag

SEQ ID NO: 307623 - DNA, 372 bp, Proteus mirabilis
atggctgtttgtttgttcattgtgctacctcgcgtttttccagtaagtcacgccgtcatcgcactggtaggcaacctgatcgggcgtatcgtcgccgataatgtagcccacggtgccgcgagtggtgacgccgatcccgtcgttgctatgaccgtcacgcttggccaccaccttgcagttatgcgcggccttgaatgtttcccactcgtcgggctggggtttgtagactgtggcatagccgccgcccaacagcatcaccgccagaaggccggggaaaattggcagctcatcgtcgcggaaagcacaccatgcgatccacccaaaaacgacaaacaggcatgtgaggtaggtgcccagcacccacgggcttaa

SEQ ID NO: 307624 - DNA, 261 bp, Proteus mirabilis; identical to SEQ ID NO: 300328

SEQ ID NO: 307625 - DNA, 549 bp, Proteus mirabilis
atgtctgaacactttcaaggtaaatttgaagcagaattgaaatatcacttaaaacgacctcaagattttattgatgcattacaactcgctggagcaactttatttatatcgaaaaatgatgaaacagattggtatttagaacatccaaatacgcctttccctgctccctctataagtttatgcgtaagaaaaatggtcccctctggtatcaatttattaattgtaaaaggcccagaacaagcccaatgtgaagcaataaaaatagaagatgcagaaaaaacggtttcgatgtttaaaacattaggttatcactgtattttaaactatacaaaatcccgtcaaatctactttctagaccaatttcatatcactatcgataaattagacaatcttggctactttgctgaatttgctattatgactgatgatgagagtaaacttgctgactataaattacagttacataacttagcatatcaatttggctttaatgatagtgagcaagagcatcataactataaaacaatgcttttaagcaaattagcttaa

SEQ ID NO: 307626 - DNA, 345 bp, Proteus mirabilis
ttgaattataatcaggataatatatttcatttaaatgataaaaaaacaaaaataataacaaaaaaatttgaaaggaatatattaggtataagcatttctcctgtaggaactctttctataagtcgtcagttaaaaaaagagatagaagttaaaatattttttcttattaataataaagataaatttgtcaagttttcagaaatggatgaaatgagtgcaatattttctttagctggaaaattatcttatgcattaggtgttgatccagtttatataaacaagctaagacgtaaatatggtaattcaataattaataaattaattaaaaataaaggtgatttgtga

SEQ ID NO: 307627 - DNA, 336 bp, Proteus mirabilis
gtgcgttattcagtgcttgaaactcaactggaagagcttatcaatgaagtgaaaacagatgaaaatctaacagttaatgatataaaagataaattagataatttctataataatgcgaaacaagagttaaataatattgaataccagcttaattcaatagatgtgatgtctataagtgaactcgccgataaagcaaaatcatttcctcttgcttttttacgattagaaagcaaaaagtctattatgcatcatcaagttaaaggtgaaattaattttttatatgataaatatgaaaagcaattggagaaaataaccactaattattattttcattaa

SEQ ID NO: 307628 - DNA, 603 bp, Proteus mirabilis
ttggggcaactttatgcggataatcctgcatggaacacaaaaggtaatcccaacttaaaaccagaaaaaagtaagcagtgggaagtgggcgttgaagggttaactcaagggattgattggcgtttatctctatatcaaaatgatattgataatctgattgcttttagagataacacttacattaattacaataaagctaaaataaaaggtgctgaatgggttggtgagatggatactggatcattacatcatcaattaacattgcagtaccttgatgctagagatagtgataataaactattaagcagaagagcaaagcaacagtttaagtatcaagtagattggaatatcgcagatatagatattggaattaattatcaatatataggaaagcgctatgatacggactttaaccaatatcctacgaaaagaataaaactaggtggggtaagtctttgggatttaactgcgtcatatcctattacatctcatctctcaattcgtggtagaatagccaacctgtttgataaagattatgagacagcttatggctatcgcacgccaggacgtgaatatttcctcaccggaagctacaacttctga

SEQ ID NO: 307629 - DNA, 921 bp, Proteus mirabilis
atgaaaataaccgtattaggatgtggttcaattggtaaactttggattgcaggattaacgcaacaagcccatgaagtacaaggatggttaagaatacctcaacctgattttgacgttaacgttgactccattaatggtatcccatttcaacaacgcattatagccaaccaaaaaacatggctacaacacagtgagttactgcttgtttgcttaaagtcttggcaagtttcagacgcggttaatgcacttatccctcacctctctgctgattgcccgattttactgatccataatggtatgggaacactagatgagctcaccctacctgaaacaccgactaaaagagcgatattacaaggtataatcactcatggtgcttatcaacaagatcaaaaagtgctccatacagcagaagggatcacccacattggtccattaaatacaacagcacgtcaatacggttatttagctgaaattttacatcaagctttaccggatgtagcttggcacaatgatattcatactattagctggctaaaattagctgtaaattgtgttatcaaccctttaacggtgttttatcaatgtcgcaatggtgatttattaaaataccctgagcatatccagaaagtctgtgatgaagtttatcaggtaatggagcgagaaggtgttatacctacctctagatcacatttacatggttatattatcgataccatagagcaaactgctaataattactcatctatgtatcaagatgtgaaatatcaacgccataccgaaatcgattatatcacaggctatctattacgtagggcatcagagcaaggactcgtgttacccgaaaataagcgactttttcaatttataaaacagaaggaaggcaattatgaccatatccgcactcatctgtctagctaa

SEQ ID NO: 307630 - DNA, 294 bp, Proteus mirabilis
atgagtgaagaatacgatattaaaaaagtgctaaacgaatcgcttaatactaaccaaaaaatccttaagggtgatcttactagcctcgttattttacaagaaattataaaggttttagacacaatcacaaaaaaagaaggagaagataaagctgtatctaatcatatcattaaacatcttcaactaaggctcgatacccttcctgagattggtgtcagtcatgacccgtcaatagttggagcgtatgacgcggcagtaaatatagttaagtctacacaaaaaactaagatttag

SEQ ID NO: 307631 - DNA, 318 bp, Proteus mirabilis; identical to SEQ ID NO: 302945

SEQ ID NO: 307632 - DNA, 1728 bp, Proteus mirabilis
atgcaagaaaaaccattctcccttacatcacatcatactgacaaacaacatcgtttattaaaatggagcttactcagcttatattttatctctgtccccttattggctgatcccgtcaatcaagcactctctatcgatgcccgcgagcaacaacgccagcaagaacgagagcgcatgttacaacagcagaacaaccccgttgtggatacgcgtattcaacagcctgatttaacgctgcctgattatccgcaaaatgaacaaccctgctttaccatttccactatccgtcttgatggtgagtccgctaccgattttcagtgggcattaaaggccgttaacgacgccaaaggccagtgcttgggtagccaagggattttgttagtcctcaataaagtccaaaatgctattttagaaaaaggttatgtcaccacccgcgtgatggcacaagagcaagatttgaaccaaggtgagttagttctcacgcttcaaccgggacgaattaatgccattcgttttgatgaaggcacttcatggcgtgggcgtttatggaatgccattcctgctgcctcaggcgatattctgaatctgcgtgatattgagcaagggctagaaaactttaaacgcgtacccaatgtcactgccgatattcgtatcgaacccggcccaattgatggtaccagtgacttagtggtcagttggcaagaaaagcgtcctgtgcgattaagcttcagtcttgatgatagtggctcaaaaagcactgggcgctatttaggctctgcgacgctagccattgatgcgccgtttgcccaaaacgatatgttttacgccaatatcagtaaagacttgtttgataaaggcccttttggtaaccgttcttacaccctgaactatttcattcctgttggcaattggggctttgccgccaattacaatgaatataattatcaccagaatattcccaatgccaacgaagtgttacgttatagcggtaagagcgataccgcacaatttaccctatcacggttactgtttcgcgaccaaatccacaaaaccacccttaatctgcgtacttaccgaaaaaccgccagtaacgccgttaatgacattgatattgaacaacaacgccgccgtaccgcagggtgggaaatcggccttaatcagcgcagcttcttaggcaatgccacactcgatgccaatattaactggcgtcgcggtacaggcgcctacggcgcacgccgtgcccctgaagaagatacccacagcggcagtgcccgcgtgggcatttttcttggggacatcagtttcaatcaacccttcacgttgggcgaacagccttggcgctggaataccgctttacgaggtcaatggactcagcatgccctaacaccacaagagcgcatgtccattggcggacgctataccgtgcgtggttttgacggtgagcaagtactgtcgggtgaaaaaggcctgttatggcgcaacgaactggcatggaatgttttttctaaagggcaagaactgtatttagccgctgattacgggcgtgttgaaggccaaagtacccaataccttgtgggacatcaacttgccggtaccgcattaggacttcgtggctcacttttctctcgtttgagctatgacctgtttgttggcgtgccattatataagccgaaaaaattcgatacgtcaggagcgacggcaggttttagcctcaaccttgaaatttaa

SEQ ID NO: 307633 - DNA, 171 bp, Proteus mirabilis
atgaaaaatgaaagtaaagtagctaatccaactcaagttagaattccacatgaacttaaagacggaatagaaagaacagctaagaagtatatgcgctctaaacaggcggatattatctatcgtttaaagttagtggatgagatggagaagaaaggtgaaattgttatctaa

SEQ ID NO: 307634 - DNA, 717 bp, Proteus mirabilis
atgaaaaaatatgaaataaatgaaggattccatgttcgtgttatggctgcaagacacgagctatcattaactcaagctgagttagcaaaacggacgggtgtttctcaacggcaaatagcggcctatgaaggtcatgagtcaaagcctagagctaatgttctaataaaactagctgaagcgcttggtacaacccccgaatggttagccagtggcgacgggctatcaggtattaaaaatatatccgggttcacagataaggtaactaaaataccaattatacctattgatagagtttctgagtgggttattaatatgtcaccaatctacataacagatgaatttcatcccactaagtatgaagttagttcattagcctttgctgtgaagataagagaccctgcaatggagatcagtgcaaatgactctatttcattttcaagtgaacctatagttgttttcgagccactacttgatgcgcatgatcaagattacgtcttggcattcgctaatggtgagtatgtgtttcgtagactatttaaagggttgaccacttcatcacttgttcctaatgataggagatatccaagtgaaactgtaagtaaccacgacattgaagataaaaaaataatgatattccctgcaattgcagttgagtttcaacttccagcgttcagtagggcctcaaaaatgtttgatattgactcatttgatgactaa

SEQ ID NO: 307635 - DNA, 177 bp, Proteus mirabilis
gtgaaaataacaattgaatgtaaagataatgagtatttatttgctcttgaagcaacaaaaacaattatcagtaataagccagatgttaatgcgttagctgtggctactggcgatggaaagacggcgtacggcaagaaatcacatgcgggtaattacaaaataactgttaaggattaa

SEQ ID NO: 307636 - DNA, 1008 bp, Proteus mirabilis
atgagtgatgagagtgattttagcatagtagtttttcagcaaaacacagatttaatcaactttaagatccaccaagaatcacaggaaatttgggctacattaaaagagattgccgcactatatggcgttgatgaaacgactgtttctagacatatcgctaatatatattcagacgaagagttaaatgaacaggcaactactgcaaaatatgcagtagttcaaaatgagggaaatagaactgttcgcagagttttaactcattatagcctagatgtcattatatctgttggctatagggtgaatgccaaacaagcaattgcttttagacagtggtctacaaataccttaaaaacatatcttgagcaaggttatctcataaatgagaaagccttacgtgactcacctgaaaaagtaaatgagctggcagctaaagttcgcgaaatacggtctggtgagaagcaggtttatgcaaaagtaagggactgcttcaagattagtgcatccgactatgatccgtcttctcgtgaagttcgtatgttttatatgttactgcaggataaatttcaccacgcaataacaggaatgaccagctcaaagttgattttagatagagccaatcatctagaagataacatgggtctttataatatagccggcacctttcctacaaaaaaagaaatagaaatcggtaaaaactaccttaggccagaggagttatataggcttcacttactctctgaacagtttcttctttatgccgaggccactgccttaaaaggcaaggaaatgacaatgtcatcactgcataaacaattagacagagttttaatcctaaatgattatgatgtgttttcagggtatgccgattacattaaagatgaagctattgaccacgcacgacaagagttagaaagatacaagaaaaagaaagtaattgaagataacggctacatatacgatgaggaaatggctgccgcaggagagtttgacttccttttcgaagattaa

SEQ ID NO: 307637 - DNA, 282 bp, Proteus mirabilis
atggcaacgataatttttaaagagaactcaaaaattcgcagacgcagaaagcaaggtgagtttttggctcgaaagatagctacgagaagtcgctcagtggaagaaatttgggattcgatatttggcgttgagaagaaagaacgccctgttctctctctcaaaccaacaaagcattatccaagtggagataactgttgcttgccaaattctagtatttactcagctaaatatagaaaatctggtacgctgttagaatctggagaagtaactgcgagggtttaa

SEQ ID NO: 307638 - DNA, 312 bp, Proteus mirabilis
atggcgaagataaagtatcttcctcaaacaggaaagcttaactctaaaatgcgtaggtatttggctagaggaaagctaattgagttaaaaagagctgaggcgcttatagctaaagaaacagaccccagcgttgttgttgacccatataaaccaattgaagtacctaatggaacattaacagcaaccgatagagccttaatgagtggtgctttaccaagagactgcgagccaaaagataacgcacctaaagatgacataatgaatagagttgtaaatcacgctcatcaaagaaatccaaataaaaaatggtga

SEQ ID NO: 307639 - DNA, 603 bp, Proteus mirabilis
atgaaaaagtatgacttgatattgtgcgatcctccttggtcttacaataacaaagtatcaaacggcgcagcagataatcattacaataccactcgatttcacatactcacccgaattaaagtccctgaatattcctctgataacgctgtactctgtatgtggtacacaggcaactttgcactcgaagcaattaaattagctgaagcatgggattttaaagttaaaaacatgttcgggttcgcatgggttaaattaaataaaaatgcaggagatagaataaataaaaaaccgccagaagatttctttgattttatggaaatattaaacaacgagacgaaaattaattgcggtaattatacccgtcaaaatgtcgaaatgtgtttaatagccacaagaggaaatggattacctcgtcaatctgcaagtgttcggcaagttatttattcgtgcttaggtgagcatagtgaaaagccaaaagaggtacatcatcgtttggaggaattatacggagatgttcctcgactcgaattattcggtcgtgagaaatacggtgattgggatgtatatggcgaccaagcggaagaaagcattcaattaatatag

SEQ ID NO: 307640 - DNA, 237 bp, Proteus mirabilis
atggataaatcaagacagcagtttgaagagtttataagtaaaggtgattatccttgggtgaaaggtattatccctgtcatgtggatggtgtgggaagcatcacgcgagagtttagagattgaattgccagagcgcaaaggaatttgtcataacgaatacgaaagtggttattttgatggtatagataaatgtgaagatatattaattagaagcggagtgaaaataaaaaatgaataa

SEQ ID NO: 307641 - DNA, 204 bp, Proteus mirabilis
atgaatagcaactctaaacaatttgtcatgctacacgatgaaaaacgttgcattggctgccaagcttgtaccgtagcatgtaaagtcatcaatgatattcctgaaggatacagccgactacaagtacaaattcaaggccctcataatgatgaggcaggaagatccacattaccaatttttccgagtttcctgtcaacattgtga

SEQ ID NO: 307642 - DNA, 258 bp, Proteus mirabilis
atgtcgatgaaagatatcggtattatggatggcgatctacttgctgtgcataaaacacaagatgtccataatggccaagtgattgtcgcacgtattgaagatgaagtaactgtaaaacgatttaagaaagtcggtagtaagatagaactgcacgcagaaaatccagagttttcacctattatcgttgatttacgtgagcagagctttactgtggaaggattagcagtaggggttatccgtaacggcgaatggctgtaa

SEQ ID NO: 307643 - DNA, 180 bp, Proteus mirabilis; identical to SEQ ID NO: 301481

SEQ ID NO: 307644 - DNA, 939 bp, Proteus mirabilis; identical to SEQ ID NO: 297816

SEQ ID NO: 307645 - DNA, 183 bp, Proteus mirabilis
atggaaacagtaactcttaaaaatggaacaatgaatattgaccttgcaaagattagatatgacgctggagagtgtgaaagtgccaacttgtgtcttgacgaacaaggagtgccaagagaggtaaatggcaaggagttatcactatggggtcgtatctgctatttcagagatggaggcatctaa

SEQ ID NO: 307646 - DNA, 729 bp, Proteus mirabilis
ttgttttatttagttgatgaaaatcaagatgtgttttctaacattagtgataataaagaggtaataagattagaggcaaaacacccaaataaaaataaacaagaagtatgggaagatattaatatcgttccaatttttgataaaaataatctaatttctcattatgcatttttaagtttagatatcacggataaagtaaagttaagaaatgatttattaaataaaagctatattgactctttaactggaatggctaaccgtctaagtattattgagaaaattgaacaggagcgattaaatattgcgacaccttcatctttttgtcttgggattattgattgtgataaattcaaaacgattaatgatcaatatggccatgctattggtgatcatgttttatgtgagatagcgcagcgtttattagccttagaacgccagcaggtttactgtgggcgacttgggggcgatgaatttgcggtacttttccctgctggattacgttcttgctctttattgttattggagatcatcgaatcgctatggcgagggatggaaaaaccgataaaaatcaataaagaaaaaacaatcgttccttctattagcttaggtattgctgaataccctaaggatggcaagacattatctgaactattaaagtcagcagataaacagctttatgcaataaaagagaaaggaggaaataaatacggtttttattcagagtattaa

SEQ ID NO: 307647 - DNA, 474 bp, Proteus mirabilis
atgcttattcgtcatatcttagacagcatagttgtgagtcaataccttgaaggaaacaactttatagatgtcggtacagggccaggattgcccggtattcctttagcaataatgcgtcccgatcaccactttgtgttacttgatagcttaggtaaacgcgttcgttttatgaagcaagttcagcatgaattagctctgcataatatcgaacctgtgcaatatcgagttgaagagtatcaagtagaaaaaccatttgatggtgtgattagtcgtgcttttgcgtcgatgaaagatatgctttcttggtgttcacatttagtcactgaagaacacgggcgtttttatgcattaaaagggcagattcatcaagaagaacttgatgagctttctgaaaatggtttaaagatgcctgaaaaggtgattaatttagcgatccccgaattgaatgaacagcgtcatctggttattttttaa

SEQ ID NO: 307648 - DNA, 423 bp, Proteus mirabilis
ttgaataataataaaaaaaaccctctacttaaatctaaagataatgatgaatatgtatctttcgtaaaggacttatggtcactaccaaatataaacgataaaataattaaccattctagtgattacattagaatttcaggacaaaaatttaaaattccattatcaggttatgtagatgataatggtaaaattatagatttcagtgcaactccacacattgtggaaaaatataaaaaagactgtttatcaaaaaacaacaatcacgtatttatgataaacaaaataaatgatgatctaattttacttttaaaatcaaacaatgatgagctaaaagaatttaaatttgataaaaatggcaatacattagaaataaaaaaactaaagataaatgaaaatatagattatgtaaataatttcatgtaa

SEQ ID NO: 307649 - DNA, 192 bp, Proteus mirabilis
gtgatcgttgttgatcctgagttatcttattcttcagatttattggttgttgcgcgtttggatgattcgaaagaagcaacctttaagcagttagtcattgacgatgaacagaaatacctaaagcctctggactcccaatattcagcaacagcgatcaacgacaacggcaccatcattggtgtagcacgataa

SEQ ID NO: 307650 - DNA, 2889 bp, Proteus mirabilis
atgataaaccaacaagtcaattatgctcccggcatgcgcattgtgatacgcgatgctgaatgggtaattcaaaaagtcgacagcagttcagatggtgggctgctgataacctgtgaagggatttccgagttagtacgtggtcgagaagggcgattcttgacgagtttggaaaacaaaattgaaatactagacccaaaaaataccgtattggtagaggatgactcctcgggctatagcgctgccaagttatacatcgaaagtatgctgcgccaacgggtgccaacagatgagaaagtacatcttggtcataaagcggcgatggacccattacctttccagctcgacccgatcaaaatggtgttaaagcagcctcgtcaacgtatcttgattgctgatgccgtgggtttgggtaagacccttgaagctggcattttagtgtcagagcttattcgtcgtggtaaaggtaagcgcattcttgtcttagcggtgaaatcaatgttgacgcagttccaaaaagaattttggagccgtttttctattccattaacacgtcttgattcaaccgggattcagcaggtacgcaatcgcatccccactaatcacaacccgttttactactacgataaagccattatctcgatagatacgctcaagcaagatgtcgagtatcgccattacctagagagtgcatactgggacatcatagtcattgatgaagcgcacaacgtagcagaacgtggttcacactcgcagcgcagtaagttagccaaattactggctcgtcgtagcgataccttagtgatgctttctgcaacgccacacgatggcaaggctgaaagtttcgctagcttgatgaacatgctggacgcaaccgccattgccaaccctagtgattacagttacgacgatttcaaagacaaaaatctagtggtgcgccgttttaagaaagacgtcaaagaccaaatggtgggtgagtttccagaacggtacattgaccgagtctatgccaaagccagcgcacaagaagaagaggtttatcgtcgcttagtcgagatgtcgctgcgcagcttagagtcgggtaacaaaggcaccaaactatttaaagtaacgcttgaaaaggcactgttttccagcccaatggcttgtttgtctacggttgaaaaccgtatcaaaaaattagaacagaagcttaagaacactagtgatgtcgattatcaagaagacattgatgagcttgaacatctcgcatccgctttacgcaacgtcgataaagccagttttagcaagtaccaacagttacttacgacgatgcaaaaagatcttcagtggaagaaaagccaatccgatgaccgcttagtgatatttacagaaagcatcaaaaccctagagtttctgtatcaaaatctgcagcaagattttggtttagctgagggagctattgcccagttacatggtggcatgtcagacacggatatcatgagcgtcgtggaggagtttggcaaagaaaactcgaaattgcgcctattagtctgttctgatgtggcatcagaaggtatcaacttacatcacctcagccacaaaatggtccactttgatgtgccttggtcgttgatggttttccagcagcgtaatggccgtatcgatcgctatggacagaaacaccagccagaaatccgctacctgctaacgcaaagcgacaacccacgaattagtggagatacccgcgtactggaagtgctgatcaataaagacgatcaggcgcagaaaaacattggtgatagttcggagtttactcgtgcgtattctcaagaagaagaagaagcgcaagttgctaatcagatgatgagcgatgacatcagctttgaccctgcggactggattgacaacttctacagccaaaatagtgagcagcaagaagaagacctgtttgcaggcttcgcaaacgacgtgtccaatgcgcaagaaggcgatgatacggcccaagctgtttccttatttaaagacgatgtcgattactgtgagcacgcgctgaagtatcttaaccagcagggacaaaagctcaaatacgaagtggacaacaaaggtgttgtttcgttatttgcccctaaagacctgcgtcagcgttttaaattcttacctacggaaatacagcccaaagaagagaacaaccataccctctatttgagtaaccggcttgatgtgattaaccaggaaattatacgttgtcgcagtgagcaaacggcttggccgaaaatccaatatctctggccgataaacccggtttcacagtggctgggcgataaaatgatgggcgcgtttggtcgccaccaagcgccagtgctgcgcatgcctgcacttttcgaaagctatgaagatcactttgtgctttctggcttgtttccgaaccgtaaatcacacccggtagtcaacccatggttggtggtcagttttgaggacggtgaactcacgggcattgagcgctttgaagactttattcagcgttacccattccaccagcaagtgctgtctaacaaaggcggtgaacgcagccacgagcgccaagaagcgcttttaagccaagcgatcgatgcagtacgcccatacttgctacaacttcgtaatgaaaaagaagccgagttaaatcaaaagctcaatcagcagatggaaaaactcgataagttacgcgataagcaaatgaagcaattggagctggactttggcgatagcaagcaagcagaaaaaatcgttaatgacaaaaaagcacagcgccaacgggaaattgagcagatcttcgatgaatatttacgctggatcgaggacaccatgaccacagaaacctcaccatacattcaactggtggcagtattaaccggatcggaagggctataa

SEQ ID NO: 307651 - DNA, 4860 bp, Proteus mirabilis
atggcattggttggtatttacaacgaaaacgacttttactcacaccattatctgagcgaagtgtttgccggtgatattcgtggtgtattagaacagtggttagaaaaagaaaaccaagcccgcgaaattgaacgtgcagaaaaagagcaaggtggtaaaccgcagcgtggttatcgtgcacctcacacacagctggcaagttatagcggtgagtactttcgcgagttaaatcagcatctcagtgttaaagacatcaacaaacgccttagcaatcagcgtgcgcgttggagccccatcttgcatgcgctcgggtttgagataaaaccaacacaagtcttgctagaaaacggtcagctaccggttttgtcggcttatcaagaccatcaaggcttacctctgttatggatcctcgaagcccatgatccatccatggacgattgcgctgacccactgtcattgccgttattatcacagcagttagaagcacttgaaccagagcagcgtaaggttctattaaaaacacagcaaagtgatgagctgagttggcaggacttaatttcgaaaaaaatctttagcgccccagagccacctcgctggttgctgttattgggcaatcgccaatgcttgttgctagatcgtaccaaatgggcgcaaaaccgtttgttacgttttgatttagaagaaattcttggtcgtaaagagagcgatactctcaaagcgatggctgctcttttgcataaagactccatctgcccactgcaaggtcagaacctactggataatttagatgaaagctcacacaagcatgcgttttcagtatccgaagatctcaagtacgcgctgcgtgaatccatcgagttgttgggggatgaagccgcaaaacaactgattgaaaaagggtttacctacgacggcaaaaacaacattgatgccagccaactaagccttgaatgcttacggtacatgtatcgcatgctgtttttgttctatatcgaagcaaggccagagctaaaatacgcaccgacaaactccgatgtctacctcaaagggtacagtttagaagcactacgcgatttggaaatggtggatctctctaccgaagaatcgcgcaatggtcgctatattcacgacagtttgcagatgctatttcgtctcgtggccaaaggctttgctggcaacagcaaacagagcgatagcgagagcagcttatttgatgatattcagaaaagctttgccatccgcaaacttgaaagtcacttattcgatgacgcgcgtatgccgtatttggcgcgagtggtatttcgtaacgaaaccttacagcgcgtgatcaagttaatgtcgttaagccgcccaggaaaaggaaaaggcaagcgtcgtggccgcatctcttacgcgcagttggggattaaccagttgggcgccgtgtatgaagccttgctttcctaccgtggcttctttgctcaaactgacttgtatgaagtgaaaaaagctggggaagagctcaacgagctggaaacaggctactttgtcagtgccgagcagttggccgaataccaagatgatgaaaaggtatttcgcaaagatggcaccttactcagccacccgaaaggcagctttatttaccgtatggcggggcgagatcgtgaaaaatcggcctcgtactacaccccagaagtgctcacccaatctttggtgaaatatgcgctgaaagagctgtataaagagcagctcgaacccctcgcaaccgttgcggaacaggccgataaaatcctcaccatcaaagtgtgtgagcccgccatgggcagcgcggcgttcttgaacgaagccattaatcagctggctgaaaaataccttgagttaaaacaactggcgcaagattcccgcataccgcaagagcaatacacccgagagctgcaacgggtaaaaatgtacattgccgataacaacgtttacggtgtggatctaaaccccgtcgccgtcgagctggcggaagtctcgttatggcttaacgccatcagcgatgaagcctttgtgccttggtttggttatcagctatacaatggtaactcattaattggcgcacgccgtcaggtgttttcgacaggcgacctcacttataaaaaagccaaagatccaagttggttaaacatcgagccaaaacgtttaggccataatgaagcgcgcagtccgcatgaggtttatcactacctgctgcccgataacggtatggccaactacagtgataaagtggtaaaagcgcttaagccaaaagaaattgccaccatcaatgcatggcgcaaaacctttgttcgctcgtttagtatggaagaaaaagatcagctaaaacgtatctgccaaaaaattgatgagctttggcaagcgcatgttgagcagcgccgaaaagagcgcaatatcaccaccgataacctgcaaatttggccaaactccgcgcgctcagcgcaacgttcaagtaccaacgataaagataagttactgagccaatcacagcagtcaggctcagccgtttacccgcgcttaaaaatggtgatggattactggtgtgcgctgtggttttggccaatggagagtgccgatgagctgccaagccgcgcggaatacctaggtgaaattgagcaggtactcgaaggttatgcagaaacagcaagtcttaatcttgttgaatctggctctggtcaactcggtatgttcgatgaagtggcagagtctcaaacgcaagatctgtttgccactaataaccgaggtaccgtcaataaagacttcttatatatggtctttccgcgtttggcgctggtggataagctggccgcgcgctataaatttttccattgggaactggaatttgccgatatttttgccgaccacggcggttttgatcttattttagggaatccgccatggctatctttggagtggtcttccaaggatgttttaggcgatttttatcctgaactgataattaaaaataaaaatatttctggagttccgctagatattaattcttctaacttgaaaacttatctaggtgagtatgaatccatagaaggcgtattgtcatttttagggagtaaatattaccctatatcatccagttcaagaacagatctatacaaagcttttattgaaaaatcatggttcctgtcgagtgatgaaacaattataggcttggttcatccagaaggaatttttgaggatgataatagttataaaattcgcagtgaggcgtatagaagactagctttccattttcagtttcaaaacgagctagacctattctctgatatacatcatgatcgaagattcagcttaaatgtttatcgtaaaataggatgtgttgattttgtttcaatatttaatttatttaatccagctacaattgatagttgctttttgattgaatctgaagatgtttttggcgtcaagactaataatggctggaatgtatcaggtaatacatctcgagttataaggtttgatcagagtgtatttggcgtaatttcaaaattgttcggtggtaacaattcttcgaatagtattgatgtaaaacttcctggtattcaatcaaaacaacttctcagcgtcataaagaaaatatcgcagtctgagggtgtcaatgatatatataaaaatgtagacttttcaacaatgtggcaggaaaagagtgctatttctgagaacagaattaaacgtatttcttcgcagccagattgttggtcggaagtagttctatctggaccgaatttctacattgcaaatcccgtttataagagcgcaaaatctgaatgtattaaaaactctgattactctacaatagatcgtaatgagattagttcttcgtatattccacgagtttcctatcagctgttgaataaatcagatagttatattccaagaagaaagtatgataacgttttatttacggagcaatataggattgttgcgagaaaaatgttaaatagctcaaatgaaaggacacttatctcttgtattgttcctccaggtgtttgtcatatcgatggagttcaatcaatatcttacgctgatttaaaccaaactcttcaggctgcaacaattgcttcatcattagtgtcggacttcctagtaaaaataactggtaggaagaatttatatagcgcttgggatgttattccctacgtcgtttctgagggggccatggtaaggtatttggccctgaattgcttgacagacgcatactccgaaatctgggctaagagctttgttaaggaattattttgttttcaaacttggtctaagaaagataagcggctgaaaaatagattttattttgaattagactcaacttggcacccaaatttttctcttagagatgattattctcgtcgccaagccttagttgagatcgatgtcttagtctcgatggcgttgggtataaccttagaagagctcaaaaccatctaccgtgttcagttcccagtaatgcgccagtatgaggccgatacttggtatgaccaaactggtcgcattgtgtttaccgcttcaaaaggtttggtaggcgtaggtttagaccgtaagtttaataacaaaaacgggtttaccctctcgattgaagatggcgtgtttgccgacaaaaccagcgggcagggcagtgcagccgagccgtggacggagagtaatatagcgctcggttgggaagatattcgcgggctgaaatccggcaaggtttacaaaacctatatggatgatacccaaccaggcggtccagtcgagcgcactattgaatacatcgccccattcgacaagtgtgatcgtgagcaagactacgaaaccgcatgggcggtgtttagtgagcgttttgcctag

SEQ ID NO: 307652 - DNA, 6423 bp, Proteus mirabilis
atgttaccgtcagtggtgagtgaccaagtcgcaagcagcgtcaaaaaatacgtaaaatccgcctttaccatgaacaacccatgctttgaaagcgaagactattcgatgatcgatagctttttaaacgagcgcgataatctggtcaaaggcccttatttatccattcagttgccttttcggcaaagcgcgctggcgctgaattttttttcgcaagtacacttaccctttccgccctacgcacaccaagcggttgcttatcagcgccttggtggtgacaacccacaggccaccttggtcgcaaccggcacgggctcgggtaaaacggaatgttttctttaccctattttgaatcactgtgcagcaagcaaccagccgggggtgaaagcgatcgtcatttacccaatgaatgcgctggcaaccgaccaagctaaacgttttgcagaaacggtgtacaacaatgcgggcttaaaaggcaaagtcactgtcggcttgtttgttggcggtggcgatggtcaaggcagcgttgttatgagtaaagatggcgtgatcaccagcaaagagcatttgcgcaataacccccccgatattttgctcaccaactacaaaatgctcgactatttgctgatgcgccctgaagatcaatcgctgtggctacataaccaaccaggcacattaaagtacttggtagtggatgaactgcacacctttgatggcgcgcaaggttcggacttggcttgtttgatccgccgtttaaagttccacttaagcgtggataaccaaggctttgcgtgtgttggcacctcagcgactgtcggtgatgatttagccccattgctggagtacgccagcaccatttttgatgcaccgtttgatgaaagcgccgtggtacgagaagaccgttatcgccacgatgaatatttacaggctcatcaagcactagtgtttaactcaccgagttatgagcagctctcgttgcttgatgcctctcagttcgccgatgaagtcgcctatttaaatcagcagttagcgctgtggtttcccgagcataacttagccttgccagacgatctcgattcggacgaagggcgagccgtgcgcatcgcattaggggaagctctgcttacacatcagtttttccattcactactgggattgctggatggcaaaattcgcgcgctggatgtgctggtgaatgaactcgaccgaagtttgtcactcggatatcaagccacgttacagttgttgcagagctttattgctttggtgtcaatagcgcgccgagggatagatgaaccgccagaggtcgagcaagaacgaatagcactgggcaaagcgcgccccgtgctgccatttttgcaagtgcgttaccaaatttggctgcgcgagctacgccgtttggtggcacaaatccatccgaagccggtgttgcgttttagtgatgatttggcgtttcacgaaggcgagcaacatatgccagtgatccactgccgtgactgtcatgcaacagggtggggtagttatggcgatggctacagcgatcagctcgagaacgatttggaggtgttctaccgcttgttcttcgctcgtcatcaaggcgtgcgcgtgttattccccatcaacgaaggtgaagatattccggccaaagggcttattcgacgcgtttgcccaacttgcttaaccttaaattcggacagtgcgccgatccactgtggtcatgagcaagacgcactgatccgtgtgtttatcccagatttggtaaaaacaactgaaactaaaggcccgcactttgacaatcagtgcccttattgtcatagcaaaaatggcctgagcattattggtgcgcaatccgcgacactatcgagtgttgctatcaatcagctttatgctagccgtttcaacgacaataaaaaactcatcaccttttctgactcggtccaagacgccgcccaccgagcgggtttctttgccgcacgtacttggccgttaatggtgcgaggacatatcgccaccgttgcgcagcaatttgaagggcttgatctggcgagcttcgccacgaaagtgacacaagaagcccaagctaaactcgtgactcctgaatcgtttgtcgcaacgtttacggcgccgaatatggaatggttaaacgattatcgcgagctggtggaaggaaacgataccgcaacgttacccgccaaaagcaatttgccagatttagtggcgaaacgacttaattgggaagtgcattcagaatttggcttgcgagcagcgattggccgaacccttgagcgcactggcgaggtgagtgtcgatgtgtgcagtgatgaattggtcgcactttgttcaaagctgcatgctgaactggttgatgaactggggaatgagttcagcggagtgaacgatcaacatctgctgcatttctgtttgggcgtactacaccgcatgcgtttgaaaggggcgataaatcattcagccttacaacactacattcaagacgccggcgaaacctactatctaactaaaattgaccgcctaacttcgaaatttatgcccaactggagtgacagaacgcgcacccctcaatttttgtcgtttggtaagatccaacgcttcgataatttgtttggttctaaacatcaccacagttggtaccaaagctggcttaacaaatgtttgggtaatcagcacaacgtgatgatctcctcgcatacccagacgatttatagccgattaatgcatgcgctacgcaaagcgggcatcattgttcaatttgatgtcaaaggtagtgaagtctggggcttgcaacctgaaagtcttaaactgacgaccaatttacaagcaatcggttgtgaccgttgtaccgaacgtttggtggtcgctaaaactgcctatgccagttggtatgctcaaccttgtcataatgattgctgtcaagggcgctatacgcgcgatctgccgcttgcggaaaaagagtggcattttgcacaaacacaccgtgtcaatgccagtgaacacactggcttacttgagcgtgatgtgcgtgaacaagttgaaaactcatttatcaaagggcaatcaagctgggctgtaaacttgctctcctctacgcctacacttgaaatgggtattgatattggtggtttgtcatcagtgctgctttgctcagtgccaccagcccaagccaactatttacagcgtatcggccgcgcagggcgaaaggacggtaatgcctttaacatgaccgtcgcagaaggtaatccgcacgatctgttttattatcaagaaccattggaaatgatggcgggcagtatcactgcaccgggtgtctatcttgatgcttcggccattttggaacgtcagttaacggcgttttgtatggaccgttggattaaaacaggtgtgaccagtagtgcgattcctaagcgagtaaaacagatgttggacgcgacagaaagtggccagcgcgatctatatccatacaatttcctcacttttgttaaaggtaaacagcaggagttgtttgatctcttcatctctattttccacagcctatcgccaaactcagttgataagttacgtgcctttatgtttggcagtaatgtcgcttacagcttagaaagcaaaattgagcagtcattgagccatttggcgactgaccggaaatcgttgcgcagtcgcgccgaaaaactcaaacgtagtattgataaattgaagttgtcgccagttaaagacctcaattttgaatctgaactcaatgagttagaaaacgagcgcaatgcgctgttggcgctgattcgagagattaacgggaaaaatactctcaactttatgacggatgagggcttactgccgaactatgcattccctgaagcgggcgttacgcttcgctcagtgctttggcgtaaaaaggacaccattgaaacggaagatggctcaagccaatacgtgacacgtacctttgagtacgagcgaccagcagcggctgcgctttctgagcttgcgccaaggagccatttttatgctggtgggcataaagttgaaatcgaacaaattgacatgaaggtgtccgagcctgagacatggcgcgtgtgtagccactgtaactacagtgaacgcattgaggccgatcagcattccttctgtcccaaatgtggccattccggttggggggatgcagagcagaaaattcgcatgctgaaactcagacaggtttatgcgcgttctagctcgcgtgactcaaaaattgctgacgatgctgacactcgtactccagcgtttttccaacgacaaatgttggtgaacttcatgccacaagatgtcgcttacgcttaccacattcctaataaagaaatgccttttggttttgaattcttaaaccgagtgacgttgcgagatattaactttggtagtgcatctgatgaaggggaagagttctacgttgcaggagagaagaaaaagaaaacaggctttaaggtgtgcagtgactgtggctttgtacaaaaaaactatggccaaccaacgcacgaaatcgcctgtaaataccgaaattctcctgaagaagcgcgttatgaggacgttttgtatctttatcgcgagcttgagtctgaggccattcgaattttattgcccgtgagtaactatgggttaggtgaagtaacggagtcttctctggctgctgcgttgcaattgggtatgaaaaaatactttaagggcagtgtcgatcatctaaaaggcacgatttataaagaaccggcagatgcaggtgaaagctatcgttattacttagtcatttatgattcagtgcctggaggtacaggggctcttaaggaattaatgcaggagcctgacaacctaatcaccctgctatcgatggcgctggaggtcattgaacattgtgcctgcgcctcggaaggtaaggatggttgttaccactgtgtttatgcctaccgtgatcgcaacaaaatgcgctcaatttcccgtgaacatgcgcgtaagttgctcagagctatcatcgataataaaggcaagctgatcagtattaagagcgtttcagatattgaaattgatggcgtagtggagtctgaacttgaacggctatttattgaatccttgaaagagcttgccaaagagtttgtggtaaccaaagagtttttccataaccgctcgtcttggtttatcgcgtcaaaaattaactctgatgtctcttggcatttggttccgcaagtcgaactcggtgcaaacgacggcgtttatatagaaactcgtcctgattttgttttgtatcccgcatctcagatggctggtgtgaaacctttagccatttatcttgatggttttgcgttccacaaaaaaatagtgtttgacgatatagctaagcgtaatgcagtgcgtgatagcgggcgctataacacttggacactaggctggcatgatattgttcaaagtgataagagtaaattgaaagagttttttggtttgcatcgccaagaaattcaacctaaagaagcgctgtatcctaagttcatcgagcgtaattaccaaacattgcgcagcgtctatgaaggtgaaaataactttagtttgctgaaaaaatggttacatcaacccatcgaaacatccgtatttttccgtcaagcttcgacggcgaactgcttctattggctagcgttcaataagtcacgagacttatcggtgaaagcgaagtttgaatacgaaatgcgtgaaaatagcgcctcgagtcgctttagcgaactctgtatggatacgccatatctgttcggtggtttacttgattcagttggcacgtcgcaaaggttggtggaagtcgcaacagttttccctgttgagtcatatggttatgtgctgaaagatgcggtgaaaggtcaaacaccttttgagtatgttgaagcaaatattcgtttgcacatttgctttgatgatcgtgacattcacgatgagcactttgaagagtacctcgcgggtttttggaagctggtgaatatcggtcagtttatgcgtgatttttcctgcacatcccgtgtactgctccaagacgacgtgaataacggtgcggtgatgccgaatcaaacggcctctgttaccgcaaattcacaatcttcagtgggcggagcgtatgaagaatggaagcttattattgagcatcaactgctagagccggaggttattgaagcgatgatggcaaaatccctcagtgctcctgaggttggctatgagttaacaagcgaagaaggcgaaattttggctgaggcagaattggcttggccgagtagtcaagtagccttgttgttgcctgagcaacaagaggcggtagatctatttgaatcaaaggggtggttcgtcattgttggcgcattaaatgaaaccgtccttgagcagctaaattttaaattaaaacataatgataggtaa

SEQ ID NO: 307653 - DNA, 2136 bp, Proteus mirabilis
atgtcaggtatggatactccaaaaattgcaattgcatccgattttttgctttcttttgctgcgattccaaaagcacaacaaaagaaggtgcaagagtttttgagcaagtttcgtgaaaaccccacaagctctgcgattaattatgaaaaaatccgtgatgcgaaaagtaagaatgtgcattcggtaagaatcgatcaagcttatcgaggcattgttcttaaaccagaaaaaggcaacgtttacatgttgatgtttgttgctttgcatgatgatgcttatgattgggctcgtacccatcgctgcgaaattcacccgtctacaggggctattcagattattgatgtttctaatgtggaagctgagattgttgagccgacacaagggatttcttcgcaaaactcaccactttttgcacagtttagagaaaagcaaatactcgcgcttggtgtaccagaaagttttatccaacgtgtgatgtcagttgcgactgagaaacaacttgaacagttggaagagagtttgccaactgaagcctttgaggcattgtttatgttggccgctggagacgactatgaatctgtttataacacctataacgaccaaattaatggcgatgttgagattgatgtagaagactttgatgcggcgttgcaacgagccgttactctgcgctctttcaaagtggttaccgatgaccttgaactccaaaagatgcttaatgcaccgttggaacaatggcgagtattcttgcacccaagccaacgaaagttggttgcactagaggctaaaggtccaacccgtgtgctcggcggtgcagggacagggaaaactgtagtggcgatgcatcgcgctgtccatttggcgaagaagcttattttagaacagagtaatcgtaagatcttattaacgacttttaccaaaaatttagcctctgatattaaagcaaacatcaagaaaatagcgacagatgaacaattggcacgaattgaagttgtcaacattgatggctgggtttctcgtctgttgaagcagtttaaatatgactacaaagtagtgtatgagggtgatgctaaacgaaaaaaatgttgggatatcgctgttagccaagcgcctgccgagccgtatttccctgattctttttatcaagaagaatggcgcctgattgttcaagcaaatgggattaaaaccaagcaagagtatttaaaggtaagccgtgttgggcgaggtacctcattgagccgtttgcagcgctctctcgtttggcctgttttcgaagaatatcgaaaccaacttaaccgaaatcaaattcgagaaattaatgatgcgatgttagacgcgatggcgctcattaatgagcaacaactcgttcttccatatagttcgatcatcgtcgatgaagctcaggatatgggtagtcaagctttcacgctactgagaagtatcgtgccagaacaagagaatgacctatttattgttggtgatggccaccagcgcatttatcgcaataaggtggtacttggccgttgcggcatcaatgttcgtggacgtcgttctcaaaagttaaagattaactatcgtactactgaggaaacccgtcgatttgccacagctattttagaaaatgtgccagtcgatgatcttgatggtgactttgataaatcgagtgactatttatctcttttccatggtgatttgccaattgtgcaagcgtgtaccagtttcgatgaggagtgtggcttcatacgcaagcagatagaatcgcttattgaatgtggtgtgccgttgaagaatatttgtattgtatcgcgaacgaacgcacttcgtgacaactacaaaagcgcttttgaacaagctggattcgattcttactcgctctcttcagaaagttctgacaacgataaaccagggcttcgttttgctacgatgcaccgggttaaagggctcgagtttcaatatattttcattgcaggcgcaaacgaaggtgtcatcccattgcaaatggctattaccgaagatcctgtcgaaaaacgcgattacgatttcaacgaaagagcgctattacacgttgctgcaacaagagcagtaaagggtctcgtcgttacatcgtcaggacaactaagcccttacttgatttag

SEQ ID NO: 307654 - DNA, 636 bp, Proteus mirabilis
atgttcaaaaacctattttttcaaaccaaagcactaccagagctgtcatctcaactcgatgcagaaatcccacgctaccctcctttcctgaaggggttgccagctgcgtcacccgaggatttgcagtccacacaagacgagctaattgccaaactgcgccaggtacttggctttaaccagcgtgattttcaaaggctaattcagccctgcattgatcatctggcggcttatgttcatttgttgccagcttctgagcatcatcatcacagtggtgcgggtggcctattacgtcattcgttggaagttgctttttgggcggcacaagctgctgaagggatcatctttgttgccagtggcaccccggttgagaaaaaagagctagagccaagatggcgtgttgcggcggctcttggcggtttgttccatgatattggtaagccagtttcagacttgtccatcacagacgaagatggacgctatcagtggaacccttttttagaaaccttatcccagtggaccacaaataacagtattgaacgctatttcattcgctggcgcgatggacggtgcaagcggcacgagcaattttcaattctggtgttaaaccgggtgatgacacctgagttgctcgcatga

SEQ ID NO: 307655 - DNA, 915 bp, Proteus mirabilis
atgctggaagcgattggcaataccgatcccgagcatgtcctgtctaaactggtcattgaagctgaccaaaccagtgttcagcgagacctgaaagctcaacgaatttccgttgacgacaatgcccttggtgtcccagtcgaacgctatctacttgatgccatgaggcgattacttgccagttcccagtggctggtcaatcagcgagacgccagagtctggttacgaaaatcgaatcaatcaaccaatctttacctggtttggaaaagcgcggctaaggacatcattgagctattggccaaagacaagatacctggcatcccaagagatcccgatacccttgcggacatcctcattgagcgaagattggccactaaatccgcctcaaatgagcgatatgaaagctttgcccctgaagtgctgatcaaagacggcaagccaatctggctacccatgctgcatatttctgaggccgatttattgttcagctcgaatgtgccaagtggtgttacgctgtttagtaaacctgagtgggaagcaacacagcaaacacaagcagaacctcagagtcgttccagtgagcagccagacttgcctgaagcgtcatcatcaattgaacacagcaaatcggctgagttgccatcgacaaaaccgtccgaacaagatgatgaacttcgtcatgcagacaatgttaaaaattctcagataattgaagacgctccaggtgatggatgcgaaaagcctcaccattcaagcgatgctgcaatcgcgaataacgcaaaccagcacgatgtagaagcattgaatctccctgattctttggcgtggctcccagaggcaggcagtgcgttggtcatggttggtgaacagatattgatccgctatcccgatgccgtaagacattggatgacatcctga

SEQ ID NO: 307656 - DNA, 564 bp, Proteus mirabilis
ttgtttattcaaaggcaacctcgcattgcgcctaatgctgctgtgcacttgctggtcgatatatcgggttcaatgggtaaatccattggcgaaggtaatcgaaagtactttcatgttgccaatgaagccgctttggctttggccatggcactggaaggcataccgggtgttgtacctgcggtcagttattttcctggtattcatcaggaagtttctatcgcgttattgcccaagcaatcggttcgacatcgggccgactgttttgaccaaaaacctcgaggttgtacgcctatggcacaagcgatgtggtttgcggcaaacagtttgttagcacaaaaacagaagcgaaagctaatgatagtgctaacggatggtgacccagatgattgggctgccacgcatgacattgttgaccggtgcagacgcagtggctttgagctgctggggatcgggattcaaacacgcagtgttgagaaattctttcctcaaagcatcgtgattaacgatgtcaaagatttgaagcgtgagttattcgaagtaacacaacaactgttaattcagtaa

SEQ ID NO: 307657 - DNA, 699 bp, Proteus mirabilis
atgatggtattaaccctgttaacaaagcagattgatggtgagtttacggtttactggaagaccggccttcgaagaggtggtgagctaaaggtcgatttaggtgagcaatacgacaagctacctgagcagcaaaagccaattgcagctgagctctatgcgattcaccaactattgtcagtgaaagaggtgatggggagtaaccgaagtggcaatggccttcaagtccgggtcagtaaaggagccatcaaaaagttacagaaacaacgctcaactctgcattcactttacagcctgactgggtttttgctcactcgataccaggaagcacagatctcggtagagaagcgggacgattggctctcacattccttcgaagaatacagcgtcgataatgctacagtgagagaaatcgatgaggtcatcaacgttccgaacattggacctgtcgtggtgactcgtcatgcactggaacggtttgtggaacggctttcagacggtgcacctaagcatccttggaaggctttgtattctaagctgctttgcccgcagctagaaaaatccaaattgccagaaaaagttgctaccaaaaaggcaaaaaaatattcacatgaggcagagttctggtggcatatggggagcaaaatacactttgttattgtaccaactgaatcaattaaaacgttggttactgttttttga

SEQ ID NO: 307658 - DNA, 1740 bp, Proteus mirabilis
atgactggcaaatttgaaatacatgaatgggctgttcgtggcaatgagctgctcgaacgctccaaagaaattttatcttctgcgccgagcgaaaaagttaaatccatttccagtagaattccggaatgcgttttagatagcgaaaacagtataaatcttgtttttgccgggcaatacagtgccggtaaatcaagtattctaaaagttttgactggtcgagaagatattgctgttggaggaggaataacaacagaagagacccactcatatgattggaatggaatcaaggtaattgacaccccgggtgtacatacggaattgaggccagatcatgatgagatcacttatagggctatagcggaagcagatctattggtttttgtgactacaaatgaactatttgactctcacctcgccaaacatttccggaacctcgcgatagaaagagacaaagctcatgaaatgatgcttgttatcaataaaatgcaaagatgtgcaaaaggtaacagtcctgaagctcaaaatgtgattcgggaagatataagaaaagtattaaatccattctccccagaggatctgcgtacatcgttcattgacgcagaagcagccttggaaagtaagtcagaggatgatgccgacatttcaagaatactatggaaaaaaggtggattagattcctttacagaaaatttgaatgattttgtgcgcaaaaaggggttaaccggtagatacagcactactttatatacacttgaacaacttctgcaagaagctttggcatctgagtcaaccggcgacaaagatgttgatgctcttgaagaattgttattgcaaagaaggcgggcattagttgaaatacaagatcgtattcctcgcgctgtagagggagaaattcagcaatcttgttctgagatacgccatgaaggtcgaaagatttcagatatgattaatggatctgctgaccaaaaggctgttgaccaagagctccaaaagtctcaggaccgtgtccaatcaatcaccgaacaattaggtcaaactgttcaagttgtgattggtaagcacatggatgacctcgaaaaacggatcgacgggatagccaatagtgagcttgcaaaagaactgttaccccggttggagcatcgaattgaagaggcttcaatttcaccagataccatgtctaacttgagaaaagcatcagatgtgtcttctaaactgggcgaattcttggtgagaaattcctttaagcctaattctggatctattggagggctttttaaactcaatcaatattccggcaccgcaacacacaatgcggtaaaagccatcggcaagttttttggaaagaaatttaagccatgggaggctgttaagtggacgcgcaatgttgcaaatataggtcgtgttttggctgttgctgggactgttctaacatttgttcttcaaatcaaagaggatgcagatgccgcacagttagagtctgacttaagagagagtcgcgcagccatccgtgctggttttaatgatgctgctcacgtaattgaaatgcattatgatcaggctacgcaaacttacgtttccagcgcattatcatcagaaatagaggatgtcgatagacagctctctgaactacgaaacatgcaagaggtaagatccaatctgtttgaaaacattttggctctgcttgaagaaacacggtctcttatacaataccttcattcagtagacagtcaatggggttaa

SEQ ID NO: 307659 - DNA, 2139 bp, Proteus mirabilis
atgccagccccaaaggggggggttgatagtatgtttcagtatgctcttgatgaaaaaaacaaggtttctgatcttgaggaagcgcttcaggaatgtagggaggctgctcgtgagggatatgatattgccaaagacaatctaaacgagacggcaaaagcgattaagggtgtttcggaaaatctttccaactcgttgaagtcgcttgataacggttctgttagaactcccggcgttgtcgatcaattgaagtctcaactcacaggtgttgtgagtgaacttgaatcattacagcaatcgtctgctcagaatcttgaggcgagaaaaaaacatttagaccatttttccattacattattcggtcgcacaatggctggaaaatctactctgatggaaattctcaccaggggaaatggagcatccattggtacaggttcacaaagaacaacccgggatgttcgtacatactcttggaacgggctcgaagtgacggatgtgccgggtgtggcagccttcgaaggtgctgaagacgaggagctggcttttaaagcagctactcaggctgatttagttctttttttgataacggatgatgcaccacaacctgcggaagcagaatgccttgctcgcgttagacgcttgggtaagccagtattaggtatttgcaacgtcaaagttggcttggatgatgaagatgatttgattcttttcttgagaaaccctgctaaaccttttgatcgaacacgaataggccagattctttcgcagttcaatctattagcagaccaatatatccccgggaagcgagtaccatttgtggtctcccatcttcgctctcaatatttggctcaacagaatgagtacgccaaatatcgtgggaaattaataaaagccagcaggtttagtggcattgaaaatagaatcgttcaagaagttacaggtagaggcacctttcttcgaatgaaaagttttatcgatggcgctgtcgctcccatgatggatttgactgggttactgcttgaattcagcgaacagaactcaagcagtggtcgtgttttaattgggaaaagacgacagttccaagattggtcggaggacttcaagacactgggcgctgaacgattaaatacccagatttcaaagcttatggatgagctaagatcagaagttccggcgttttccgaagatcactacgataacaattccgcaggtaaaagctggaatagattaatagagtccataggaataaagaacaaaatcgagaagctgcaaaaagcacttctcgatgaatgccaaaaagcacttagtgaaattgcccgagagttaaagtcagagctttctttagtggctgacttatcaagtgaccgcaacatcaaaatggatagtatcttcgacctcaaacgtgcttggaattggggaacaaatattcttgccggaggactgggcatcgccgcactcattctcggtagtggtccacttgggtgggctgcagcagcagttggagccgttgggtggttgttttcattgttttttgatgatcgtgaaaaaaaggccagaagagcacgagaaaagctgtcccgacgtctttatgatcatattgataaaatcgagaagaacctgagaaaaggaacaggtgactggttccaccaggaacttctcagcaagcaggtttatgttctactccatgacttgggagcagtaacagcaggtttgtttgaactggcagatactcaaagagctctggcctggactttgaatgatcgccagaaggatcttggaaaaattctgataaacaaggttcttgatcaacttgattcagcatatctgggagagcacatcgttgatgtggcaagagttcccggatttgcgacaatgttactaatagcccctaatacaacttttccgggtgatgttcgtgcaaaaatggaaaggctcttaggtgaacaaatctggtttgcaattaatacaaaaaatcagttttcgatcctctcgcaagcaattggcagaaattgtgagaaaaagaaaattagtattgaagagaaaatatgtgttgcccatgtaccgctggatgatcttgatgcgacaacaagatcccgggtgcgcttagcgcaacagctcaccggcctgcatataatgagataa

SEQ ID NO: 307660 - DNA, 201 bp, Proteus mirabilis
atgacagaaaataaatggctgactatggaagagctggcggcatatctgaagatgagccgaaccaagctctatgccatgacgcagaaaggtgaaattccggcatcgaagatcggaaatcagtggcggtttgaccgggatgaaattgatgattggaagaagcagcaacggaatattgatgccagccccaaaggggggggttga

SEQ ID NO: 307661 - DNA, 300 bp, Proteus mirabilis
atgccagtgatgggccattctatcagcgtggtcaggaagactggtcctgcagtgttcttagttgatccacctaatgtcatcactcccattggccaaggtgcaatgagccttgatgagctcaataatcgaattattctcgcagcccatcaagccggttggattgacgatcaaacttactatgccaccagacctgttcaacccggcgtgtcactcgcgatgtcagcccaagagcttaacgaaaagatattacaggaccctgagttccttgttcgctatctgcgtacacaaggaagattgtaa

SEQ ID NO: 307662 - DNA, 474 bp, Proteus mirabilis
atggtaagaaccccatatgagaacgcttcgagtgtcgcggcatctgatgtaaacagaacaattaagggtaatttggtttggcgagcactgaaacgtcattcggcatcaagctggtttgcatcgggggatgaccgttttcttgaagcagttatgtcggtgacgggttcgatcattgttggtgatctagcgaatgtcgttgatggccaaggtaaagccccaaaactgaccaggctgaatggcaataaagtgactattgagcatctaattcatggcggcaacgttgctatgtaccgatgtgacacagtggcgcaagacggttgtctgaacccaacaatcactaacgtgactcttaccgggttatcaactcaggtagaaaatttacttcttggtacaggttctagtaacggcattatttttaaatttgctcgaaatacaggggctgctagcaccaccgaaaaggcttttatgacctag

SEQ ID NO: 307663 - DNA, 330 bp, Proteus mirabilis
atgattcgaacactttctgcattaaatgaaggtgccgctaggtcgtttgcttcacgagcagcaccatttattgctgttgagatggcccgggcattggttgaagacatgctcaacgtagctagaagcacctctggtgtggaagatcatgcctatgcgaagttgttaaccgaagaccttgaacgtgcacgtcgccaaatcaatgaggagtacgccgcgttacagcgaagatacggctcagagcaagaattactggcgcattttaatcaggtgattcagaccattcgcaaacagcgttattacaccgttaaatctacggcgctgggggaatag

SEQ ID NO: 307664 - DNA, 675 bp, Proteus mirabilis
atgtgggaaatctattccatcggggatacggcttttttagagcaggtcctgaatgctgtcgcgatgatcactggtacaggcgactttacttcaatggttcggattggcttgctcattggggtattgatggtctctgttcaggccttaatgcaaggtggtcgtgggattaattttcaacacgttttagtctcatggctagtctttgcaaccatgtttgggcccagtacccgagtgagcattgaggatgcgtacacgggacaagttcgagtggttgataatgtgcccatcggtgttgctgccgcaggcagtacgatttcgactgttggctttcaaatcacgcgattgtttgaaacggcgttctcaactcccgccatgacggaatacggctttgcatccagtttacagtcactgattaaagtgagaaaacaggtgatggatcgctctggtttgggtgatgcaaatcgtgtcggcggctcggacatcgagcaatcgtggtttaattacatcaaagagtgcaccttgattggtatcgacattggccaaaagaacctcgatcaggtgctgagtgatcctaacctgatgactgcgattaggtttgattcgcgcatttatggcacgcgcatcatgctcagtggtagcagtagcgatttgaactgctccgatgcctatagctag

SEQ ID NO: 307665 - DNA, 1263 bp, Proteus mirabilis
atggattatttagctcgctatatgaaccagcatgttgaagcaggtaaccgattacgtgaaaaccttccaatgtatcagcgcttgctacctgatgataatcaggcgtatgtggccgcagctatggagtctttaacctatagcaactcatcgacgcccgctgaacgagacaatgattatcaagcagcaatgactgttatggccatggctaccggagccgatttacgatcaattcagccgcgctctaatgaaagcttgtcatcaactgcacctacttttggtggtactcaaagccaagttgaatcgggtgtattgggcggctacgaggatgctgtaactgttcaaacgcagttcaattcgactcaatcagcttaccaaaccaatctgtctggtgtagatggacagctgaatgcgcatcaacaacaagcccaacaggccgtagtttctgacacaagtacctatcaatctggactaaacagtgaagctggctctcagtggcgatctcgcattatggctgataatagcggagtctctggtgctgaaatgttctttaacagcgccagtgctattggtgatttcagtggcaagcatactgatgctgcactgcataccttgaatcactttggcgaagactatgatagttacaaggagcaagcgcttgaagaccctggctcacgaggtttcttgcacaatgcaacggtggccagtaaatcaacctgggatgggttaaaagccgccgttgatgccggaacctctttggaaaatccattgacggcgtttaatgatgcatacagtggatcgagttcgcagtatgcctccgaagtaaactggggcactaagtctgaagctatgttggcaggggcattcggtgcggcagttaacaatcggtatggtgagtacttagaacagtacgccgatgattttaaacaagaagcatacagcgaagggcagagaatgggattgaccctgattcaaagtcaagtgttcgctcaagctttcaatgaaggtttggcggggcgcgttttcaactctgaagactcatcgagttggtcgcctgaaatgcttggcctaagggaacaaatgctaaatgagtattgtcaaaaggatgagagtggcgcttacatccccgacagtgtgtccgaagaagataaagcatttgtggataagcagattgcagtgatctcaaatgcatcccttgctggagattatgctcagaacaacttgatcgatattagggcctataaccaggcttcaggaaggaactaa

SEQ ID NO: 307666 - DNA, 432 bp, Proteus mirabilis
atgacaaacttacttaaatctttaccagcacgctgctggtttatatcactggggctttttctggcgactttggctgcggctcattttttcccatcagaaatattaacggcatctgccaagttagcggctttgccatttctgatttgcaccatcgtttttttcagctacttgggattcaaagcaactgctagtcctatcggacttataaccatcaccactatgtttttagcaatcgcatattggcaagcgagttgggcaattttatgtgtcggtttagctttcttaggcttaagcggactaatccatttatttcaaagacaactgaaagataccggtcgagaactaagcctgagcgaaaaaaaatattggtactgggtaaacgaatttgcagacggtcgctcatctatcctccccaaaaggccaaaaaaatag

SEQ ID NO: 307667 - DNA, 2145 bp, Proteus mirabilis
gtgtcccgtacaattatgctagtcccaactgatacacgcgtaggtttaaccagcgtcagcttgggtgtaatccgttctatggaacaaaaaggcgttcgccttagtgtattcaaacctatcgcacagcctcgtgttaaaggcgcattagatcaaaccactgcgattatccgctctcactccacaattcaatccgcagaacctttaaatatggattacgttgagtcattactcagctccaataaaaaagatgttctgatggaagaaattgttgctagatatcacgaaaatactgctgatgcagaagttgtactgattgaaggcttagtgccaatgcgtaagcacccttttgcacaatctttaaactatgagattgccaaaacattaggtgctgaaattgttttcgttactgcattaggcaacaacaccgctgagcagttaaaagagcgcattgaatttgctcgtgctgaatttggtggtgtaaaaaatcaaaatatcacaggtgtgattgttaataaattaaatgcccctgtggatgatcaaggtcgtactcgccctgatttatcagaaatttttgatgactcaagcaaagcgattatctctaatatcgatttaaataccatcgaaaaaaatagcccacttcctttattgggttgcattccatggaacttcgatttaatcgctactcgtgctacagatatggcaaaacacttaaatgcgactatcatcaataagggtgatattgaaactcgtcgtattaagtctgtgactttctgtgctcgtagtattccacatatgttagagcatttccgcccaggttcattgcttgtcacttctgccgatcgcccagatgtgttagtttcagcatgtcttgctgcaatgaatggcgttgaaatcggtgctatcttactcacaggtggttaccaaatcgatgcaccaattaaacaattgtgtgagcgtgcatttgaaactggtttacctatctttatggttaattcaaacacttggcagacttcattaaatctgcaaagctttagcttagaagtgccagcagatgaccatgagcgtatcgaaaaaattcagaactatgttgctcaacatatcaataaccaatggattgattcactgacagcaaactctgaacgtcctaatcgtttatcaccaccagcattccgttatcaattaacggaattagctcgtaaggcgaaaaaacgcatcgtattacctgaaggtgatgaacctcgtaccgttaaagccgcgtctatttgtgctgaacgtggtatcgcaacctgtgtactgttaggtgatcctgaagaaattcgtcgtgttgctgcggcacaaggtgttgaattaggtacaggtattgaactcgtcaatcctaaagaagtacgtgaaatttatgtacctcgcttagttgaactgcgtaaaaacaaaggtatgacagaagttgttgctcgtgaacagttagaagataacgttgttctcggtaccttaatgttagaaaaaggcgtcgttgatggtcttgtttctggcgctgttcatacaaccgctaacactattcgcccaccactacagttaattaaaactgcacccggtagctcattagtgtcttctgtgttctttatgctattaccagaacaagtctatgtttatggtgactgcgcaattaacccagatccaaccgcagaacaactggctgaaatcgctattcaatctgcagactcagcaaaagcgtttggtatcgacccacgcgttgcgatgatctcttactctacaggtaactcaggtgctggcagtgacgttgaaaaagtgcgagaagcaactcgtttagcacaagaaaaacgtccagatctgattattgatggtcctttacaatacgatgcggctgtaatggctgacgttgctaaatctaaagcaccaaactcacctgttgcgggtaaagcaactgtgtttatcttccctgatctaaacaccggtaacacaacctataaagcagtacaacgttcagcagacttggtttccattggaccaatgttacaaggtatgcgtaaacctgttaacgacctttctcgtggcgcgttagtcgatgatatcgtctacactgttgcattaactgcaattcaagcaagccaacaagaaaatgcctaa

SEQ ID NO: 307668 - DNA, 1230 bp, Proteus mirabilis
ttgtcttataaaaatatcaataaaaatattttttatcttatttttgtacagcttgctaattatatagctcctcttgttatattaccttatttatctagaactataggtattgacggtgttggcactgttgtaatagccctatcactgtgttcattagcattgatatttacagatttcggttttgcagtagccggcccttattggatagcaaaaaattataataaaaaaaataaattagctttatacatgggttcaatatttatattgaaattaatttttttcataatatttttattcgtatatataatattctctaattttatttcttttttaaaagatcagacggtatacttccatataattatcttatctactatattttttcaagcttttcaaataacttggttctttcagggaatcgagaaaatgaaaaatatcactatttgtacagtaacgacaaaaatcacataccttatattagtgattatttttgtcaataataaaggtgatattaattttactcttttttgttttatgtttagtaatttattgtctgctactttaggtctttatttaatgtataaggaaaagtattatatacttatatcaacccctaaatatatttggagaatattcaaagaaaatacttctttttttctttctcgagcagcagtcagtatatataccagtgctagtacttttcttgtaggcaattatgctggtatacagcaagccgctctatattctagcgcagaaaaactctatcaaggggctattagtttaacagctcctgtaagccaagctttatatccttatttagccaaaagtggtgataggaaagtattatataaatttatttttattctttctcctataatgttcttttgtggattaatttgtatttacttttccaactccataataattattatttatggcgaagattttctagaagcatctagcttattaaaagtatttattttaatttctataattagttttattagtatcaattttggttaccctgcctattcaacaattgggcggcttgatttagtaaataaaagcgtcatattaggcggaattttgcaattgtcattaattatggtgttaatttttacagatagacttaatgctaactcaattgttatttcaatcctcttcactgaaatcatcattctattatttagagtattaaactatttaaacattataagaaaagagagttaa

SEQ ID NO: 307669 - DNA, 579 bp, Proteus mirabilis
atgaatactttttttagattaataatttcatttatagacattttcattcctaagaataaaagaaaaatatctataccatgcataaatgataatgagtggcaggggaactgctcattcctttttcaataccttattaaaaataaagaatcattaggtattcaaataaatatactttgcaataaaaaaagcacgttgctcaggaatcaagatactcgtttaaatacacaatacttatattcattcaaaggaatatggacattattaacatcaggtattgttatttatcatcatggtccattggcaggtagaattccactaatatcatctcatagaataaattttcatattaaccatggcatacactttaaaaaaatagaattagctttagattctaaatctcaagaatataaaaatatatcttttattaaaacaaaatggctttgtaaatatcattctgtttcatcaaacatagatgcactatcctgttgttctgattatcatacttatttgtcaaatatttttataactggtattccaagaaatgatttattttttataaataatgatgatttactctaa

SEQ ID NO: 307670 - DNA, 747 bp, Proteus mirabilis
ttgacaccaaaaattcaaaattattgtattgataataatattaattttattgattcagttggaaatatatttattcagacaaaggaactttacctttatatttctggaaggaaaggtactcatctattaaaaaaagaaactcaaatgtcgctaggtataatgaaattattatttatactactttctgatgaaagcaatataaatttaacctatagagaacttgctgatttatctggaatatctttaggtatggtcaataaaggaatgaattaccttaagctaaataatttatacagggagtcaggaggtcatcgccgctttattttttcagatgaaatatgtatgcaatggatcaatgattacggaaggattttacgtcctaaattaaaatctatttatctatctggtgatgtaaattggttagatatcccactttatgatggtgaatattgggggggggaagcagctgcatctaagttgactaatggttatcttattcccgagaatattcaattgtttacacctattcctctaatggatagaagaaaagcgcttaatatgatccccgttcaatttagtcattttcagttggttgaaatattttggggaggatcatattgcctaaataaaaaagctgaggcattgttatcggttgctgaattggttgcaacacaagatgaacgtaatattgaaatagcgaagagaataaatgaacagtatttacacattaagaatacctttagctga

SEQ ID NO: 307671 - DNA, 816 bp, Proteus mirabilis
atgaacagtatttacacattaagaatacctttagctgaagaaataaatcaaattttaataaaaattgctaatatttgctcagtacttgaacttcctttttttattgctggtgcaacatcacgagaagtacttctcactcacgttcatgggcgaagagcgggaagacatacaagagatattgatattgctatttttttacaggattgggatcaatttaatttattaaaaaaggaattaactaatcaaggtgctttagaagttcataacaatatacatcgatttatctttgatggtatcgaactagatattatcccatttggtgatattgcatctgaaaatcaaatagcttggccaccagatagagaaattattatgtccgttgatgggtttaatgaagcctttcactgttcaacgattgttcaaatatcagcagatgtaaatattcgtttctgttcattatcaggattactgttactaaaactctttgcatggcgggatagaggaaacggttcatcaagagatgctattgatatttataaaattgtttcagagtatcaatatattgaagattcaaggctttatgaaaatccaaaatggggtgatgatgttgattggaatactgagcgattaggagctatccttgctgggagtgatactgcagcaatagcttctccagatagcttagaaaaattatctcatttagataaagaattgtttattgatgccattgttagacaattagatccttcttctaatcaaactgatttagccatccaattaatcaatgatttttggagtgggttgctcaatttataa

SEQ ID NO: 307672 - DNA, 900 bp, Proteus mirabilis
atgacagcaattgcctgttggattaatagagaagaacatgaaagtgtttgggctgttagcgattcaaagatcactcaacaaggtagtactttaataaattattgccctaaactattttcaattcctgtatcggttattcgatcaactgacagatttcgtatacacccacaaaaaatattcgaatttggctttggttttgcaggaagtacaatgataggtatcaatgtcaaagaaatgcttgcagtttcactttctcaattaaatgaggtaagcaatagtaacttagaacatgaaattccttctgaaatgtaccctagcttggaagaaatagctgcattaacaaagagcattgccgagaaatatatgtatgaccttggacaatccttccctcgtttagtacaaaccgaaatggtgatttttggtttttgcaaaaggacacgaacacataaaataataaaactcaataatactccttcaaccccaaatattcttactattgaggattacgaacacttaacttcaggagaaccagtcttattaggtgatcagcaagaagcttttcatgagtatattaatactacaagattacgctttacatcagagacgattaattggtggagagccccgttcatagcattaaataactggataaataacaataccgtaaatactatcggtggttacatacaactttctatagcaagtgagtttggagcaaaagtatcattcctcacaaatatccaatctgattccatcaacatgagttacgctggaattaatattacagaatcttttagttatactcttggagggtttatcttgatgccaatgtcaggaatgtcacttccagatgaaaatggttgggataatgggaatcagattattagaagacaacaataa

SEQ ID NO: 307673 - DNA, 1686 bp, Proteus mirabilis
atggataataaagaagatggtaagctgtgtgatgaatatgaaaagacacttcgtagaaatttaaagctcttattcgaacaaataaatgcaggtaaagttcatataagagacggattacaaattaaagatagtcttttagctgtaagaaaaggggctgatggagaaatagacctcagtactgttgatggacttgtccgttcaatggcttctgctatagctcaaatgaatgatagagaagaattaaaaaagaagatttctatttctgatattcagaataattatttctcttttatagaacagcagtttggagaatattataaaatcatgctggaaaataaaggtacaccgcatgatataggtaaggtctgttctaaagataacaatatagttaatgatataaataaaaatttgaaggagtttttaaatctgattgttgaatattggaagcaggtgggtgaaattgctcatatgcatatttcagatatgaaaaataatataaaaggggtatttggtggggatttatttccatctcatgcagagaatattgcgtctaaatgtggtgtttatactgatacaataatattgccagatccatttcttcgttcaaagcatatatttgaatatcaatcaaaaaaagataaggtttattatttatttaaacatgccatgaatatattaaaatataaagatctagcatgtgctaatgttgatatccctattgttgtaattattcctgattttgcagaacttcaagaaaatgaaaaagagttttttcattcattaggaaagcaagattctatcattcatgccggaaagttatttggtagaaatttcgagtcatttgacgaattaattgattttgctaaaacgttagacactgtagataaagctctaacagaagttaaagactctagccgaattttatttgatgttgaatggacgggagatattaaggctcaattagagcgagctttaaaacataaggtttatagccattttgcagaatctccaggaatacttttagcatctcaatctttaggtagaatgagtgttagtaatgaattattgattaaatcacgtagattaaatgctactcctataatagatgctcccacatcatggcaatacttagtttggaaattagaatatgatgcaaacagagctgagttagaatttaaatcagaaaatctccatattacaagagggttaaataatttagctaaggatgaaatggtatggttaggtaatataccacctaaagctcttattgaactaagagaaaaaggtataatggatgatatacgtaatattttaggtgcaggaataaatgaaattattgaagcagaaccattaaattttagtgctagtaaagagaaaattcttttaaatattgagatggcctttaaacaacaccaagaaaatattaaaattttaagaaagaaaaaatggaaatttgcagggaaagatataggctcttgtctcgtatttggagcaattgggattacggctgctgttacaggaactccgacatggggattagcagcctacgccgcaggacaatttttagatgctactaagttaaaagatatacctaaatctattcgtacattgattgatgagaataatgatgtcaaaaaatcgccagtaggtattttatttgatatacataaaaaaataagtaattaa

SEQ ID NO: 307674 - DNA, 1392 bp, Proteus mirabilis
atgaatttaaagggctgtatcacggtttttgtaacattagccgtatcaactttaatagtctgtggaatagtttggggaattgtttggtggaacgatataacagtaaaagaagtgtggtctaattatattagtaaaccggagccatgggttggtgtctttacaagtataggtgctatttttaccgtatttgtttttatagtgaccgcatatgcatctttaaaatcaggagagagtgcaaaaattgctgctaaggcattagaactttcgtatgagaacagtcgaaaagatgattatattaaacagtttacgttattattagagcaacataataatctacataaatcggttgtaaaatatattgatagtcttaaaaataataaaggaattatttcagattctgatgataaaggtattattagatgggacgagtcattagaggatgccgcaaataaattatatcagaactataattttagtatatatatgataactttatatagattattaaagcatattgatgaaaatttttataaaaagaattcttctgataaatttattaaagaaaaaaaagaatatagctctattgttcgtagtgttatcaggaacgatgtattatttcttattgctataaattctttcaataagaataattcttttaaagaatacaaaaaaaaattagaaaaattctcattcttcaaacatatgaatgctgaaaaaataagtgataaaatcatatttaatgaaaataaattcattaatgaatttaaaaattcaataagtaatcttatagattcttatatagataaaaaagaaacaagtaatgctaattctttattgccgagtaatatatctatattaatgattaattatttgcaaagagaggaaaataaatttttaaaaaataagatcgaagaggttgttaatcaagctattctatgcaaagttaaagaattagaaagtaaatcatttaaagataaaagcatatatttttatctaggtacttctgatttagaagatggtggtattgttgatgataatttaactgcaagtaatttagaaaagttaaataatatcaacaatataaaagattttaataatttggagatgatggatgcaatctcagttggtgaaggaaaaatattgtttttcagttttcaagagtatgaagatggatctgtgaataaaaatgttaaatattattcaatgtataaagaagaaattaaatctataatctcagttaatattttaaaaaaagaaaataaaaaaatatttaactatatgatagaaaacttaaataaatcagaattggtaattaatttaaatatgcagtttattataaatgaaagtaataaagcagttctgtgcatgaaaaaatcatgcagcaaagtgtaa

SEQ ID NO: 307675 - DNA, 729 bp, Proteus mirabilis
atggttatatcactattacccaacaaacttggtagagactttgtcgtcggtgacattcatggctgttatgatgaatttgaatgtttactaagtagagtaaagtttgatagtactaaagatagagttatttctgttggagacttaattgatagaggaaaagatagcgtatcttgtataaaattattagataaaccttggttttatatagtgctaggtaatcatgaacaagccatactcgattggtatcaatctcacgaccgagtcacacaagagacctacgaaagaaaattattacataatggtagtagctggtttttagccctatcagtaaaacaacaacaacaaatatgtaataaattaaagtctcttccaaaggttatatttatcaataataacaataaattatattgtattctgcatgcagaaattactcctgaaataaatgacattaatgtttttttaaaaaatatcgttctgttagaagataaatcaacattaaaagcgtgtttggaaggccgcagacgatcccgagccaagtattatcccttcataacgggtatcgactatcttctttgtggacacactccttgtttcaactttcagtcaaagaatgctaacacaattaatcttgattttggtgcaggaagttatagaaaaggagctactttaggaatgatagacttaacatctcattcaataatactacaacccatgtacaatccttactaa

SEQ ID NO: 307676 - DNA, 393 bp, Proteus mirabilis
atgaaacactggaaactttacattgttattgtgatggtaggagttatcagtggtggttatattgccaatggcatacaagatatcattactcaacgagataagttattagcagagaataagcaattaacaaaagaaaatgagagctactcaaaactgttaagtgatcaggtctttcaattcaatcgttttaatcaaatagcgactacagcttaccgtcatggtattcagacagatgcaaaatcacaggagaaaattattgaatatagaacaatccttaaaaaagatccgaattgcgattctcttgttcctcagtctattgctgatagcctgtacgaatacacaaacgagttacgttccagcgcaatgtacaccaataccagcaacattaactga

SEQ ID NO: 307677 - DNA, 705 bp, Proteus mirabilis
atgtctagctggttatgtccgtactgcaatcaaatatcaacaaaaggctcatatatcgacagatcttgttcttttaacgcaataaattcaattgttgatggtgttactcaaccgacagatataaaggttgctctttattctaggcactgccctaatccagaatgcttgaaattcgtattaggtattaacatggatgaaattgaatttaatcctatgttaaggaatcatcaagtaataagaagtatctctagtaataagatccttccaatgggggctacaaaaattttccctgattatattccttctgcgattttaaatgattacaaagaagcttgtttaattagagaactatcacctaaatcatcggcaactcttgctcgaagatgtttgcaagggatgattagagatgtttggaaaataaatgaaaaaaatttagcaaaagaaattgaagcaattaaagataaagttgagtctgaaatgtgggaagccattgactcgattagaagtataggaaatataggtgctcacatggaaaaagatatcaacattattgtagatgttgagccaagtgaagcacagttactaattgagttattagaaacactgatacaagaatggtatgtagaacggcataataaaaaattaagactagcatcaataaaatcacttgccgagaagaagaaagaggaaaggaagaaacaataa

SEQ ID NO: 307678 - DNA, 480 bp, Proteus mirabilis
atgaaaattattcatgaaacatctgttggtgcagcattagctattatgaacagtggtaaatataaacctacgttctccaatgagtatagtgctgattctggattaaattgtgcatcaacaataaaaacttataaaaaaggacaattagaaggttatggagctgtattattgctagaatggcaaggagccatagaagagtgttccccccagaaaaatccaccttatgctaaaaatattctattagaccaacatccttggcgttgttttatccctagagataacgaccctgaactgcttttattaaaagatattgattttaactttgatgcttataagagtgaatttaacaaaaagcctcttttttcgtttttcagaactaaggaacaaattaactcatgggtaaatacacaaattgaaaatgaaataaacaatattaagaacaaacttcttgctacacctgtaaaaataaaaatactttaa

SEQ ID NO: 307679 - DNA, 1173 bp, Proteus mirabilis
atggcacttacagacatacaaatcaaacgagcaaagcctcaagacaaaccctacacaatgaatgatggacaagggctgtcattactcatcaatccagacggctcaaaaggctggcgtttccgctttcgttttgcaggtaaagcgcggctaatgtcatttggcggctacgaccttgtgagcctcgcagaagcacgtgagaaacgcgatacagctcgtaagcaagttgcaaacggcatagacccagtagaagagcgtaaagcccaaaaactggcacagcaactctcaacagagaattcgttcgaagccatatgtcgagaatggcacaccaacaaagctgaccgctggacagtggcctatcgcgaagaaatcattaagacatttgaacaagatgtgttcccgttcattggtaaacgttctatcagtgaaatcaaaccgttagaactgcttgaagtattgagacgtatagagaagcgtggagcactagagaagaccagaaaagtgcgccaaagatgcggcgaggtctatcgctatgcaatcataactgggcgcgcagaatacaatcctgctcctgatttggctattgctttagccgttccgaagcaaaagcatcatccatttttatccgctgaagagttacctcattttattcgggatcttgaagcgtataccggcagcattatcactaagaatgcgacaaaaatcgtcatgctgaccggtgtacgaacccaagagatgcgctttgctacatgggatgaggttgaccttgagaaaggtatatgggaaatccccgctgaacgtatgaaaatgcgtaggcctcacattgttcctttatctactcaagtagttgacctcttcaaacagctcaaacctattaccggccattacccttacatctttattggcaggaacaaccgcagtaaaccgatctcgaaagaaagcgtatcgcaagtgattgagttacttggttacaaagggcgtgctacaggtcacggttttagacatacaatgtcgacaatcctacatgaacagggatttgatagtgcatggattgagatgcaattagctcatgtagataaaaacagtattcgtggcatttacaatcatgccagttacgaacaaaatagaagaaaaatgttacaatggtacgctgactacattctaaaaagggattga

SEQ ID NO: 307680 - DNA, 198 bp, Proteus mirabilis
atgcaagatgtaattaattgggttttattaaataaagaatggctattctctggcgcaggattactagctattactgttatcgcaaaaatcttctttcggtctaaaaatgatgggattaaatcaaataaacaaaaatcttgcatgttttcaattgggtcgaataataaaacaaaaaatactcagaaaaatgagcaatag

SEQ ID NO: 307681 - DNA, 651 bp, Proteus mirabilis
atgagcaatagcaacgctcaaaaatcaaatgtaaacattattggttcaaataatgaaaccaaggtcaaccaattcaacatttcaatttacgccaatgatgttttgtcaattacaaatgaacttagagagaatataatagataccctagagggcgagttagttaattctgaacttaatgtttttttatgctatccgaacattttgaaagataaattatttgactcttgcatcaaaaatcttaaaaccgaacttagtaaaatagatgctgtgatttatgaagggggaggaaagcaaactctgcccgatactgaaagtgtgtatatacatatagcagaattagattttattaacaaaaagtgtgatagtatcatcatattcgtcttagatgaattaaccctatcgcagataactttaataagttattacaaaataactaaagatattaaaaatccagatttgatagtcatctgcaatgacaaaataaaaaatctcgatcgttttttttcattaggtgttcttcaatattgtgacgataacagtattaaaatatttgacatatccgacattgaagatgaaaaaattgaaaatattattagacgagtcaggaataaaaagctcgtttctaaaaacaaaggccttttgggaggataa

SEQ ID NO: 307682 - DNA, 1488 bp, Proteus mirabilis
atgtctaactcaataaactttcgcttacttttatgggccacctcaattattcaaccagcagccccatctgagatattatattacttgagattaatattaacagatgatggagcattacctaacattgattcattaaaacagcaccttaaagaattacataaaattggctatgtggaattagtttccattaaaaacgagctgtattctataactccctctggcgatgaaaaactttcagcaaatttaaaaaaactaagagacaagttgcgcattttccttcttgacaaatgccataaatccactaaattgggtgtgctagcctctactgatacaaagaatatggacggcgcaccgccgtctttgcagttaaggccttacataaaagaggttccgcacccaagcctgtcttgggcgtccgggaccttgcccagccgcccaagacaggcttgggtgcggatctttgagcaattacgaattggttcaatgtccagtagtcaggctagcatcctttcaaaagatagtgacagcctaattcccgaaaaaaaaattatcgcagctccaattttctattcttacaagtcactaaacagtccccttttcgaaaataacggtattttaacggtcgcatcttgtatcggacttacaccacgacttataagctctatgataaaaaatccagatagatattatcggatttttgatatgcgtaaaaagagcggtggtgttagaaaaatatcagcaccacgaaaattcatgaaggtaacacagtactggataaatgattattttttgaataggctaaatattcactcttcatgtttctcatatagaaaggggatcagtattcatgacaatgcttatccacatcaaaataataagttcattgccaatatagacattgaaaactattttggctccattaataaaaccatgataaagaactgtcttttaagaaataatatatctgagcatatagttaatactattgctggtttaacaactctctatggtactttaccacagggtgcacctactagccctaatatatcaaatgccatattgtatgaattcgatgaattaatgacaaaccaagctttagttagagactgtgtatacactcgatattctgacgatataaccataagtggcgataatagacatttaatagaagagcttgtcagcctcgcaaaaaataaaataaactccatgggctttaccttaaataatgcaaagtataggctgctctcatataacaacagacaagcggttactgggattttaattaacggcccactaaggccacctagagcatatcgccgaagagttagagcaatatttgaccaagcaataaagtcaaatgatcaaacctcgttaacaattaatgcgttaaaggggcatttgaattatttacagtcattcaaaaaatatggtttcagctttgaagaaactaaatattcattaatcattgaaaaattaacaaaaaagtaa

SEQ ID NO: 307683 - DNA, 567 bp, Proteus mirabilis
gtgaccactctgaccttacagcaggcctatgaagcctgtcagacgaacaaaaccgcgtggctgaaccgtaaaaccgaactggccgccgcagtgcatgaatatcaggaattattgctggatgacaacgcatcaggttcccgcagattacagacgctgcgtgacctgattgacgtaaaaaaatgggaggttaatcaggccgccggtcgctacatcttctcgcatgaggaggtgcagcgcatcagcatccgtaaccggctgcatgattttatgcagcagaacggcgcagagctggccgccgctctggcaccggagctgatggagataaaaaaccagcccgcgatgataaaaaaccgcgcgcttgaccgttcagtcacttacctgagagaagctctttccgtctggctgaccgcagaaaatgaaattaattattctgcacaggataacgacattttaacggccatcggatacaggcctgacgcgccttcgcgggatgataatcgtgaaaaattcacccctgtacagaacatgatttacgcccgtcgacgcgccggactggccgcgcagtag

SEQ ID NO: 307684 - DNA, 738 bp, Proteus mirabilis
atgactcataccgctgttattcccgactaccttaaacccgcaatggaacgtcttgagacggccagagaagcgcatctcaccagtgcccgacgcatggatgaaaccacggcggccatcagccaggtgaaagcacaaaaaaaggaactggagcaggaaaatgacaatgattccggcgcatggcgcgccgcctttcgtgccggtggtgctgtcgttaccgacgagctgaaacaacgccatctggcgcgcgtggcacggcgggaactggcgcaggaatgtgacaatatggctgaggttctgtcttttgagctggacagccttaaaggagcgtgtgaccggacggccagagcgtatcgtcaggcacatcacagcgtcctcagccagtatgcagagcatgagcttgatgttgccctgcgtgacacctgtagcgcgctggtcagggcaatgaaactcaacatactggttctgaataacccgctagccaataccacaggccatcagggatataccgaaccggaaaaggttgtgatgcagcaggtgaaagaccggcttgagcaggcggtgaaaggctgcaatatccgtctgaccgatgaaccggtgctgtttaaaacagggctgtcggcctccacgctgccacatatggagcatgacgttgcggccacgcccgttcagcggaaagtctggcaggaaaaaatgcgggaacgtgaagccgacctgaaagcacgggggttactgtcatga

SEQ ID NO: 307685 - DNA, 267 bp, Proteus mirabilis
atgcacaccgctttttcttccccgtcttctgcccctgccgcgccgctgatgccggtctctgacgccgttcatgagcgttttatttgtctgcctgaagtgatgcatttatgcggcctgtcccgctcgaccatttatgacctcatcagccgggaggcattcccgaaacaaatctccctcggcggtaaaaacgtggcgtgggcgcactcagaaatcacggcatggatgactgaccgcattgccgaacgtaaccggggttatgacgcatga

SEQ ID NO: 307686 - DNA, 552 bp, Proteus mirabilis
atgatgatgaccattcagcaaacagcccctttttctggcttgcttcccttcgccgtttccaggtatagttttatcgctgtcgcaaaatcggcagccgggcgtaggaacccgtgtaattcacaggcgacaacagacgcgccatgcgtctttttttacgtcgttgctcaggcacacccatttttcgggctgtggtgcttatcccatagcccctgtcagataatggtggtccgggcggggcagccttcgggctggccggtattctgtgaagccggtattcctacccccgttcgggtcaccacccatgagcgtaggaactccggtggtggcaataaccgctattcacaggaggttgcccttatggctacgaccctcaccccgtcacacccgcagtttgtttttgtgtttgccgccgttcgtcgcgccgaccgtaaactccgcatctgtatgcttcgtaccgttgccggtgatgaacacgccgcacgtctttccctcgttcgcgattacgtcctctcgtttgctggccgtctgccggttgcggaggtgcgcgcatga

SEQ ID NO: 307687 - DNA, 228 bp, Proteus mirabilis
atgagacactccaccattaccgcccgagacctcgaatgtctggagcatatgcgcaacgtcggccagctcgtcggcgacctgatgcaggtgcaggactgcgcgaccgttaggcgtgatcctgcgcagcagttacagctcacctccgtgatttaccttatgaccgtccagctagacagcgtggtcgagcgctgcaatcagcactggctgaccggggagggtaatgtatga

SEQ ID NO: 307688 - DNA, 321 bp, Proteus mirabilis
atgaaaaagccattaccacccgtattacgcgccgcgctgtatcgtcgcgccgtggcctgtgcatggctgaccctgtgcgaacgtcagcaccgctatccgcaactcaccctcgatgcactcgaaagcgccattgccgccgagctggagggcttctacctgcgccagcatggcgaggaaaaaggccgtcagattgcctgtgcactgctggaagatttaatggaagccggaccactcatggccgcgccgtcgctgtcatttctcgggctcgccgtaatggatgagctttgcgcccgtcatatcacgtcgccggtactgcactga

SEQ ID NO: 307689 - DNA, 2334 bp, Proteus mirabilis
atgaaaatgaacgtaacggaaaccgtaaaacaggcgtgcggccactggccgcacattctccctgcgctgggggtgaaggtgattaaaaaccgccatcagtcctgcccggtgtgtggcggctctgaccgtttccgctttgacgataaagaggggcgcgggacgtggttctgcaatcagtgcggcgcgggtgacgggcttaagctggtagagaaagtgtttggcgtgactccgtcagaggctgccgggaaggtgaacgccgtgaccggcaacctgccgccggttgccccggaaatgattgcggccgcagaggctgaaactgaggccgaccgcaaagccgccgccgcgctggccgtaaaactgatggagaaagcccgaccggccaccggcaatgcctacctcacccgcaagggcttccgcgaccgggaatgtctgacgctcaccgtcatgcataaaaccggcggcgtgacgttccgcgccggtgatgtggttgtcccgctgtatgacgataccggcgcactggttaaccttcagcttatcaatgttgacagtctcaaacgcaccctgaaaggcggtcaggtcaaaggggcatgtcatgtcatcgaagggaaaaaacaggccggaaaacgcctgtggattgcagaggggtatgcgaccgcactcaccgtccatcacctgaccggggaaaccgtcatggtggcgctgtcctccgtgaacctcctttctctggcgagccttgcccgacaaaaacacccggccagtcagattgtgctcgctgccgaccgtgaccttaacggcgagggccagagtaaagccgctgtggccgcaggagcctgcgagggcattgtcgccctgccgccggtgttcggtgactggaatgatgcgtttatgcagcacggcgaagaggcaacgcggaaagcgatttatgacgccatccggccaccggctgacagtcctttcactaccatgagcgaagcggaatttaccgccatgagcaccagtgaaaaggcaatgcgggtgcatgaacattacggcgaagcgctggccgtggatgcgaacggccagctcctgtcccgctatgaggccggtatatggaaaatcattccgccgtcggattttgcccgcgacgtggctgggttatttcagcgtctgcgcgcaccgttctcgtcggggaaaattgcctcagtggtggagaccctgaaactgattattccgcagcaggacgcccctgcacgccgtctgattggctttcgcaacggcgtactcgataccgccaccggtatattcagcccgcaccataaatcacactggctgcgcacactctgtgatgttgattttaccccgccggtggagggtgaaacgctggaaacccatgcaccggatttctggcgctggctcgaccgtgccgccggtggccgaccggaaaaacgcgacgtgatacttgccgcgctgtttatggtgctggcgaaccgctacgactggcagctctttcttgaggtaaccgggccgggtggcagcgggaaaagtattctggccgaaattgcgaccatgcttgccggggaagataacgccacatcggccaccatcgaaacgctggaatcaccgcgcgaacgtgctgcgctgattggtttctcgctgatccgtcttcctgaccaggaaaagtggagcggtgacggggcaggactcaaggctatcaccggcggcgatgcggtctccgttgacccgaaatacaaggatgcgtactccacccatattccggcggtgattctggccgtgaacaataacccgatgcgatttaccgaccgcagcggcggtgtttcccgtcgccgggtgatcctgcatttcccggaacagattgccccggaggaacgcgacccgcagcttaagaacaaaatcgcccgtgagctggccgtgattgtgcgccatcttatgcagaggttcagcgacccgatgaccgcccgcgcactgctccagtcacagcagaactccgacgaggcgctcagtattaaacgtgatgccgacccgacatttgatttttgtggttaccttgaagcactgccggagcctgagggtatgtatattggcaatgcaaacatcattccgcgtcagccgcgcctgtatctgtatcatgcctatctggcgtatatggaagcccacggctacaggaataccctgagcctgactatgttcggtaaggggttgccagccatgctgaaagagtacgggctaaattatgagaagcgccgaaaaaatcagggcatacaaaccaatctcacgctaagagaggaaagcaacgccgactggctgccgaaatgtgatgaccccataacgaaataa

SEQ ID NO: 307690 - DNA, 507 bp, Proteus mirabilis
gtgtctatatcaaagaaaaataccttaagagcaagtgtctattttaataatgattattatattataacaacactttcaaaaatcggtatttatttgattgattttaaaaaaggttataaggttttatccaaagatccatttgatgcagatttgggtttctttacaagaaatgcattaatccaaagcgaaatattagatgctaattcatctgaatatcatgaaatgcgtaataacgaaggattatattctgaatgggtaaaaaaaataattaaagaatgtaattataaaaataaaacgacactattcaaaaacatgaacttatgtaatgtgaatgtgactgatggtattatatctattattccttatgatcacttacgattggatcattggattggtaaaagtatgcctaacaatgcaattattacattaaaaaccaattgtagtgatgaggttttaggtgcttcaataaaaaaagcttttacacgttgtattagcagtagagtttaa

SEQ ID NO: 307691 - DNA, 513 bp, Proteus mirabilis
gtgtctatatcaaagaaaaataccttaagagcaagtgtctattttaataatgattattatattataacaacactttcaaaaatcggtatttatttgattgattttaaaaaaggttataaggttttatccaaagatccatttgatgcagatttgggtttctttacaagaaatgcattaatccaaagcgaaatattagatgctaattcatctgaatatcatgaaatgcgtaataacgaaggattatattctgaatgggtaaaaaaaataattaaagaatgtaattataaaaataaaacgacactattcaaaaacatgaacttatgtaatgtgaatgtgactgatggtattatatctattattccttatgatcacttacgattggatcattggattggtaaaagtatgcctaacaatgcaattattacattaaaaaccaattgtagtgatgaggttttaggtgcttcaataaaaaaagcttttacacgttgtatcagtcgaaaaaccatcacttaa

SEQ ID NO: 307692 - DNA, 975 bp, Proteus mirabilis
atgataaattttagctcattttatcaacatattgcgcaagatgaacggttatttcattggcttgatacgctgccggcacaattatcagaatggcgcgcccatgctttacatggccattttgcttcatgggaaagaatgctggaaaacttacctgagattactcccactgaacttaatttaaagcaaggtgttatcgccaataaaaccccagcattaagtaccggtgaacaacttggtttaacgaatattctaaaagcgttaatgccatggcgcaaaggccctttttctctttatggtgtcaatattgatactgaatggcgttcagattggaaatgggatcgcgtattgccccatctttcgcctcttaaaggccgattagttttagatgttggttgtggcagtggttatcatatgtggcggatgcttggtgaaggggctgattttgttgtcggtatcgatcccactcagctctttttatgccaatttgaagcagtcagaaaattattaggtaacgatcaacgtgcccatttaatccctgtcggcattgaacaaatgccagaactaaatgcttttgatacggtattttcaatgggggttctttaccaccgtcgttcaccacttgatcatctttggcaattgaaaaatcagctcgtttctggtggtgaattagtattagagagtcttgtgattgatggtgatgaattccaatgtttaattcctggtgagcgttatgcacagatgcgtaatgtgtactttataccgtcagccaaaatgctcaaagtatggttagaaaaatgcggttttaaagatgtacgcattgttgatgaaaatgtcacatcactcgaagagcaacgtaaaacggattggatggtgactgattcattagaagcattcttagatcctctcgatcacaccaaaaccgttgaaggctatccagctcctaaacgggcaattttaattgcgactaaaccttaa

SEQ ID NO: 307693 - DNA, 834 bp, Proteus mirabilis
atgaacaatcaacaagccgaacaactaaaaaagattatgatggctgatagttattttgcacaacctattacgcccccttttccacagcctttagcaataaaatcattacaacagacacttaatatcaaagatacagaaggacttgttcaatttattatcgcttcacctaaacgttttaacgaatcagaaaaaatgatcatgacacagctgaaagatatacaaattgccttaatctctattatgtcgaatcatctttcagtattaaaaaaagaagatagtgaagcttattatcaaccagagcattggctagaaacccttaatcatttgcctttgcttagccgtaataaagttgaaagcaaacgacttgataagcaaacatttgatttttcaattgctcaagcctttgtgcaactgttattaggtgcagccattaatgcagcgtcaccgtcattagccgagtttatcgattttttacgcaatcagggacaacaaattgaactaggaatacgccaatcctttgatagctataaaacaataactattgcaggtgtgacggaaatccttaatcataataatcagcttatttttgtacctaaattaaaaataatgagtctacgtttctcacatcgaacagccaaaatgttattagccagttgttcggggcgaaaatttacgatttcagtagaatacacaacaatcacctcaatttttgatattggtgcacttaatgatccactgattaatcgacaattttatgcttttttaaataagtttcgtcagttgagtattactcaatctgattcattttttagtggggactttttattgcaatag

SEQ ID NO: 307694 - DNA, 1743 bp, Proteus mirabilis
atgagcacattattatctacacaaaacctctcttttcataataatcacggtatattgctgagtaatatttctttggccctcactaaaggtgagaaaattggtttaattggctacaacggttgtggaaaaagtacactattaaaacttttatcacaccaattaataccaacagatggctctattactatcgccaatcaagtcattatggcttatgtcgaacaacagttaccaagtgagctacagtcaatgcgtctcattgatgcggttcttcataaattacctgaagagctacgcatatctgaaagttggcgcagtgaattattattaagtgaaatgggatttaaaaccaatgaaatcaatctattagtctcacaattaagtggtggtcaacatactcgtttattacttgcgagagcattgattttgcaaccagacttactgctattagatgagccaagtaaccacttagatctaccgactatcttgtggttagaaacatttttaacacagtggcgaggaagttttattcttgtttcacatgacaataggttgttagataaagtgaccaattgtacgtggatcattcgtgataaaaccctatctgtttttcgcttgccctgctctcaggcaagacaagagcaagaagtacaagatatcagtgcgcaacatcgttgtgatgcacaacaaaaagagatagatcgtattgcacaaagtgcgaagcaattggccatctggggaaaagtgtatgataacgaaagtttgtcacgtaaagccaaacaaatggaaaaacaaattgttcgtttaaaagacgaacaagtcgatgtaacagaaggcaatcaatggacgttacagttatcaggaacaatattacgggcagatagattgcttgagctgcatcagctttcagtgatccctgcgccagatgcaccgattttatataccatcgataatcaacggatcaaaagtggtgatcgagtcgctattgttggtgctaatgggacaggtaagtcatcattattaaaaatgatttggtcatcatttcatggttcaaccacatcaacaaaaaatgtgatcaggctgcatcccagagttgagttaggttattacgatcaaagtctcgcacaacttaatgataatgatacccttgccgatgcactaaagccctttgcaccgctattagatgagcaaaggaaaatggcattaataaatgcaggttttgtttattctcgccataatcagcaagtaaagtcattaagtggtggtgaacgagctcgtttactttttattggtctcagtttggcaaaatattcattattaatgctagatgaaccaacaaatcatcttgatatggaaggtaaacaggcattagctgagcaaattcaacaattttcagggggaattttactcgtcagccatgatagagaattgatagagaaaagctgtaatcgtttttggtatattcacaatggtattcttagcgaacatcatgatattgaaacaatttatcagcttatttctcaacaagatatgtcatcggtctctaatgagcaaaatggccatcatgctccatctgttgaaatagtaaaacatcataatgaagatgaattgctaatgaaattgatagcacttgaagataaattgaatgctgatttagcaagaaaatctgctcatcaaaagcctatgttacaggctcaatggcaagcagaaatagagatcttaaagcagcaacttgatttagcttaa

SEQ ID NO: 307695 - DNA, 579 bp, Proteus mirabilis
atgcgctatatcattatctttttgagcctcattttatatggatttaatcttatggcttattcagaacaaacgctggtatttatccgtcatggtgaaaagcctaataatgatagcgggcaattaagttgtcagggattaaatcgtgcgttagcgttacctaatcgattgataacacaatttggtcagcctgatgcgttatttgcagcagcaccaaaacaaaataaacttggaaattcattacgctctcttcaaactttaacacctcttgcggtgaaaacatcactgccaatccatttaaattaccatgccaaagagatagacccattacgtaataaactgctgagcgaagaatatcagaattcagtcatttttattgcttgggagcatgataatttagttaaagtagtaagggatattatggcgcaatttggtggtgatccaaaagctattcctaaatgggaaagtggtgattttgatagtatctatatattaaaaataatcaaagaagcagataagaaaaaagtgctctttgagcaacagcatcaacagctaaatgatgtgcctaaacagtgtccttag

SEQ ID NO: 307696 - DNA, 579 bp, Proteus mirabilis
atgaatattctacttattaacggtggacaaaaatttgggcattctgcaggacaattaaaccgtacattacatgatatcgctctggcacatttggcgacattagggcatcaggtaaaagaaacacaaattgaagaaggctatgatatcaatgaagagatagagaaatttatctgggctgatactattatttatcagatgccgggctggtggatgatgatgccatggaaagtgaaaaagtatatggatgaagtctatacttatggtcacggcaaactatatgaaaacgatggacgtactcgtcatgatccaagcaaacaatatggtagcgggggattgttgcaaggtaagcaatatatgatctccgcgacttggaatgcccctattgaagctttcaatgaatttggtaatttctttgatgggcgaggggttgatggtgtctattttgcttttcataaatcacaacaatttcttggtttatctcagctgcctacttttatgaccaacaacgtcattaaagagcctaatattgagaaagatattgtagaatataaagcacatctaaccaaagtctttggctaa

SEQ ID NO: 307697 - DNA, 1008 bp, Proteus mirabilis
atgagctataagtgtcctgatattaaagatgcagattttggtggcctttatcctatgacctttatgctagtagatatattattattacaatatctctatggcccaaatatgaccacacgtcttgaaaataatacctatggatttcattccaatacgggacgcgccgcttactctttaaaaagcatagaagataaattagtgagctgtatttgggattcgggtggaattgatacattagacttttccctatataccgttaatcaagtcattaatctcaatgaaggctgtttttcagatattggaggattacggagtaatatctctattgcctataacactattattgaaaatgcgattggtggtaaaggtgatgacactctcataggaaatccttttgataataacctaatcggtggtgatggcaatgatttattctatggcggtgatggcaatgatttattttatggtggctctggaaacgatgttatatacggagaaatgggaaatgatgtgctctatggtgatgatggagatgatatgcttattgattattatggtgctaatatgttgaatggtggtaagggtaatgatcggatctgtgtagcatcaatggatagagggcttccaggcagaaatatcattcaagggggagaaggtgatgatgaaatatatttaggcacaggaactcataatgtaaccggtggacaaggaaatgatacctttaattttttctgctatgaggacattgaaagcaatagttcaatttgggattttgaaaaaaacaaggataaaataacgttgattactagggattatagaaaaatagatatatcaaaaatgaaaaaagttgataaattatcaggagataaaaatgaattttcattaaatcataacaaaccagccaacaaaaccatcatagacgtttcaacatcttctaacgatgataagtccattgtacatatagagattgtcggtatatttaaccacgatgaactctttgcagtataa

SEQ ID NO: 307698 - DNA, 579 bp, Proteus mirabilis
gtggatctaacagatttcgggaaaaatggtttttcttttgtagtaaaaagatatatctatctggaaaatgatataaaaggtatctctatctctttaaaaaataataacaatagtgcttatttaattaatagctctattttatttaatgatgatgataaaaatgtacctatagtgaataaagatcgtgaaagaacaccttttatgattttaccacctttgtatcgtttagaaccctctagtgaatatagctggaatattcgtcgtattagtgaaggttctaatgatatggcgttaccaaaagacagagaaagcttattttggattgcatttagagcagttcctcttaaggatagtaaaattgaggaaaagaaatctgtgtcactaacgataacacctactttctttttcaaattaatttatagacctgagtcaataatggcattggaaaataaagatgttattgatgatgttattgttgaaaaggtaaatgagaacatagttataaataataaatcaccactttatatgacttttgaatatttaaaagtgggcgaggttgaaataaaaaatgatgaatga

SEQ ID NO: 307699 - DNA, 339 bp, Proteus mirabilis
atgaatttcattcaagatgataatatattttcatttgggtatggtttagtatcaaaagatcatgactatttaccttcatattatgaagcaaccaaagatattacattatttggctcaatactttctatttatggagtatttttaggcaccataatattattagttttcatattcatattattaaaatcaaagattcaagtaaaatataaactaatattaaccatacctcttttaaaactatgtagccctgggtatgcttttttctttatatatatcttatggttttttataattttgaatgaaaaaaaattcaatacagagcatcagagtcaatcatga

SEQ ID NO: 307700 - DNA, 258 bp, Proteus mirabilis
atggctacggaaagagtcgtaattggcactgattgtggtggaataaaggaagttattggaaattatggatttatcattcctaaaaaagatagtacggcattaaaaaattcaataaataaagtgttacaattgactgatagagaaagaacaaacttagggtttaatgctagaaatcatatcgaaaataacttttcattaaacatgatatctaaacaatggctatcactctatagtaaactacacgataaaaaaagatga

SEQ ID NO: 307701 - DNA, 204 bp, Proteus mirabilis
atgagagtctttattgcggaaaaaccatcattagcaaaagccatttttgagggattaggtggtaatccaaacacggaaaagaaaaaagggtattttcaacacggtgacgatgttgtgacgtggtgtgttggtcacatgctcgagttgagcgacccccaagattatgatgagaaatatgcaagctggcgttttggtgacctataa

SEQ ID NO: 307702 - DNA, 441 bp, Proteus mirabilis
atgaaaattattaatgaaataaaaattatccaaaaattaactatagattgcttaaaaagtgtaaaagaacaggtgaaaaaagcgtggtttagtagtcctaaggatatgaagggcgatattagttttattgatttaactttttggcaaagaagtgaaaatatattctttgaagtggtacaaaacattatcgttcaaatacaaaaaaatgattttctaacccatgaacaagccaaaaaatggttaaactctattagaaaaataagtatttctatttttgatgaatatgctttatcagcattaggaacacaaaaatcagttagtgggtgtattaaagcaagaaatggtttaattaaagatctttatagtaataaaagaataaagaagtttgctgaagactttaaaattactaaggaaaatggagaacaatatgggatcttataa

SEQ ID NO: 307703 - DNA, 588 bp, Proteus mirabilis; identical to SEQ ID NO: 296770

SEQ ID NO: 307704 - DNA, 201 bp, Proteus mirabilis; identical to SEQ ID NO: 297020

SEQ ID NO: 307705 - DNA, 228 bp, Proteus mirabilis
atgagtctacgtttctcacatcgaacagccaaaatgttattagccagttgttcggggcgaaaatttacgatttcagtagaatacacaacaatcacctcaatttttgatattggtgcacttaatgatccactgattaatcgacaattttatgcttttttaaataagtttcgtcagttgagtattactcaatctgattcattttttagtggggactttttattgcaatag

SEQ ID NO: 307706 - DNA, 1905 bp, Proteus mirabilis
atggtagaacagcctgtaaacgtctatctaagtacagtcggtggcttcttaagtgactacggtacttactcttattcacaattaaccggcatcgtcccttatgtgtatggtgatatgctggaatctctgttaacagaaatcgaaaactcagatttggttgtgatgtttggtcataatcttgctgaaactcgtatgtctggcggtggtcagttctatgaaacactgaatgcgttagataagagtaaaagtaaagtaattattatcgacccgcgtcgtactgatagtgtcacaacattaggtgcagagtggatccctatctatccgggtactgatgctgcattagtggctgcgttaggttatgtgatgatccaagagggtatcactgatgaggcatttttacgtgaatattgcatcggttgggataaacaaactctgccagcctcagcacctgaaaatggctcttacaaagactatattctcggtaatggtcctgatgggattgctaaaacccctgagtgggcaagtcaattaaccggaatttccgttgcgcgtattattcaattggcacgtgaaattggtaatgccagagcggcgtggatctcccaaggctggggtattcagcgtaccagtaatggtgaacaagcttgccgtgccattatgatgttgccattaatgtctggtcatattggtcgtcctggtactaataccggatgttggggcggtagcattgaataccctgtcgcaagttttgccataccaaatccagtaaaaacccagatcccaacgtttatgtggtctgaagcggttgctcgtggtgaagagttaaccagtaaaaatgccggtgtcagaaataaagataagctggatacgggcattaaatttatgtggtgttactccagtaatgtgattggtaaccagcatgctgatctcaataaaacacatgaattactgcaagatgaatcaaaatgtgaatttattttagtgtgggataaccacatgacaccatcagcaaaatatgccgatattttactgcctgatgtcactactgtggaaactaacgatcttatcaataactcttatgctagtggtgcgtatcattatatggtgcgtttacaaaatgccattgagccgttatgggaaaatcgtcctaactatgatgtattggcagatatcgctgaaaaattaggtgttaaagagaaatttactgaaggtagaacctaccaagagtggattgagtattgctataaccaagtaaaagcaaataacccagcgcttccttcttttgctgaaactaacgatatggggattgtggatagaaaacttcctcctcgtagcgcttatgtggcattagaagcatttcgccaagatcctatcgccaacccactaaaaacagcatcaggtaaaattgaaatctattctgagaaattaatgcaagacactgaaggttggatcttaccagaaggtgatcgtattcctgcaattccagaatattgtaaaaatgaagaaggtgttgaaaacgttaccttaaaagagaagttcccactgcaaatgacgggcttccacgataaaggtcacgtccactctacctattttaacgtcgcaatgttacgtgaagctattccccatcaattttggttaaaccccgttgatgcggcacagcgtggattaaaatctggcgatattgctgagatttataacgaacgtggtcgcttgcatattcgtgtcaaagtgacagatcgtgtattacctggtgtgattgcagtaccacaaggtgcatggcgttcacttgatacaacaggtgtagataccggtggatgtattaatacattaacaagctggcacccatcgccgtttgctaaaggaaatccacaacatactaaccttgttgaagtgaaacgtgcataa

SEQ ID NO: 307707 - DNA, 363 bp, Proteus mirabilis; identical to SEQ ID NO: 297052

SEQ ID NO: 307708 - DNA, 336 bp, Proteus mirabilis
gtgacattagatgctatcgttgaaaatagtgaagaaaatgaagaggatgagcaaaacgatgccataatagaagatagcattgatttagctcaatcacttgatttaaattcaattggcgctattccgattacaatatcttttcttttagccaataaaacattatcaattgatcaacttgaagaattagcaccagggaagaaatttattttacctgataatgccattcgtcatattaatattttagcaaatggtaaagctattgcccaaggagaattaatcaaaattaaagatatgttagcggtagaaattaataaattatctataaaatgcgaataa

SEQ ID NO: 307709 - DNA, 504 bp, Proteus mirabilis
  misc_feature (419)..(428): n is a, c, g, or t
atgagtattaacgtagaggtagataataaccataaagaaacaaataaaattaatgacatggtaatattatcttctatctttggtacaaaaaaaataacagaaaaacagctatattttgtattgagatgtgagaataaattaggaaccttaacggcgttaatttcagttagtcaagtcatggataacttatatcctgaaaaaaaaattgattgggaattagtacctgaaaactatttaattgctcttttttcacaatctttatcaacattattatttcctttttctaaagagccaatgtcatcatgtgttgaaaatatctgtttaggtgctgaaaaaggatcttgctatccttgtgtagataccacattaggtcatgtttttatttgcgatattaaatggaaatatgaattgacagtatnnnnnnnnnngatgatatccatttttcttttaatgttggtgataaaaaatatttttatttttcatgggatgagggtaattgtgtga

SEQ ID NO: 307710 - DNA, 249 bp, Proteus mirabilis; identical to SEQ ID NO: 297123

SEQ ID NO: 307711 - DNA, 1770 bp, Proteus mirabilis; identical to SEQ ID NO: 301596

SEQ ID NO: 307712 - DNA, 171 bp, Proteus mirabilis
atgttggcctttaagttgtgtgatgaaaaaggggaactgctttttgatgctgaaaatgaagaagacttaaaaggtcttaatcgtctagggcaagggttctctaatgcggtgtttacggccgaagcggggaatagcgaaaaaaacttggagaacggcgacaatttcaattga

SEQ ID NO: 307713 - DNA, 804 bp, Proteus mirabilis; identical to SEQ ID NO: 297407

SEQ ID NO: 307714 - DNA, 1299 bp, Proteus mirabilis
atggatttatctaatattatagattttggtaaaagtaataatgataacttaaataatatacttaggaataagttatttattactaatgatgatattcaactttctgaaatgatgatagcatcgggtttgggaaaaaaattaatgtcagagatgacattttctccgatatttatgattgttccaacattacgctgtgatcatacttgcaagtattgtcaagttagtagagcctctataagtgcacaacattatgatttagatgagaagaatatccctaaaataatttcattaataaaaagaatatcaaaaaaaaactataaactagagattcaaggtggtgagcctttaataagatttgatttaatcaaaaaaatatataatgaggcagtattccaacttggtcaagagaatattgagtttgtaattacttcaagcctttcattactcacagatgaaatgattgaatggtcagaagaaaaacctgtaatctactcagtatctttagatgggaatgaatatgtgcataataaaaacaggatattacctacaaagaactcatttcaaataatcacagaaaatataaaaaaactacaacatagattaggtcgcgatagagtttcaacagttactacagtaacaaaggaattgcttcataatcctcaatcactgattgatgctcattttgaattagatgtatttgatctttttattaggcctataagcccttatggatttgctgagaaaaaagaaagctacacaatatctgagtatattaatttttatgaaaaattattagatattattttcgaggaaaataaaaaagggcttccttttgttgagcattctggtgctatacatataaaaagattatataatcctggtttttgtgggtatgctgatttaaaatcccctagtggtatagtatttaatagcttattattcaattatgatgggaaagtatatggaagtgacgaattaagaatgcttcagcaggtatactctgatattgacttttctttaggtgactttgattcgttatcatttaataaaaacactatctataataatttactttctaattcatttaacatgctacatgttggttgtgaaacttgtgcttttcagccatattgtggcgttgacccttgtcaaaatatcagtttatttggtgagccggttggaaataaaagtctttcacgattttgtctttatcataaagggatgtttaaactactagtaaaaaaaattgatgaagataatgcaggggctacattactaaaaagttggatttatgcttga

SEQ ID NO: 307715 - DNA, 189 bp, Proteus mirabilis; identical to SEQ ID NO: 299239

SEQ ID NO: 307716 - DNA, 342 bp, Proteus mirabilis; identical to SEQ ID NO: 297214

SEQ ID NO: 307717 - DNA, 171 bp, Proteus mirabilis
atgttggcctttaagttatgtgatgaaaaaggggaattgctttttgatgccgaaaatgaagaagacttaaaaggtcttaatcgtttaggacaagggttctctaatgcggtgtttacggccgaagcggggaacagcgaaaaaaacttggagaacggcgacaatttcaattga

SEQ ID NO: 307718 - DNA, 612 bp, Proteus mirabilis
atgtcaactcaaactttaaataacgcaaacgcccatgagcatcatgggcaccacgatgcaggagcgacgaaagttttcggcttctggatctatctaatgagcgaccttatcctgtttgccagcttattcgccacttatgcggtgcttgttaacgggattgctgatggtccttctggtaaagaaatctttagcctgccttttgttttagttgaaaccttcttactactgtttagtagtatcacttttggtttcgccatgcttagcatgaataaaggtagtgttagccaagtcaatctgtggctattcgttaccttcttattcggtttaggcttcgtggtaatggaagtgtatgagttccatgaacttatcgctgaaggttatggcccagatcgcagtgcattcttatcggcattctttgccttagtatcaacacacggtctgcacgtaacagcgggattagtttggattattattatgatgatccaagtatcacgccgtggtttaactgatgttaatcgcacccgtttaagttgcttaagcctgttctggcacttccttgatgttgtctggatctgtgtgttcaccgtagtttatctgatgggagcgatgtaa

SEQ ID NO: 307719 - DNA, 390 bp, Proteus mirabilis
atgtctaaatcggcaaaaggtacgacagaacggcctggacggaacgtaaaagctaaatctggtttaaaccgctcaatactggagcagggctggtatgaaatgcgccgacagcttgagtacaagcagctctggcgaggtggtcaggtactggcaataccccctgcctacaccagtcagaagtgcgcttgctgtggtcatacagcaaaggaaaaccgcccgtcacaaagtcaattcgagtgccttgaatgtggatatacagcgaatgctgatatcaacggggcacgtaacattttagcggcaggacatgccgtgcttgcctgtggagggagggtgcagtcagaccgcccgtcgaagcaggaacccgccgaggtgattcagacatcagtctga

SEQ ID NO: 307720 - DNA, 1038 bp, Proteus mirabilis
atggccagcacaaatcaaccagcacatactgaagtaatcgatcgttggctggaacaagctggctcatcggtaacagagtataatttttatcaactcgttgaattgttaaataaaataattcatcaagatgtcaactcgatggaggatgacagcggtattcttcgctttaaatcttattcaaatattgcatttccgacgcgagatgtcatttccattgaaaaaaataatgtcgaacaatatgaattagaagtcgcttttttgggcttacaaggaagtcagtcccccctaccaggctattatctggatgagtttgcttgggaagatgcacaacagatagaaggtatctccgcttttctcgatatcttcaatcatcgtctgatagcgttactttatcggatctggcgcaaatatcgttactacatttgctttgaaaatgaaggtcaggattcattttcacaatatatgttttctctcgttggattaggtaatggagctaatcgcggtcggatcaaaatcaaccatagcaaaatgctcgcttatgctggtcttttggcgagtccaagtcgctcttctgatgtgattagtagtcttatatctcactgtttcgacttagaaaatgtaaaagtaattggttgggagacacgccgtgttcctattcctgaatcacaacaaaacaagttaggtacgatttctcatcaatccggacaaaaatctcgcccacgaatgttattaggggaaaattttagtctgggctcacacatatatgactgcaatggaaaatgcaccatcgaaatcagtgaattaagtttagaacgctatatgcgttttttacctaacggcagtgatttcgcaccattagttgcctttgtttcttacatttttcatgagcaattagcttgggatttacgtcttagcattgctgaaaagcaagccgaagggttccgtttgggtcaccaacaacacaaccaattaggctggcaaagctttttaggtcaacccgcaaagaaaccggatgtcaccattacggtattggaataa

SEQ ID NO: 307721 - DNA, 279 bp, Proteus mirabilis
ttggatatccgtcatccattaaaagatctcgatatgcagatgattgattgggcggtggattcagagcttccgactctcgtcttgctcactaaagcggataaattagcatcaggggcgcgtaaaaagcagttaatggcggtacaaaatgcactgtcagaaaaatcaggtgatatacgtattgagtgtttttcttctttgaaaaaaataggcattgataaattacgtaatacgttaaatgagtggtttactgatactaacgaaccagagacagaagcttaa

SEQ ID NO: 307722 - DNA, 1419 bp, Proteus mirabilis
atggctggtattagtgcactaggaataggctcaaagctgccgcttggcgagacattaatgcaattagaagcagcagaaaataagcgccttgaacctttagacaaacagatgaaaagctacgatgcacaaattactgcatatggaaaaattcgtagccaattagataaattacagaaagcatctgaagaattaaaaaaattcgataaaatcgtcgccaccaaagttgatgatgagtttgatgcctttaaagtaaccactgatggtaaagcaagcattggtaattatacggtctcggtaacagagcttgcccatgctcaaacactgaaatcaaaagccgtcagtgatatcaaagatcctattggtgaaacattaggtgaaggcaaaactcggactttagtgatcacccaaaaaggtgaaaaagagcctttaaaaatagagttaacagacagccaaacttctattattgaattacgtgatgctatcaataaaaaagaaggcaacgtttctgccactattgtaaaagcccaagatggcgttaaccatttagttctgacttctcgtaaagaaggtacagattctcagatggaaatcactgttgaaggtgatagtaagcttaacgattttattagctactccactgaaaaaaccagtggcgcaatgacagagatcgttaaagcaaataatgcaaagttaacgattaatgggattgaaattgaacgtcaaactaatgaaattaaagatgcgcctgaagggatcacgttaaatcttaagaaaaaaaccaatgataataaagatggcgtagataaacctgaaattattacggttgcgcgtgatattgagccaatgaaaaaggccataaaagcctggacagacgcttataatgaattaaataaaacctataaagatttcaccaagtacacccaagttgaaaaaggtgaagatgcctctaaagacaatggtgtgttattaggtgataccactagccggatgattatgtctgagctaaaaagctttatcactcgttctcaatcttcatctgagattgatacccttaataaaatgggcattaaatttaaagttgatggcacattagaagttgatgataaaaaactcgataaagcattaaaagaaaaacccgctaacgtcaaagagttttttatgggggatggtaaagaaacaggttttggtactcaaacctataattacctgaaaaaaacactgcaatcaaacgacggaacacttgatattgccactgatggtgttaaaaaacgtaaaaaatcgttagataaccaaattaaaaatactaaacgtactattgaagcgacgatggaacgttataaaaaacagtttcaattattagataaaatggtcaactccatgactaactcaagtgcatcaattgaacgtttgttacgttaa

SEQ ID NO: 307723 - DNA, 1110 bp, Proteus mirabilis
atggctaaaaaagcacccaaagaacaacaagcaattagggaaagtgccgaggttcgatttgctgaagaattagaacgcttaacaaaagcggatgctaataatccgaagccccaaggatggcttcgctctcctcgagctgtgcgccaatttattttaggtgatgatactttaggtatcacacctaagtttttcggtgatgatgccttagttgatcgtgcaattgttacattattaggcaaacagggcttaatgctggttggtgagccaggtacagcaaaatcaatgctctcagaactttttgcggctgctatcagtggtgattcaggattaaccatccaaggtactgcagggacgacagaagatcatatcaaatactcatggaactatgcgttactattagcagaaggcccaacagaacgagcattagtcggctcaccgatttatcaaggcatgttacaaggtaaaattgttcgttttgaagagataactcgctgtcctcctgaaattcaagatgtactggtttctttaatgtccgaaaagcagttaatgatccctgaaatgggcgacggtgcgcgtattagtgcaaaacccggatttaacttgattggtaccgcaaacttgcgtgaccgaggtgtacatgagatgtctgccgcattaaagcgacgttttaattttgaaacagtaaaacctattcgtgatccagcttttgaaatcagtttgatccaatcacagcttgaaaatgagttaggtactttagcgacagaaatcaccgtccctatggatgtggtggaattactggttaccacattccaagaattacgttcaggtaatacgcaagatggtggcaatatcaaaacacctgatgcggttatgtcaacagcagaagccgtaaatatcgcttatgcttgtgcgttagaagcgcattatttaggtgatggcgtgatgaatgccggtgcgattgcacgtcaattaatcggcgttgtattaaaagataatcctgatgatattaagcgtattcgttattacatggacaacgtcgccagagaaagggccagaaatagtaaagagtggaaagcgttctttgatgcatcaaaagacttttggcaataa

SEQ ID NO: 307724 - DNA, 2565 bp, Proteus mirabilis
atgactgacagccaaaatttcgaatcccacacccccatgatgcagcagtatcttaagcttaaggcagagcacccagaaatcttactgttttatcgtatgggtgacttttatgaactgttttttgatgatgctaaaaaagcctcacgcttattagatatttcattaacaaaacgaggtcagtcggcaggtcaacctattcctatggctggcgttcctcatcatgcggttgaaaattatctggctaaattagtgcaattgggggaatccgttgccatctgtgaacaaattggtgatccggccaccagcaaaggccctgttgagcgtaaagtgatccgtattgtcacaccgggcaccgttacggacgaagcgctacttgaagagcgccaagacaatctattagccgctatctggcaagataaaaatggcgcttttggctatgccactttagatattacctctggacgttttcgggtcactgaaatgccggatagcgaaagtatggctgccgagctgcaacgcactcacccagcagaactactctacccagaaacctttgagtcaatggcattaattgagcgtcagcaaggtttacgccgacgtccaatttgggagtttgagtgtgaaaccgccaaacaacaacttaatttacagtttggaacccgtgatttaactggatttggtgttgaaaatgcccgacttgcactttgtgctgcaggttgcttattacaatatgttaaagatacgcaacgcactgcgttgcctcatattcgtagcattaccatggagcgtccgcaagataccattatcttagatgcagccactcgccgtaatttagaattaacccaaaatcttgctggcggttgtgataacaccttggcatctgtacttgatctgtgcgtgaccccaatgggaagccgtatgctcaaacgttggatacacacccctttacgccagcgtgaacagttaattaaacgccaagatgccattagtgccttacaacccctctattttgagttacagccttttttacgtcaggtgggtgatttagagcgggtacttgctcgtttagcattgcgatccgctcgtcctcgtgacttatcacgtatgcgccatgcctttcaacaatatcaagatatccaccaagtgcttgatcaggcggatatgccctatattaaagaattacagcagcgtatcagccagtttgatgagttgcgtgaattactggaaaatgccattgttgaaacaccacccgtattagtacgcgatgggggtgtgatagcccctggttataatgcagaattagatgaatggcgagcactggctgacggtgcgagtgactatcttgaaaagcttgaagttcgtgaacgtgaaaaatggggtattgataccttaaaggttggctttaatggggttcatggttactacatacaagtcagtcgtggccaaagcaatttagtcccaatgcactatgtgcgtcgtcaaacactgaaaaatgctgaacgctatattattcctgaactaaaagagtatgaagacaaggtattaacctctaaaggtaaagcattagcaattgaaaaaatgctctacgaagagcttttcgaaaaactattacctcatctaaccgccttacaaaccagtgccgaagcattagctgaaaccgatgttctggctaatctcgctgagcgtgcagaatcactcaattatacacgccctgaattaacagaaaaaacaggtattcaaatcactggtggacgtcaccctgttgtagaacaagtactgagtgagccatttatctcaaaccctctacaactcgcgcctcaacgtcgtctactcattattaccggccctaatatgggcggtaaaagtacctatatgcgtcaagcggcattaattacgctactagcttatattggtagttttgtgcccgcagaaaaagcggtaataggcccaattgatcgtatttttacccgcgtgggtgcctctgacgatctggcttcgggtcgttcaacatttatggtggaaatgacagaaaccgcaaatatccttcataatgccactgaaaacagtttagtgttaatggatgaaattggccgaggcacttctacttatgatgggctttctctcgcttgggcttgtgccgaaaatttagcgaatcgcattaaagcgatgacactctttgccacacactattttgaattaacgacactgccagaaaaactagaaggcactgccaatattcacttagatgcggtagagcatggtgagactattgcctttatgcacagtgttcaagaaggtgcggccagtaaaagttatggtttagcggttgcggcattagccggtgtgccaaaagaggtgatccgccgtgcaaagcagaaattaaaagagttggaaaccctatctggtcattcaggggcaagccatgtagaaacgtcacaactgatgttattagcagatattgagccttctgaagttgaattagcattaaataaaattgatccggattcattaacaccaaaacaagcgttggaattgctctatcacttaaaagagctaaataaataa

SEQ ID NO: 307725 - DNA, 990 bp, Proteus mirabilis
atgagccaaagtacgctaagagtagacgagttatatactgatgatattgatgagaacatggaagagttcgatgaagcagccgcaacaaaagaggctgaaaatgaatctgacgctcaagatgaaattgaactcattgaaggagtcaatcagcgtgcgttagatgcaactcagctctatttaggagaaattggctattctccattgttgagtgctgaagaagaagtattctttgctcgtagagcgttacgaggtgatatcccatcaagacaacggatgatagagagtaatctacgtttagttgttaaaatatctcgccgttatacgaaccgagggttagctcttcttgacttaattgaagaaggtaatttaggccttattcgtgctgttgaaaagtttgatcctgaaaaaggatttcgtttttcaacctatgccacatggtggatacgtcaaactattgaacgtgccattatgaaccaaacccgcactattcgtctccccattcatatcgttaaagaactcaatgtctatttaagaaccgcaagagaattagcacataagctcgatcatgagccaagtgttgaagaaattgcgcaaacgctggataaacccgtcgatgatgtcagcaaaatgctacgtttaaatgaacgtatttcttctgttgatacaccgattggtggggattcagataaagccttactagatattatttcagacgaaaatgaagaagggccagaagcaaccattcaaaataataacctcaaggaaaatatcgtaaaatggttatttgaattaaatccaaaacagcgcgaagtattagcgcgtcgctttggattactgggttacgaggctgaaacattagaagatgttggtcgagaaattggtttgacaagagagcgggttcgtcagatccaagttgagggattgcgtcgtttaaaagatattctgcaagggcaaggattatgcatagaggcactttttaagatgaactag

SEQ ID NO: 307726 - DNA, 270 bp, Proteus mirabilis; identical to SEQ ID NO: 301561

SEQ ID NO: 307727 - DNA, 2040 bp, Proteus mirabilis
atgaaatttaaaataagtgctttaacagcctgtattttaatgacttcttattcactacatgcacaagaagataaagtagaacgattagttgtatcagcctcagggtttgcacagcaacaaacagatgcacccgctagcattacggtaatcaacaaagaacaattagagaaaaaaccgatacacgatcttgctgatgccgtaaaaggggttgaaggcgtcagtgtgaatggtaatgcaaataaacaagaaattactattcgtggcttacccggagaatacacactgattttggttgatggcagacgtcaaaatagtcgtgaatcacgccctaatgggagtggtggatatgaaggtggatttattcctcctgcggatgccattgaacggatcgaggtaatacgtgggccaatgtcatcactctatggctcagatgcgatgggcggtgtgattaatattattactaagcctgttactaaagagtggcatggtgcagtttccatggggggaacattgcaacataaccgtgacgcgggagattctatcaatggtgatttttatctttccggcccattaattgaagataaattaggtttacaactttatggtagtagctacttacgtgcagaagataaaattacgtatgggcaagggcgtaacgataataaaaatattacggccaaattagcttttactcctacagataaccaaaccattttattagaagctggacgcaattcgctacaacgcacgacaacaccgggtaaatcgatgagcgaatttaccaatcgtggtggacgtcttgataaaaacaaaatgctagaaacgaataatgaccgtaaccattgggcattaacttataaaaatcagtttgatattttgcactctgagttaagtgtttatcaagagcaaaccaagcgtgttcaaaagacggaaggtgtagataaagcgacaggaaatagctacaaatattatgaagatcgccgccctgaaatcactaatactgttttcgatgctaaatttaccgcattccttcctgataatgtgatgacttttggtggtcaataccaatatgcacgtttaaaagacgaatcttcagtcggtggtaaagaggtcaaacaatctacgatcaccgctgatcaaaaagcgttatttttagaagatgaatttagtgtcacagataatttagccctaactgggggaatacgtcttgatgatcatgaatactatggtaagcactggaacccaagagcatacgcggtttaccatttaaccgacgaatttaccataaaaggagggattgctaaggcctttaaagccccgagtttacgagaaattagccctcaatatggtacatcaacggaaaaagggcgagcgattatgtatggtaatcgtgacttaaaacctgaaacttcggttagccaagaaattggtgttggttatgataatggtgatggttttaccgccaatgtgaccttctttaatacagaatttaaagataagcttaccaactacgataccggtgaaatcgatcctattaccggattaaaactgtaccaatatgataatgtgggtaaagctaatattaaagggattgaaaccgcggttgcattccctgtcgctgataactggcgagtaagtgctaattacacttatatcaactctaagcgtaaaagtgatgacgaaaaattaggctctggtgaatcattaaaaggttatccattggatatgacaccaaaacatagcgccaatgcgcgtgttgattggcaatacgatgaagctaccagtttctatgccaatactgcctatactggtaagcaaatttgggcggctcaacgaaatggttatactggcgctcgttatcgtagtggttatacaacctttgatttaggaatgacctataactttaataaaaataccatgctaaatttagccgtattgaatattaccgatgaaacgggtcctgcggtcaacgataaagggggaaactgggtcgttgatgaaggccgtcgttattgggcaaatatcaaatatagtttttaa

SEQ ID NO: 307728 - DNA, 273 bp, Proteus mirabilis; identical to SEQ ID NO: 299160

SEQ ID NO: 307729 - DNA, 912 bp, Proteus mirabilis
atgaaaaaattatttggcgttacagtggcgatggttactccgtttgattcaaatgatcatgtggacatcaacgcgttgtctgcattaactaatatgttgatcaccaaaggtgttgattgtctttatccttgtggcacgaccggagaaatgttgcgtttatccgcatcagagcgtaaaagtgtggcgcaaaccgtagtagagacggcaaataaacgtttacctgtttttattcatgttggcgcaatgacggtaacaaaaaccattgaactcgccaaacatgctgtagaaattggtgccgatggtattggtgtagtgacgccacaattttttgctgccacagacagagaattagagcactattttgtgactatcgccaatagcgtaccagaaaatttcccaatctatctttataacattccacaatgtgcggctaataatatcaagcctgaattagcggctaaaattcagcaacaatgcaaaaatgtgattggtataaaatacagttttgccgataacaatacgacacttggctatttagcggttgcagataatttttcagtacttcatggctacgataaattattccttggtttattagatgcaggctgtgatggcacagtttcaggatgtgcctgtgttttccctgagccatttgtgaatatgtatcaagcctatattacgggtaattatcaagaagcgaagcactggcaacaattttgtgtgaaatttagtgatgctttgaaatcaggtgcgaacatggcgatatttaagtcagcattaactatgcgtggcttaaatggtggtcatatgcgtttacctcaacttgatttattacctgaagaaaaccaacaattgaaagaagatctaacgcaattatgcaaagaagcggggatcgctttttcaattaattaa

SEQ ID NO: 307730 - DNA, 909 bp, Proteus mirabilis
ttgatagtgttggtcacattctggccaccgattaaaattttagccttagctgtattaggtttagctgcgctattttggccagcaggaacgccgatccccgctacacaagcatatcaagatatggcatttacccaaggttttattaatggctatcttaccatggatacgttaggcgcgatggtctttggtattgttattgtcaatgcggcccgctcaagagggattgataattcgtctttattaacacgttatactatgtgggcgggaattatcgcgggtgtgttattaacggcgatttatcttagtttatttaagcttggttctgctagcggcagcattattccagaagcaaaagatggcgcagatattttacatgcttatgtgcaacatactttcggtaattttggtagtttctttttagctctgcttattttcttagcttgtatggtgacagcggtaggtttaacttgtgcttgtgcggagttttttagccgctatttgcctatttcttatcgtacattagtattgattttggctgtattttccgcggtagtctctaatcttggtttaagtaaactgattgcgttctccattcctgttctggtgatgatttatcctccttgtattgtgattattctgatgagtttcactttacgtttttggcataatccaagccgtattattgcccctgcaatggcaataagcttattttttggcatttttgatgccattaaagcatccgatcatttaaaacatttattaccggattgggcggctaaattaccattaagtgagcaaggattagcgtggttaatccctgtattagtgactattgttatatgcgctatttacgataaagtagctggctcacaacataaaaaagtgatccactctgggataaacaaataa

SEQ ID NO: 307731 - DNA, 231 bp, Proteus mirabilis
atgcctgaaagccacttgtgtgaatatgaagctttttatcgcaaacaaccctttggtttatggcgagaggattatcggatggcacaagtggcgcatcttcttgcgatgataaatcgtgatccgaaaacgtctccgcctgaattgatggattttatgccgatgtggaagaagaaaatcacggaagaagaggtgtgggataacgtcactgagagtgtattagctaatcgatag

SEQ ID NO: 307732 - DNA, 663 bp, Proteus mirabilis; identical to SEQ ID NO: 297388

SEQ ID NO: 307733 - DNA, 924 bp, Proteus mirabilis; identical to SEQ ID NO: 297518

SEQ ID NO: 307734 - DNA, 1212 bp, Proteus mirabilis; identical to SEQ ID NO: 297054

SEQ ID NO: 307735 - DNA, 180 bp, Proteus mirabilis
atggggcgtaaacgcttaattcaaaaacaactcgcaaataatgaattaatagtcccttttgataattgtgagtttttttgtgcacaacgctattatctggttacccgcgatgaaaagagtaacgctaaagtacaactttttattcaatggctgaaaaaacagatcttacaagggatgtga

SEQ ID NO: 307736 - DNA, 345 bp, Proteus mirabilis; identical to SEQ ID NO: 299382

SEQ ID NO: 307737 - DNA, 345 bp, Proteus mirabilis; identical to SEQ ID NO: 299382

SEQ ID NO: 307738 - DNA, 696 bp, Proteus mirabilis
atgcgtactgagctagaaggcatttttaatgatgaaacctttttagccgatttagatgatgcacttccacaaggctcacagcgagagcttaatactgccggtcgccgccgtatcgtcattatggtcactaaagaagcccattgtattggtgacctcttaatgaaaagcgcttttggtgatctggatgttgaaattgcagcagttattggtaatcacgacacgctaaaacaccttgttgagcaatttgggatccctttccatctcattagtcatgaagggttaacccgtgatcagcatgatgaaaaactgatagcacaaattgaccaatacaaacctgattatgtggtattagctaaatatatgcgtgtattaacccccgcatttgtacaacattacccaaatcaaattattaatattcatcattctttcttaccggcatttattggcgcccgcccatatcatcaagcctatgaacgtggtgtaaaaattattggcgccacagctcactatgtaaatgataatttagatgaaggccctattattactcaaaatgtaataaacgtagaccacactttttcagcagaagatatgatgcgcgcaggacgggatgtagagaaaaacgtactaagccacgccctctattgggtgctctcgcaacgtgtttttgtttatggcaacagaacaattattttgtag

SEQ ID NO: 307739 - DNA, 492 bp, Proteus mirabilis; identical to SEQ ID NO: 305263

SEQ ID NO: 307740 - DNA, 555 bp, Proteus mirabilis; identical to SEQ ID NO: 297295

SEQ ID NO: 307741 - DNA, 450 bp, Proteus mirabilis; identical to SEQ ID NO: 297040

SEQ ID NO: 307742 - DNA, 456 bp, Proteus mirabilis
  misc_feature (391)..(400): n is a, c, g, or t
atgttactacaaaccattttagcagcgctggggcccattatcttagggcttttagttggctggctttccggtaaatatggatttattaaaagagagtattcacaagcctttgctgattttgtcgttaaaattgctctgcctttttcactctttttagcggcaacccaagcttctccgtcggttttctttaatatcgactacctattagctctcgcggtaggattagttgtttcttatcttattggttttttaggcggcaagttcttttttaaacatgataaaaagaactcagcaatgcaggcattatcggtttcatttcctgatatggcttattgtggaccaccagtattactggcaacagtcggctcatctggtttgattgctatggtgnnnnnnnnnngtgggaaatttgatctacacggtaattattttaccttttactatcatgatcattag

SEQ ID NO: 307743 - DNA, 489 bp, Proteus mirabilis
atgatcattagtggtgccaaacaaggaaaaagcattttacagtcattgcttaatgctatctctcagccattagttttcctgcctattttgggggctatgctagctattttcggcgttaagttaccagagattttacaaaactcagtgaatgaaatagggaaaacatctggtggtgtagcattatttttcttaggactattaatttcagggctcaaactcaaagttaatactgaaattgtttttaatgtgataataaagaatgttgtacaaggggcattaattttaggaacgggatttgcacttggattagaaactgaattattaaaagccgtctttctaattggtgtattgcctactgcaacagcagtgcctgctttagctattacaaataaggcctatgctgatatggcaacgggcactgtattattaagtacgctatgttcattactttctattattggtggtatcactattgtagaaatgatgtaa

SEQ ID NO: 307744 - DNA, 984 bp, Proteus mirabilis
atgaaaagtgtcaataacgctataatcgaagattctgatgctatctatacggctcagcttaatgggcatggcggaattatgccgatcacggctaatagcatagcaagtaatgaaaggcctttttgggttcatctcgattatcgtaaacccaaaagtgatcagtggattaatcagactgagttacttcctcctatcgcaaaagatgtgcttttagctgaaaatgttcgacctaaggcacagcgtatcggggaaggggttattattaatttgcaaacgattaataacaaccccgatgatcggccggatgaactgattgcgtatcgtatttatattaatggtcaaatgattatttcgagccgacatcgtcgcgttaattccgttgattcggtgatccactctttagaagtgggtgatggtccagaaaatagtggtagttggttgatcactatggccgatgcagtgacagatgaaataggtgattttgttgaaacacttcatgaccaattaattgagttggaagatatgatcctcgatcagcaaattccggctcgaggtgaattggcattgctacgtaagcaactgattgtgttacgccgttatatggcgccacaacgtgatgtattctctcgactctctatcgaaaaattaccttggatgagcgacagtgatcgcattagtttggttgaaatatcagaacgtctctcgcgtcgattagaagatttagatagtagtatttctcgtacagccgttattgctgatgaaattacttcaatgatggcagatgcgatgaacaggcgcacatataccatgtcattaatggcgatgctatttttgcccacgacctttttgacaggactatttggggttaatttaggggggatccccggtaatgagtttccttatggctttgctatattttgcttttcactgtttttcttgattgtgattgttgcttggtggttaaagcgtagtaggtggttgtga

SEQ ID NO: 307745 - DNA, 126 bp, Proteus mirabilis
atgtttaacttaaattatttcaaagcagactcatcaacatttattattaaatcggtcaacgggaaagtgcgccaacaaggtaaaggcttaagtttttggtataattggtcctcaactttaatttaa

SEQ ID NO: 307746 - DNA, 642 bp, Proteus mirabilis; identical to SEQ ID NO: 296845

SEQ ID NO: 307747 - DNA, 468 bp, Proteus mirabilis
ttgtttggattacaaaaaaaagaggacaaacgaagtaatggcgtcactaatacggattatttaggttgggaaattgaacccggtattcgctactttatcaccccgaatctcaatacaacagtggcttattttgatggtggaaaacaagcaataagacatgaagagtatgatacaaaagaaacaaatcacaaccagcaattacgtatgtatgtaaactggacgacacctatcggtgttattatttctccctcaatgcgtaagtctatttttggaaaaatagaagacagaacaaataaaggtgaatatatcgataaagatatgactcgttataccttacaaatggcttaccaaatatctcctcaatggcgtgttatgacagaatattataatgagcgtgttgagaataaaaataacggcagcaagtcaactcaagattattttaaagtatcggtaagagcaactttctaa

SEQ ID NO: 307748 - DNA, 474 bp, Proteus mirabilis
atgtaccaagattatctcaatacgccgaaaggttttccaaagccttatatatccattactgcagatgatgatggcatcaccagccttaactttgttagtgaaaaagaggcgttagttaattcaaatgccataattgacctgtgtataaaacagttaaaagagtatttttcgggtaaacgcaccctattttcagtgccactagcgcctaaaggaaccgaatttcaaatacgcgtttggcagactttacagtctattccttatggtgaaatttggagttataaaaagttggcacttacattaggttccgtcaactattgcagagcggtaggaatggcaaattcacgtaacccaatctcgttaattattccttgccatcgcgtcattggtcataatggtaagttagtaggctatactgggggacttgatatcaaacgttggctattacactatgaaaaagtggatattgacgaatag

SEQ ID NO: 307749 - DNA, 390 bp, Proteus mirabilis; identical to SEQ ID NO: 302855

SEQ ID NO: 307750 - DNA, 390 bp, Proteus mirabilis
atgtctaaatcggcaaaaggtacgacagaacggcatggacggaacgtaaaagctaaatctggtttaaaccgctcaatactggagcagggctggtatgaaatgcgccgtcagcttgagtacaagcagctctggcgaggtggtcaggtactggcaataccaccagcctacaccagtcagaagtgcgcttgctgtggtcatacagcaaaggaaaaccgcccgtcacaaagtcaattcgagtgccttgaatgtggatatacagcgaatgctgatatcaacggggcacgtaacattttagcggcaggacatgccgtgcttgcctgtggagggagggtgcagtcagaccgcccgttgaagcaggaacccgccgaggtgattcagacatcagtctga

SEQ ID NO: 307751 - DNA, 225 bp, Proteus mirabilis; identical to SEQ ID NO: 297381

SEQ ID NO: 307752 - DNA, 336 bp, Proteus mirabilis; identical to SEQ ID NO: 307627

SEQ ID NO: 307753 - DNA, 171 bp, Proteus mirabilis; identical to SEQ ID NO: 307717

SEQ ID NO: 307754 - DNA, 903 bp, Proteus mirabilis
atgcagttctcaagtgaacatatcgcgatatttttagccgttatggataaaggctctttttctgcggctgcgcgttcattaaaacgtgttccttctgcggtcagtatggcgattgctaatatggaggctgaattaggttatgcgctgtttgagcgttcatcgagagagccacggccaacagaaaaagctaaagcacttgaacctcacgccagaatgattgctgagcaattaaagctattacaggttcatgctcaagagctttcaatggatctggaaagtatattaaatattggcgtcgcggcagatattaatcccgactatttattaccggcattatctgagttaacacagcgttaccccttactcaaagtgaatgtagtaaccgcggcgcaagatgacattattgagatgctgcacgcacgtaaaatccaattatgtctcgtgtatggtgggttatacgtcaatggcgatgaacaatttcaatatttgggctctgagtcattagttgccacaatttcggcaagtcatattgcacttgctcaccctgcaggggtatttattgaagatttagtgaatgtaagacagataatgatagccagccatactcaagagataagagatgtacgctctttagtggcgactaattactggcaaacagataactttcaaatggcattaggtatggttgaagcggggatgggctgggggaatttaccttattcgctgatttatacgcagttacaaaagggaaaattaaaacaactgcaatttaaaaatactaaaaatgaattgcgtttaccggtacatgcaatgtggttaaaaggcgagtcactacaaaaaggggcaaaggaattggtggagttaatgaatattcaccaacccattgtgcccaattttgattaa

SEQ ID NO: 307755 - DNA, 243 bp, Proteus mirabilis
atggtaataatcatgaacattaaagtcggcgatgagtttttggtttatatggcattgggtgaagagagctatatgaaggaatattatcgtgtgttggagttagatagcgcattatcacaagtgaccggtaaattgctaagaaggacgacggcagatgataaaaatattgggttagggcgttgtgaattagaaggtgggattgaacaatttgcgttagaagatatttatccaatagagaagtga

SEQ ID NO: 307756 - DNA, 426 bp, Proteus mirabilis; identical to SEQ ID NO: 296867

SEQ ID NO: 307757 - DNA, 327 bp, Proteus mirabilis
gtggccagcaaattaaattatctgcctggcgtcaatatcgatttaaaagaaactgaaaccgccgtcgttaattcggcgttacccagtgtgccggttcaagctgatttgaatgccattaatcaaaaccaaccaaaccgccgttttgattatcagccgtcattgttaacaggaaatgagttaaaaggcattaacaaaggtggtttgagtaaagagatcaataacaatcaaacgagcgttgataaccgcaggcaatacggaaatatcaccattaataatggcaatgtgatgacacctgcggatttggaagagtggggcgcattgaattaa

SEQ ID NO: 307758 - DNA, 501 bp, Proteus mirabilis
atgagtgaaacaatgacagcacctaaggtcgtattaacggtaggaaatagcatgatgggggatgatggagccggtcctctgttagcggatttaatggaagcaaacccgattgatggttggatggttatcaatgggggaagtgcgccagagaatgtttcttatcaaataagagcattacaaccgcaatgtgttgtcattgttgatgcggctgatattggtttaaaacctggtgaaataagggtaatagatcctgattatattgcagaaatgtttattatgagcacccataacatgccgttaaattttctgatagatcaattaaaggacgatatccccgatattactttcttggggatccagcccgatctggtgggattctattacccaatgaccgaagcggtaagaaacgctgttgataaagtttatcaaggcattaagtcttggcgagttgattactttcctgagcttgaagtctgtgatgaagacgatatcgaagaatag

SEQ ID NO: 307759 - DNA, 891 bp, Proteus mirabilis
atggagccaatcacccgcttaatcgatcgcatgttatcttttgcattacttgatcctcgaattgaggctgtggtattaacaggctcagtgggtcgtaataagaagatagacagctattctgatattgatatagagcttattggtcacggtgcgactgagctagcaaaaaaccaacattggctatcacaatttggtaaacacctcgtctctttagcaacagaatgtgaagatccgaacggcattcgctggccaatctatttgcacgtattagctcaaggccgaaaaatggatattttgatggcagagcctgaaagaattatcaatatgaaacaaaatggtctaagtccagtttatcaacgaggctatcgtgttttacttgataaaacaggtttatgtgaccaacttccagaaattagcactgtgacacccccagccctttccatagagcaagctgatgccttggctcaagagttttggtttgaagccacacaaatcgctatagctatcttacgtaatgaattttggttcgctgaatatcgtatgagtgatataagggaatggttgatccgtttactagagcaagttgctctgcaaacatcaacacaagatgtctggtatcaaggcaaaaacttacgggagtggttacctaagttttactcattacgttcattagaaagcacactggctatgagtaccccttatgaagcagcggctgcattaagtattatcatggctttttttattgatgcatcaaagcgttttggtttgtcgatagaaaaggcaacacaagctcaaacacttattagcgattggtttattgataatgaactattaactgaaaatgaatattaccaaataaccacttccattatttgtcattatccaacttaa

SEQ ID NO: 307760 - DNA, 1476 bp, Proteus mirabilis
atgaaaacgcaaacgataaataatccgagaacccctacacttctcgagtcactgtttcctatatttacaatggtggtgctattaggcggaggttacgccgcttttgatttacctcccgaaccactaatggtgttatcaaccgtcgtcgcggcattattagttaaacgattaggctatcgttacgacgaaatcttaacggctatctcacaaaaaatcgccaaaacgatgccggctttgctgatcttaattagcgttggtttattaatcgggacatggatggtgggaggaaccattccactgatgatctactatggattaaagatgatcagtcctgaaatgctatatgttacagcactgctagtgacatcattagtatcagtttgtactggtacttcatggggctcggcgggcactattggcgtcgcttttatgggcgttgctgtcggtatggaggctaatcttgcagcaactgcgggtgccgttgttgctggtgcttactttggtgacaaactctcaccgctatcaggggatactaacctcgctgcaatggcggccagaatagatctttatcaacatatctgtcacctgctttataccacattaccttccttgatcctcacagcgattatcatgactgtttatggtatgaatggcgatttagcaggacaaggagtgcctgaaaaagtcaccttaattaccaatgggttggagaatatttatcacttcaacttgatcttgcttattcctgtattagtcattttatatggttcggtcacgaaaaaaccgactattccagttatgctggcctctgccgctattgcgatgttgaatgcttatcttattcaaggatttggcttacatgatatcgtaaaaagtgccgttgatggctttaatgtctccatgatccaaggtaaagaagtacctgaattattaggtaatttattaaatcgtggtggtatgaactccatgatgagcaccctacttatctgtttctgcgcactctcctttgcggggactctatctttaagcggtgcattagaagtgatagttcatgcgctgctaaaaatggtgcattcaacgggatcgatgatcttagcgactattgcctgtggactgaccatgattggtgttacttgcaatggacaaatctctattcttattcctatcgaaatgttacgtggtgcgtatattgaacgcggtttacaccctaaaaaccttgctcgtactgttgaagattccgccactatttttgagcctatcttaccttggactgctgccggcgcttatatggcgggtacattaggtgttgcaaccctaagttatttgccttgggctgtattgtgctggagtggcatcttctttgccatgttatggggtttcaccggttttggcattgctaaattaacaccagaagagcaggaagaaatgactgctgagcttggatcacattcagaattacaacttgatactaaataa

SEQ ID NO: 307761 - DNA, 309 bp, Proteus mirabilis
atgctaataaaaaattctttagcttatgcgattacactaagtttctgcttatccttacccgcacaagcattaccttctctttctcatgaaccttttggcgatctttatctttttgaagatgaaatgccaaataccttgagcacctcaaatgaccatcagctatcactaagtaaagagcatgctaaagatggcgtacagtcactcaaatggcagtatcaaccccaatcaacattaacacttaataatgaagttaattatcaagatgataaaaatacagcaacaccactcacttttatgatgtggatttaa

SEQ ID NO: 307762 - DNA, 1269 bp, Proteus mirabilis
atggtgaaaaataaaactctgtttaaatcacttctcacaatccccgttaacctccataaacgtacaacgttaaaatggttaggcggtagtttactgcttgccagtatgggcgcaaatgccatcgaaaaaagcaagtgttcaccaacacttcgttatcaacgtgctattaactacttaggaaaacatcaagctggggttatcacgccagaacaaaagcatgcttcatttattgcacttgatttaacagtaacaacccctgaggaagtagaaaaaattttccgaaccttaacacagcggattgcttttttaacacaatatcatgaacttaaagaaagtcataatcctcaccttccccccgcaggatccggtattctaggtagccaattataccctgatgaattaaccatcacagtggcgttaggggatagtttttttgataatcggtttggttttcaagctcataaacccaaacgccttgaagcaatgaaacccttccccaacgatcgcttagatcctaaatggtgtggcggtgatctgttacttcagctttgtgccaatagtcaagaaagtatcatttatgcattaagagatattttaaaatatctttctgggcaagtgcatgcacgatggaaaatagatggttttctacctgctcgtgatattgataatcaacaaacgccaattaatttatttggttttaaagatggcacaggtaatgcccctgccactgacactcatttaatggatgatttagtgtggatcaccgataaacaaaatgaaccgcagtggtgcttaggaggtagctatcaagcagtgagacttattcgttttgccttggaattttgggatagaacacctcttgaagatcaggagaataactttggtcgtcatcgtgcaacaggcgcgccgataggaatgaagcaagaaatggactcacctgaatttgcacaagatcctcatggcgacaggatactctttgattcccatatgagacgagctgaacccagaacccccgaacgttatagcgccaaactgcgtcgtcgcagttatagctactcattagggctaacaccgtcagggcaattagatatggggcttgtctttgtctcatttcagaataaccttaaaaaaggctttattgatacgcaaaagcgtttaaatggtgaaccgttagagcgctatataaaaccttttggtgggggttattacttcgtattacccggcgtcacacaagcaagcgatatattagctaaaggactatttacttaa

SEQ ID NO: 307763 - DNA, 690 bp, Proteus mirabilis; identical to SEQ ID NO: 299182

SEQ ID NO: 307764 - DNA, 543 bp, Proteus mirabilis; identical to SEQ ID NO: 296359

SEQ ID NO: 307765 - DNA, 2019 bp, Proteus mirabilis
atgcaaacaatactaaaagagagtattaatcagaatgcattagataatgagtggaaaaatattcataaaacatttattttttttgagaaacatcaacgtattgtattatcattgtatgaaagctttatgaataatccggcaatcattaatgaaaacggtggcttaaaacattattttgattatgctttttcatatcacgaacgtataacgaaagaagatgtctttagtattgatttttttaaggaccttaatcaagcttttgatttatattttgatttaatatctccattaatgaattctaccgaaggacaaagaacattagataaattatattcaattaatgatgaagaaaataatagcctgtgggtgggagtgacaaagaaagtaattagtcttgttgctaattcaaaaattatggacgcacttttaaatgcacaagaatatgcagagaatatcgaaaattttgttaataagcttgcgtttatttgctcagatagcattggttttgcatttacaaaaacaagtaagatgctttctcattacgatattaaaaatagactaattaatactaagggtattgactatttagctcaaaagatacttccgatgatactggcattttgcaacacaaaaatttcattaaccgagtttgttaaattatcgggtaatgagcttaaccagtgggtggaacaactccgtaaattaacggaacaaatagtaccaaatctgcaacatcctaaattaaataagcttttttcttggaaacaaaaaataataaatctaggcgaagagactgccgttcttattccgaagattgagatcacagatattactaaaaataagatttatatttatggtaaagatgcattacaggtttccactaagctatttttaaacggtttcagcatgataaccggatcaatccaagcttatacattacaaggcatgagcttatatgaacgtaatgacccattaaaactatccccctataatctgtatacagcacagattattgcgaatttatttgtagcaagctacagtattttaaaagtctctcaagaggcgacaaaattatctcaaacagtatcgagcaccacactgaaattctttttagataaaataaaattacctatgctaacaacagaagtgggaaccaaaagaatggcagcattaggtaagattgcaggtgccgttggtgttgctcttgccactcgagatgcattagaagcttttcatattggaaataataaacaaggtttatcaaatgtagccattgccattggttctatcatgctaatttttgttacagggggatgggctctatttgcaggactgctaatattaggaggctttatctcaagtcaactcaccagttggagtcatttggaaactttgctaaaacacagtttttggggaaatgaagaaagatcaaatttttggaataataaaagacctataacaatcgataaacaactagaagaatatgttaaaaatttcgaacaatatgaaaaacagagtattattgaattacaagaattttataatctattttatacagctaaaatgactcaagaaaaaataccaaatggaaaactccgcttatcttttgaatttactaattttatcccagggatttcagaggtatattttcactttgttacagaggttggttatcacagcggtttggcagaagaaataaaaacacctagttcagcttatgttctaaataaacgaaaagatctcttagaaattagcaaacaattaaaaatggcaagtgaaaaaggtgattggaaccctgaaacaggtatatttaaatttagtttggaagtacagtctcaattagtaaatacatattctgcttttggtgcacatcccaatagccgtataggtattgaagatttatattggtattatcaagtcaatcccgaggtaacaacaccgatgcgttatatcaattgggggggagatacccaagaaaacaatcggcttttaggctttattaacagtgagaatatctaa

SEQ ID NO: 307766 - DNA, 897 bp, Proteus mirabilis
ttgacattatttaatcggcatcctgtacatcctcaaataaatgaagtacttggtgattttacctcattacaattactcgattggtatacctgtgatctttggtcaaacagtatctcaatgatgcaaaaacgtttacataaagatatgcaacatcgtagtgtttcagccattaaagtaatgcgtgaaatggcaattcaacgacagatgtctcatatagagatacctgtcgtttttacctgtgcattgggctataaacatgatgaaggttttctttctcatcattcatggctaaaacctgtttggggaatatcacaaacaccacaaacatggctagatcatcaagtatatgagtcagacggtgaattatatttaaactgggattttgtcgaacaattatttgactacacaaccattttttccatgttccagcaatatgaacatatactcactaaactggctactgaaccacaatcttggcaattgccactaaataaacttataccaagatgcaataatctcgtcatcaccccagttttcaatgccaaaaataatcaaaacacacattataaacaatctactgatacacaaaaaacaggtcagacaatacaaaaactacaacaacttgttaagcaagttattggaataacgttagcacctgaaacaaattttttcgaagcaggtgccagctctttacaattggttcaacttcatgcagcactacaaaaaaatggctatagccatattacaattactgatctgttcgctagtccaaatctaagtacattagcgcaattgctttggcaaaacacttcaccaacatgtgagcaatattccgaccgagacaaacacaaaaacaagagaaagaaacggttacaactacgaactcatagtagataa

SEQ ID NO: 307767 - DNA, 1416 bp, Proteus mirabilis; identical to SEQ ID NO: 297430

SEQ ID NO: 307768 - DNA, 2487 bp, Proteus mirabilis
atgttaattccttattcaccccacacaatatggaagaccatttgtgcgactttgctattaagcttggcgtttttctcacaagcagagcaggacgattctgtggaatttaacattcatatgctagacgcggaagatcgcgataatgtcgacctttcacgtttttctacctcaaattatatcattccgggtatgtactatttagatattcgtctaaatggtcgcgactttcctcgccaaaatattaattatattgaagtagcagataatcattccgtggcttgtatcgaccctactcttttaaaaaagttaacaatcaaccaagaaaaccaaaaatatatcaaacaaatatcaccagattgttttgatattagccaattacccggtatctcgattaaaaatgatggtggtgtacttgatatcacgttaccgcgctcattaatgaaatatgaagaatctgattggacacctccggagctttgggatagcggggtctctgggcttatttttgattatacattaacaggaacgtcaactcgacctaataaaggcaataataacaataccttaactggttatggtcaagcgggattaaacttgggtgaatggcgtttaagagctgaatatcaaggcaattattcttctgaatattcatctaacaatcgttttgattggaaccaaatttatgcctataagccattaccagatctcgcagccaaactaacggttggggaaacttatttaaactctcaaatttttgatagtttccgttttacaggagccaatttacaaagcgatgagagaatgttacccccttctctccaaggctatgcacctgaaattcatggcatcgccaataccaatgcaaaagtgacggtaacccaaaatggacgtttaatttatgagacaaccgtacctgctggccctttcgtgattaaccatctacaaaataccgtacagggtcaactcgatgttagagttgaagagcaaaatggtaagattaacgaatttcaagtgcaaaccgctaatttgccttatatgactcgcccaggatctgtgcgttttaatacctcactgggacagtcatccgtgaacaaccataaaatgcaaggccctattttctatcaaggggatttttcatgggggatgaataatacatggtctctctatggtggtgctttacttaccgctaaagattataacgcatggtctttaggtatcggccatgatatgggacgttttggtaccctttctggcgatattacacagtcttatagcaaaacctatgataatgaaaagatcaatgggatgtcttttaaactaaactatgcaaaaacttttgatgagtaccacagtaccattacttttgcaggttatcgtttctcagaaaaaacatttcgctctttttctcagtatattgatgagcgttataacggcatcaataataatggctatgaaaaagaaatgtacaccattaccggtaataaaactttttgggctgatgatgcagaaaaatcgaccaccctctatctctcttatcgccaccaaaattactgggataaaaatactcaagagcagtatggtgtcacagtaagtcgtaatttttccattatggggattgagcaaatcaataccaacttgtcagcatttcgtacccaatataaagggaatactgacgatacgctctcttttaatatttcactaccattaggaagtggtcgcaatattggttataacttgcaagataacaatggcaaagtgacacaaatggcctcttatgctgataatcgcgattataataatttatggcgcataagagcaggcttaagttcggataagaaagccaataccgatggttattatcaacatcgttctcagtatgcagaaatcaatgccaatgcaagctatcaacaagataattacttagcagtgggcgcaacgataaaaggcggttttactgctactcgttatggcgctgcattacacagtagcagtatgacctctagcacagcaagaataatggtggatactgatggtgttgcaggggtgccctttaatggtcaaagcacgactacgaaccgcttcggcattggcgtactaaccgacttaacaagttataacaatgttgatgcacgtattgacgtcgataagatggatcaagatattgaaacacgtaaagccattgcttcaacaaccttaacagaaggtgccattggttattaccaatttccggttcgtcaaggtgaacgcttaatggctgtcttacagacaactgataataaataccctccttttggtgcagaagtcaccaatcaaaaaggggaaagtattggtatggtgatggaagaaggccttgtttatattgcgggtgttaaccttaatgaatcattaaatgtaatttggaacggtaaaacacaatgttcaattaccattcccgcggaaataacagatcccttaaaacatcaatcgctcgtttgtcaggatcgttaa

SEQ ID NO: 307769 - DNA, 339 bp, Proteus mirabilis
atgaactcattcagcacactaaaaacactattttgtggctctttgctggcactgagtctagtgaatacaacacaagcgggtgtttcactggatagaactcgtattgtattaacgggtaatgaaaactcagccagtgttaatttaaaaaataccagccctgatattccttttttagcgcaatcttgggttgaaaatgaaaatgggcagaagatctcttcacccttagtggcacttccaccgttacaacgccttgatggtgctcaaaaaggcgtagttcgcattacaaaaacagctgaagttgggctattacctcaagatctgtctcttatacacatctga

SEQ ID NO: 307770 - DNA, 663 bp, Proteus mirabilis; identical to SEQ ID NO: 297388

SEQ ID NO: 307771 - DNA, 1353 bp, Proteus mirabilis; identical to SEQ ID NO: 297243

SEQ ID NO: 307772 - DNA, 249 bp, Proteus mirabilis; identical to SEQ ID NO: 297123

SEQ ID NO: 307773 - DNA, 615 bp, Proteus mirabilis
atgacttatacagttgctcttacaggtggtattggtagtggtaaaacaaccatcgctaatggttttgcctcactcggcgtccctcttgtggatgcggatgtcattgcccgattagtggtagagccagattcgccgggattaaaagccttacagcaacacttcggtgacacaattttattgcctgatggcaagttaaatagagcgcaattacgtcatattatttttcaaaatcaacaagaaaaagcgtgggtaaaccagttactccatccacttatacaacaagagacgcaaaaacaaattcaacaaattcgcgccccttattttatttgggttgttcctttattagttgaaaataaactaacacatttagccgatcgtattcttgtggttgatgtgactgaagaagaacaaattaccagaactatgcaacgtgatggtgtaagccgagatcatgtactcaaaattttacaagcccaagctaaaagagaacaacgattagccgttgctgatgatattattgaaaatcacgataatagcttaaatcaagatgaacaaataaaacaacttcatcagcattacttagaattagctcaaaaaagcaatacaggacaatag

SEQ ID NO: 307774 - DNA, 909 bp, Proteus mirabilis; identical to SEQ ID NO: 307730

SEQ ID NO: 307775 - DNA, 291 bp, Proteus mirabilis
ttggatctggcattagcgaaagtgggagggggaattgaagcattaagcaccccgattggtaaatctatgggacttttattagcaatagtcgcttatcttgctgtcggccctttatttgccacccctcgaaccgcaacggtctcttttaaagttggcattgctcctttagtgggtgatagtgatattgccttacttatttatagtgtcatttactttttaattgttatcggtatttcactgtatccgggaaaattacttgatagtgttggtcacattctggccaccgattaa

SEQ ID NO: 307776 - DNA, 1056 bp, Proteus mirabilis; identical to SEQ ID NO: 296753

SEQ ID NO: 307777 - DNA, 1191 bp, Proteus mirabilis
atgttagatgcacaaactatcgcgacaattaaatccactattcctcttattgctaaaacaggccccgcgttaacggcgcatttttacgacagaatgttctctcgccatcctgagttaaaagatatttttaccatgagccaccaaagcagtggcgcacaacgtgaagcgttatttaatgcgatatgtgcttatgcaacgcaccttgaggatttacctgctattttgccggcggtagaaaaaattgcacaaaaacatgccagtttgaatattcttcctgaacattatcctattgttggagaaaacttattagccaccattgatgaaatgtttaacccgggcaaagaagtgcttgatgcttggggagccgcttaccaagttttggctgatgtctttattaatcgggaagagcaaatttatcaacaaaaagaacaagcatctggaggctggcgaggattacgtcactttaaagttaagcataaagtaaaacaaagtgaggttattaccagctttgaattagagcctgaagatggacaagcggttacaccttaccgtgcaggccaatatttaagtatttatattcgtgatgagaaacttgcaaatcaagaaattcgtcaatattccttaacgcaatcggcaaacaataaaacctatcgtattgcggtgaaacgtgaagacaagggaattttatctaattttcttcatgaccatatccaagaaggagacatcttacaagttgccgcaccagggggcgatttttatttagatatctcatcaacaacgcctgtcacattaatttcagcaggtgtaggcttaactcctatgttagcgatgttgcacactctctcttctcaccaagcacaagtcaattggttacatgcagcggagcatggtggcgtgcatgcttttaaggaagaaatcgcacaagcaggaaagcaaattgaacaatatcaacaagccgtatggtatcgtctccctcgtactgaagatataatcaataaagactatcaatttgaagggttgatggatttaaccgagatacatgaatggctatcaatacctaatatgcagttctatttctgtggtccattaccttttatgcaatctgtcgctaaacaacttattactctcggtattgaaagcgataaacttcattatgagtgctttggccctcatactgttattagccaataa

SEQ ID NO: 307778 - DNA, 1059 bp, Proteus mirabilis; identical to SEQ ID NO: 293761

SEQ ID NO: 307779 - DNA, 480 bp, Proteus mirabilis; identical to SEQ ID NO: 294762

SEQ ID NO: 307780 - DNA, 363 bp, Proteus mirabilis; identical to SEQ ID NO: 297052

SEQ ID NO: 307781 - DNA, 912 bp, Proteus mirabilis
atgacatcccccctcgtacttgcgccgttattacgactaacatttgtgctaggagaacaagctcaacgaaaacaaaccttaaaacatatcagtatgatccttgaactttcagagcataaacaacatgataaacattttactctccctaaaaatagcgatattacttttaaagatgtctgtttggatcatggtgataaaccgatattagagaaaattagttttaatgcccaagcgggtacaacaactgcaattgtaggccacagtggtgcaggaaaatcctcattattaaaactaattccccgtttttatgattgtacttctggccaaataaaaataggtcaatatgatatcaactactggccagaaattgatttactttctcaaataagtgttgtttttcaagatgtatatctatttcatggaactattttagaaaatttactcatagcaaatcctaatgccttatttgaggatattatcaaagcaactaaagcagccaatattcatcatgttattgaaaaactcccagcaggatataatacattaattggtgaacaaggaaataaactttcaggtggagagaaacagcgattatcaattgcaagagcactattaaaaaactctccaatcctacttctcgatgaaattactgccaatgttgatgctgaaaatgaaattttgatctatcgcgcattaaagagtctatgccagaatcggactgttattatgatcactcataacctacatactattattaacgcagataaaattattgtgcttgataatggaaagattattgatacaggtacacacacccatttattaaaccaatgcccaacctatcaaaaattatggaatgattatagtcacactattcattggcaattaatccaggagaataataatgattaa

SEQ ID NO: 307782 - DNA, 405 bp, Proteus mirabilis; identical to SEQ ID NO: 297408

SEQ ID NO: 307783 - DNA, 753 bp, Proteus mirabilis; identical to SEQ ID NO: 293760

SEQ ID NO: 307784 - DNA, 411 bp, Proteus mirabilis; identical to SEQ ID NO: 296836

SEQ ID NO: 307785 - DNA, 531 bp, Proteus mirabilis
gtgtataagagacagcccttagtcacgcctcctttggtaataggtattggattattattattgttaggtcatcaaggacctttaacaggggtttttcctcaattatctcgtgcccttttttctcccttagggattattattgctcaaacatatgttgcaagtgcaatcattatgcgtaatagccttgcggcgtttaaagctattgatcctgcttatattcaaaccgcacagaatttaggattaacaccaacaaaaacgcttattttggttgagatcccactttgttggtctgtattaatcagtggttgtattgtggctttttctcgagcattaggggagtttggggcaacattaatgttggcaggggccactcgattaaaaacagaaaccttaccaatggcaatctatttaaatatagcgagtggtgatttctcgcttgcgataggttgtgctttagtactgatagcaattgcaattactctattgtttgctttacaccgtttacagcgtgataggaaattagcatgttaa

SEQ ID NO: 307786 - DNA, 525 bp, Proteus mirabilis
atgaaaaagtggagtttagcagcactattacctggttttttaacgttaaatagtcaagctgttgctagttcaacagggctacctaattctgaattaacatttgaacctgaagatctcgtgtttgctcctttaaatacagaaacaccgttttatatagcagggcatagaagccatagttctcatcgaagccatcgtagtcatagctctcatcgctcttcatctgggggaggatattatcgaagtaccccttctacacaaagttattctcaaccacaaacaaccaatagaacaacttctaatttatctaataatgatttttcacaagcagttaagaattctaatgttaatcaggaacaaaaaaaacgcctgataatgagggtacaatatgccctatttgaaagacattattttaatgggatcattgatggtattatggggccaacaacacgtcaatctatacgtaactatagaagagatgcaaaattacccgctaatgtattaattctgtctcttatacacatctga

SEQ ID NO: 307787 - DNA, 579 bp, Proteus mirabilis; identical to SEQ ID NO: 297499

SEQ ID NO: 307788 - DNA, 552 bp, Proteus mirabilis; identical to SEQ ID NO: 297205

SEQ ID NO: 307789 - DNA, 474 bp, Proteus mirabilis
ttgatcgccaataagttttcaggttgcagtattaatttgcatgtgccggctgtagtgtcaaatgcgcgtttggcaatggagctacaagcagaacccataatacggcgtaatttctctgctttaaatcaatgtaataaagctttgtttgtagtgggtaatactcaagatgacaatcctttgattacaacaggcgtactcaccacaaatgagatggcacaatatcgcgatttaggtgctgttggtgtcatttgtggtcgattctatgatgcacaaggtaatcctctgctttctgatatcgaccttagaattatgggaattagtcttgcacagttaagacagatcccacagcgtatttttattgctggaggcgttgaaaatgttgctgcaaccataggcgcaataaaagggggatatgctacagatattgtcatcgatgaagtgacggcattagcattattggaattgagtatttaa

SEQ ID NO: 307790 - DNA, 492 bp, Proteus mirabilis
gtggataattccttaactggggaatgcggtaaacaaattaaaaatattgcaccgaagccttgtattagcgtcactattccgcaaatttgcgatcgttattttaattctgtcaatattcggcttgtgccttctttatgcttacaaattaaaaaccgtgttgcaaaattggatatccaaaaaatggttataatctttaatggatatactaaagtcaatagcagtgagcggacattggtttatcgttctacattagaaatttatgccgatgatcctcgtttaggtgatttcctgcaagatactacaccaagcaatgagccgataagtatgattgaaatatcagagcctgcattagaaagtattttggcggatgcattgccaaatatcgaagtgggacaattaggtattcaggtgatggtatttgagaaaaatggcaactgttacttatgtggtgaaaatatgtataccgtttctctacgtttaccttgtgcttaa

SEQ ID NO: 307791 - DNA, 336 bp, Proteus mirabilis; identical to SEQ ID NO: 303591

SEQ ID NO: 307792 - DNA, 399 bp, Proteus mirabilis
atgttaaatctagacttagataaaagtattaattttctaacaagtgataataagcaaaatttcgaatccggtaaacctgttgaagtaaaagcgattaaatcattgcgagaaccaaatacttatttgtttaaaacaccgggcccaggggataccaatttattcatatcagactatggtcgtcgagattatacctttaataaagtcaaaatttacaatgatcctgaaacgggaaaacttcaatacgattccgaactttggcgtataacgcctgatagtggggacattaggaacatacgttttgataaaaaaaattttgaggatacctataatcttagtgtggtcaataattgttggaatacattctgtctcttatacacatctgacgctgccgacgaatag

SEQ ID NO: 307793 - DNA, 288 bp, Proteus mirabilis
atgcaatatgtaatcaaaaaagactctccaaactgggtttgttttgattatattaatagcggaatggatatgaattatcctgatttatctctagggacaatagcagaaggccgtaaagtccgtgtggtttcaatgccagcaacagatgcatgggtaaacgtacgtgatgcaattgaatatacaaataaaagaaatttagagttgaggtactgttttggtagaccaacatttgattacaaagaaagatggtgtaaccgttttcctttacaaagagtaatatcaatatag

SEQ ID NO: 307794 - DNA, 336 bp, Proteus mirabilis
gtgtttattgccggtgtttctatgatgctagcgggtatattaattacactatttgactctctagcaattatttttataggtatgcttattttaactacaggtttttttgctgcccatgcggtagcaagtagttgggttggacgtcgagctaaacgaggacgtgcgcaggcctcttctctttatctatttacctattatgcaggctcgagtattgcgggaacactaggtgggatcttctgggtcaattttggttggcttggtgttggtttgtttattgcttttttaatgttaaccgcactattaatcgcactgcgccttaatcgaatagcacaataa

SEQ ID NO: 307795 - DNA, 231 bp, Proteus mirabilis
gtgaataatacggtctttaccaatatatcatctaactctcctgctaaaggggttggaattaaaatatcaaataataatggtgttattcctgctaatacaccggtcaaattaggcaatgtgacgaataatagtgtgagtttaaggctatctgcttcgtatggtgaaacgggagaaagagtaagagcgggtaatgtaaaatccgttatcggtgtgacctttgtttatgagtag

SEQ ID NO: 307796 - DNA, 168 bp, Proteus mirabilis; identical to SEQ ID NO: 103842

SEQ ID NO: 307797 - DNA, 885 bp, Proteus mirabilis; identical to SEQ ID NO: 303441

SEQ ID NO: 307798 - DNA, 354 bp, Proteus mirabilis
atgtcagatgatagaaaaaaagtaataactcatattcatcctaatgatagcgtagaagataaatatgctgatgaattaataagtagccaatcaagaaacaaaggtgattttttaaggaaatgcttattatctggattagctctacataaagctgatccaagattacctaatatgatatcttgtttgcttgatgataattttgatattaaacagctatcaaacatactctctttaattgataatgacactttacaaaaagtgtcaaaaccgatagaagaaaaaaacacaaagaaagataaagaaataaaaaacaatgacttagataatgcaaaatctaattttctgataagttaa

SEQ ID NO: 307799 - DNA, 999 bp, Proteus mirabilis
atgactatgaaaattttttgtgatgacggttcaacatccactaaattagcttatttccaaaataatgagctagtgaaagtaatttctgatacttcatttaatgcaggaaactggaactttgcatacggtaaaaatatttttaactatgaaatagaaggtaaaaaatattcgttcaatgatgcgatttcagatacaagcgaaacaacaaacattgactatcaatatagtgatgaaaacttagcagccgttcaccatgctttactacaaactggcttgaagccttgtgaaattgagctttttgtaacactcccattatgtgagttttttgatgaaaatcgccaaaaaaataataagaatatagaaagaaagaaaactaatttattaagagaaataaaatatcacaatggtgagagtttcattgatacatttaaaataaaaaatgtgaatgttagccctgaatcattaaccgctttatatgatgtttttgataaagataaggttagcgattttgaaacatcattaattattgacctaggcggtactacgttagattgcggggtcgtcagtggcaacttcaaacagttagtaaacgttattgcagaaccaacgctagggacttcatttgttgcaaatcgagccaaaaaggtagttaaatttgaaacaaatttagggttaagttacgcaactgctaataatttagttgttagtatttttaacggaaatgatgatttaattgattctattactagcggagataataataaaaaagaaaaaatcaagaatgaaataaattcagctttagaggaattaagtaatagagtttctagtaaaattaagaacattgatgaatttcaaagaatttatttaatcggtggcggtgcttattttattcatgaaaaaataaaatcagaatttcgccaattaggaaataaaatatttttagttcctgaatcacaaacggcattagttgaatcaatagctaaaatggtaggtgaataa

SEQ ID NO: 307800 - DNA, 360 bp, Proteus mirabilis
atggaaaaagaaattattccttgcaactcatcactcaatatcattcagtttagtaatccattaggcttatctggtgtgacttactatcgaggtattgataccttagctaatttgacaacgtatattacggagttaaaacacaataaggtaatttccaacttagatacaaacaccatgactactgatggtaagttattaaaagcgtggtattcagaatcaattctaatacatgctgttattgactttcaggaaaaatctgtaattttagatttactccatatacaccaacccagtgattatgaatgtattgaaatgtctgatctagttcacttaatcagaacacatcggaaatacaaataa

SEQ ID NO: 307801 - DNA, 342 bp, Proteus mirabilis
gtggaaagagaacaaatttcaaataaagtaaatacgttttttgattctatttttgtaaattgctatggagttattagtttaagaaaagaaaataactctagctttagctatgaaattgaaattaatgatattgaaacaattaagaaaatagcacttaatagcaagaatgaatatttagttcaatttattgattttaaaggtgattttgattttgctgaattgcatttgctcagtggtgtagataagttaaataatccattggaggatatcatttattattattttgatttgttgagtgctagggattatgaaaaatacgggagtgatatttttttaatgtaa

SEQ ID NO: 307802 - DNA, 294 bp, Proteus mirabilis
atgttagatattgaatattaccgaaatttgtttaatgaattatctgtaagtgaaaaatctaggtgtggtttagtctacgaattatatcaacgtcgtttaagtaacgaaatagaccgttatttaaataaattaaacccaactgataaagataaagtattggagttagcaaaaacagaattcgattatctttcacaaaaagaaatagatatggctgttgataacgactacatggctggattatgtagtcatggattagaccctgattgttgccctcttgggtgtggtgatctttaa

SEQ ID NO: 307803 - DNA, 525 bp, Proteus mirabilis
atgaatattcagcaagcattaaatatttttgggttatctggtgaattatcagaaaaagatatcaaatctgcttataagaaagcctctttaaaatttcatcctgaccgtaatcaaggcgatcaagtagctgctgagatgatgaaagccgttaattgtgcctatgattttttgatgcaaaatttggacaaaattaatgcgtttcagagtgaagaagcaacagcacgttacaactacggagaagaattagaaaacgttttaaaagcattacacgcgctttctggtgtgatttttgaagttactggcaattggatttggatcagcggagaaaccaagaaacataaagaatcactaaaatcaatgggttgtaaatgggctaaccaaaaaaagatgtggttttatagaccagaagaatataaagctactaataaccgtaaatctcatagtatggatgaaattagagccatgtacggaacaacaggagaatacaaagccaagggaagtagacaacttgagagcaggctttaa

SEQ ID NO: 307804 - DNA, 552 bp, Proteus mirabilis
atggataaaaaagcatctttttttgaaaaatatcagccaatttttgtagttgtatgtggttatttagggcagggatggaaagtaaatttacttgatgattgtaaatatcggataaaattaacttcacctaattttaaagggtttaatatttttattaatattgaaaaaaaacgctttaaaatagatggttgtgtaagttctcgtttttaccgtggcgagtattttacttgtactttatcactagatagaaaaatagatgatatagcacgaactattgaaacaaaaattttatcacacgctaaagaagaaataattaaggctagaaatgcattagaagcgcatcagaaagcacaagaagaagataaaatcataaaaggtatgctttcaaggctggttacactcagtaaccaccataacgcttttacaggctttaatactgataataatttgagtggaaatataacaagaaattatgcaggctatggtgttgaagtcaaagggcttaccattgatcaaatgataaaactaacatgcttcattaactctttgtaa

SEQ ID NO: 307805 - DNA, 270 bp, Proteus mirabilis
atgatcactaaagtgataggaaaagggaattttagttattatttaaatttttatgaagatacaaagctgtataagtttgatgtttatgtaaaaataagatctaaaaagaaaaaagaggctctaggaaaaactagagcactgatacttactattacatcaattagcattgaagaaatcgcacttaaactaaactcattacagcatttacaaaaattacatgaacttaatgaacaggtattaaatgagcgaaatatcaccagaagtaattaa

SEQ ID NO: 307806 - DNA, 219 bp, Proteus mirabilis
atgagcgaaatatcaccagaagtaattaaaaaacttagaaaaaaagcgggtttttcgcaacaggaagctgcggaattttttggtatgtcttacagtaattggaaaaggaaagagtgcctatctggtcgagttgtacccattactaaagctgagtatttttcacttttattgttagcaggagagcaccctgatctggttttaactgaaaaaaagaagtaa

SEQ ID NO: 307807 - DNA, 588 bp, Proteus mirabilis
atgagaagaacagagataacgattgatttttatgatattaagaacttgatttcatgggattatgatttttctgataatcccgttaggcgatcattacctgatggtaaaaccacattattttacttagagcgttttttcactgcgagtaaattaaaaaaatatagaagcaaatcacattttgctaaatgtgagctatctaaacaagcattaccaaccatagaagaactactgaataagacgttaaaaacgtatcaagacacaaaaaatttactcgaaaaaaccgtaaagaagctaccctttaaagacattcttaaaaaagagtctaaacagcacgtagaacacataaagattgaaatattaccttgcgcccctgctttgtcttttgttcgtataaatcaactctgcgatgaatctatatcactgctcaaacaaatacacctaagcggctctatcacgacaaaagaatattatcagcagagaaataatatctacaaagaccttaacaagctaaaaaccagtataaaaaaaatcgttgatggtatcggggaaaaagttaaaacgataaaagaaagcgaaaaacagaactaa

SEQ ID NO: 307808 - DNA, 441 bp, Proteus mirabilis
atgactaaaatttttcgcttagccagccctgatgattacacctttaatcataagattggcttatatgaattatcatttgataaacgccctattcagggcgttcgttgtgaaaatcccgcccttggcgcagagcaatacaacactcaaagactaaaaattattcgcgcacaagctaaaaagtggcaacctgatagcttagatttttctgagataatcaaatgggcagtagaacatggaacccctatcgactgccaagctgtttgggagctttaccactgtaaagatgaagaacagtacaacctattggctatacacctttctaggcacataaaatcagcaaatttaagcatgattttattctttacgggcaagcgtcagcggatcttaaaagatatttcattactgcaaaaattagaccaaaaaagggagatagaacaatga

SEQ ID NO: 307809 - DNA, 2010 bp, Proteus mirabilis
atgcaagatcaaaaccttgagtttttagctcacattttgaacaacatttaccctacttacttttacttatgggtagctactttatctatcatttgtatttttactttcactggtcatatagaaaaagcaggtgataaatcagcttcacaattaataacgcaaacggtaagaaaaaaattactggttgcttatcttttaattacagccgtgtttttcttggctatgtatgtaatagcttatcaattcttaggtaaagatattcataatgctaacggctacatggaaatgcttttttcaaaactaaaaggaattgaaatattcagcttcaccacaatactaaatattattgcggttttattacttcctattatcttagttttttttaacagacggtatataaaacctaaaatttcatcatttctaagaaagtatagagtatcacaaacatctgatactttatcagacgtaagaattgagcaagttaaaaataaagcaaaagactttgaacctaaaaaatactataaagaaaatcatgtttttgttgggttggatgaaaaaaacgagcctgtttatctaacagacaaagaatttagcggaactaatataaaaatacttggtgcaactcaaactggtaaaggtgtcacccaaggcgtattattagatcaatcaataagaaaaaattggggaactatatttatagaccaaaaacctgatgattttatttactcaataatggttaatgccgctgctgaaactggtagaaaaataattgtatttgatgctaacgagtttagagggaattcatatgaaccatttttaaacggaaataaaagagatgttattagccgtttgtataaatcattttcaattaatgacggtggaactgatgccgacttttataaaagaaaggctagagcctgtattaataaagtaatggaaaaaaacgtatgggatagaacgttacaaaatctaaaagagataatgacagggaatcaccctagcatttcagatagtgacaatgaatttattagaacctacggagatcctatattggaaagagctagtgaatggttagatctatcatctatgggatactctcaatctattttagatataccgtcaataatagaaaatggtgacattctctatattagggggcatctgaaagatagaacagtaaaagctatatgtaaaaatttactgactgaaatatcacaatcaataataaacatttcaccaaaaaaacattgttatattaatgttgatgaaattagatttttaatttcatctgagatagcagactcattagccacgatattatcaaaaaatgcgaatatgggaatagcatatcaagaaaaagacgacttattaaatattgaggacgaatcacctaatgtttgtcgctctataatgaaaagtacagaaaccaatacaaatatcactttagtttttcaaagtaatagtgaaaccgcaaattgggtagctgaaaattcaggtacgatagcaaaaagcctaaccaaattagaagaagtagatacagacggttttggagccgaaaattggggcggtagaagaatgataggacaagatagcgaatttttaattacagtaaacactatcttatcattacctgcgcgagtggctgttttaaaaagaataggaagtttaagtcaacttttatttacttgctggatcagcattgacaaagagcatgaattacccgtatgtgaaaaagaaatgcctataaagaaagttgaaagaaaaaataaggcttcaaatacaaaaaatgataataattatattgatgaatctgaattattatcattaaaagattccctatcaattgatggtcttttaagtaatgagcaagaacaaaagaaaccgtctatcagtagcgaaacagaacaagaaaaaaacgaattagttgttaatgaaaatactgaaactgatccaaaggtaaaaaggaaagttaagataattactaacccatttggagatgataatgactaa

SEQ ID NO: 307810 - DNA, 714 bp, Proteus mirabilis
atgtcgctaagtcctagagaattagcccaagaaaaaagaaagaaagtagttttgttaattgcaaaatttggcttttctacaagaaagatagtttgtgatcttttaggtactacctatggcactcaatcggttttttttaagaaaatgatatctgataatttaattattcagaataaaagaacgggttttttatctgaaatacttacattatctcaagatggttttgaccttgctaaatattataaccctgattctaaatttacatttaggcgtaaattatcatttcctaacattgttcatgctttatctattcaacaatttctagttaatggtttaaataaattttctgattatcaatcagaaagtgaattaagtgttatgaattttcatagacgacctgatttgatggttatcactcgtgatgataaaaaaatggctattgagatagagcttaatcaaaaaggcgtttctcaaattgaatataatttctttcaacattatagagattggaaattaaatagatttgatagtgtttgttatgttttcgataatgaagttattatgaaaaaatacatttcaatttttagtaaagataaatggaaaactcacgatttctttttgggtaagctaaaggaaacaggcgagtttgaccctgctgaattacaagaaaatggtgttataacatttttgtatatggattcatttaaattttaa

SEQ ID NO: 307811 - DNA, 1050 bp, Proteus mirabilis
atggctattaaagaatacattttcggaaaggttgaagtttttgacgatatagacggttgtgcgtgggatcaagttcatgatgaaatgatgcctatcatgagtctatataaagatgattcaataactgatattaatataaatagatatgatgaaatatggatatataagaatgggattcctcaaaaagctaactgctcgtttggttctgaaagttcgttaaattcgtgggttagtcaaatagccacagtattaaaacaaccatacggtaaaaatgctagttataaagatggggatgtaatagagccaatattagatgcaagatttccagatggttctagaataatggctacgtctcctttaatttccccacagggtactactgtttctttaagaaaagccccgaaagaatttttaggtaaagatgattttttaaaaagtgaaatgttcaatgaggatatgcttgaatatctaattcaaatgatcatggatagaaaaacatttttagttgctggtaacactggttctggtaaaacgtctttattaaggttcttagcttcatatatagataaaaatgagcgagtcattacagcggaagatacacaggaactacatataaatagatattttcctttaggtgtggctttagagtcgccacatagaaatgatattaatagcgacctacctaaattaataacggcaacaatgagggcacaacctgatcgtgtgtgggttggtgaaataagaacagcggaagcaatagccgcattttatttggcttgtacaagtgggactacggggaacgcttcgactattcactcaaaaaccccaattggcgcattcaataaaatgcaatggcttatttccagtcaattaaatgttgattttgatgttgctggaagtttggtgaaaagtgaaattgatgtggttattcaatgccgccgtgactatcgttttggtcgaaaaattaccgatattgttgaagtgaaagacggtgaaccagtaacaatattttcatattcgaccaaagataaatgctttaagaagtattaa

SEQ ID NO: 307812 - DNA, 309 bp, Proteus mirabilis
atggaaaaagtagataacacactaaaaaatgcccgtgtcttttatcgacatagactaaaattcggtatccccgcagaagtttttatgattcttctgtttttgaatgtgtttgcacttattctagccattaagttttttagcatagtctctatcttgtcgttagtggcattttttttagtctgttttgtgccaatgaaatttttatttagagaagatccacaggctcacagagcgtgggctagcggttacttttctaattcaaaagtaggtgtaaatggttataagaaacgcaatgtttctttcttttaa

SEQ ID NO: 307813 - DNA, 342 bp, Proteus mirabilis
atgaagtcagtaataaaaaaagtagtaaaaaaagctaagcactgttggggattggttctaatgtttccagcttggttagctgtcgcagcagatggaacgattaacttaccatctgctaacgagggttttttagacaaaatagttaaatggttccaagatattattaactttattggtggcgctggggcgctgttcatggcgtttattgctggttgtgctgctatcttattatggatttttgcaccgaaagcaggggcggcaatgggctttatcatgcgtgtttgcgtgggtgctattgccttattcaaccttggcttattcattgcttggttacaagcttaa

SEQ ID NO: 307814 - DNA, 2604 bp, Proteus mirabilis
atggcattggcaaaagaatttaatgagaattttaatctggctggtatcgaatccaacaacgatacgcttttcacatataacggaaatgcagtaggggcaatagagcttgtcggatgcgatccaactggtttaaccgaaagtagcaagaaaacgatttctaagttactgggtagtatcattagacttttgccaatcgaagccgtggttactcaatactatattcacgctgaaaacgtgaaaataaaattaaaagaacgtgattcagagcgtagcgagaaacttagtaagactcgtcaagcatttctaaataaagatagaaagctgaatagctcacgtattgtatggtttgttgaaataaaaccatcttatgaactagggaaaattttttctgcttcttttttgcgaaatctatttaatagtattttcgataaagatgcgctttataaagtgaaaaagactttatctaattttgacggtattttattagataaagaagaatttgcaaggcaaagtgatttactcaaagataccttatcaacgttaaaggctcgattagagttcctttctgatggtaatgaaattttaaatcatagtgatgtatttaaacttcataaatttttagccacatttaattatgattatttgactaataattttaatgctaccccttgcgaggagtgggattcctatactgttgatagtgataagctggaaattattaattataaaggtgtagatctattaaaaataaatggcgttaaccctgtttatgttaggttggcgagcattattaaaataggtgatgaatataccccgttatctgcttttgccacaggtgatgaaaaagccgttttagctaaaggtaattatgtgatttatgggcgctacaacccgttaacgggctttaagcgttctatgatgttaactaacaaatctaacgagctggcacggtcacagattagtttaaaagatttgttaactgataatgctggagaagttcaaagagagaaagcagtaaataacaattctatgctaaaacaaatgcaacaagaattggataatattaatttttccgaggaaagattagctatttgtcaatatggtgtcgcggtatataacacggataaagacgagcttttaaaaacgtgtcagaaccttaatcgtcgtttaactatatcaatgcaattagtttgggagtcagtagatttaattaatgcttactacatgattcagccatgctatgcaaaaaataactatcgctcaataccgctaaataatatgcagtatggcgcagcttctttattttataaatcccatactggtgtaaaagaatgggaatcaggtctgaatgaaacagaagaagcattttatattttagaatcagatgatggtgtgccatttttttactctccgaaagttaaggataaattattaacaattggatgcggtgccacacgctcagggaaaacttttttaaagaattgtatagcgtcacattttgctaaatacaatggagtgtatagctgtattgacgttgatgatggttcgataccaatggctaatttctttggtaataaggcatcagcctttacattgagtaaagaatctcaaaaaggatttaatttattcgctactgctcaatctgctgatgataaagtttttattaatcacatgatttcacagttaaaagcaatggcggctcaaaatagtgaaaatagcaactattttactcctgaagaaattgagctattaacagaaaatattagggttttattagagatgaaattctctaaaaataccgaatatttgagtaagccctctctatctgctttagtcgccaaatgtggcgatacgattaaacgtaaactatcacagttcgttagtgatggtataaacgcacatttattcgattgtcaggatgatgcaataggcgtaattgataaggctattgctgtttataatttagccgcagtcaaagacaatgaagatctagctaaattagttcaccgcgagatattttttagaatcgttcgcttgtttgaatcggagcaatacagaactattcctaaaattctggaaatagacgaagcgcaatatactctatctgtcgagggaacggctgatttcgcaattgctaaatcaagaacatggtttaaacatggtggcggtatgtcattttggacgcaaagccctaagcattactctagcttacctgaatggtcaacgcttagaagtgccgccagtgtattcctatttgccgctgatgctaacggggtagtcgatcaatatgttgaaacttttgaaatgcaccccgaagaagctgaaattattaaaaacttaaaaaggcatcagcaaatctatatcaaaataccagagttaaacattgctaaggtcgttaatctattcgttgaagcggaacaatatgcgatctgtacatcacacccgtatgaagcatcagaagctaaaaaagagtggttaaaaatggaaaatggcgaatgtgatgcagacgaagccataagcaatattgttaaagttattggtaaatatcccccaactgttttagaaacagaggaagaacttaaagaggttgattattatgcgtaa

SEQ ID NO: 307815 - DNA, 825 bp, Proteus mirabilis
atgcgtaaattatttttagcatccgcaatatgtttagctttaggggtttcctatcctgcattttcaggggggattcctgttgttgatggtgcatctattattaaccagataaaagggcttaatcaggacattcagaactacgagcaatatttaaaacaaaccatcctaagccaagaggaattggctaatgcgctacaacaatatgatcaaatgttagccgactatcagcaagttatgcgagaagccagagccttacaagggcgtatagaggggatgaatccgcaagagtggctaaatgagttagctaagttggctaatagtcacgatccgctttatggttcgttaggtattcaaaaaaacacaggctataagccttgggatgatgcagtagaaagaaacaggctgttaaatggctatggtatgactgacgaagaatatgagcaaatgttagttgatattccctttagtggcgacgatagaaatagagcacagcaagtatttgaatatcgacaaagaaaggttgccgagggaataactagggatgcttatataatttctttgcaaggaaatttagcagaacaagcaatcaaacttgctcaaatggacgctcgcagaatcgaaaaccaaagcgataataatttaacagcatccgtgcagttcttaactgaacaaaatcagcaattattatatcaaatgcacaatatgcagactcaggcaaccgagcaaatgaaatttagtgatcgattagctgatcactattttaataacatggcgaaatcagaagaaagaagaattcaacaacaagtagagggctggaaagaatga

SEQ ID NO: 307816 - DNA, 486 bp, Proteus mirabilis
atgaaaacaaaattaattactgctattgctattcttgctttttcgtcaatgtcttttgctggttatgttgatgttgatgaaaaaaaggtttcagaaaaaagagaggtattaaaaacaaaactttttaaagaatgccaaagtaaaaaaattattgctaatggtaataaaaatgcctgtcgccaatatgcagatgaacaatcattacagcaaatcccattggtcaggggtagtaatgattatatgcaagctaaatacaataatctaagtaaagatcaagccttagatgaattagctaaattggttaaacttggtgttcaagtaaaaaaagatcaatcaaatatggctaagtgggatggtaagatttatttagttcaattagatacagaatctaattttattctaagtaagtattttgcaggtcaaacagctaatcaaggtttagtttcagccgagcaattattagcaaggaaaggaaaaaatatttaa

SEQ ID NO: 307817 - DNA, 969 bp, Proteus mirabilis
atgtccgaaataaataaaagatatatattgatgttatcaatatttatctttgttgttattccgagcgttagttatgccgcttcggaatcatcaatattacatgctgaatttggttcggaaattaataatgcaattaatgcaatagttaatgattctggtattaaatcttggtcaatggcattggctttgtttattgcctttgttacgttgactttaaatattatcgtgtggataagaaacgctgatttaataccattattaactacgtcagtgttgttaattttatttggaacgctttatttaagctatggaacagtagttgatacggtgtacggtgcttgtgagcaattgggcgatatgatgtatgatgccgccataggcggagcatcaccagacgctatctataactcttttgttaaagcggtttcgttgcctactgttggtatttttgatgccatgcaaatgataggtatttctattttttggtatttaacaactgctattttagccgtggctatttattttgctgaaatctggttagttacaggtttagcattagctaaagttgtaggagttctttttatacctttcgtagtgtctaaatatacgcataatttatttattaaatgggttcaattctttttcttatggggaattgccgcgatattcttaaaggtaacatcaataatttgtcttgtaataatgaaagcgtcattaaatgcagtggctaaaagtcaaggtcttggcgatatcgtaggctcagggtttacagcagataaagcaatgcaatttacggaagataatataagtcttgtatttgctttaatcggtttcactattgtagctgcgattatgatttttgggagctttaaattggctgctcaatgtttaaatggcagtggtacggctggtaatagccttaataatggtgctgtaacaattgctaagaaattagcggtgttgttctaa

SEQ ID NO: 307818 - DNA, 717 bp, Proteus mirabilis
atgttctctaaagatgaagttaataagataaataaaaaaacctttcgggatagagtgggggaaataaagaaagatagaaatgtatttttctttgtcgctatatttttagttgcattggttatttatcaaagtgtttctataaattcgttggtcgaacagacaaagaaaacaaaagaagttatttttgttaaggttgagccaaacggaacttattccgttaaagattttttaccagaagatgaacaggtaatttccacagctttagttaactctttattggatagatatacacgaaaaagatttggtcagcataaagaaacaattgaacaagactacggggaagcgtccacgtttatgtctcaaagtttagctggctcttttattgatgaaaaaggctttaatgcaagaaaaaaaattaaagacgttttatcaaatcctgatgctcaaattattgatattgaagttgttgacttcgaccattatgacgtaattgatggtgtttttgattctcagaaaaagcctgtaattcgttctacattggtttttaaccgaatcattaaagataaaaatggagtctttgttaaaaaagaagcagtgagattaaaagttcaatggtcactgttacctaaatctgtattaggacagcaaagcctagcatggctgaatgtaaaccccgtcggtattgttattattgatcaacaagaagaagcgatttaa

SEQ ID NO: 307819 - DNA, 828 bp, Proteus mirabilis
atgaaaaaatatatcaaaacactaaccacaattgccgttttaatcagtgctgttaacgctcatgcggctggttgtagacaagttcaatggaaagctggggatattgtcaaagttaattccgcgctttacctcggtactcgtattcaattaccagagggaacaagtttagtaacaaaagatcctttttcttctaactctttatggaacgcagcaggggcagcaaatcaggtaacaatacagccgaccagcggagaagccgagggcgctaaatccatgattaccatttttttatctaatggtgaggcgttagatatagaagccaatagagtcagtcaggcagcgaatcagcaatgtgttgttattaatcgttcgggaatgtcgtcaagtgaccgtagggcgttatcttcttatggaaataatcaaaatagctctcaagatgtagctcgtttacaacaacaaatgaatgctatgcaaacggcacatgagttagaaaataaaaaagtggttgcagaagcgttacagcgttacagatattttatttatacccgttataactggagcactggatctggtttctcaggtaaaaatattatttcagatgtctatgacgatggacgatttacgtttatccgcatttctaagcctagtcgtggtttactggctgttaccgcagaggttggcggtgagcctgcaattgttccaactaaatatgatgatgcttaccatatttaccaaatgtcaggcatctatccgaaatttactttaactcttgatggtaaaaaaattgaagtggttagagctgataacggtacaaatggggaggggtga

SEQ ID NO: 307820 - DNA, 1452 bp, Proteus mirabilis
atggacgaaagacaggaaagagttgacgaaaagccagctacccataaaaagaaaacacagctttacctttttttggtagtcgggggtattttcttagttctgttagttaactttatttattcgctatcaacacgtaatagcgaacctaaaagcacagatacaacagaatccgttaatacaaacactagcacagttaaagcccaggatttgaaagggttatttgtcaaagataaacaggacgtaatcacacaaaatagtcagcaagggggaagtaaaccaacgttagttaaaccctcagatcaaataataggaggaacaacagcaaccccaaatactcaacctcaaattactgaacggcaatcaccttatacacgaatgatgccgtcaacaggtaataacttaaaagacaaccagaatagccctgaaaaaatgcgtgaacgctttcagacagaagaaataaacagggctttaagggcgcgttatgatcgtaaaaattttgatgcacagtcatcatctactacgtcaggtaatgcgtatggttcaagagagagttatacagggattactggttcatcaaatgatgaaattattcaggaaataggacaaaaaagacaagctattcaagggcaaattgccgccttgaataaggatattcagcgaaacaaagcggatatgccgaataaattaaatggggctagaggtcaatcaaaagaagctaatagcattgttaataaagcattatcagggggagattttacaggttctaacccaagtgaaactctatcagataatgcaataaataatgttcctaataacgttgttggttatacaaaagataatagttataacgcaaatacagacggcttagtcaaaatgccaataggaacagtcataaatgcaataacagttatgactgctatttctgattatcaaggtggaagtatgaaagccatgataacgaatgatatttatgatgcttctaatactcaaattttagcgcctaaaggctcagaagttattatcagagttgttaaagcatcaggggttaatgaagtaattcaaaatcgtgtagcgtttcttccatcgtggttagttctacctaatggcgataaaattgattttagtaaagcatcaggtttagaccagatggggattcctgctgtaaaaggtgatgaagttgatcgacattttatggctcaattcttcggtgttgccgcttatgctctagttggtactaaaaccagttacgagggttcaggtggtaataatgatcagtcgtttgctggtaattttggttctggtgcaagaagccaagcaggtggattagctcaaaaatacttacaagtagtgcctaccgttgaattatacgcaggtaaaccaattcgtattattcttgaagatgaaatttttgtaaaaccttggggaaatatctatgaagattacactaactaa

SEQ ID NO: 307821 - DNA, 447 bp, Proteus mirabilis
atgaagattacactaactaatattgcattgattgtaagtttgtcaatgctatctatttcatcatttgctaaaaataatgaaatagaagttaagggaaatttccttaaagaaaaacaaacattgcaattaagtaaggctcaacaatatcaaccaaaatttgttgatccactcagtggttatatgcgtactgttttccctaaagaaattgatacagttaggggcgcggttcaatatacattagaaccaacagggtataaattagtatctgaatatcctgcgcctatgtctgcaaatattttattaaatcagcggttgccattatcaattaaagttgtaagaacgatgcctattattgatgttttgcaattattagtaggaacggaaaatacaataatcattgaccctgctcaccgtttaatttcttttgaaaaaggaaatagaaaatga

SEQ ID NO: 307822 - DNA, 192 bp, Proteus mirabilis
atgagaaaaatattattattattaattataacgggtttaatggggtgctctacaactaactttgatagtggcaaagatcacctataccagttaggaaaaacaaacgtagtttaccgtgatttaacaaaaccagaagcggtaggaaacgaagcgcaagtaatagattacaaaccagtaaggctattaccatga

SEQ ID NO: 307823 - DNA, 630 bp, Proteus mirabilis
atgaaagggctaaaactcctattgctaattgctcttatgcccccctctatgggggctttagctaatcagttctatgatgatgaaattagtgatcctcagtggatagcggcaatgcaaagccgctggggaagtaccacgaatttacaggattttaattattatcaacaaattcaaaaagaagcggttgaggaaataaaccaagctatcgttaaaaatagcgagacaacttataaagccaaaactaactttaatgcgagtaaagatattaaagatatagttaataagtatgctgaaaaatacgatatatcccccgatttagttttagctttaattaaacaagagtcaggatttaaaccagatgcaacaagctctaaaggagctaagggattaatgcaattaatggacgttaattctaaacctcacaatattgacccttatgatcctgacgataatgtaaaagttggaacagcattattagctcgattaattaataaatatggcgatattaagttagctttagccgcttataatgcaggagagggggcagtaaaaaaatatggaggaataccgccctataaagaaactgaaaactatgtaaaaaacattatggctatggttgatgaaaattaa

SEQ ID NO: 307824 - DNA, 612 bp, Proteus mirabilis
atgaaagtaaaaattagcgttgttgctttgttactaggggctttttctggtggtgcttttgcgttacctcattatgaaaaccctgatctggacgagttttcaggagatacaaaattagcttgtgaagctatcctttgtttatcatcgagcactagacctagcgaatgtgcatcatcattagctagatattttggtatcaaaaaaaaattctggtcagataccgtaagagctagacggaatttcttaaatatttgtccgtcagctagcgagccacaaatgccagaattgattaattctatctctgaatctgcggaacgttgtacagcggaaagactgaattacgatctgtacgaagaaaaaggtgttgagcggtgttctggtccgaatagtgatcgttggtgtacaacggactattatttcaggataagcccgaacttacctaactattgcaacgcatttattaaccatgagtttactgatgttcaattagagtataaaggctctaaagattggacgctaaaatctcattcatcatcgagttggaaaggtgatagagaaacaaagaaaaaaccagcggggcaatggttcgacaattacacaacaggcgaataa

SEQ ID NO: 307825 - DNA, 270 bp, Proteus mirabilis
atgagccagtattttaatagagtatcgagcaatcacggagcagttgagatcttaacaggctgggatcaggctttgggttatttttttttggtaataggtgttgatctcgatgagccttactattctaatctctacgagccagacggacttaacttaacactagaatactatcagactatcctagataaatttgaaattaacgagatctcactaaaaccagattcagagctaaccaaagcgctactagacgaccaacgaaacagacgatag

SEQ ID NO: 307826 - DNA, 801 bp, Proteus mirabilis
gtgtttttagatataggcggacaacaatttgttgccaaagggaaagtcgaaagagtgaagggctggtctgtattatttgtgaaacatgaagacgatccgccagtaaaagaagaggcagaaaccgggctggaagccggaacagaaacattgccgtcccttcacgaaggtgaattctgtgtggtacaggaggcaaaggttgtacaactggcgacctcaccaccgaaaccgtatacggatggtacattgattgcggccatgaagaatgcgtcctcctttattaccgatccgacattaaaaaaagtcctgaaagagaatgcggggctggggacagaggcaacccgggcagggatcatcaccacgctggaaaacaggaaattgattgtcaggcagaaaaaaacactccgggcgacagacaccggttgtcagctgattgatgccctgccggcagcctgtacagatccgggaatgacggcgttatgggaacaatcactcgagcaggttgcacagggaaatctgtctctggatgtgtttatgcaaaagcaaatcagctggttggcacatctcattaaaaaaggcggggaaatgccgctggcgctggatctgccaccgatgccatcctgcccgtcgtgtcatggaaagatggtcttacgggagagcagtaaaggccgtttctggagttgtcagcgttatccggattgtaaagggagtgtaccattaccggaaaaaatgcagggggttacccgggggatgaataaaagaaagaaggccgtgaagaagagcataacaggactctttacctga

SEQ ID NO: 307827 - DNA, 372 bp, Proteus mirabilis
atgaaagttgagcaatctcaagttactaagttagtaataacggatgttgagcgacatgatcccatccatgtttatcttgaggactacggtgataacgatgcaaatgctgaatacgctaaaaagcaagttatcaaactacgcaaagatgatgaaatagataaacacgaagcaagggaatattgggacttaatcgaagtatcagataatgttaaagatgagtactgcataagttttataggcgaaaaattaacaactttatttgatgatgctttgcatgccgattggcccactattcccaaccctgaatatataagaatggaatcacgattaaacgctgttcgtgaggcattaaagcaaataagtgtgaattaa

SEQ ID NO: 307828 - DNA, 1353 bp, Proteus mirabilis
atgaaactaaaaagaatggtgttgtttatgttttccccttgttttttagctgtgagcgctgctaatgctgggaattgggaaaatacaattaaagaaagctcatttatttctgattctgaacttgagctgactaccattaatatgtggaaatacctaaaaacagaaaaccgttttgataaacaagagcaacgttatagaaaacaagttgctaatgcttgggggcaaaactttcaagctgatttcagatctggctatttaggtggcattcttggattcgatgtttcttattatggcggtattaaattaggagcaagtaaagacttcgcttctcgtgccatattatataatgatgatggtgaagcaaaaggctataacaaaattggtcaacgttttgcaaaagtgagattcgatttagatcctgttttaattaatggtaaagcgggttggtttaccttgaagaatacaggtatttttactaactcacagcgcttatcattaaacagttataacggttattacactaatacggcgatgggtgattggagtttagatttgctgtatctcgacggaaaagttatgcgtcgtgatagcccaaatatcgatagaatgtatttcagtgatggtaatggtgttagacataatattgaccatgttattactgggggagttaactataattccaaaccattaaaagtctattatttctatggtcaggcggatgatgtattccgtcaacacggtttagaaacaaaatataagttaacatcggacgttactctaggtggtgttgtttattaccacgattatggcagtgaaggaaaacgcacattaaccaatgctaatgcaggtaaacgtaactttgataaggatgcatggcactttgctggtactatggaatggcgtattcctgaatcagcgtggaccattcgtacgggtgtgacttataccgatgcgaaaaaagccaatggtgttggtcaatttgcgcgtaacccaattgggaatactcgtggacgctttaactcaccggcttatgcagatattgactatgtgcgtgatggtgaagtgatgggggcattagaagctgcatacaaagttaacaatgagttgtctgttggtgcacgaactaactatagtgaatttagttactctggcgaaagattaaaacaagggcagtttggcttatttagctactggaagccaacggctaatctttctatttctttaagtggcggtattggttggcaccatcaacaagaaaatgattacaccacaccaaaactgtatgatggtcactcacgacgtgctcactcattatcaggctctatgacaacgacatatcgttttaaaatgtaa

SEQ ID NO: 307829 - DNA, 228 bp, Proteus mirabilis
ttgactaagcctgcgacattggaagtaataacaccgactgaggtaaaactgaccattagtgaagggaagtaccatcaagttaaacgtatgtttgctgcggtgggtaatcatgttgtcgcgttacatcgagagcgtatcggtgatatcacattagatgatgctttagcgccaggagaataccgaccgctaacagaagaagaaatcaatagcattcatctacctaaataa

SEQ ID NO: 307830 - DNA, 471 bp, Proteus mirabilis
atgggtgagattaaaatcagtggattgtctgaactcgctcaacgaatgcaagacattgcccgtaaaaccagaaatcaaagtgtgcgtaaggcgatgaatgcaggcgcttcggcgttaaagcaggaaatcaaacatcgggtgcctatccttaaggaaacggtgcctcatcgacgcaaaggcaccatcaagcgcaatattcgttctaaaacgaaagtacagcgcaatgggcaagtcaaaacacgtatttgggtaaaatcattatcgggtaaaaaggtgtctgcctttaaacaagcaacggggaaaagtgcagcattgaacccaaatgatccgttttattggtggtttgtcgagtttggtaccgccaagatgcccgcacaaccgtttatgcgccccagctttgaagcaaaaaaggaagcaacggctaaagtgattgttcaaacactcaaagaggatattgaaaaagcaaggtag

SEQ ID NO: 307831 - DNA, 342 bp, Proteus mirabilis
atgatacagcaattaaaagagaccctttcaccgcttgtcgatggaagggttttttttcaggtattacccgaaggcaaagggcagtatcccgccatagtgatccagtttgccagcatcacgcctaacagtgcgctggaggatacggatttagacaactaccgcgtgcaacttgatgtgtatgcgccccagccacaacctctgatggtcttgcgtaaaaaaattgaggctcagattgttgcggcaatcccattcgcacaacgggtgaatgcggtctttgggtatgaagcggatgtcaaattgcatcggcttgttcttgaattaatgatttcatcagataaataa

SEQ ID NO: 307832 - DNA, 456 bp, Proteus mirabilis; identical to SEQ ID NO: 298194

SEQ ID NO: 307833 - DNA, 2496 bp, Proteus mirabilis
atgcgtaagagtattatcgctttatcaatattaggtattattttttcgaatacgattaatgctaatgaaataaaaagaattaaagtgggcggatatattattcctccggcatttgttaatgctttagaggaaggtatgtcggtgcccgttttcttacgacttaatgatgcaaataaacaaaaccaaagtgaaaagaaaattgcagatgcgattattgttatcgataatgataaaataaaactatcaagtattcaattaatcgaaaataatcaaggcgcaacactaaatcagttattagttgataaaattgaaaataaaaaaaatgctatctttaatgaaaataatagtataactattgatagtaatgctgctcttcaattaaatgtctcttcatttaatttatcattagatgttgataagtcagcttttgcacccaaagaacatgctagacaatccatattaggaaattcatctgttaattcattttctgctgtggccaactatgatttgggcgtctttcaaagtcgtgttaaaaacgcccaagattcatccagtagctactttaatttagacacattattagctaaagctgaacaccattttaatattaatgcatctgcctacagtataggtaaatccaattccaatattgaactctatagagcaatgtatgaacgtgattttaatggattgcgttttgctatcgggttaatgagcacttggaatttacagtccttagccagcttaacagtattgagtagcagtaaaatttatgcagcatcaatcgggaacaattcatcaagtagagtggtgaataaacagcaatcattaactccgatttatgcttttttaaatagtccaggtgaagttcgtatttatcgccaaggtaaattattaaatattcaaaatttcccgatgggtaattttgaagttgataccagcatgttgccttatggtatttatgaagtaacgattgaaaccgttattgatggcaaggtagtgacaacacaacatcaaaccattaataagtcttttggcaccgctaacggtaattttgaccaattaaattgggaaatttatggtggctatattgattttgataaacgtcattatatcaaagagggtggcgcttataaccaaactcccgaaaaaagttatttaatcggtagctcttttgcttataactttcctctgttatccggtattcgttttcaaatgtctaactatggatttgataaatttattgtacaggagacgaatatcagtgtagcggtaaataactatctttctattgcttggcaaggaatgttagagaatcatggtagtcaccgtaatattagtacgctttctattaatatcccagaaggctatggttcattatgggcatctaaagagaaaactatcgtaagaggtgatttaccgctatatgaggctgacagttactcttatggaggaactattaatttcgataagataatggatagaacgggttcatttactatcagcaataccaaagataagcgagttggtagtgattctattaattatgaatatgcaaatacattattttcgggacgttatggcacggtaggattaagagctggggttcagcgttatcattatgataatcaaaatagcactaatgaaaaatttattaatcttgatttctctttacctctttcaacgtggttaagtactgggatctcttcaaccaatggcaatgtaaaagccaatatttatgtgaataagaattttgaaaactccgtgatcactaatgcgggggtttctgtttctaagttagtgcatgataaagataatggtgaatctgacttctcaactctaggttacgcttcttatgatacgaagtataactctggtacggtgaccattaatcgccctgataataaacgactcaatggtaatttaacttctcgtggctctatagcttatagtgaagggatgatcacacccagtggtcaacaaggtaaatctggcattattatcaattcagacattaaaggtagtggcagtatgctcgctaaagttaacgggcaaaattacccgattagtggaaaaaatacctttattccattatctccttattcagattatgacatccaattaatgaatgatggcaaatcgaaagacagctttgacattatttctggccgaaataaatccgtcacattgtatccaggaaatattgccttttatcaaccggaagtgaggcaattagtcacggttttcggacgtctgaaatcccctaatggtgaacttttaaaatatgcttcaattcgaaatcatattggtcgaactaaaacagatcaaaatggtgagttttcaatggatgtagatgtccgttatccggtgatctcgttactacaagaagatcagcaaacaatctgtgaagcagacttagatcttaaaggggcacaaggagcaatgtgggttggagaggtaacttgtcaacctcagtctagtttcgtaaaaagataa

SEQ ID NO: 307834 - DNA, 1197 bp, Proteus mirabilis
atgaataaatcaattattatcatactgcttgtcacagtattagatgccattggtattggccttatcatgccagtactaccaacactattaaacgagtttgtgagcgaaaacagactcgccaatcattacggtatattattagcactctatgcgacgatgcaggtgatcttcgcacctattttaggaaaattatcagataaatatggcagaaaacctattttattattttcgctattgggtgcggcattagattacctattaatggcttgctctacctcattatggatgctctacattggacgcattattgcgggtataacaggagccactggtgcagtatgcgcatcagcaatgactgatgttactcatcctcatgaaagaacacgttatttcggttttttgggtggtgcatttggtgtgggtttaattattggccccatgttagggggattactcggtgagatcagcgcccatacgccatttatctttgcggctatttctcattcgttattatttatattttcattactttgtttccaagaaactcaaaccacaaaaatttcgactgaaatatccgcattaaatcaggatacagcgcctcactctgccactggttttattaaaaagagtctctttttttggcttattgcctattttattattcaactaatagggcaaattccggccactatttgggtgctattcacacaagttcgtttcgcttggcacactactgaagtaggtttatctcttgcatttcttggtgtattacatattttttttcaagcggttctcgcaggaaaactggcgcaaaaatggggagaacgcaacacggttatcattagcatgtcaattgatgcatttggttgcttattattagcctggataagccatgtttgggttatgctccccgctttaatctgtttagctgcgggaggaatgggacaacctgctttacaaggatatttatcaaaatctgttgatcatcatgttcaaggacaattacaaggaacgttagtcagtctaacgaatataactgggattgtcgacccgttactcttctcttttatttatagttacagcgttgaatattgggatggcttattgtggtttattggtgcaatgctttacagtgggttacttgtagccagttattttaaacagaaatcaccaatattaaaaaaatttccctcataa

SEQ ID NO: 307835 - DNA, 807 bp, Proteus mirabilis
atgaatggactaattgttattgatggtgttcaaattcgtcgagatatcgcggggcgctattgtttaaatgaccttcatcgagtctcaggtggtgaaaaacggcatcaaccatcgaattggagtgctttaactcaaactaaagagttggttgatgaaatttcaaccgctcctgagatcacaggagcggttcccattgtgaccattgttggtgggcttaaccaaggaacatatgtttgcaaagaattagtgtatgcctatgcaatgtggataagcccatcatttcatttaaaagtgatccgtacttttgatgctttgataacacagcaacacggcgaaaagttagccgataaagttcaagctggagtcatattgcttgaatcgatggctaagagcctgaatttctcaaactcttcaaaattaggggcgtatcaaaaattacaagtcatggcaggcttacccgaattagcccctgtgtatgcgattgatgcgccaagcggatcaatggatggttcaagtcgtccaacagtagctttatcaacactgattagaaaacatcaattacctatttcagcccagcaagcttataaacgattagccgatcttggcattgttgagcgcttatcacgcccaagtacgaaaaccgccaacaaaatgaaagagttttggtctgtgactgcccgaggctgccagtttgggaagaacatgaccagtcctaataatcctcgtgaaactcaaccccatttctttgaaagtaaaacggatgaattgatccgtatggtgatgctgaataaacaggtgagtgcatga

SEQ ID NO: 307836 - DNA, 531 bp, Proteus mirabilis
ttgaatattaatttagataatatttctgttattcgctttgaaggcattcaggtgcggattattaaaattaataatgaaccgtggtttattgctgcggatatctgtaaagctttagaaattaaaaacgtaacaaatgcgattaaaacattagacggtgatgagaataccctatgttcaataaagggtattaaatccagtgcaggacttcccctgtttaaccttgtggctgaatctggtttttataagctaattactcgtagccgtaaagccactaaggaagggacttttgcacaccgttttgctaactgggtatttcgtgatgtcattccatctattcgtagaaagggagcttatggggttccttttggcgaattaaatgacttaaccagaaggcaaaaacaatacaaagaaaaatcatcacaactaggtcgtgatttacaagcttgtagggaagaaaaagcaagtttacagcgtgaagaaatagcgttgtggcataagcatcaatctgattggattgaggagtgttactga

SEQ ID NO: 307837 - DNA, 423 bp, Proteus mirabilis
atgtcaaaagagataagcgaattacagtttagtcttcactatgcctcagaaacagacagtgaaaagaatacctccgtcattttaacggcgaatatccatacggctgatagtgaaactcaacaactcacacaactaatttgcacgacatctccctcaggtaaaaagcaatatcgaatcggtacacaaaaaattaatgatgcaggcgatccattgctggtggcgattgaatcctattggcgcaaaaacacacaagagagttgtgtttatttgttagagaaagcgaagcaatttattcagggacacttacaacaaacgaatacatggatatccatgtatggtctcgtgattgtttctaatgcgtcacttgaagagcagttgcctgaaggtttattaaaggcacttaaagtatcaatacccgcctaa

SEQ ID NO: 307838 - DNA, 1974 bp, Proteus mirabilis
atggatggattagtttttacctgtcaatttaaaggaattcctgaagaaacattcactgtgacagaatttcaactgactgagcatttatctgagttatttacactttctttaactgcggtaagttcattaccgtctatctgttttgatgatatgttggggtttgcttgttccttaacggttacgcgcaatggtaaacctattcgtactgtacgtgggctattagctagtgcggagcaacaaaatacagatggtaatcaaacgtggtatcactttattattcgacctgaaatttgggtcatgtctttagggcaaaacagtcgaatttttcgacaaataacggtgcctgacttacttcagcaattattatttgagtctcatattaaagcggattgcaaactctatgctgaggatgcttatcctaagcgtgattatataacacaaaagcgtgaatcagattatcagtttttttgccgtttagctgcagaagagggaataagcttttggtttgaagatgcaggaattgagccacggatgttttacagcgattctcacttaggtatgacggcagatattgacttaatctacaacccacaatatgaaacagatactagagatcatactgcatatcattggcgttatagagagtcactgctttcagataaaattctttacaaagattataattctaaacgtccttcttatccccttgaaagtaaaatagaaggggaaatacataatcagcatccatattatgaaagttatgggcgttttcagacgcaagatgatgcggatcgttataccaaaattcgaatggaagagatacaacaacaccgttgtgtcggcaatgcattaactaattgttttgctttgatgccagggaaaattttttcgttatcttctcacccatgctcaaatatgaatcgccgttggcaagtcattgctattactcatcacggcactcaacccttagctgataatagggaagggcaagggacaacattatcgaataatttaacctttattcctgataatttaaattggcgcccgccttttattcataaaccaacagctgatggcgatgaattagccacagtagttggccccgaaggtgaagaaatctataccaatgaagaaggggctgtacaagtttattttcattgggatcgcatgcgagaaccagaattaggaagctcatgttgggttcgggtagcgcagggatggaatggtaacggttatggctttatggcaatacctaggattggacaagaagtgcttatcagttatctaaatggagatatagatagacctataatttcaggctgtacatataatggacgcaatactccgccactaaacctaccttatgagatgacgcgtactacgtttaaaacaaaaacgcataaaggagaagggtttaacgagttacgctttgatgataaagcaggccgagaagaaatctatcttcatgcacaacacgatatgaatgctcatattgaacataacgcacatttccatattcagcatgatgcaaaaaaacggattaataatgatcaatttaccgaaatcgcaggtaatgatcactttattttaaaaggctcacaaaaaaatcatatcactggaaatgtatcattacatattgaaggtgatgaaaagacgaaagtaaatggaaatgcggtgcatgaaagcactctgcaaacttattttgtgagtggcggtaaaattgtgcttgatgcggggacagaaatcacccttaaagtgggagagagttttatacggatcactcccaatatgatatttacttcgaataatttggtcgtcggtggtggtagtgcaggaagtgggacttctatcgatttggagctaccacaaggcgtccctcctttagagttatctccgtatcctgtaaaaaaatactgtgcagtagcagcacagcactcagggggaataattataaaaccaaatgaggatgaataa

SEQ ID NO: 307839 - DNA, 900 bp, Proteus mirabilis
atgaatactaaaataaaagtcgctattgtgggctatggcaatattgggcgctttgcactagatgcagtacttgcagcacctgattttgagttagtgggggtggttcgccgtgatagtcaaaatattccagatgaactgcgaaatataacagtaacaaatgatattaaaagcttaggtaaggtggatgttgctttattatgttcaccaacgagagccattaaagatttggctaaatcgatattgagcttaggtattaataccgttgatagttttgatgtccacagtgatatcgttgcattaaaaacagaactggatgaggtggcgaaaaagcataaccgtgttgcagtgatttcagcgggttgggatccgggttcagactctattattcgtaccttaatgttagctatggcacctaaaggtattacctacactaattttggtcccggtatgagtatggggcatagtgttgccgctaaagctattgatggtgtaagagatgcgctatcaatgactattccattgggcactggtgtacatcggcgtatggtttatgttgaattagaaacgggtgctaactttgcacaggttgagcaagccattaaggccgacagctatttctcatctgatgagacgcatattaaacaagttgatagtgttgatagcttaaaagatgttggtcacggagtacaaatgacccacaaaggagtgtcaggcaaaacacacaatcaattatttgaatatgctatgcatattaataatccagcattaacatctcaatttatggtttctgcagccagagcaagtatgaaacaacaagcgggtgcctatactgtgattgaaattccccccgttgattttttagcaggggatttaactacattaatcgcaaaactggtgtaa

SEQ ID NO: 307840 - DNA, 1854 bp, Proteus mirabilis
ttggatacagagataaaaaataaaaatgatgcaaagtctactgttatcgaaaagtactctaaagttatttttaaaaaaactatcaatgatcggcaatcgttagattattttctagatagagctaaacgagtaaataatttttatcaaaaaatgagggaaacttcattaggaattcaaaaatatgagctggtacaacttacagagagactggagttgttacttaatagtgaaggaactcaatatacagagattattgaaccagaggtttatggcctatctgacgaaatgctgactctacttcaaagttcgttgacagcatcgtccgatacaccattttcagccattattcagcagttaggtaacgctgattgggttcatagtggaacaggttatattaaagataatatttgtccattttgccaacaaaaatttgattctcagcatcttcttcatgaattgacactcatgtttgataaatcttatgaagatgctctggcaacgcttacccacagtcagacagtcatttcccatgaattagacttattggagtcattccatgagcatttacgacaacaccctgtagttagtgatgatcaccaagtttttagtattattaaatctctgcaacaaactttacgtaataatctacaatcactcagacaaaagctactacagccttcgcaatccatacaacctgacgttattacagatatacgtcagcatttgaaccagatactggtaactttaaatagtaacattagagacaataatcagctggcagccaattttagtcaggagcgagctcgcttggcggcagattcctttgcatatcttagagaagtgagtgatccttatttgcgtcaatgtgatcaggaattagcagaaatacaacaacaattgcaagctgagataaatcaagttgatttattgagagatgaagagcgagcactttcggtcgaaactactcatcttatagggcaattatcagttatacagcctacaattgataacattaattataatctgacacaattagggatcaatgatttcaatattatttgtcatgatgagagcttgaaactatatcgcttacatagacaaaaccagccagatgattctgaggtctttaaatctttgagtgaaggcgaaaaaacaatcatatctcttctctatttcctagaatcatgcattggtcacgtacctgatagccagacaatacaacctaaactgattgttattgacgatcctatttccagcctgtcacataactatatttatgaagttgcttcgatgataaaacataaattaattttaccgaagattgcgcaacacattgttatattgacgcataatatatttttctttcaagagattctactttcagtttataaacgactggctcccgaacgtacaacaccaaaggggtgtgcactttatcgcatcattaaaggagaatatagtgattgtatcccattatcgatgcacgacatgctgaatgagtatcaggctttatggcaaaccatacgggatgtccgcgatggaagaagtttaccggtagtattacctaatacaatgcgaaatattcttgagtactatttcagtttttcttgcaaacaggaaaaactggataaagcgctaaataagctagcagttgaatattcagcaggggaatatgactcattttatcgagcaattaaccgtcattcccattctgatggcagaaatatcatggctacaggagtgattaatgtagaaatgtatttccgtttatttcagaaaatttttgaagaaacgaaggattctgatcattacaacacgatgatggggattactgttgagcaaacagaaggttga

SEQ ID NO: 307841 - DNA, 276 bp, Proteus mirabilis
atgattgaacgattatccccttggaatttaggggcaacgctgtatatgcccgcaacacgaaccgatatcgccgcaacaattattgatcaaaaaattgatggattacgttcattaattatttgtttagaagatgccgtcagtgatactgatattccacaagcattacaaaatctagcaacattattaaccacattatcagactataaaaagcatcatgattgtactgaatggccgttgctatttatacgcccccgccatacagaaatggcgcaatga

SEQ ID NO: 307842 - DNA, 960 bp, Proteus mirabilis
atgaatggaaaatcaaataatagtttaataaataatgatagtaataaacaaatagctaaaccaataattccgccaccatctgctaaccctactttaagttcacaaatggagacaggagatggcaatgttgctttagatttagttgtggtaatagatacaagtggctcaatggctgatgaatcttctgatttaagtcaacaaatagatgatgctgttcaaaaggcattaggacgttgcccatcaagtttaagagtcacttttttaggaatagaaggtacgtgggataatactaagttcgatcgctcagtgactgactatttaatgacacaaggtgtatctgctcacaaattacaagcaagagcgccatttaaagaggctgatggacgagatcatgctggaaataaagaagatttatgccgagccgtcattgatgtgtgtaaatatttcgattggcgagatggcgctcgtcgtgcaatttttgtcttaggtgatgaaggtatggaaggtggcggaggtgtattaacacaagccgctgtgcttaaaaacaatgaggcaatagtggttgctagaagcgaaaaagtaaaagtatatacttatcagggaacgcctaatgatgatccctctaatgtggatcgctttcctactattgctgatagagataacatcacgaaagagtatgtgcgcttagcgcagatgacgggaggacgctcttatatatacacaacaggtatcgctaatttttctttagttctgcaagaaattctatgtgacagtttaacattacctaaacttcctgatctgaataaagataattcaacgtgtcgtcatgtttgtgaagagctctctactattatatcaacagttaatacccttgcagaaataatgcataaagcgattgattcatgttgtaaagatgattggggcacacgcgaagtgtttaagcccaattgtgattgttaa

SEQ ID NO: 307843 - DNA, 1674 bp, Proteus mirabilis
atgaagaaatcgcttgtcgctgttggtgttattgttgcactaggtgttgtttggaccggtgcatcatggtacatgggcagtaaaattgaaagccgcttacaggaagaaaccaaacgcactaacgttcaattagcgcaacttgctaaagaaagccaattaggtgcggatattaaacttgaaattcgtgactataagaaaggcgtctttacttctactgctgatcttgcggttgtgatttcagagcatgccaaatcagatgaagataaaaaagtagaagaagtgctctttaagacggatattgaccatgggccattccctctttctgatattgctcaatttaatctagctcctaagttagcagcaatgaataatactttagtgaataatgagaccactaaagatctatttaagttgaccaaagagccatcatttattgatatgcactcttctttatcgtttgatggcagtgtatcgggtaaagttaacataaatcctattaattacagcaaagaaggtagccagttaacaacatctgcgtttcagattgatttttcttccgataaaaatgcaacaaacatctcaacagcagtaaaaggtgatgaagtcattgttaagaaaggtaatgatgaaacctttacgctgaaaaatattgcaggctctgtcgaaggaactaaagttaaagacgatcaatatctatttgatacacaaacactgaactttggcgatattacctttacgagccaagataagtcatctaatttcactttaaaagatacttctcttgctactaagagccaaattaaagataaattattctttatcactcaagattatagttttaaatctcttaatgttggtggttttgattttggtgcgggtaaatttgcttactcaattgataaagcagacccagatgcgatgttgctattaacaaaagtttataacagcaccttcttaccttggaatcaaaataaatacgataattcagcgatgattgagcaagctgtacgtgatgttttggaaaaaggtttagtattccgtatcgatgaagcatcgcttaccaatagcagtggcgcaagcaagctaaactttaagttagatttaaatgcgttcaatgctgatgcactgaaaaaagaagacaaggcgccttcagttctgtttaatgaattgtttaataatatcgattttaatatcgatctttctgtaccaatgctaacggagttccgtagtaccacacaataccttgatgttatgcgttattctgaaaaaggcttaacagacgaagataaagctgaaattcagaaaacaaccgctaacgacatggcacagttaaaaactgaattacagcaaaatatcaatcaaatttctcaagacgagaaagatgctctgccattgatgctgttatcacaagacggtaataaactgtctttaaacctgaactatgctgctgataaatttactatgaacggtaaaacttacagctttgatgattttatggaagtaacacaagcccctcaaatgttaggtttagcggcgatgttattcggtgcgggtgcttcttcttatgattatgatgactctgattatcctgaatattcagaagagccagatcaaaatgatgcaatagaagagccacaaattgagatcccagcagcacctgctgaaaacaattaa

SEQ ID NO: 307844 - DNA, 138 bp, Proteus mirabilis; identical to SEQ ID NO: 306682

SEQ ID NO: 307845 - DNA, 399 bp, Proteus mirabilis
atgaaacaacccaattggacacttaaattatctgaaaccataagggcggcgatgagtcgccctttttcatggggtgaatttgattgttgtatttttgcctctgaatgtattgacgcacaatgcggtttctcgccaataaagccttatctcaatcactataaaactaaagctgaagccttcaatcttattaagtctaaatttggctccttagagaaagccgtttcacgctatttcaaatccattgagattgagcgcgttcagcgtggcgacctcgtactgtttaaaggtgaggatggtgacagtctagccgtggtctgggcggggcattattggggcgtaaccccacaaggcgtgaagccggtgcagattaacccaatcaaagcgtggagagtggaataa

SEQ ID NO: 307846 - DNA, 753 bp, Proteus mirabilis; identical to SEQ ID NO: 293760

SEQ ID NO: 307847 - DNA, 864 bp, Proteus mirabilis
gtgcaaaatgctggcttattgattgactgtaaactcgtggcacaaggtaaaaaaagtgatattttatcagactcagtaattgcgcaattatctcacagtgaaacacttgaaaatctgatcttacccgccacagactccgttgatgcagttcctaccttatcaccaacgctttcccctattatacttaaggatggcgtggtcagttataatgataaacctgtgctccatcacttaacctgggaagttaaaccacaacaacattggcaaatattaggtcctaatggcgcaggaaaatcgaccttattaagcttaatcacaggagatcatcctcagggctatagcaatgatttaactctatttggtcgtaaaagaggcagtggtgaaaccatttgggagatcaaacgccatattggttatgttagtaatgccttacatcaaagctatcgcgtctcttcaagtgtgaaaaatgtgattatttctggttttcatgactctattggtatttatcaagccgttaccgataaacagcaaaaattagcggatgaatggctaacactaattggtttaactgcactcgctaaccatccttttcactcactttcatggggacaacagcgtctagtattaattgtaagagcattggttaaacacccgacattattgatcctcgatgaaccactacaaggattagatacaaccaatagactattagtacagcgctttattgatatcatgataagccatagcaatactcaactactgtttgtcagtcatcatcaagaagatgcacctcactgtattacccatcgactgatttttattaaagaaggagatatctatcgttaccaacaacaaccctgttaa

SEQ ID NO: 307848 - DNA, 501 bp, Proteus mirabilis; identical to SEQ ID NO: 302519

SEQ ID NO: 307849 - DNA, 804 bp, Proteus mirabilis
atggataatcagataatggctgaagaatatgccatttcacaagataaacagcgtgaaattacgaaattatgtattcaaacggcgctattgttgttacaacatggtgctgaaagtatgttggttgaacagctctcaacgcgacttgggctggctttaggcgttcatcaagttgaaacggctatttcagccaatgcggtggtattaacgacaatagttaatggccattgccaaacctcaacacgaaaaattgttgatcgtggtatcaatatgcatgttgttactgaagttcagcacattgttattttagttgagcatcatctcgcggatattgatgaagcaaggaaacgttttgaacatatcaaaccactacgttatccacgttggataattattgttatggttgcactttcttgtggatgtttttccaaattgaatggcggtgattgggatggctttttagtctctgctttggggggaggaatgggaatgtgggttcgtcagctcctcactcatcgtcaagtaaatcctttaatcaacttttgtatcacggcatttgttgcgacatcagtatcaggtttattgctaaaactcccttattttcaagttactgccactatatcaatggccgcgagcgttctattattagttcctggatttcctttaattaatgctgttgctgatatgtttaaaggtcatgttaatacaggactcgcacgctgggcgatggcgacgatgttaacacttgctacctgcttaggagttattttagcgatggcagtatgggagttaagagattgggcataa

SEQ ID NO: 307850 - DNA, 1497 bp, Proteus mirabilis; identical to SEQ ID NO: 298395

SEQ ID NO: 307851 - DNA, 1248 bp, Proteus mirabilis
ttggttaggaagtttactagagatcttaaagctgaattaaataaactagagtccggtttatatgtttcagtatatcaatctgctggaaaatcaattagaagaattggtaaggttgatgctgaatacgaaagcaaagacttcattccgaactcagtattccatttgccggagaccattaatcgagttattaaatcaataaggaaagtaaaagatgggagagcatacattgttattgatgcaataagaaatccctatgaagctaagttttttaaagaccgttatgcagcgtttcatttagtatcaattaatgcacctgatgaacatagaacaagatatttgcaaaaattgcataaattttcagccgagcagatcaaaaaaattgacgatgaagaatcaggtaaaggagacagcgaatataagcatttaactaatccaaatgtaaaaaaatgtatagagatatctgatatacatttatttaatccaaaaaatgaatatgataataacaatgtattaaaggcacaaattgcatggtatattgcattaatgcaacatccagggttaatttctcctacatcaatggaaagggtcatgcaagttgcatatacagtaaaattaaactctggttgtatttcaaggcaggtaggtgcagttgttactgacaatgataattcaataaaatcagttggatggaatgatgtggctaaagggcagatcccttgtgcgatgaggtcacttgatggattaataaatgattttcattcagaaacatacagccattatgaaaggaataatgaaaaatttagagagaaggcgcaagaattttatgaaacgtttaaaccagtaattcaggagtcaagttcttttaaaggtagaaatatttcatattgttttaaggatatacataatagtatagataataagagcaaccaagtacacactcgtgcgctgcatgcagaagagaatgctttcttgcaattagcaaaatatggtggaagcggtattgttggtggtaaattatatactactgcgagcccatgtgaattatgtgcaaaaaaagcatatcagcttggtatttcagaggtcatttttatagacccttatcctgggataacgcaggatcatattattaatatcggatatatgcctcctaaattaatacagtttagaggtgctattggtaaggcatatcatcgactttatgagcagattatacctataaaggatgagttggattatatattaaaatag

SEQ ID NO: 307852 - DNA, 306 bp, Proteus mirabilis; identical to SEQ ID NO: 297209

SEQ ID NO: 307853 - DNA, 879 bp, Proteus mirabilis
atgatgaggattgccttattcctgttaacaaacttagctgtcatgtttgtgttcgggatcatcttatctttaacaggtattcaaggccgcagtgttcagggtttaatgatcatggctggcctatttggttttggtggtgcatttgtttctttacttatgtcaaaatggatggcattacgatccgttggtggtcaagtgattgaaaatccaacctctgaagtagaacgttggttacttgatactgtaagacgtcagtctgagcaagtggggattaaaatgcctcaagttgcaatctacgatgcaccagatattaatgcgtttgcaacaggagctcgtcgtgatgcttcgctggtggcggtgagtaccggattattagccagtatgagccgtgacgaagcggaagctgttattgcacacgaaattagccatgttgccaacggtgatatggtaacgatgaccttgttacaaggtgttgtgaatactttcgtgatctttatctcccgtatcattgctcaatttgtggcgaattttatttcgagcgatgaagagagtgaaaacagtaacggaaacccatgggtatacatgggcgtttctatggtgcttgaaatagtctttggcattttggcaagtatcattacgatgtggttctctcgctaccgtgaattccatgcggatgcaggctctgcaaaactggttggccgtgagaagatgatagcggcattacaacgcttaaaaaccagctatgagccacaagaagagagcagtatgatggctttctgtattaatggccgtaataagtcatttagtgagttatttttatcacacccaccattagataaacgtattgaagcactacgtagtggcgaatatctcaagtaa

SEQ ID NO: 307854 - DNA, 906 bp, Proteus mirabilis; identical to SEQ ID NO: 306392

SEQ ID NO: 307855 - DNA, 1158 bp, Proteus mirabilis
atgaatcgtcgttcatttttaacatcatcaagcttagtgatcgggggactttcattaagttcgtttgttagcgctgcctatgccgcagaaacttcaaaccctaaacagctatttaatgcagaaaatcctttactgttaaactttaatgaaaactcgctaggcatgtcatccaatgccaaacaggcgattattgatgcacttccccatgcttttcgctatccagatgatgcgcgaagcgcactgatcagtgcattaggtgaagaatttaagctatcagacaaacacatcactctaggtaatggctcctctgaaaccatacaagcagccgtacaatatgtggctaataaagcgcaaaaagcaggtaaagcggcacaactaattgtgcctgatccaacgtttaattatgccgaactttatgctgaacctttaggtgttaatatcgtaaaagtgccggttgataacacattggcttttgatttaaccgccatgcagaaaaaagcacaagcatttgatggtattagcatggtatatctgtgcaatcctaataacccaaccgcaatgctgacaccaacagcggcattaacaaattggatcacctcagcaaaagaaaatgtcttttttattattgatgaagcttacgctgaatttgtgacaacacctgaatttaccagtgcgatagcattagttgctcaaggttataaaaacttgattgttacccgtacattttcaaaaatttatgcattagctggattaagggtaggctatggtgtggcagtccctgaggtaattagtgaagtagatagtttcgtttctattgataataccaatactgccggtgctgttagcgcattagcctcgttaaaagatcacgcttttgtggcatatagtcgcaagtcaattgatgtatcacgacaaatggtggttgatactttaaacgccttaaatatcgagtatgcaccttctcacgccaactttatttttcataaagtcaaaggtgatgtgaaaatttatcaagagagaatgaaagcggcaaatattatggtaggacgtgagtttcctcccgcattaggttggagccgtttaaccttaggaacccctgaggagatgagttattttgtcgcgacgttaaaagagtttagaactaaaggatggatataa

SEQ ID NO: 307856 - DNA, 672 bp, Proteus mirabilis
atgttaacacgcttgtttgttacggggacagataccaacataggtaaaactgttgtcacccgagcacttcttcagtcaataaatcgtggcgggacaacagcagtgggctttaagcctatcgcaaccgaattacatgaaacggttgagggtaatcgtaatcgtgatgctcagattattcataattcctcacctattgacgctcgctacgacgaaattaaccctattttgctagaaaattgttatgtaagtgaaaatgcaatagacttccatcaaatttcaagtgaactaaataatttgggccaaaaagctgaatgcgttgttatcgagggaaatggtggttggcgctatttacttgatgataatactttttattcagattgggtggctaaagaaaaaattcctgttgttctagtggttgggatccaacctggttgtgtcaatcactcaattctaaccgcgcaatctattattaatgatggtttagaattagttggttgggtggctaatagaattaatcctgggttaccgcactatgcaaaaattgtagaaaggttatctcaacatattccagccccattgattggtgaaatcccgtatttattacgccctgaagaacgtgatctctcttgttatcttgacttaagtcagttagaaatcgctcaacccgcttag

SEQ ID NO: 307857 - DNA, 504 bp, Proteus mirabilis; identical to SEQ ID NO: 306416

SEQ ID NO: 307858 - DNA, 294 bp, Proteus mirabilis
atgcgttggttttttattacctttgcattatgcggctcaggatttgcgttattatttgggattattatgagccaagcactttctccatttagccaacgagccggcgttgcgagctctgtgctgggtatttcacaattaagtttttcttcactttatatttgggtaatggggtggattgaagtatcctcaataaatatgttggtggttattttatttatcagttgtattgtaggtactctttttctatgctttcctcggttcacagaacaaaaaaaggttaaatataatgtctaa

SEQ ID NO: 307859 - DNA, 465 bp, Proteus mirabilis
gtggacgttttcccaacggagccgggggcaaataacgatccgaacgatccttttgtatcagaattaattaaatttgataatgtgatcttaacgccacatattggtggttcaacccaagaagcccaagaaaatattggttatgaagttgctggtaagttagctaaatattctgataatggttctacattatctgcggttaatttccctgaagtatcattgcctagtcatggtgatgatgtaaaccgtttactgcatattcatgaaaaccgtccgggtattatgaatagtatcaataacgtatttacagaagaaaatattaacgttgctgcacaatatctacgtacagctggtaatgtgggttatgtagtgattgacgttactacacaaacgaaagcacaagctgagttagtattgcagaaactaaaaggactaccgggtaccattcgtgctcgtatgttgtactaa

SEQ ID NO: 307860 - DNA, 219 bp, Proteus mirabilis
atgggctactgtatacacgcagcaaattgcagttttttagacgatattcatcaatcaaaagcgttattgtacgacttgcaagcccgctatttgtgccgtcatcaaccgagaacatggcagatcgccaatgaaaaagccgcaccttataaatacaaccaagttttattgagttaccaccgttatatcgcctgtttaaatacccaaggagaaatgaaatga

SEQ ID NO: 307861 - DNA, 231 bp, Proteus mirabilis
gtgggcaatgaactcaaaatggtggtggcggatgtggtcagtgatcatcaagggcgtgcaaatattcctatttcaccgatgttaagaacgtcacctaccgtcaatgaaatgctcgaggttgagcgtccttttggggtttttcgtctcgttgataatgaacagggtaaatttcagcatcgtcgcttggggtataccaatatcacgttatcttttgaggaggtattgtactaa

SEQ ID NO: 307862 - DNA, 141 bp, Proteus mirabilis; identical to SEQ ID NO: 306927

SEQ ID NO: 307863 - DNA, 237 bp, Proteus mirabilis; identical to SEQ ID NO: 306808

SEQ ID NO: 307864 - DNA, 414 bp, Proteus mirabilis
gtgggtggctattgggtgattaattggcaagctaacaggattaattcactgatagataccaacaaaaaactaactgtggctctcgaagaacagaagtctattaatactgattatcaagcacgcataatgcgattaaaccaactggatattcaatatacgcaggagttagcgaatgctaagaatgaaattagccgcttgcgtgatattagcgagcatcatcctaagcgggtgtatatcaaagccgagtgcccaaaaagcaaaaccacttccgccaccagcttggcttctgcaaccaccgccagacctactgacaccgctatcagaaattattggttactcagagaacgaattgcagagtcagagcagatgattaaagggttgcaggattatataaggctggagtgtttgaaataa

SEQ ID NO: 307865 - DNA, 4695 bp, Proteus mirabilis
atgggaaatgaatttttcgcagccaagcaaggcgataaattaatgcactcgtcaatcttcgccgatatcgtgtgtggtgtggttaaaggggcggtttatgccgcgatagggacggccgctgtggcgctgaccattgggacaggcggtatggcaacggccgccggtgcggccatttttgccggtgcagggctggcggcgggctttactattggtggattgattgatgatgccgctgattgggtcgcggatgggatcgatagcttattcgggctaagtaaccctgatggtgaaatcgatacaggctcgaaaaatgtacgtgtcaaaggcaagggagccgctcgcgcagcgggaaaattaccgtcacccgtactattagcctcaattgcggcagataataccccaccgaaagaagaaaaaggcaccgagattgccttacgcgtattgaaaaataccgccatgatgacgactggggcattttctttattggcgggtaaggtgctagggagccaaaccaacaatgcggcacccatagcgctcgatccctccgagtttcccgaatacccttctccagagcaaggcttttttgacagtattctttccccagtaaaagctgcgaaacacccgaatgctgaacctatgcctttggataccatcacgtgcgataaatggcattgtgctagcgccccttactttttagccgaagggtcgaaaaaagtccaaattaatagccaaccggcgtgtcgtaacggtgatagaagcacttgtgaagccaaaatcagtgatacgcaagaaaaagggattgtgcgtattggcggtggcagtgtggtagtacgcgatattatgagtgggcgtaacccctttgccgaaatgtttggtgaaatcctcggtggccttgctgttggcgcggcgtctaccctgtttcgcagagggggactcaaggcgattaaacagtgtttgaatagtgtaggctgtactttggtgagtgaaatcgccagtaccgcagtgggcagtatggtagtcgcctcggtgacccaagcctttaatagtgtgcgtcaccccgtgcatgcggctacgggggcgaaagtcctaaatggagaggatgacaccgattttattattgatggtgtgtacccgttagtctggtcgcgtatttaccaaagtcgtaatacgggtgaaaatcgtttaggacgcggttgggcgatgccatttgatgtctttttgacaattgacgacacgggtaaagggcttgagaatgaaaatatttattatcatgacatgtcgggaaggcgtttagcgttaggaaaaatcgcccttggtcagaaagtgttctatcaagatgaaggctttaccgtctatcgcacgacaaacaatcttttccttgttgaatcggcggaaggtgattatcaacttttcgaagccaatccacataaaatcaatacactgcgtttaatgaaaagtgctgatcgtcataataacgctttacactaccgctatgctaatgacggtgaattggtacaaattcatgatgatgcgtatctgaccgatatccggttacattatgatgaaatcacccaacgcttacagtcggtgacccgccaccaaggacaagaagaaaaaacgctggtcacttatacttatgatgcacaacagcgtttagtgcaagtcactaatgcggataagcgagtgactcgtcgttttggctgggatgatgaatcgggtttaatggccatgcaccaatatgccacaggggtcagtagtcattatcgttggcaacgttttgatgcctttaccattgaagacaatgaacctgaatggcgagtggttgagcactggcttaaagacggtaaacgctgtttagagcataccgaactgacgtatgatttagctcaacgaaccctcaccaccgtggaaacggggggcgaaaccaccttccgtcgctggaatgaacaacagcaaattatcgaatacactaatgcattgaatgaaacgtggtggtttgaatgggataccagccgcttattaacgaaagcaatagccccagatggcagtgaatgggggtatacctatgatgagcgcggtaatttaacccaatcgaccgatccggaacaacaatcgacttgctatgattgggacaaagattttgcgtttcccacggcacaaaccttgccaaatggggcggcttggcattgggagtacaatgagcacggcgatattcgtcgtgtgattgacccgcttggccatatcacgcgcttggcgtgggatgaccaaggcctgtgtctggggcaagtggatgctaagggtaatgaaacccactatcgctataatgcccgcggtcagttaatcgagcaacgggactgttcgggttatcccaccaccttgacctacgatgattggggacaacttcgctcgttgaccaatgcacagaatgaaaccacgacttacacctttagtgaagcggggttgttgttaacagagtgcttaccggatgggacagaaaaccgttatgactatgatgccaccgggcaattagtgggaataacggatgccggagagcgccatattctgttgcgccgtaaccgtcgtgggcaagtgatagcccgacgcgatccggcagggcattggttgcattttcactatgatactttcgggcgtatgcaggcgctggaaaatgaacaaggcgagcagtaccgctttgagtatgatgcgttacaccgtttaaccgatgaatatgatcttatcggacaacaaaagcactatcagtacgatgtgatggggaatgtcacccaaataaaaaccacccctgggccttgcgttgatacgccgatgcccttatccccgcaggtgaccaccttcggttacgataaagtgggacggttgctgtttcgagaaaacgccgattatcgcacggaatacctttatcaacctttgagtgtgacgttacgccgagtccccatggcgatatggcatgaagccgaacgcaccggcaccactgcccgcgtagagtatcaagacgccctgacctttacctacgataaagtggggcagttggttcgagaagccagtgcccgcggtgattatcaacatcactatgatgtgctgggtaatatcactcgcaccgagttgccccatcaacgggcatttgaatacctgtattacggctctgggcatttacaacaaacgcaatggcgagataatgcgcaactgacggtattggcggaatatcaacgagaccgtttacaccgagaaacgttacgcaccagtggcgccttagacaatgaaacgggctatgactgtcggggacgtattacgcaccaagtggcgcgccaaatgaatgcctcacagtttgtgaccccggtgatagaccgtcgttatcgttgggataaacgcaatcaacttatcgagcgcagtgtcagttatggtcaaacgggcgaggtttttaccgctggacattggtactaccacagttatcagtacgacccgctgggacaattgacagcgcatttagggtcggtgcaaaccgaacactttctgtatgatgcagcagccaatttactgacccgtccgcacaccgaagcaccgcataaccaagtgcctcatagtgaccgctttgattatcgctacgacggttttggtcgcatggtatcgcgctatgaaaaaggcagtagctcggggcaacgctatcactatgacagtgaccaccgcattatcgcggtggatatcgaccaagggcccttagggtatcagcgagcggaataccgctacgatatcttaggacgtcggattgaaaaacggttatggaaagccagtgcgattgccaatacagtcacctatcaccaacatgagccggatgaagtgtacacctttggctgggtagggatgcgactggtgtctgagcacagtagcgcagcgccccataccacggtttatcatgcttacaatgaccaaagttatacgcctcttgctcgcattgaatgcacggataacccgcttaatccgcaacgggcgatttattatacgcacagtagtttaagtggcttaccggaagcgttgaccaacagtgacggtgaaatagtttggcaagggcaatacagtgcttgggggcatttacagcgtcaaacccgccccacaagcacatttaatcgtgaacagaacctgcgttttcaagggcagtatttcgacaaagagacggggctgcattataatacgttcaggtactatgccccggatttaggccgttttacccaacaagacccaatagggttggcaggggggataaatttatatgcttatgcgccaaatccattgacatgggtggatccgtgggggttagcgggctgtcctgtcgatatattaaagaatgctagaaaaaataatcatgccatttcagcagaacaaaggcagcaaataatagattcaatagagaatcctaagctgcaaaaaatgtttaaagaactatatcggccaggtgcaaatattcctgatggaggtacagcagcttctattctgtatacaaagaatactggacaattagtcggcggttcagaccatataaataaaggtaaggattatttaacagcgttgaaaaatttatctagtggtaatggaaggtataaaaatgaggctctaagcccatcggatagaagtttagcaagttacatgataaatgatttaaggaacgcattggggcatttatga

SEQ ID NO: 307866 - DNA, 2007 bp, Proteus mirabilis
atggtagtgttaaagaaaaataaaattgcgcttggcgttgttgctgctcttgcatcaagttttgtgatgacagcttccgcagaagatcctgaaaggttactggtgacaaccgcttcgggatttaaacagactgttgaagatgctccagcttctgtttcagttgtaactcgtgaacaattagaaacaaaatcatatcgtgatgtgactgatgcgctaaaagatgttccgggggtgctagtgacggggggcggtagcagctctgatattagtattcgtggtatggatcctaagtataccatgatcttagtcgatggtaagcgtgttgcatctcgtgaaacgcgtcctaatagtgataactcaggtattgaacaaggttggttacctcctttacccgcgattgagcgtattgaggtagtaagaggcccaatgtcttctttatatggctctgatgccatgggaggcgttatcaatattattacgcgtaaagcgcaaaaagaatggaactttagtttacgtggtgacacaacgttgactgagcgtaaaaatgaaggaaatacaggacaaggtagtttctatgctgcaggtccattgattgataatgtgttaggtctaaagctgcaagggcaatattctcaccgtggtgaagatagacgtgttgatggctataaccgtcagatcacggcaagtggtggcggtacattaagctggacaccagatgagaaaaataccgttgaatttgaatttaaaaaagataatcaacatcgtgattcacgtgttggctattcaaaatcagctgaacttgttaaagggaaaaaaccacaaagtagctttactgattatgagttaacgcattatgccttaacccatgatggtatttatgattttggtactatgaatacctatgttcagcgcgatgaaagccgcaatccatcacgtaaaatggattatgatgatacaactgttcgtaaccaaaccgtctttatgtttggtgatcatatgttaagtgtcggcggtcaatatcgctatgaagagctgaaagatgaaggcaataagcttaaaggtaataataagctagatcgctatagttgggcgctgtttgctgaagatgagtggacattgacaaacgacttcgctttaaccgccggtttacggatggataaagatgaaaactttggtactcactggacaccgcgagtttatggtgtttggcatttagctgatgaatggacattaaaaggtggggtatctactggatatcgttcaccggatttacgtcaagcgacagctacttggggacaagggactggcggtggtcgttatgatgcagttatttacggtaatcctgacttaaaaccagaaaaatcggtgacagaggaaattggtattatttgggataatcgtgataacttaacggcaagtttaacgatttataatactgattttaaagataaaataacagaagttcgtcgttgcgatagtcgttcagacaaagcaccgggtatgcgcgattgtacattagctgatggtgttggtaatagtggcgacccttatgattttgtaagtgatagaactaatgttgataaagccaatatgcgcggtgttgaagttactgctaactggattatttccccagaatggaatttagcagcaaactacacgttcacagatacggaacaaaagagtggcgatttcaaaggtaagcctctgaataagcaaccgcgccatatggcaaacgcgaccttaaattgggaaaccacacctgaaatggaaacttgggcacgcattaatttccgtggtaagacatcagattatttatcacgtacttcaatggctaagagcacaccttcatacacctttgttgatgtaggtactagctatagtctaacgaagcaactaaatctgatcggtggcgtctataatgtttttgatcgtcgcatcgaaagagataattacggttcaaccttagaaggccgtcgttataacatcggattaaactacaacttctag

SEQ ID NO: 307867 - DNA, 3687 bp, Proteus mirabilis
atgaaaaaacagacacttaatatgattgttaaagtgatttatgccagttgcttattaggagttacccattccacgcttgctaatgcaacagatgcgaatattgtcagctcgttaatagagcaagcaaattactggcatggaaaagcgcatgatgaacgagccattgaagcgctacaaaaagtgctgatcatggaaaataataatcaagatgcgctgtatttaatggctttttttactgcgcaacaaggaaatgaaaaacaagccagctattggcgtgaaaaactggcacggattgcacctcaagatccgcgtattgcgggattaaaaaatattcgctcatctcaatttagtgaacagcaattgggttacgcgagagaattagcccaaaaagggcaacatgaagaggcaataaaagcctatcagcgcttatttgtcacacatgaaccacctgatacgctatcacttgaatattatcaaactatggctggaataccggcaatgttgccacaagcgattgctgggttaaaacaacgtgctcagcggatgccagataataaagaaacacaaaaagcattaggattaacattaacttataacgaagaaactcgccgtgaagggattgctattttaagtaagatttctggtgatgaaacggcgaaaaatggattaagacaagccttactatggcttaatgtacgtcctgatgatgaagggctgtatcaatcttatctacaaactaatcctaacgataaagccattgcacagcactaccaaggagcaatacaaggtaatgcccgacaagcggggtatgaagcgttaaacacaggtaacctaaagcaagcaacaacttactttaaacaagcattaacggtcgatagtcaagatgcccaagcgttagcaggattaggttatgtggctctacgttcaggtgatttggcaaccggacaaaagttattaaaccaagcctctcagtcagggggggaacaagggcaaaaatggaaacaacaagcagaggatgcgggtttttattctcaattacgagaagtgcaacgacaagctaagcaaggtaatactcagcaagcactggataaattatcacctttaacttactcatcgggtgaaaaaggattatcagcacatttattacaagcggatttattgcgcaaacaaggtaatttacctgctgcttatcagctattatctgaactatatcaacagcatagtcaaaatgaaaaagttatttccgcatattactacttgcttattcaacaaggaaaaaacagccaagctgagcagttagtagcaaaacaacccgcatctttacgacaaaaattaacggcaaatactgatccatcagaaagattacgtcgtgatgcgcaaaaggcgttagaaaatggtcatcgcactcaggcaagacaattattaactcaggcacaacgtaaaaacccgcaaaataattgggtataccttgatttagcccgtttaatgatagccgaaggtgataaaacgcaagcggatcagctcattttacaacttgaacgtcgtcaaacacgtgatgccaattatattgcggcgctcttttatgttgaacaaaaacagtgggataaagtttttagcctactgaacagtcaacctcaacaaaatgaggcggaaaaagcgttattagagagagcgcgtttttatcgtcaactgacacaagctgagcgttactataaaacgggcaatctcgttgcgatgcgcaatacgctgcgtcctttaatcaaccaagtggctgattatccaaatgatgtaggggaattagctgaaaaactggtaaatagtggtgcacaagatgaagcactgcaattgattgaaaatgatctggctaaagggactaaaggctctgtgggaaattatgcagggcatatcaatgtgtttaatgcgttaggacattatgcacaagcctcgagcttgattaatgatcccgcattacagcaacaaacgccagcagccgagaaacaacgtttagctatactgacaaatgttgcgcaagcggatagtttacgggaaaaaggtgaaatcaaagccgcttatcaaactctcgtcacctcattaaaggtaagtcctgatgatccagacttattaatggcattaagtcgtgtgtatttagcgcaatctatgccagagcagtcaaataaaattctctcttaccttgaaaaacagcaagggagagatagcaaattacttcaagcacaaattgaagttgctctggcgcaaaaagacggtcgtaaagccaaaacactgttacaacaaataccgacatcttcacagcctgcttatctattacaagcagcgcaagtagcgcaattaaacggtgaaaatcgtcaggcattggcattattgcgtagcgcgcaatggcaaacgacaaataacacaacaggtacggtgaataccgcagctgggcagttaatggcactagagagtgaaaatagtgtgatgactggctctataaatgtagataaacagatggttgcggttcaacgctccattcgtcaattagagcagcagatatctccttgggtacaaggtggtattgctattcgtcatcgtaatggtgataagggattatcaaatttgactgaaatatcggcaccgattgctatctcaagtgttcctggtgaagattggcgctggcaatttaatattaatcccgtttcaatcaccagcggtacggcttctggagagcgcgctaatcgctttggctcggggcaattgcagcatgctgaacgttttgcgaaaaacagtgataatcatgatgaaaagaacaaaataaacgcagatgatgcgggaagccagcgagcttcaggtgttgaattaggattggttttatctgatcacaatacacgttttgatgttggaacaacacctttgaataaagatagttccactattgttggtggactgacttactcaccaaaaattggccaaaatggacagttaacattaaccgcagagcgtagagcgattaaagatagcttactttcctatatgggacgtaccgatcctataacgggagaaacctggggacaggtcacgcgtaatggtgctaaagcgcaatatgcatgggatgatggcaaagtcggtgcttatattggtgggggatactataactaccaagggaaaagtgttgaaagtaatgaagaggtaaaagtttggcttggctcttatgcaaacttctacaaagatgagcaacaagaagtcaaagcaggtgttcatgtggactatatgaactttaaaaacaaccaaaattacttctcattagggcatggggggtacttcagcccacaagattatgtcgctgtctctttgcctgttgcttatacccgtcgttttgaaaaaggagaggtatcgctaaatggtgcgataggggtacagagttacaagcaaaaggggagtgattattttccaacccatgcttatatgcaaaatgcgttaaacaaacgtcatacgagtgactcacgtattaaatctcgttatgaagagcaagatgaaaccaatattacctatcgtttagggctcgatgctaaatattatttaaataaagagtcagaattaggactcagcttatctcatgatacatcgggtgattatgctgaagataatatgtggttatatctaaaatacaccccagactttttatctaaataa

SEQ ID NO: 307868 - DNA, 1248 bp, Proteus mirabilis
atgaataaatggggaaaattatgttttcttattttgggtggtgggactatattcaaactatccagcatgaaagatgtattttatgtgccaatgcaacaagattggggattatctaacacccaaattggttttggctttactatttatgccattattcaaacaatcggattattttcatcattgtatattgccgatcgcttctctaagaaaattttattaccagcgggcttaattggggtaggtttatgtggtgcttatttaagcacattgcctccttttacgggttatttaattgcatttggtgcaatggcatttttcggcgaggttgtttattggcctgttttactaaaatcggtacgtttattaggaaataaagaagaacaaggacgtatgtttggttttctagaagctgggcgaggggttgttgatgttctagtagcttcgggagctctttatatatttgttttatttggtgaaggtaaagcaggtatgcaagcaggattaatttattatacgcttgctacaataatagtaggtataattacatattttattgtggataatgacgataagaaggaaacctcctcagcaagtgaagctaatcgccaagttttggaagggattaaaaatgtcgtaaaatgtcctaacttatggttagcatcaatgagtatcttctttgtttattctgcttactgtgggttaacttattttattccttttttaaaagatatttacgcactaccaatagcccttatcggtgcctatggcattattaatcaatatgcactaaaaatgataggtggtccattaggcggatttttagctgacaaagttgcaaaatcgccaacaatatatctgaaatggacatttttattatctgcgattgcaatggctattttcattatgttgcctcatgactcaatgaatgtctatttaggtatgactgcaacattaggtttcggtgcaatcattttctcgcaaagagctattttctttgcaccaatggatgaaattggaacaccaagacaatatgcaggttcagcgatggcgtttggatgtattattggttatatgccttccatgtttgcttatgctctctatgggtcattattagataattttgagggcattcaaggatataactatgtatttagtattatggtcacttttagtttgcttggttttatttgtgcaaccatattagctaagcgtattaaaatgataaataacactttaaatatagcttaa

SEQ ID NO: 307869 - DNA, 192 bp, Proteus mirabilis; identical to SEQ ID NO: 306753

SEQ ID NO: 307870 - DNA, 705 bp, Proteus mirabilis
atgttaaacgaacaaaatcgtgctgagtttctgcaaactattgctcaaaaattaggacgtgaggtgacgcatacgccaaaaccacaagatccccctattaataatttagctaaaacacgcttaacaaatttaacccaagatgaattatgcaaagaatttactgattttgcacaaacccagcaagtaagatgcgttatcactaaaccagaacaagtgataaatagcttaatagcgctttgtgaaagctatgattgtcaaggctcagtgataataagtggtgatgagcgcttaaatgcacttggtgtaacacaagctattagtgaaaaatatgaaacttatatttgggatcctaaactcggtcatgaaaatattattcatgctgagcgctctcaaatagggattgtctttgcggaagcgggattaacagaatctggcgggattgtgctgttttcttctccggaaaaagggcgttctgtcagcctgttacctgaaacctcgattgttattttacgcaaaagtgacattttaccgcgagtggctcaacttgcagagcgtttacacaaaatggcacaagatgggatcagaatgccttcatgtatcaatttaattggtggtgcaagctcaacggctgatattgaattaatcaaagtatggggagttcatggcccagttcatgccgcttatcttattattgaagattgttag

SEQ ID NO: 307871 - DNA, 603 bp, Proteus mirabilis; identical to SEQ ID NO: 301843

SEQ ID NO: 307872 - DNA, 3294 bp, Proteus mirabilis
atgtgtataagagacaggaatggagatattaattattcatttagccctatagcctcttatactctgaatagcattaaggcaccatttattgatgtgtctgaaaaaatagacttttattcaggtaaaaacatttacatttcaaatgtaataattaatgaatcaaatgaaaaaagtttatcagcattagagaatattaaaataaaacgcgatgagtctttatttttcaacctaatgccaaattttagagatgaacaatatatttcagcgtttttatttaatatggggctttggaaaagtaagaataatataagcttgatggctggtaaagatattgttagtcagggaataaaatattatagtaacaaagaaataacttttaatgcaggacaagatatttttcttgcctccaaattaataaaagaagccgctccttttttcagtgatattcattacccccaactacaatctaaattattttcagataataaccttattttaaatgccgcgcgtgatattgatttaagttcaacagtattaaattcaaaagataaaatcattgtattagcgggtagaaatataaaactgggtgcaaatgcttattccgccatcgaagatccccacgaagatgcgcaagacattcaatataccaccacatccattatgggaaataaaggtatttctattgcatcatcaggctcactcacaacagaaggaagttcacttaaatcagagggggatattgctatttccagtggtggcaatatccaattgggatcagtaagaacacattttcgtaaagagtcggactcagagttagaagaacttcgtaaacaagtcagtactgaaattaatagcggtaatcatctaacactattatctgagggcagtattttatttcaggcctctcaattggctgctaataaaaagatggatattgctgctaaaggtggatttctttatgcacaggcaatggaagaatccagttactatgaagaagaaaagaaaaaatgtaattggtggacactgtgtgcgactaaaaagaaatataccaaaacatttaataacacaacgaataaagttaccgagtttattgctaatgacgatattaatttaattgctaaagatgatatcactttagaagcaagcaaattagagacagcaaagaatgccaaattaaccagtaaaacaggaggcattaattttaaagcggtgaaagatactgcttttaaacaagttattactcgttcaaaagatatatatatcactcaacgtaatcagggatacaccaagggaacatggctattacctgaactctatattggcggaaagctgactatcgatgcgccaaaaggcatatctgcagatattaaagccaaaaaagagcaatctttagagcaggcattaactgccttaagtaacacaccagaatatgcttggcttaatgcgctccaacgtcaagaaaatattaattggaatttagtgaaagacacttattccagttgggatgataaaacccagcagttaaatccagttgttggtgcggttattgccatcgcggtaggggttgcaacttatggtacggcaacagctgcctcaataggaggaatggcaagtaatgccactattgctgcaggagcctctgcgggggttgcgtcaacggcatcagttgcggcacaagccggttttgcttctttagtttcgcaagctgcggtctctttagccgaaaatcaaggcaatatttctaaaacatttggcgccttaagtcgcagtgatacggtgaaatccattgtcaccagtatggccgttgcaggcgccttgcaaggtcttgaccaatttatgggttgggatcaagcaatacaggggggaacattaccgacaacaggcaagttgcttgcgacggataatgccacatggactcaagttgctcaacgcgttgcctcacagtcagtagtgagttctacactgggcacagccattcaaggtggcagttttattgataattttaaaactgcgctattaagccatatcggcagtcaatttcacgctgaaggtgccaatctcattggtgataacggtgcgatattagggcatgcaggaaaggttttaagccattctgttgttgcaggagtgagtgctgaaattgcaggaggcagtgtaacaggtgcagtagccggcgccttggcagcagaaatagcggcaatatcgctacaaagtaaattatttgagcctagttatttaaatgaaactgacagacaagttgcattaattcaagaggcactacatggcaatgaaggaaaaacacagctcactaaattaattggtgcactgacaggcgctattgtgactcgtaagcctgagggcgtattttctgcggctaattctgcggagttagtttatcgacataattacagcgaacatatgctttcaaagctagcactagaaaataataaggacataattgcagcgtcaaaaggtgatgttgcagcagcagaaagagttgtaaatcgacaaaatgcagggatgattgcgattgctcttggtttaggaggaagtgcgagtattattggtggtcacactgttattgcagcaacaccagaacttattgctattacgcaagctgcatttagtacatgtaaaactaattgggtttattgtgctaatcagctaggtattaatattgctgggatatcagctccagaagctgcaatcgctggtgtcaccgttggtactggttataaagtattagctagttcagaagaaagtgctaaagctttctctagcatgttagctaatagttcaaagtctttaatgacttcaggaaaattaaatataactgctataaaaccgatagtagatcaagaaaagttatttatagcagcaaataaacgtgtaatagatgaaattaataaaatatcttcaaaaaataaagctaaagatatagctacaatggtagctgcatatgatattaaaacaggaactattatagtaagaggaagtgttggttctgacattaaaatagaaatgcttcataaagatactgtggttctactaaaaaataaattaggtgatgttaaagttggaacaaaaacagtacattgtgataatattgtaggaggatgcggtgaagtattagccgcagatcagctgattcgaaaaggggtcaaacctcaagatatcagaatttctcaggcatatcgccccagaaaagcttacggatatgatttatctactatgccagaagaagcatttgttgatacatgtaaaaattgtattaaagtttttttagatgaatag

SEQ ID NO: 307873 - DNA, 498 bp, Proteus mirabilis
atggatgcgcaagatgtcagttctgtctctcaagcattacggtatacacctggcgttttcactgaatatcgcggcagttcaaaccgaaatgatgaaatctttattcgtggatatagctatgccccccgttttcttgatggacttagttatggtatgggagcctcatcttctacaggagctattgacccttggctattagagagagttgagctgatccgtggcccgtcttctgttctatatggtcaattaaatccaggtggtcttgtggcaatgaccagcaaaagacccacttcaacaaccattaatcatattcaagcacgtgtaggaaatgataaattagcagagacagcttttgattttgcaggctcattaagtgatgataatcgtattctctatcgccttaatggattagcaaaaacacaacatactcaaattaaagactataaagaagaacgatttgcccttgcccctgccatcacttttttgccaaatgagtag

SEQ ID NO: 307874 - DNA, 1290 bp, Proteus mirabilis
atgtttgttgctgcattaatttttgttttaacgatcaccttggttatctggcagccgaaagggttgggtattggttggagtgcaacggccggcgctatattggcactcctttttggtgtgatcagttttcaagatattccgactgtttggaacattgtgtggaatgccacagcgacatttgttgcagtaattattattagcctacttttagatgaaagtggcttttttgaatgggcggcattacatgttgccaagtggggtggtgggaaaggaagattactattcagttatatcgtgctacttggtgcaatggttgctgctttatttgctaatgatggtgcagcattgatactaacacctattgtgattgcgatgttacttgcacttggtttcaacaaaggtacgacattagcctttgttatggcagctgggtttatcgcagacacagcgagcttgccgctgattgtttcgaacctcgtgaatatcgtttctgcggacttctttaatattggatttactgaatatgcatcaattatggtgccagtcgatattgcgggaattgttgcaacgcttgtgatgctacattggtttttccgtaaagatattcctaaccaatatgatgttaaaaagctgagtgagccagctttagctattaaggatatgactacgtttaaagcaggttggcttgtattgttgttattgctcattggtttttttattttagagccattaggcattcctgttagtgcaatagcggcaattggcgctttaattctttgggtaattgcagccaaaggccgtacgattaatactaaaaaagtgttgcgtagcgcaccgtggcaaatcgtcattttctctttaggtatgtacttggtggtttatggtttaagaaatgcaggattaactaattatctttctgaaatacttaattaccttgctgataaagggttatggatagcaacaattggtacgggatttattaccgcctttttatcatcaataatgaataatatgccaacggtattaattggtgctctatccatagaaggaagtgacgcgacaggggtaattcaacaagcgatgatttatgccaatgtgattggtgctgatttggggccaaaaattacaccaataggtagcttggcaacattattgtggctacatgttttatcacaaaaaaatatgacgatcacatggggatattatttcaaaacagggatcatcatgactatccctgtgctcattgtcacactcgttgctttagtacttcggctttcactgtttaattaa

SEQ ID NO: 307875 - DNA, 1395 bp, Proteus mirabilis
atggttatgcaacatgctaaaccaggcagggtggcacttgccgttatgggcgcattgcttgtaactgcactacctgcgaaaatgtcttatgctgaaggatttattgatgactcaaccctgacaggggggatctattactggcaacgtgaccgtgatagaaaagagttaacaccaaacagtcctgattacggcaaatataaagcaaatttacaccactctacctttaacgctaatcttgatttttcttctggttatctgggtgatttttttggtattgatttagctgcttttggtgctgttgaacttaacaacagtgggccagctgcacctaatgaaataggatttagtgatgcaaaaagtcgctgggatgaaaaatggacaggtgatcgcagtggcgtgagtatttataaagctgctgctaaatttaaattaggccatttctgggctcaaggtggatatattcaacctaaagggcaaacattattacgtcctcattggagtttcttacccggtacttatcgcggtgcagaagcgggcgctgtatttgatttcgataaaaatggtgaactctctttctcatatatgtggactgatgaatataaagcgccgtggtatcggaatatgtacaatttccgtaaggcagacttagagacaaatatcagttatttacactcttttggtgccaaatatgattttaaaaatagcttagtattagaagccgcatttggccaagctgatggttatattgatcaatattttggcaaagtttcttacgatttccctatcgcaaataatacattaaaaacctcttatcaattctacggtgcaaaagataaagtcaccggagggggaattaacgatgtttatgatggtttggcatggttacaagcattcactttaggctatacctacaatgtatttgattttaaagttgaaggtacttgggttaaagcagaaggtaaccaaggttactttttacaacgtatgacgccgggatgggcaacctcgaatggtcgtttagatatctggtgggatggtcgttctgattttaacgccaatggtgaaaaagcattatacgcgggagtgatgtatgatctaaaaaattgggatctaccgggctgggcgattggtacttcctatgtgtatgcttgggatgcaaaaccgagtagtaaccctatttatgaccaaagtaaacgcatcagagaaagcgcatggaatgccgatatcatgtataccgttcaagaggggagagcgaaaggtacgttatttaaactccactacactcgttatgataaccattccgatataccaagctatgaaggtggttttggtaatatcttccaagatgaaaaagacgttaaattcaatgtgatcatgccatttacgattttctaa

SEQ ID NO: 307876 - DNA, 756 bp, Proteus mirabilis
atgaaacgccaagttttggtaggtttaggttttgcactaggattattttgccataatagctttgctgtagagcttcatctctatgctggcgcaggattaaaacagcctgtagagcaagttgttggtctatttgaaaaagaaaccggcaatacagtgactatcgaatatggcggttcaggccaaattcttacacgctttaatctcactcaacaaggtgatctgttttttcccggctctcaagagtatgtagagaagttagcgaaacaaaatcaggtggttagccaatatcctattgtgcgtcatattcctgttattgctgtcagaaaagataaaatcggtgagatcaaaactatcacagatcttgcaaatagttcattgaaattaggtatgggagatgcaaaagcaattgcattaggtaaaagcggtgaacaattaatcgaagcgtcaggccaaggtgagcagttacgaaataaagtggttgttcgtacagcaaccattaaacagttacttatgtatttattaaatggtgaggttgatgctgccattattggttacgctgatgcaatgaaaaaccaagataaattagttttattacccatacctgaaggaagccccgaagaaattgcgacactagcggtgttaaaaacctcaacaaaccccacacaagcacaacaattggctgattatttttctcgtcccgaaggaataaaggcttttactgattatggttttctacctgttatttcaaaaccatag

SEQ ID NO: 307877 - DNA, 681 bp, Proteus mirabilis
atgaaaaatggcaaactctctttcgatgcaaaaatcatatcatcagtcttagtctctatctgtcgttttttaaccgggatcagagccaaacaaatatctccgattgagaaagataaaccttgtatttattacgcaaatcactcaagtcatctagatggtttagttatttggtcttcacttgccccccatattcgcccatttgtgcaccctgttgctgcagaagattattggaataaaaaccgtttacgtcgttatctttctcgtcgtatctttcgtgcagttttgatcccacgccacgcgaataaaacaaatgttactgaaggaaatggtgaaacaacaactgcacctcagaaagtaaatgctcttacactgatgcaggctgttttagataaaggtgaatcgctaattattttccctgaagggacaagaggtaacggtgagtctattcaggattttaaagccggtctttggcatttgtcccgtaacaatccacaggctcaattagtccctatctatcttgaaaacttaaaccgcgtacttcctaaaggctctcggcttgtcgttcctatcatttgtagtgccacatttggcccgcctattgagccgacacatgaaaatgaagataagactgaatttctattaagagccaaaagtgcgttagaggagttacatcatggatag

SEQ ID NO: 307878 - DNA, 969 bp, Proteus mirabilis
atgacagatactaataaaaaaaagttaacaatcaatgatatagccaaactttgtggtgtgggcaaatcgactgtttcaagagtacttaatcaagatcctatggttaatgaagaaacaaggaaaaaagttaactcaattattgagaaatataaattcacaccgtcaaaatctgcacgagcaatgcgggggtactctaatcgttcttttggtattatcgtcactcgccttgattcttatgcggaaaatcaagcagttagtgccatattaccgatcctttatcaaaacaacattgaccctattattttagaaagccaatttagccaagccaaagtagaagaaaacttaaaaatgctcgcccaccagaaaatcgatggcgtaatattatttgcattttcagggatcaatgcggctaacttagcaagttggaaacaaaaaatggttgttatagcaagaccactagaaggttttgtttccatttgtcatgacgatgaacgagctgttaacgctttaatgcattatttccatcgagacaaacattatcaacatataagttttatcgggatccaaattaatgatgaaacaacgggtttattacgttatcaaacttatcttcaatattgccagcaacatcaattaatatctcaagctcaacttggtgaacttaattatcaaagtggctatttacttgccaaacaagcattagcaagcaagcctcaagctattttatgtgcgaccgattctctggcctttggtgtacaaaaatatttagccgaacagaaaatagatcatattgaggtggcctgcatcggtcgtaatgatctactcacctttttatttcctcaaactaaattttatcgattaggttttagagaaagtggacaagaagctgctaacatattgatacaaatgctagaaaaaaatattcctgcacaaaaaatcattatatcaagtcatgacttaaacccatga

SEQ ID NO: 307879 - DNA, 714 bp, Proteus mirabilis
atgcgtaaagtcacacttactcttagtgcaattgcgttggcgttaagtttaaatggcgcagcaatggcaaaagttcatatgccagaagttgttagcccaggggttactgttactgaacttgcacatcagcaaccaattaaatgggtttctgttgcagaaattgaaaaaagcttagaaggccaagcaccaatggcggtaggttttgatattgatgacaccgttctgttctcaagcccaggcttttatcgcggtaaactggaatattctccaaacgatttcagttatctgaaaaacccagaattctgggaaaaaatgaacaacgaatgggataaattcagtatgcctaaacaagtcggtatcgatcttgttcagatgcacttaaaacgtggtgatactgtttatttcattaccggtcgtacacagactaaaacagagactgtgactaaatatgttcaagaaggtttaaatattcctgcagataaaatgcaacctgttatttttgccggtgaccaacctggcgcaaataacaaagtaagctggatgcgcgatcacaaactgaaaatttactacggtgatgcagatgctgatatcgcagcagcagatgagctaaatatccgtgggatccgtatcttacgtgctgctaactcttcttaccagccgttacctaaagcgggacaatttggtgaagaagtggttatcaattcagagtactaa

SEQ ID NO: 307880 - DNA, 804 bp, Proteus mirabilis
atgagtgttcccgttttaggtcttggtacttttcgcttaaaagacgatgcggttataaattctgtaaaaactgcactagaactaggttatcgtgctattgatacagcacaaatttatgaaaatgaagctgctataggacaagccattgcagaaagtggtatatctcgcgacgcgctttacatcacaacaaaaatctgggtagaaaatttaagtaaagataaattaattcctagtttgaaacaaagcttaagtgatttacaaacagattatgttgacttaactctagtacactggccatcaccaaatgatgcagtttctgttaaagaatttatgcaagagttattagctgcgaaacagatgggattaacgcgagaaattggtatttcaaattttaccattccattaatggaacaagctattgctgccgttggtgttgaaaatatcgcaacaaaccaaatcgaattatcaccttatttacaaaatcataaagtggtaaattgggctaaacagcatggcattcatattacatcttatatgactctagcttacggcaaagcattaaaagatgaaacaatacaaaccattgctaaaaaacacaatgcaacaccagcacaaatcattttagcttgggctatgaatgaaggttattctgttattccatcttcaacaaaacgtgaaaatttagccagtaatttactcagcgtaaatatcaaattggatagtgaagataaacaagcgattgcaaagttagattgtcatgatcgtttagttagcccagaaggtttagcgcctcattgggattaa

SEQ ID NO: 307881 - DNA, 495 bp, Proteus mirabilis
  misc_feature (472)..(481): n is a, c, g, or t
atgaatattattaatcaaccttggttgccttttcgttttcgtgatggcgagattaaaacacttccaatatcagctatttcacatcctgatattattgatttctcattaaatagagccgattttaaaggtgctgcttatcaatttgcaatagggttattacaaacgatatttgcaccagaggatgaagatgaatgggaagaatattttgaaacaccaccttcaagtaaaaaattacaatctgcatttgataaagttgcacatgcttttaatataatgggtgatggccctttatttatgcaggatttttcaactttagaagagcaaaaaaatattcctatagctcagttgctaatagatgctcctggtgaaaatggaataaagcaaaatacagaccattttattaaacaaggtattgctgatgtaatgtcattagagatggctgtgttagctttatttaccttacaaataaatnnnnnnnnnnataaatgcccctag

SEQ ID NO: 307882 - DNA, 771 bp, Proteus mirabilis
gtgtataagagacagcctttaattcaatatgttgttaatgaatgtatagcagctggcatcaatgaaattgtgctagttacacactcttcaaaaaattctattgaaaaccattttgataccagttttgaattagaagctattttagaaaaacgagttaaacgtcagttgttggaagaagtacaaggtatttgtccaagtcacgttactattatgcaaactcgccaaggaatagcaaaagggttaggccatgccattttatgtgcaaaacctttggtgggtgatgagcctttcgctgttatcttgccggatgttattttagaccgatatagtgctgatctgactaaggttaatttaaaagagatgctttctcattttgaacaatctggcgcaagtcaaattttagtagagcctgttcctgaagaggaagtatctaactacgggattgttgactgcatgggagaacatttacagcctggcgacagtaaacccattactcgtgtggtagaaaaaccgaagaaagaagaagcaccttcaaatttatctattgttggtcgttatgtgttgtctgaaaacatttggcctttattagccaaaacggcaccaggagcaggggatgaaattcaattaactgacgcgattgcaatgttaattgaaaaagagcctgtagaagcttatcacctacaagggaaaagccacgattgtggtaataaattaggttatatgaaagcttttgttgaatatggtttacagctgtctcttatacacatctga

SEQ ID NO: 307883 - DNA, 582 bp, Proteus mirabilis
atggatgcaaaacagacgtcaattactcttaataatacagataaaagattacgctttttagtgcaatcatggattgatgatagccaagatcaaaaaagtaatgaatttattgttacaccaccactgtttgtcagcaaaccagaaagtgaaaacaagctaagaataatttatgctggtaaggcattaccaaatgatagagaaagtttgttctggttaaatacaaaagcaatccctgaaattgagcgagaagaaataaaagataaaaatatattacagctagcagtattatctagaataaaaatttttattagacctcaaggattaaattttaacatagaggatgtacctaatagtcttgagtttaaaaaatcacaaggaaacataatagtaaataatccttcaccttattacgcgacattaattaatttagaagctgataatgaacagctaaatagtattatggttcctcctatgggaacagtaatgattaaagtcagcaagcctaactatagtcaaatatcttatcaaactattaatgattatggtgccatcacaccaaaaacaatcgtcgacgttagataa

SEQ ID NO: 307884 - DNA, 171 bp, Proteus mirabilis; identical to SEQ ID NO: 303621

SEQ ID NO: 307885 - DNA, 450 bp, Proteus mirabilis
atgaaaagagacagccgcttgtcgtctgtcctgcatgcgttgctgcacatggccgagcaggatggacccgttacttcagaaaccttggcgcagtgcctggggaccaacccggtcgtcgttcggcgcacgatggggtatctgcggcaagcggggatcgtcacctccgatcgaggccactcaggaggatggcgtatccacgccgaccttggcagcgtcaccctgcgtcagttgcatgaagccctgggcgagccggcaatgtttgccatcggcaaccgcaacgagataccggagtgtctggtcgagcagacggtgaatgccgcactcgaaggcacgtttgccgaagccgaggccctgctgctcaagcggttctcggaaatcacccttgccgatctggcctctgacttcgcacgccggcatgcggctttacgacattcaaggaatcaatcatga

SEQ ID NO: 307886 - DNA, 126 bp, Proteus mirabilis
atgaaaatagccattgcaatcgcagataataaaaatgtccatttcagatatattgttggcgattttgcaactttgtcagctaaaaatccgcctaatggaccacctatcatttttagtgcatattga

SEQ ID NO: 307887 - DNA, 3639 bp, Proteus mirabilis
gtgagtgaagtgatacaggcacaggtattagatccctatacacttcctttgtatcaaagacgcctcattgaggcgtctgcgggaacagggaaaacatacactatagggttattgtatttacgattactgcttggattagggggtgagtcagcatttcatcgccccttaagtgttgaagagatcttagtcgttacttttaccgaagcggcaacggatgaattacgcgcccgtattcgtcaaaatattcatcagttaaggctagcctgtatccgtcatcaagtagaaaatgacaataacgcttaccaaatattattagatcaaatcccgaataaaatggtggcggcgcaatggctactagaagctgagcgtcaaatggatgaagccgccatttatactattcatggtttttgtcagcgcatgttagccactaacgcctttgaatctggtgtattgtttgaacaggtgttgatccaagatgaatatgagttaaaaaaacgtgtctgcgctgatttttggcgcaggcactgttatcccctttcttatgatgttgcctatgcggtaagcgaaatttggtctggccctgagcaactgctgtatgaaattcaaccctatttacaaggtgaatgccccgaaattcaaggtattgatttcgacgctaaaaaagagactgttgaacagcgtcatcaagcagtcattgaggccattgataaagttaaagcactatggcgtcatcattgcaatgaaattgcagattggataacttcatctggtgttgataaacgcagttacagtagtcgtttcttacctaaatggatcgatgaaatcaccgcatgggccactccactcgaaaccaaaagttatcagttacctgactgtttaagtcgtttttcgcaagcaaccctacatgaaaaaactacaaagggggctgcgcctgagcacgctttatttgcggaaatcgaactactttgccaacaaagcttaacgttacgtgatgtgatcattgccaatgccatccctgaaatacgccaagggatagaaaatgaaaaaatgcgtcgtggtgagttgggatttgatgatctgttaacgcgtctcgataaggcattgcaacgagaaggcggcgaagcattagcagatgctattcgccaacgttatcccgtcgcgatgattgacgaatttcaggataccgatcctcagcagtatcgtatttttgatactatctatggtgagcatacagagagtggtttgctatttattggtgatcccaaacaagccatttacgcatttcgtggtgcagatatctttacctatattcgggcaaggcaacaaaccgatcaccactatacattgaatactaactggcgctcggctccgggtatggtaagtgcagttaataaactgtttttacgttctaaaaccccttttttgtttgatcatattccttttattgaggtcaattcggctgaaaaaaatcagcatatgaagtttatttaccagcaaaaaacagttgccccattaaatttttggttagctgaaggtgaaagcctttcaactggtaattatgaacaattaatggcctcgcaatgtgcgatgcaaattcgtgactggttatcagccggtgacaatcaacaagcttggttaatcgaacaagacaataaaagcgctgttacatctgccgatattgtggtgctagtgcgtagtcgccgagaagcattattgatccgagatgcattagatctgttatctatccaatcagtatttttatccaatagagaaagtgtgtttgaaaccaatgaagccaaagatctactttggttactacaagcagtggtaacccctgaaaaagaacgggtgttaagagcgtctcttgccagtgcactgtttggatttaacgcacaacaaattgacgaacttaatcaagatgaacagcgttggaaccgctatgtggagcaattctctgattattttgtcttgtggcaaaaacgtggtgtgttacctatgctacgtaaagtcatgatagaaaaccaaatcgctgagaacttactcgcaagccaagcaggagaacgacgtttaaccgatatcatgcatattggcgagttgctacaagaaacatcattacagcttgatagcgagcacgcccttattcgttggttagcccagcaaatttctcgaccagatgcacaagcggaaagtcagcaaatgcgtttggaaagtgataaaaatctggtgcaaatttgtaccattcacaaatctaaaggattggaatatcccattgtttgcctaccttttgcctgtaattatcaagaacaaaagggcgcgctttatcatgatagagatgaattttacgcaaaattagatatttttaatcaacctgatagcgtgcgtcttgctgatgaagagcgactggcagaggatttacgcttgttgtatgtggcattaactcgggcgaaattttgttgttatgttggtgttgcgcctttggttaaaggaaataaacgtaagtcaggattaactgatttgcataaaaatgcgctgggatatctgttgcagcatggggaagagggtaatagtgagctattacatcaatccattaatcaattgcttgatgacaatataaaagtgatcacgttaggtgatacctcaacgcatcgatatcaatctccacatacaacggatattgctttagatgccgccatatttaagcgaaaaattaatgataattggcgtatcaccagttattcgggattaacggcacaacactctgctcgtggatatctatttgatagtgctgatttggatgccttggtacaatctatcgcaccgggcttagataccgatgctaaaggtgagaaaacagcgcaacacagcgatgaactctctattcatcacttccctcgtggtgcagtcgcggggacatttttacatagtttgcttgaagagcttgatttttcacagcctattgatgaaagttggatgcaagagcaacttattgcccaaggttttgaggaaaaatggacgccattgttggtggcttggatggaaaccctttttcacaccccattaaatgcgcaaggcttatgtttagctgatattcctaaggagcatcaactcgatgagctacaattctatctgcctattgaaaaggagatgtcggcggcacagttaacagaattaacccgtcaatacgatcctttatctgcgcaatgtccagccctcaattttcagcaagtgcaaggcatgctaaaaggttttattgacttagtattttgttgggagggcaagtattatgtggttgactataaatctaactggcttggtgaatcgagtgaggattacacgcaagaggcgatgagcaatgcaatgcgcgatcatcgttatgatttacagtatcaactctatactttagcgctacatcgatttttacaacaacgcttacctgattatgattatcaacgtcattttggtgggatctgctatctcttcttacgtggtattgatgctgactacccgggcaatggcgtctatacctatctacctgaagaaaagtttgtagaggcattagatgcgctatttaaaggggaagcgcttgaggttaacggcagtaaagtgaacgtgctgggtgagaacaattcaaatgattaa

SEQ ID NO: 307888 - DNA, 639 bp, Proteus mirabilis
atgattgattacgcactgaaattacaggagttaaaaagccaacctgctcataaattaaaagaaattggcgatcagtggcgcacccctgaaaatttatattggggtatcaattctctctatggacctttcacactagatctctttactgatgcacaaaacagcaagtgccctcatttttacaccgtagaggataatgcactcactcaagactgggctgaaaaactcaaagaacttggtggttctgctttcgctaatccaccttattcacgtagttcatatcatgaaaaacaggctgtcactggtcttagacacatcatgaatcatgcattagcgatgcgtgaaaaaggtggtcgatatgtattcttgttgaaagtggctacaagcgaaacatggtggtgtgaagaagcggatcatatttgttttatccgaggacgtattggttttgacgttcctgagtggtttgttcccgcagatgaaaaacagaaaccaacgggcgcattctttgctggagcaatagttgttttcgataaaacatggacgggtaaaaaattcgattacattcatcgtgatgaattagagcaaattggcaaagcatttattgagcaaatgaagtggctggcgtcgagaggtgttgcatga

SEQ ID NO: 307889 - DNA, 651 bp, Proteus mirabilis
atgaacgtattgaaaatctttttctgcacattactccctttactcttcacttcaccgggaaaggccgaaaataatcttaatcagaaaatgattgaggaattaactcaatgccgtttggaatcatctcagctaattcgtttagattgttatgacaaaattgcgctttcttcaacatcttcctccaatgcactgcctgatgttactcaaatgggtaaaacatggcgccaagcaacagagcatgaaatgaaacggacgggaaacagtgcaggttttctcgtctcagtaccagaaaccggtgattatcccgtattaatgaccattccagcgattggctttcaaccgcctcgccccatcttaatgctgagctgtattgataacattactcggatgcaaattatcctgccaacaaaacaagatgctggcagtgtgatggtttcaacggataaaacacaatttactgcagaatggtttttacgtgaaaacggttatgtattggaatcaagccgcggtataccgggcatagatgaaattaaacgcttgttaaatgctgaaagattgacattgaaattatctaataacgaaaaactcaccttcaatatttcaggtatttcacaacaaataatccctttaagagcggcttgccactggtag

SEQ ID NO: 307890 - DNA, 189 bp, Proteus mirabilis
atggtcagtgcattcgcaggacatgcagaagtacaagccccacaaacaatacattgctcaggtgagtactcaggttttcctctaaaaccatcagggagttctaatggtttaaaaggatattttgttgttgcatcgcctgttttgataatggttttaaacaattttaacatcgttcagtccctcacttga

SEQ ID NO: 307891 - DNA, 471 bp, Proteus mirabilis
atgaaccaacatgatagcgatatattacagttaccttttgaaagcggttggcaagatctgacacaactattattttttcaaatagttagtgataacgatattacgcaggccgaaaataaattaagggatatcgggaaagatatcgctcaacgttacccattacctgatagcgaaaatatccagtcattagaatcacatattaatcaagttttaacactgtttaagtggggctttgtgactatctctccagcaatgagtgagttgctattagttcactgtgcatggccacatttttcagcaaatgaagaggaagctaattggcgtgcagcgagtgccagtgtattagaagggctatatgaaggctggcttactcatcaagggggaaatgataaaatgcatgtgcaccgtcaagctacagatgcaaaagatgcctttatttttcgttatgcgaatagttcatcagataaataa

SEQ ID NO: 307892 - DNA, 855 bp, Proteus mirabilis
ttggttttatctgcctgtgatcaacttgatttagataataaaaaagataagttttattacagtaatcccagtgaaaaaagcatgagctttgttgttgatgataaaacatatcaggttgagccgggtaaaagtggttatttaacactctcaccgggcgaacatagtttacaagatagtgcaggtaataaatccacttttatggtgtatgaaaacaacaatggtggaattttaaatcctgataattttatgtattaccgtttatctgaagtctatgccgtacaaggtaagggagatcgctttaaaccaacagaatataaagtggttattaatggctatcagttagaaatgccattacaaagcacgaatgctaccttgattgatggcaatgtatttaaatgtacttatacgttaggtgaacctttccccagtgaaattaaaagccataataaaaacgaaatggggaatatcaaaaccaaatgttttgataaacctgaattaatccaatatattatgactgattatggtcaagatctaaaaccgctttcccctcaagatgagtataacgatactgttaatctagcgttagactacagtttacctcaaccacaatttactgatcctgatattcaagcagaggcagaaaattgggttgcattgcttgatcaaattaaagaaagtaatgatcctaatatccataaacagcttaaaacaccattacatgaagcaataaataagttatcaaaagccgatagtgaaagagcagtaaaaaactctgttgaagataataaatactataattcttttattcaccaagcgagccaatatcaatcttatgggatcttacctagagattaa

SEQ ID NO: 307893 - DNA, 531 bp, Proteus mirabilis
gtgccaatcataaaaaaacctatttcgggcgttgatctccgtgcaagtttttatttgacttcccaaagtttaggatatccttcaaataaacaggcaatattaatggctgatattgccacattaatagctaaatggaggaatggcttagaggtcgaaatttatacggaaaattatgaatttagatatggtaggattaagtcttcacgttttaacgcctctggtgaggaaagcgtatattatgcaacttactttcatactcgtgccaagccaaaggacaatgatccatttctaataattacttttgatcccgttgttggacaagacgattttatgttcattgagaccattattgatcatagaacctattttggttcaccgggtgcaagtaaaactaaatctcatattgaaagacggtcatctgatttaaaacgccgcattgaaaatggaaaaaaaattagttccgaaccttcatcttcagttcaaaacgttaataaaaataacaatgattcgcctgatcaagaaaataagtaa

SEQ ID NO: 307894 - DNA, 3708 bp, Proteus mirabilis
gtggcaccgtcggctcctgtattaaaagcagaggacgatggttcggtttcagttgacttaccaacagatgccaataaaggtgatacggtagaaattacctttgaagatgaaaagggtgataagcacacggttaccttagaaaaaggggataacggttggacatctgatacaccggcgttgatcccagacagcaacggcgataaggcgaccattcctgcggataatgtaaaagacaacagtgaagtaacggggattgccaaagatccgagtggcaacgaaagtgacccatcaacggtgacttcgaaaacggacggtgtcgctgatgcgcctgtactgactatcccagaagtggctgacggttatgcgaatgcggatgaactgaaagacggcttacaagcagaagttaccttgccagcgggtacggttgaaggggcggaaatcaccttaacggtcactcgcccagacaaaaccactgaaaccgtaacgcatacagtcactaaagatgaagctgctgcgggtaaagtatctgttgatattcctaaagatgcggtacaaaacggccaaaacagtgtcgatgtcagcttaactcaaggcaataatccagccaaaccaggaaacaaagtagattttgctgttgatggacaaattccgggcgatacagatggtgatggtacggtggataccacaccggtggtgaccattccggaagctgcggacggtgtaaatgctgacgagctaaaagatggcgtacagaccgaagtgactgtaccgggaggtagtgcagcaggtgacacactgacactcactattaccaaaccagatggatcaaccgacactgttgaacacacactgactgcagatgaagtgacggcaggtaaagccgatgtgacaatccccgcagataaagtgacagcagatggtaactattctgttaccgcagaaattactgatccggcgggtaataccagtggtcagggtaaacctacggactttatggttgatacgcaaatcccaggcgatacagacggtgatggtgtggtggatacaacaccggtagtgaccattccagaagctacggacggggtaaatgctgacgagctaaaagatggcgtacagaccgaagtgactgtaccgagaggtagtgcggcaggtgacacactgacactcactattactaaaccagacggctcaaccgacaccgttgaacacacactgactgcagatgaagtgacggcaggtaaagccgatgtgactatccctgcagataaagcaactccggatggtaattattctgttaaagcagaaattacagatcccgcaggtaacacgagtggtgaaggtaaagcaacggacttcactgtagataccgttgccccatctacccctgtattaaatgctgaggataatggctctgtttctgttgaactgccaggggatgccaacaaaggcgatacggtagaaattacctttgaagatgaaaaaggggataaacagactgtaacaatggagaaaggggataatggttggacatctagtgatcctaatttgatcccagacagtcagggcaataacaccgctattccatctgataatgtaaaagataacagtgaagtaaccgcaatagctaaagatccaagcggtaatgaaagtgctccagcaacagcaacgtccaaaacagatgtgctaccgacagtgagtattagtgttgatacaacatcagtaaatgacaatggagataagattagtgctgatgcttctgtttcgggtgaaataacagaagttcctgcaacaatagaggacaaggatgatactaccggattagtatataccgttgctctagattatgttgcagcacaggatgtgaccgtaaccataaccttaacaaatgatgcaggtcatgcaagtgcgccggattattcaacgcttgcaggctctcagcatgatgggaaaatcgccctacatggggacactggtaaagtaacctatgatggagcttcaactgtaacggttgttattcctgctggatctaagagtgtttcatttatagttgatccaacaatggaagctaaccaaaatgcatttaatgctgaaggtatggagaaagttgttgcaaccattacgggaacatctaataacgctaccgctgtaactgatacagtaaataatgcaggtgcttctgctacgggggttatttatgatggcaaccctatttcattacgtaatctggacggcgattttacactgaagtattcattatcctcatcggtggctgaaaatggggactttggatataccatcggagttgatagcggtaaaaaagatcctaagctaacgacagattacaatgatacgatttatgttggttattatcaggatggtagcgaaacttcatcatacagcaatcttgctaactcgcaggataatggacctgatggcacaaaaacagatggtaatcaaagtattacaactgttgatttaggtgctggtgatgacctgatggtgatccgcggtaatatgttaaccaatacacgagtctatgctggtgaaggtaatgatacctttactatggacggcatgaatacagcgttacgttctatgtatgctggtagttatctctttatggaatctggtaatgataccgttacgattaaacgtacaggggtaaccaatgctggtcaaatctatcttggctcaggtagtgatacctttactcaaggtgatgccaatgatcaaaataataccgaattgtccggtttattagatctgggtagtggtactcaagataagtcaaatatgccaaatgagtatctttctgtttatcaggatggcagtaatttaagcttaggtaatgacaataacattgatgcggtcacagatgttaatactgtcactatttatggttctgtctccggtgaaattttaggtggatatggtagtgataatatcactatcactaaaaatctgactggtaatgtttctgttggtgataatacagacactctaactgctgggtggatttatggtggtgccactgtttctatgggggatggcaatgatacggttactgtcactgaaggtgcgtataacacaactatttcactaggggcaggagatgatgtgtttgatgctactgctggtgttatgggggattctgttagcgcgacattagtgaatggtgaagatggcaatgacaccataaaattaggcacaattggtaaaaatctgacagttgatgcgggtgctggcgatgatactgtgattttgacaaaagattatgatccttcacctataggtaatcagggatatattaatgggggagagggaactgatactttagtcttatcaggtacgattacggtaaatatggccactaagactgatgaaggtattgctaatttcgaaaaagtcgatatgacggttaacagtgagttgaaagtggacaatagctctcagactattaagttaaccgcatctgatgtgttgggaatgaatgcaaattcaacgatttatatttccggtgatgctaatgataaggtggatttaggtgccgatggtgctggaggtttaggtacatttacagctactgccactacaacaaaagcaaccgcattagatggtactgaacatacttacactctttatagcagtgcaagtggtgctaatgtctatattgataataatattatcgataatggaggtgttatttaa

SEQ ID NO: 307895 - DNA, 1074 bp, Proteus mirabilis
  misc_feature (1030)..(1039): n is a, c, g, or t
atgtctttagctattcgatatcttgcgttattaccacttttcgttattactgcttgccaacagcctgtaaattataatccaccagcaactcaagtggctcaagctcagcctgctattgtcaataattcatggattgaaatttcacgaagcgcactcgactttaatgtaaaaaaagtccaatcattattaggtaagcaatcttctctttgtgcagtgttaaaaggagatgcttatgggcatgatttatcgttagttgccccaattatgatagaaaataatgtgcaatgtattggtgtaacaaataaccaagaattaaaagaagtacgtgatttaggatttaaaggccgtttaatgcgagtgcgtaatgcaacagaacaagaaatggcacaggcaaccaactataacgtagaagagttaattggtgatcttgatatggcaaaaagattagatgctattgccaagcaacaaaataaagtcattcctattcatttagcattaaattcaggtggcatgtctcgtaatggtttagaggtcgataataaatctgggcttgaaaaagcaaaacaaatttctcaattagctaacctaaaagtggttggtattatgtctcattatcccgaagaagatgctaataaagtaagggaagatctggctcgttttaagcaacaatctcagcaagtgttagaggtgatgggattagagcgtaacaatgtcacattacatatggcaaatacctttgcgacaattaccgtgcctgagtcatggctggatatggtacgtgtgggaggtattttttatggtgataccattgcgagtacagactataaacgtgtgatgacctttaaatccaacattgcttcaatcaattattatcctaaaggtaatacggttggctatgatcgtacttacacattaaaacgtgactcagtactagctaatattcctgtaggttatgcagatggttatcgtcgcgtttttagtaatgcggggcatgcgttaattgctgggcaacgcgtacctgttttaggannnnnnnnnnttaggaaaaacatcaatgaataccgttatggttga

SEQ ID NO: 307896 - DNA, 2535 bp, Proteus mirabilis
atgaattttaataatcggttacacctcatttcttatcgttattctcttccgttttgtgttgctttggggattggggtgataacaatttcttcattcgctgctgaagaagctgaatttgatcctagctttttgcattcagtgcaaggaaagaatgcgattgatatacgtcgctttaattatggcaaccctattcctgagggcaagtattacgctgatatctatctcaataatgaatggaaaggaaaagctaatgtacagtatttatatactgacaatgcgaatacgtcgatgttatgtctaacgccggaattactttcattaattgatgtcgtcaaaggcactgttcctgaaaacagttataaagccacttgttatcccgcctcagaaggactcccctcagcaaaatttcattttgatttatccactttaaagctgaatatagaaattcctcaggcacaagtgaatactcgacctcgaggatatattgcccctgcacagtggcaaagtggagtccctgccgcatttgtcaactatgatgttaactattatcaatacaatactccggatataaataatgagcagacttaccttgggttaaaagcgggactcaatttatggggatgggcttttcgtcaccgtggtggtgaaagctggaataatggtcattctaccggatatcagaatatcgaaacaaatgtgacgcatgatattgctcggttacgggcacaattcacattaggtgatttttatacgaatggcgagttaatggatagccttagcttacggggaattcgattagcatcggatgaacgaatgttacccaactctttacgtggctacgctccgatcgtgcgaggcattgctaatagtaatgctaaagttacgatttatcaaaatgctcacatcctttatgaaacaactgtgcctgctggcccctttgtcattaatgatttgtatcccagtggatatgctggcgaccttcttgtgcaaataaccgaatctaatggacaaacaagaacatttacggttccttttgcttctgttgcccaacttattcgtcccggatttagccgttggcaaatgtcagtgggacgctatcgttatgcaaatgagacatatcatgatttaattgcacaaggcacatatcaatatggtttgacaaatgatatcactttaaatagtggactgaccacaagctcaaaatataccgcaggattggctggtgttgcttttaacacgccgattggggcaattgcatctgacattacattgtccagaacaacatttaatcactctaacgtaacgcgtaaaggctacagtttacatactagctatagcgtcaatattccgaccacgagtacaaatatcacgttagcagcctatcgttattcatctaaagatttttaccatttgaaagatgcgctattggctaatcacagtgaatttattgatgatgtttccataaaaagtgccgcattttatcgccctaaaaatcaattccaagtttcaattaatcaagaattaggtgaaaaatggggaaatatatttttaactggtaccacttataattactgggagcataaaggaagtcgtaatgagtatcagatgggatatagccatttttggaaaaaacttggttatcagattggcttttctcaatcacgagataatgagcaacaacgccgagatgacagattttatgtgaactttacgcttcctttgggagagcgtgttcaaagccccattttttctactgtcttaaattataataaaggcgagaaaaacagcattcaaacatccatcagcggtatcgctggggaagataatcaattctcttatggtatttcaggtaatagtcaggaaagtggaccttccggctatgcgatgaatggaggctatcgttcaccttatgtaaatgtaaccgcaaccgtcgggcaagatactcaacataatcgtcaaatgtcattgggtgcgtcgggggccgttgtcgtacatccttatggagtgacgttaagtaatgatttaagtgatacttttaccattatccatgcaaaaggagcacaaggtgcggtcattaataatgcaccaggtagccgattagatttttggggaaatggtattgtgccttatgtcacgccttatgaaaaaaatcaaattagcatcgaccccactaatttggatttgaatgttgagttatcagcaacagaacaagaaatcattcctcgcgctaatagtgccacgttagtgacatttaatactcaaacagggagaagcctactatttgatattcgaatgccagatggtagtactcctccaatggcttccgaggttttggatgagcataagcagttagtcggatatgtggctcaagctggacgcttatttacccgcggtcttcctaaacaaggtcaacttgatgtgatatggggaccaaatcatgacgataaatgctcatttacatatcatgcgacacgcaatgaaactgacatgcgacctcaaaccattcctgttcagtgtataccgcactctaattag

SEQ ID NO: 307897 - DNA, 1638 bp, Proteus mirabilis
atgaaaacgaattatatttttgtgaccggcggggtcgtatcctctctgggtaaaggcattgccgcagcctctttagcggctatactagaagcccgtggactcaatgtcaccatgatgaagttagatccgtatattaacgtcgatccaggtacaatgagcccaattcaacacggagaagtcttcgtcactgacgatggagctgaaactgatcttgacttaggccattacgagcgctttattcgcacgaaaatgacgcgtcgtaataactttacgaccggccgtgtatactcagaagtgctacgcaaagagcgtcgtggtgactatcttggtgctactatccaagttattcctcatatcactaatgaaatcaaagaacgcatcatccgtggcggtgaaggtcatgatgtcgtgttagttgaagttggtggtactgtcggtgatatcgaatcacttcctttcttagaagctatccgtcaaatggcggcagaagtagggcgtgagcatactttctatctgcacttaacattagtgccttatttagcggcttcgggtgaagtaaaaaccaaaccaacgcaacactctgtaaaagagttactctcgattggtattcaaccagatgcattaatttgtcgctcagatcgcgttattccagctaatgaacgcgccaaaattgcactgttttgtaatgttcccgagaaagcggttatctcattaaaagatgtcgattccatttataaaatccctgcactcttgaaatcgcaaggattagatgattatatctgtaaacgattcagcttagattgcccagtggcaaatctgtctgaatgggaacaggttatctacgaagaagccaaccctgaaggcgaagttaccattggtatggttggtaaatatgttgaattaccagatgcctataaatcagtgattgaagcattaaaacatggtggtttcaaaagccgtgttgcggtaaatatcaaattaattgattctcaagatgtggaaactcgtggtgtagaaatcctaaaagggttagacgcaatcttagttccaggtggttttggtgaacgtggtgttgagggcaaaattatggctgctcgatatgcacgtgaaaataaaatcccttatttaggcatctgtttaggtatgcaggtggctatgattgaatttgcacgcaatgttgccaatatggaagatgctaactccacagagtttgcacctgattgtaaatacccagttattgcgcttattactgaatggcgtgatgagaatggcaatcttgaagtgcgtacagaaaatagtgacttaggtggaacaatgcgccttggtgcacaaccttgtcatttaagtggcgatagtttagtgcgtactctgtatggtaaaaataccattacagagcgtcatcgtcatcgttatgaagtgaataatctactgttaaaacgtatcgaagatgcgggtttacgtattgcaggtcgttcagttgataacaagctggtggaaattattgaaaatccaaatcatccttggtttgttgcttgtcaattccaccctgagtttacctcaacgccacgtgacggccatccgttatttgctggctttgtgaaagcagcctttgactaccaaaaaggcttgctaaaatag

SEQ ID NO: 307898 - DNA, 726 bp, Proteus mirabilis
atgttaaagttcattcttattttcttgactctgtttgtatccacagtggctcaagccagtgtggttattatggggacccgcgttgtttatcccgcaacgcaaaaaagcattaatgttcaattaaataataacgatgaatcccccgcattaattcagtcttggttagataccggaaacgcagctgcagcaccagattcaattcacgttccttttatcattactcctcccatatttcgtatggagccgaaatcagggcaaaccatccggattgtctataccggtgaatcattaccacaagatagagagtctcttttctatctaaatgtcttagacattccagcaaaacctaaagtggaagaaaattcggaaaactcagagggaaataacaattacttacaattagccgttcgtagtcgcattaagtttttctttcgccctgataatctcaacgtaacgcctgatgatgcttaccaaaaagtgacttggcatcaggaaggagcactacgcattaaagcgattaacccaacaccttattacatcacttacaacaaaatctcagtgggtcaggataaacagctaacgcctgttgaacaaagtgggatgatagctcctttttcttcaaaaatattttcacttaaagagaagccaacattaacaaataaagtcacttgggttgttgttaatgattatggtggataccaacaaggtgaatctactttggaataa

SEQ ID NO: 307899 - DNA, 1041 bp, Proteus mirabilis
atgcgtgatgatattctaggctcgttcgcctttctagcgcaattttggcatgaacaaagcccggcacttgcagaacaaattgatgatttaagcagagattataatcgtattgaaaataacgatgcgccgattattgttgcttcacctgccgagaaagaagaaaaagtacagactccgccggttagcgagtctatagaaacaccgacaaaaaatagcttaacaccaactattaacgttaaccatcaagatgaaagacaatggaaacaaacattacttcaagtagctgatgttatctgccaacaagcccctgaaagttcagtaggatatcgtatacggcgttatgcaatttggcacgctattacggtcttacctcaagctaatgctcaaggtaaaacgcctttagcccccgtatcaattgaccgtgtaatggattacaaagctcaactgactcaagcgtccattacgctattaaacaatattgaacagagtctctcactctctccttactggttagaaggccatatgttagctgcacaagtagcagctaaattaggttatggggaagtagaaagtggcattattgaagagttacgtatttttttagcgcgtcttcctgaacttgttaacttgcacttttcggatatgactcccttctttcctgaaagtgtacaacagtggttagagcaatataaccaaactgaaaacggtcaattgccaccatcgaatacaaatactgcgatcctagagcaagaagtcttgcaatgttatgaacaacaaggtcttgaagcagccctgaagcttattgaattaaaccttgctagcagatcagagcctagagatagattttatggacaattattgtctgcacaactatttgaattgtcaggtatggattatatggctacacagttataccaacaacttaatacctctgcctcacattattcacttgcagattgggaacccaacttaatacgacaactcatgcaaaaaatagacaaaaagacagaaataacaatgactatggatagggatcaataa

SEQ ID NO: 307900 - DNA, 1212 bp, Proteus mirabilis
atggggatcccgcctagccatattgatcatgtaaaacaatttaatcttggcactgtttttcgattaattgatgaacatggtcctatttctcgtatctcgttatctaaaaaagcaacacttgcgcctgccagtattactaaaattacgcgagaattagtcgaagcacaccttattcatgaaacagaatttcctgggttgggatttcggggacggccggctgttggtttaaagttagagagcaaagggtggcaatttttatgtattcgagtaaataatggtagcctactttttagtttaagagagcttgataatcaattagttgttgaagataccttcgactttcctaaacaaaatagtgatgcttttttgcatcatttccttgctgcaatagatacattctttcaacgttatcaatcaagagtagagcgccttactgcaattagtattaccatgaatgcaattgttgatccgattagtggcgttatttatagttctccttactatgctatccaagatattccgctggctgataaaattcaggaaaaaacaggtgttgctgttttcttacaacacagtgtaacggcttggacaatggctgaatcactctatggtgcagccaaaaataacaccgatattctgcaaattgttattgatgatattgtcggtgcaggggttgtgactaatggaaagacattacattcaaacagccatagtgccgtcgaaatagggcatacaaaagttattgattcacagacgcaatgttattgtggtgcaaaagggtgtttagaaacggaaatatcgatccctcagttaattaaaaaagcacagcacttggcgcaagaaaatcccacctcaatacttaatcaatatccgattacggtagaaacgttatgtgatgctgtattaattggtgataaacaagcattagacataattaatttagtggcgcaacgacttggttttattttagccgtgatggtcaatatttttaatcctcaaaaaatattaataggttcacctctgtgtagagcaaaatctgcacttttccccctgatccttagtagtatccaacaccatgtattacctagatatgcccataacttggttattgaagaaacagaattgcgcaataaaggcacattgccagcggcatcactagtaaaagaagccttatataatggctcattattacttgagttaatgcaaggctaa

SEQ ID NO: 307901 - DNA, 1056 bp, Proteus mirabilis; identical to SEQ ID NO: 296753

SEQ ID NO: 307902 - DNA, 951 bp, Proteus mirabilis
atgactaaaatatttaaaatcccctttgccacgcaaggggataaaacagttgtgcctgttgagatccaaacagatggctcagtatcctatactcaaggttacggttatgattatgagcgtgaccaagtcactgatccggcggcaaaagatattgaacgtgaaaaaatgaacagcctatttcacgatatcaccgagtctattggtgaaatgcaattacaaggttttgctaaatggtcagaagcgggcaagccctatgccattcgtagtgtaggcaattatcaagcttcaggagattatgccactaataccaatttaaaaaatgagcttaataaaaaatttgataagggtaatatttctcaagcgaccggaacctcaacggctcatgttattagccaaaaagccgccactgatgcttttcagccaaaaggaaattatcaacccaaaggcaattatgcattagtgggtgcatcctatactaaaacggaatctgataataaatatcaacctaaaggcaattatttagcgacaggttatagttattctaaaactgaatctgataataaatatcaacctaaaggcaattatttagcgacaggctatagttattctaaatcagagtcagatggaaagtatcagcctaaaggtagctatagtaataagaatacagttagtaaagcactaaacgggtggtggaaatgcggtgatacgggattaatttatttttggggagagacaccacctattgaatatacaactatcactattgatatgccaattagtgtgcctaacaaattattatctgctcaagtggcatgttcatggaagaatgtaagaggtgaggggaacttagttagttatgtcaaaattgaaggaaaaaaattaatcatcacagctgatcatactaaatcaagtgctaaagtttctcgttactggtttgcgataggatattaa

SEQ ID NO: 307903 - DNA, 753 bp, Proteus mirabilis
atgaatagacggtatttgttattactatttttatgttgcttacttcctttattaaacggttgtaaggatcaatcactgctcactaatttaagtcaaaggcaagcaactgaaattcaagcggtgttacagaaacaccaaataacaagtactcgtactgcgttaggaaaaggattatttgagatctcagttaaaaaggaaaatatagggattgctattcaaatattagaagaatatcaattaccaacaatttctcgtattgaaattacacaattatttccatcagatgcattagtttcatcgcctcaagctgaaaaagcacgtttaatttcagccattgagcaacggttagaacaatcattattaaccattgatcatcttatcgatgcgagagtacatgtcagttatccactatcatcaaatgatcgtataacgccaacacctcatgcttctgctttagttttctatgaagatggcatgatagatagtgatcagctaagtgacgatgttcgcgcttttatccataatgcttttaatgatatggatgagagtaatattactgttttattatatccacggaatatcaataaatttacgatattaaataatcaacttcaccaagataatacgacatcattgagtaactcttggttactcatagggttatcagtaattagtttaattataataattatggtcatattgattatttatcgtcgtaaacaagtcaataaaatggtaagcgagaatgagtaa

SEQ ID NO: 307904 - DNA, 549 bp, Proteus mirabilis
ttgctagatgatattaatattaaccaaataaattccgataaactctgttcatatgtatcttctgtttatcaagatgtcgttttattttcaggaacaattaaagataatattttaatgggaaaaacagatgctcacgatgatgaaataataactgcagctaaattagctaatgcacatgagtttattatacaaaaaccacaaaattatgatactcctattggttacggtggtatgttactctcaggtggagaacgtcaacgtctttctcttgctagaactttattaaaaaatgcaccaattttactgatcgacgaagcaacatcgagtatcgattgttcatcagaagtattaattcaacaagctttatcattgttatcaaaagataagacaatcattatgattgcccatcgattaaatagcattaaaaatgccgataacattatcgtaatggaaaatggaaaaatagcagaacaaggaaaacatgctgagttacttgcaaaaaatggcttatatgcacatttatggttacaacagaaagcgttatgctaa

SEQ ID NO: 307905 - DNA, 579 bp, Proteus mirabilis; identical to SEQ ID NO: 301489

SEQ ID NO: 307906 - DNA, 357 bp, Proteus mirabilis
atggtcccctctggtatcaatttattaattgtaaaaggcccagaacaagcccaatgtgaagcagtaaaaatagaagatgcagaaaaaacggtttcgatgtttaaaacattaggttatcactgtattttaaactatacaaaatcccgtcaaatctactttctagaccaatttcatatcactatcgataaattagacaatcttggctactttgctgaatttgctattatgactgatgatgagagtaaacttgctgactataaattacagttacataacttagcatatcaatttggctttaatgatagtgagcaagagcatcataactataaaacaatgcttttaagcaagttagcttaa

SEQ ID NO: 307907 - DNA, 441 bp, Proteus mirabilis; identical to SEQ ID NO: 302375

SEQ ID NO: 307908 - DNA, 423 bp, Proteus mirabilis
atgtccacaacggatttatctctagagttgcaagataaaattaaacgctcaatcacccgcgtctctaaagttatttttccaaccacgaccaatcatcactccacactctttggcggaacggcattagcatggatggatgaagtctcttttattaccgctacgcgcttttgccgtaaacgtttagtgacagtttctacagagaaaattaattttaatcaccctattccctctggcaccattattgaattagttggtgaggtaatacgtgtcgggcgtaccagtctaacggtaaatgtttctatttttctcgaagatatgtatgccgaaggacgagaagaagtgatccacggccaatttaattttgttgccgttgatgagcatggtaagccaacccctttattcgataaaccatcgcttttataa

SEQ ID NO: 307909 - DNA, 336 bp, Proteus mirabilis
gtgacattagatgttattgttgaaaatagtgaagaaaatgaagaggatgagcaaaacgatgccataatagaagatagcattgatttagctcaatcacttgatttaaattcaattggcgctattccgattacaatatcttttcttttagccaataaaacattatcaattgatcaacttgaagaattagcaccagggaagaaatttattttacctgataatgccattcgtcatattaatattttagcaaatggtaaagctattgcccaaggagaattaatcaaaattaaagatatgttagcggtagaaattaataaattatctataaaatgtgaataa

SEQ ID NO: 307910 - DNA, 186 bp, Proteus mirabilis
atggaaagctcaacacaattaatcttgatcctagctcttgccacattggctccttttattattgctgcaggaacttgttatttaaagttttctatcgttttagtcatgactcgtaatgcattaggtgtacagcaagttccttctaatatggtacttaatgctatcgctttaatgatgtcgcattag

SEQ ID NO: 307911 - DNA, 366 bp, Proteus mirabilis
ttggataccaattcattctctaacaatattgaaatagataatgcggtgaaaagcgtagttcctactcgtggggccattagtgcgatcacatttgagcctagtgttgggataaaagcaattacgacattaacccataaagggaaaccagtacctttcggggctatcgttgattcaggtaataatactgggattgtggcagatgaaggaaaagtttatttaacagggttatcaccttcagggcaattaaaagtgaattggggtagtaagaaagagcaacaatgcttagtaaattacacattaccaccacaagatccagataaactttatgttgaatatagtgcagagtgccaccctattaaggaataa

SEQ ID NO: 307912 - DNA, 399 bp, Proteus mirabilis
atgtatcaacaatcagccagtaaaatgtatgctcaaattgatgttgaaagtgagattttaaatgcttcaccttaccagctgatccaaatcctatttaatggggcgctaagcgcccttcgccgtgcattaatattaatggaacaaggaaatatcgccggtaaaggagaaaatatttctaaagccattaacattattggcaacggcttaaaacaggggctggataaagaaaaaggggaggagcttgctgaaaatttagcattactttacgactatatgatcactcaactactcgatgccaatttaaaaaataatccagaaaaaattcatgaagtcatcaagttattaactgaaatttctgatgcttggcaacaaattggcacacagattaattcttattaa

SEQ ID NO: 307913 - DNA, 348 bp, Proteus mirabilis
gtgagtgttaagaactctccttatacgactattgcaagccaatatcctcttaatgataaagagagtttaaaacattattttaatatgttatttgataatgatataaagacagtttatgttttagcctcgaataaggatattaaatgggacttctcaaaacctgatagtgaatatgataaaagcaattctcagcagaaagggtttaaatactttagagagaatttttattcagataatatagaatctcgccactttaataagtgggatttcagtcgttttaaaataaaaggtaaaaatgggaaatttatagaaaataaaaatggagataatgaaattttactaaattaa

SEQ ID NO: 307914 - DNA, 195 bp, Proteus mirabilis
atgtggcaaacaattttaactgaaattaatgcttcattaattaattttaaaaaaattgataatgcaatggagttaattagatttagtatttatttagaaaaaatcattgcaccttggtatatggtggtcggttactcaaaggaaatgatggcggtatttgatgaagctttatcctctttttattcatctaaataa

SEQ ID NO: 307915 - DNA, 180 bp, Proteus mirabilis
gtgacaacacaagattactcaacatttaacttcttacaatggtatgttgctgaacaacatgaagaagagaagttatttaaatctattctggataaacttgctatggtcggtgatggtggtaaggcattgttcttgttagataaagacttaagtgctctttctacatccgcgcatatttaa

SEQ ID NO: 307916 - DNA, 411 bp, Proteus mirabilis; identical to SEQ ID NO: 298166

SEQ ID NO: 307917 - DNA, 156 bp, Proteus mirabilis; identical to SEQ ID NO: 304992

SEQ ID NO: 307918 - DNA, 201 bp, Proteus mirabilis
atgttacgcaaaggtgatacacaatttaagtcgttaattgatgaaaccattgctaatgcgcaaaaatctggcgcagcagaaaaatcgttcaaccgttggtttaatgccccaattccaccgaaaaacctcaatttagaattcactatctcggatgaaatgaaagcactgtttgcatcaccaaatgataaagcattgaactaa

SEQ ID NO: 307919 - DNA, 288 bp, Proteus mirabilis
  misc_feature (257)..(266): n is a, c, g, or t
atgcaagaacaatatcgtcccgaagatatagagcaaactatccaggaacactgggaaaagaacaatacatttaaagtgacagaagataataacaaagaaaaatattactgcctgtcaatgctaccttatccttctggtcgactacacatgggacacgtccgtaactacaccattggtgacgtgatttcccgttatcaacgtatgttgggtaaaaacgtcttacaacctattggttgggatgcgtttggtttacccgnnnnnnnnnncacctgcaccgtggacttatga

SEQ ID NO: 307920 - DNA, 1728 bp, Proteus mirabilis; identical to SEQ ID NO: 103825

SEQ ID NO: 307921 - DNA, 273 bp, Proteus mirabilis
  misc_feature (213)..(222): n is a, c, g, or t
atgtcaagttcgaaaaatgaaaagctaaaactaataagagaatcagaaagattaaaactaaaggaaatgtctgatttaacagggattaattaccatacatatcatggatatgaatcagggaaaatgaatatgtctttagaagcagcaacaaaactattttcaattccaagatttagaaaatatatgacttggtttatgtttgatgaaatcaannnnnnnnnnagtgggcaagacaacacgcaatcatcccactcagacaagaaaattggataa

SEQ ID NO: 307922 - DNA, 660 bp, Proteus mirabilis
  misc_feature (629)..(638): n is a, c, g, or t
atggaatggatcgtagatccgacgatatgggtaggtctttccacccttattgttctcgaaatcgtacttggtattgataaccttgtttttattgctattctagcagataaactcccagcaaaattaagagataaagcacgtatcacaggattattgtgtgctcttattatgcggattgtactgctatttagtctctcttggcttatcaccctaaccaaacctcttatcacactgtttgatcatcctttcagtgccagagacttaatcatgctcctcggagggatattcttacttttcaaagccacaatggagcttaatgaacggctagaaggtaaagatcataacgagggaaaacaacgtaaaaccacgagtttttggtctgttgttgcgcaaattattgtactagatgctgtattctctctagactctgttatcactgcggtagggatggttgaccatctcggcgttatgattgctgctgtaactattgcgatgttcttgatgatcctcgcaagtaagccattaaccacatttgtcaataatcacccaactattgttattttatgtttaagcttcttattgatgattggttttgccttagttgcagaagggtttggctatccaatacnnnnnnnnnnctattatgatagagatatttaa

SEQ ID NO: 307923 - DNA, 756 bp, Proteus mirabilis
atgttccatatttaccattcaaatcaattatcactacttaaatcactgatggtacattttatgcaaaatcggccactatcatcgccttttgagcaagaagtgattttagtgcaaagtcccggaatgtcgcagtggttacaaatccaattagcagaaagtttgggtattgctgctaatatccgttatccattacccgctacttttatttgggaaatgtttactcgggtattatcaggtatacctaaagaaagtgcgttttctaaagatgccatgacatggaaactaatggcattattgcctaattaccttgatgatccggcatttaaacccttgcgacattatcttaaagatgatgaagacaaacgtaaattacatcaactagcggggcgtgtggcggatctctttgaccaatatctggtttatcgtcccgattggttgtcggcatgggaaaatgatcaactaattgatggcttgagtgacaatcaatattggcaaaaaacactgtggttggcactgcaacgctatacagaagatcttgcgcaacctaaatggcatcgtgctaatctttatcaacaatttatttctactttgaatgatgcgccagtaggggcgcttgcgcactgttttccatcgcgtatttttatttgcaagcactgcaagcaatcggcagacataccgaaatctatttattgtttactaatccttgccgctattactggggagatattcaagatccaaaattcctcgctcgtctaa

SEQ ID NO: 307924 - DNA, 891 bp, Proteus mirabilis
  misc_feature (876)..(885): n is a, c, g, or t
gtgagtgaagtgatacaggcacaggtattagatccctatacacttcctttgtatcaaagacgcctcattgaggcgtctgcgggaacagggaaaacatacactatagggttattgtatttacgattactgcttggattagggggtgagtcagcatttcatcgccccttaagtgttgaagagatcttagtcgttacttttaccgaagcggcaacggatgaattacgcgcccgtattcgtcaaaatattcatcagttaaggctagcctgtatccgtcatcaagtagaaaatgacaataacgcttaccaaatattattagatcaaatcccgaataaaatggtggcggcgcaatggctactagaagctgagcgtcaaatggatgaagccgccatttatactattcatggtttttgtcagcgcatgttagccactaacgcctttgaatctggtgtattgtttgaacaggtgttgatccaagatgaatatgagttaaaaaaacgtgtctgcgctgatttttggcgcaggcactgttatcccctttcttatgatgttgcctatgcggtaagcgaaatttggtctggccctgagcaactgctgtatgaaattcaaccctatttacaaggtgaatgccccgaaattcaaggtattgatttcgacgctaaaaaagagactgttgaacagcgtcatcaagcagtcattgaggccattgataaagttaaagcactatggcgtcatcattgcaatgaaattgcagattggataacttcatctggtgttgataaacgcagttacagtagtcgtttcttacctaaatggatcgatgaaatcaccgcatgggccactccactcgaaaccaaaagttatcagttacctgactgnnnnnnnnnngtttaa

SEQ ID NO: 307925 - DNA, 2748 bp, Proteus mirabilis
atgatgtggatttacaatgaaaaaccacagtcaacgccccttacattacaatttaaacaaaataatcaagtagcattaagttttaaaacggaactgaatttcacaggttggcgaggtattgcagttccttttcgtgatatgaaaggctcagcaacaggcaaattagataaattagtcattactgcaccagatcaagcaggtacgcttttttttgatcaaataattatgagcgtacctttagataatcgttggcctattcctgactatcaaattccatatgttaataatgcagtaaatacaatggtgagtaaaaattggagtgcattattgatgtacgatcaaatgttcacagcgcattatcctacattaaattttgcgactgagtttcgcgatgatcagcctgaagtggcatctatttatcaacgttttgaatactatcaaggtgtcagtcgtgataaaaaaatcaccgctgaaatgatcgacaaaaatttagcattatggaaaaaattagccttagaacaacatgctgatggctcaataaccgcaaaagcccttgatcatcctaatcgccagaattttatcaaagtcgagggggtctttagtgaagaaacccaaaaagcattacttgatgccaacatgctaagagatgtaggcaaaacgcttcttcaaacagcgatttacttgcgtagtcactccttatcagcaatcgatagaaaaaaattagaaacgctctatttattaggcactcgttacgttcttgaacaaggtttcacacgggggagtggttaccaaattattactcacgtaggttatcaaacaagagagctttttgatgcatggtttattggtcgccatattctagcaaaacataatctgttagcaccgacacaacaagccatgatgtggtataacgcaacagggcgcatatttgaaaaagataatgaaatcgttgatgcaaatgtcgatattctcaatacccaattacagtggatgataaaaagtttattgatgttgccagattatcaacagcgccaacaagccttagcacaattgcaaagttggctaaacaaaaccattcttagttctaaaggtgtcgctggtggctttaaatctgatggctctatttttcaccattcacaacattatccagcttatgccaaagatgcatttggtggcttagcgcctagtgtttatgccttaagtcattccccttttcgtctttcatcaccagcacatgcacgcttaaaagatgtattattaaaaatgcgtatctataccaaagaaacacaaattcctctggtattaagtggcagacatcctacggggttacataaaataagtattgatcccttcaaatggatggctcttgcaggtacgcccgatggtaaacaagagctagatactacattagcagccgcttatgcaaaattagcaaacaaagatagctttgaaggtattaaagcagaaaatgaaccggtaggtgcatgggcaatgaattatgcttcaatggcaatccagcgtagagcatcaataacagcgccacagcaaagctggcttgctatcgctcgtggttttagtcgttatttagtgggtaatgaaagttatgagaataacaaccgttatggtcgttacttgcaatatgggcaacttgaaattattcctgcggatttaactaaatctggttttagtcatgcaggttgggattggaatcgatatccaggaacgactacgatccaccttccttatgatgaactagaagcaaaactaagccaattgccaagtgcaggcatagaagaaatgttgctttcaacacaacgttattctggtgccaatacactaaataataacagtatgtttgccatgaaattacatggtcacagtaaatatcaacaacaaagtctaagagcgaataaatcctatttcttatttgataatagagtgatcgcattaggctctggtattgaaaataacgataaacaacatacaacagaaacgacactgttccagtttgctgttcctaagttacaatcaattataattaatggtaaaaaagtgaaccaactcggtactcaattaaccttaaataatgccgatacattaattgatccggtgggtaacttgtataaattagctaaagggcaaacggtagaatttagttatcaaaaacaatactctgttgatgacagaaattcacagcaaacagaacaattgtttgcaacagccgttatctctcacagtaaagcccctaaaaatgcaaattatgaatatgcaatagccatagaagcacaagataatagagcgcctgaatacaccgtattgcagcataataatcaacttcatgcagtaaaagataaaatcacgcaagaagagggatatgctttttttaatgccaccgaagtcaattcatctcaagctttattattatcaagtgattcccccactatggtaatggtaaaaaaacaaaaacaacaattaacgctaagtattgttaatcctgatttaaatttatatcagggtattgaagctgaccaaattgataataagggtaaccaggttgaagtgagtgtttattctcgccaatggcttacagccgatcctcaaccaataagtagtacagttactgtaaaagggatttggaaattagccacaccacaattaggtgttaatattagatatcaaaatagtaatacgctaattacaacaacgactatacaagcaataccaataacagtttatttaattaagtaa

SEQ ID NO: 307926 - DNA, 396 bp, Proteus mirabilis
  misc_feature (375)..(384): n is a, c, g, or t
atgccctctcaattgatgaggacaagtgccgtcttcgctttcttgatttcactactctttactggtgtgagttttgcctctaccagtaccggcagttcccgaatgctgcaggcggatacattcaaaagcacgacaacctcgttgccagatttgaaaaaatatccctcgggaactcagcgtaagaaagcgtttttaaatgtcatagttcctattattgataacattaataataagatattgagagatcgtgagtggttaaccgctcaacgtaaagcccaacactggggcagcgcagatttgaaaaaactgcgtgaaatctgtcaatactatggcgtaacatgtaccagccccaaaaaagtgaattgggattcgttnnnnnnnnnnattcgttactga

SEQ ID NO: 307927 - DNA, 939 bp, Proteus mirabilis; identical to SEQ ID NO: 299865

SEQ ID NO: 307928 - DNA, 960 bp, Proteus mirabilis
atgatatacacaacaggcactgttagcacagtgtcagggtctgctgttgtctctggcacaggtaccattattttaattaaaaatggtaatgctaattttatttatatggtggacagggttaatagcgatacagaattagtcatttcacaaccggctacatttaccgtaaaaaacactagttacagcattaatctcactgagccgaactcatacagcgacgctaataatcgtatgaccgctattgcatcagatacgacgtattttctgcgagcaatggaccaatggatgatgaataacggtgtggtgacagtagagctatctaacgggcaaaaagtaacgttagatagcattaagaagatgcgggaggatattgctaataaggcggatttagtgagtgccgagtctcagttcttcaatggtcaggttatatcttttcaaggtttatataattttgataaatcaaatcctttaaattattttgggttaaagagggctcaaaaaaatgatctatatggattttatttatcttatgaaaactcatctggtaaatccgctggttattctataaattttccagaaaggactagtggtactattttattacaaagtggaaaccaagcaacaattaaggctactaataattatgctggcttaactttaaccagatcaaatggattctattctctccttgagaccaacccttctgatgaagaagggtctagaggagttttttgtaatctagtatctagatcacctagcggatcaaataggggagttattagttttagtgagactgtaagtggcactgttttagttgacaaaaccccaaatacagttaaaaaacaatctataaatagaaatgggttttatcaatgccaagatattgagccttatgatgtaatgtttatggggattgcttgtactcacgtgagtaacgagcaatatgtattctccttatag

SEQ ID NO: 307929 - DNA, 534 bp, Proteus mirabilis
atgatcagagccagtggttttaaacgtgatgtacgctttgatcacccatttgcagattatggcaacttaccattaactctatttagttatgaaggtggggatgttttctcacgtgtgatggtgcgtattaaggaagtgcttgattctatggcaatgattgaatatgccttagataatctgccggaaggaccgttattaacagaaggctttacctaccaaccttataaatttgcacttggttttaccgaagctccacgaggtgaagatattcactggagtatgttgggtgataatcaaaaattattccgttggcgttgtcgtgcggccacttacgctaactggccagtactacgttatatgttacaaggaaatacggtttctgatgcaccattaattatcggtagcctcgatccttgttactcctgtactgacagggtaacgcttgtcgatgtgaaaaaacgtaaatcgaaaacagtttcttataaagaaattgaacgttatagcatcgaacgtaaaaattcgccgctcaagtga

SEQ ID NO: 307930 - DNA, 222 bp, Proteus mirabilis; identical to SEQ ID NO: 294477

SEQ ID NO: 307931 - DNA, 801 bp, Proteus mirabilis
atgcccgttatatcaatctctatcgttgctgtctgcgcttatttactcagtctggtgtttattctccccagtttgctgagaaaagagcaaaatggataccgtggattagcgctgctttttgcggtggtcgcccttgtgacccatgctatctcattaaaatttttgattttccgtccacatagcgggcaaaatctgtcactcaccaatttaggggcggtggtcagtttaatggtctgcgttatcatgaccattgttgcttcccgtggtagagcttggtttttgctgcctattgtttattgcttttccatagtcaatctcattattgccgccttgatgccaggtgagtttgtcacccaccttgaaagtagcacatcgctctttattcatattgggcttgctttattaagttacgccactttgttaattgctgctttatatgccttacaactcagctggctcgactatcaactaaaaaataagaaactaaaattttcaccacaaatgccaccattaatgtcaattgaacgtaaaatgtttcatattacccaagtgggggtagtattactgacattaaccttgtgtaccggcctgttatatatggataatatttttggtaaagaaaatatccataaatcaatattttctattattgcgtggtttgtctacatcattttattatggggacacttccgtgagggttggcgtgggaaaaaagtggttatttttaacctgatcggtgccattattttgacattagctttttttggtaatcgtttattgcaagagttaatgcttaattaa

SEQ ID NO: 307932 - DNA, 378 bp, Proteus mirabilis
  misc_feature (29)..(38): n is a, c, g, or t
ttgggttggtcgtggcatggtgttattannnnnnnnnntgcggttatcgctatttatttagcccgtgatccagaaaacaaagtacttgatttggtgagtaatgcttgggcaggatttggtgctgcatttggtccggtgatccttatctctgtcacttggaaacgtatgactcgtaatggtgcttttgcgggaatgttaattggtgcattaacggtactggtatggatgcaatataaatggttcggtctttatgaaattattccgggctttattttcgcgtccatagccattgttattgtcagtttactgggtaagtcaccaacggcagaaaatcaacaacgttttgatgaagcagaagcggaatatcgtaacacttaa

SEQ ID NO: 307933 - DNA, 309 bp, Proteus mirabilis
  misc_feature (288)..(297): n is a, c, g, or t
atgttagatcaagagatgatccgtacttttattcaagtagcagattgccaaagctttactaaagcggcggagatgttacacaaaacatctgcggccatcagctatcggatcaaaaccctagaagagaatattggtacacagttgtttaatcgtacgacaagaaccgtcacattaacgccggcaggggaatatttattagagaaatgtcgccagtggattgtttggcttgaatcaatgcctatcgagctacagcagatgaatgcgggagttgagcaccaagttaatatnnnnnnnnnncttactctatga

SEQ ID NO: 307934 - DNA, 2061 bp, Proteus mirabilis; identical to SEQ ID NO: 300169

SEQ ID NO: 307935 - DNA, 348 bp, Proteus mirabilis
  misc_feature (325)..(334): n is a, c, g, or t
atggagaagcatgatgatgatatgcctaaagataaaatacaacaagccaaacgctggcgcttgattttaggccaatacgctgatgatgctttagggcaagccacgtttaatgctgatgatcttaaaattgaacgtacactcgattttctttatcgccgtgaatatcagcgccgaggattacgtcaagagcgcggtcgtcatggttctctcgatgcatcgcaacttactgccgtaaactggctaaatcaagctcgcaaactttttcccaatagcacatttgaacgtatgcaatcacaagcgattgaacgttatcaaatcagtagcnnnnnnnnnntcccaatacgctaa

SEQ ID NO: 307936 - DNA, 417 bp, Proteus mirabilis
  misc_feature (13)..(22): n is a, c, g, or t
gtgatccagcttnnnnnnnnnngtttgatccaatcacagcttgaaaatgagttaggtactttagcgacagaaatcaccgttcctatggatgtggtggaattactggttaccacattccaagaattacgttcaggtaatacgcaagatggtggcaatatcaaaacacctgatgcggttatgtcaacagcagaagccgtaaatatcgcttatgcttgtgcgttagaagcgcattatttaggtgatggcgtgatgaatgccggtgcgattgcacgtcaattaatcggcgttgtattaaaagataatcctgatgatattaagcgtattcgttattacatggacaacgtcgccagagaaagggccagaaatagtaaagagtggaaagcgttctttgatgcatcaaaagacttttggcaataa

SEQ ID NO: 307937 - DNA, 417 bp, Proteus mirabilis
atgagtattgaaagaacagcgaaagtaggctctattatactattagctattttcttagtgacatcagctttatcatcgttttttatttatcaaatgcaggataattttgcttcattaaactcgttaaccacgagattaaataatgtacaagaggcaagatatgaactagcaaccatacgctctcatgttaactttttagtcaatattggtcatgaaaatttagatatgcaagaaaccaaagctcgattagtttctgaagctaaaacattagcggctaaatcaaaagcgacaattaacgcttgggaaagggaaagcaaaatcagtgctgacgcacaaagaaactcagaacaattatcggcactatttatcaaactcgtcgatactattattgcgcctattgatacgctagcttattaa

SEQ ID NO: 307938 - DNA, 279 bp, Proteus mirabilis
ttggtaaagtacctaaacggttactattatttattggttaatcaaattggtgaaattatggaagttttcgactttaaaaaattttggaatagcttaacgattaagcaaagagaagcattttctcaaagaacggggtatagccaattgtatcctgtctcttatacacatctccgagcccacgagaccagagagggtaaactcaataagttatatgatatttgtattgaattcggtgcagatacaaccagagagcaattaatcaatttctttattcgataa

SEQ ID NO: 307939 - DNA, 684 bp, Proteus mirabilis; identical to SEQ ID NO: 299132

SEQ ID NO: 307940 - DNA, 504 bp, Proteus mirabilis
  misc_feature (492)..(501): n is a, c, g, or t
atgaccctaacacctggcggaaatatatccgtacctgatcaaacgttaatggtgcgtattcactcaggctcacctgttgatgtatctgcatttaggctttatgcctcaggaaaagtgaacggtgatgctgatatggtgttttatggtcaaaccaccaatgatgatcgtactattatttatgcaacagcaggtaatagcacgtcgtttacggttgacttaactcgcttacgtcctgatgtcgatagaattgcttttacagctacttgtgaggggcaacaaaccattgctcatctacaacatttgtctattcaagttgatgctaacaataatgtcgttgcgaacggccatgttgatatcgatggacgcactgaagcggcattaattttaggtgagctataccgtcgcaatggaagctggaaatttcggtttattgcacaaggatttaacggtggattaaaaccattggcggaatattttggtgttgatattgcnnnnnnnnnntga

SEQ ID NO: 307941 - DNA, 786 bp, Proteus mirabilis
  misc_feature (761)..(770): n is a, c, g, or t
ttgcgtttatttttaccgattaaccctgtctttgctgtttacacctcagtggctaatgccaaacataccaaatggctcagtcgttatgcggatattgttcctttagatcccgctaatccaatggcggttcgccaattagttaaagaagtcgataaaggccgtcctgttgttattttccctgaagggagaattacggtaactattggtttgatgaagatttatgaaggtgctgcgtttattgctgctaaatcaggggcaaaagttatccctgttagaatagaaggtgctgaatttagctacttttctcgagtgcgtaaaacgttaaatataaaagcaaagctctttcctaaaatcacaataaaagtgctacctgcggttgatttacctatgcctacagcggaaaaatcagcagagcgccgtcgcttatcgggagaaaagctccgtgatattatgatggatgctattatgcaagcacgtcctaatatcacgctctatgaggcatttttacaaggaatgtctcagtttggtcgtttcagtcctcttatttcagatattaatatgaaagaggatagttatcagggcctattgaaaaaaatattaggtgttagtcgtattattgaacgctataccgaacctaatgaacgaattggccttttacttcctaatactaccgttacggttgcggctttatttggggcgacaatgcgtcaaagggttgtggcgatgcttaactatactgcgggtagcttaggtgtacaaannnnnnnnnngtacaaaatgccatga

SEQ ID NO: 307942 - DNA, 894 bp, Proteus mirabilis
atggagcatatcgaacaagcgggtgttcactctggagactctgcttgctctctacctgcttatactttaagccaagatattcaagatataatgcgcaagcaagtacgtgaacttgcttttgaattaggcgttaaagggttgatgaacgtacagtttgcggtgaaaggtaatgatgtttatcttatcgaagtgaatcctcgcgccgcacgtacagtgccttttgtctctaaagcaaccggtgtgccattagcaaaagttgctgctcgcgtgatgataggacaaagtcttgaacagcaaggcgttaccaaagaggtgatccctccttactactcggttaaagaggtggtacttccctttaataaattctcaggtgtcgaccctattttagggcctgaaatgcgatctaccggtgaagtgatgggggttggtgctacttttgcacaagcttttgctaaagcgatgttaggtagcaattccaccatgaagaaaaaaggaagagcgctactttcggttcgtgaaggtgataaaaaacgtgtcgttgatttagcaactaagctattgaaaaatggttttgagttagatgcaacacatggtactgccattgtcttgggggaagccggtatcaatcctcgcctagtgaataaagtgcatgaagggcgacctcatattcaagatagaattaaaaatggtgagtatgactatattgtcaatacgactgccggtcgccaagctattgaggattcaaaactgatccgccgtagtgcattacaatataaagttcactatgacactacattaaatggcggatttgcgacaacactgtcattgagtgctgatcctactattgatgttatttcagtccaagagatgcatgcaaagataaaaaaatcttaa

SEQ ID NO: 307943 - DNA, 264 bp, Proteus mirabilis
ttgaaagaaaattgccctgtttgtgagggaaagctcgctcaacttattaagcaaaatcaacctattgatatctatttagtgggaagcgaggggaaagatgatgtgatacgaaattgggctaaaaaacatcatatacctatcgaaaaggtaaaaaagcgccatatcacattaaaccatgataacgggatatggctaaagcatggcaatggaatgatgccagtcgttttacaacaaggagcgcaaggatggcaaagagtcgattag

SEQ ID NO: 307944 - DNA, 282 bp, Proteus mirabilis
atgcggatcttaattattgaagataatatcttacttcgccatcatttatctgtgcagtttcgcgatgcaggacatcaagttgatgcagcacaggatgcgaaagaagccgatcactttatcgcagaaagtacacctgatgtcgccattgttgatttaggtcttcctgatgaagatggtatcagccttattcgtcgatggcgggaaaataatattactattcccattatggtattaacaagccttttcattttgaagagatcgtggcacgcgttcaggcattaa

SEQ ID NO: 307945 - DNA, 261 bp, Proteus mirabilis; identical to SEQ ID NO: 299232

SEQ ID NO: 307946 - DNA, 627 bp, Proteus mirabilis
  misc_feature (589)..(598): n is a, c, g, or t
atgactcgatatgaacagcttgcggcacagatacgccaacaaattgaagataatatttggcaatcaggcgatcgtttaccctcattacgggatacggttaaacaatcaggtttaagtttaatgaccgttttacaatcttatcaactgttagaaagtcaagggtggatcaccgctcgtccgcaatcaggttattatgttgcacatcgcaatacaggttttgctcaagtaactgccagcaaagggctacatatgagtgaaaatgttgagataagcgcctctatattcaatgttcttcaagcctgtaaagatcccaatatcattccgttcggttccgcctttccagatcccagtttattcattcaacctaaattaagccgagcattagcctctgccgctagacatttagcccctcaaagttcagtgattaatttacctcctggtaatgaaaaactacgtcgtaatatagcccaacgctatgcactgcaaggtattcatgtatcgcctgacgatattgtgatcaccgcaggtgcgatggaatcattaagttttagtttacaagctgttactgagccaggagattgggttgtcnnnnnnnnnntgctttttatggcgcattacaggcgatag

SEQ ID NO: 307947 - DNA, 1419 bp, Proteus mirabilis
atgccttatgcttatttgggtggatataacccaacatctcccccaatcgtcaccggtaatactattatcattggtggctctgttactgataacttatcaactcaagagccttctggtgtgatccgtggctatgatgttaatagcggaaaattaatatgggtatttgatactggcgcagaagatcccaatgcgatgccaggtaaagagactcaatttgttcataactcccctaatgcatgggcgcctttagcttatgatgcacaaacggatgtggtctatattccgacaggagtaggtacacccgatatttggggaggcgatcgtcatccattaaaagagcgttacgctaattcagttttagcactaaaagggtcgacaggcgagctattgtggcatttccaaaccacccatcatgatttatgggatatggatgtaccttcgcaaccatcactggttgatatcaaaactgataaaaatgaaacaatacctgccatttatatcgtcacgaaaacagggaatgtgtttgttcttgatagaagagacggtacacctattgttcccgtaacagaaaaacccgttcctaccagtgtcaaatatggtccacaaacacaaggtgagcattactcacccactcagcctttttcagcacttaatttagcacctaaaaataagttgcaaggttcagatatgtggggcggcacaatggcagaccagctgttatgtcgtatcgccttccatcagttaaattatgagggaatttatactccaccatcagaaaacggtacgcttgtttttcctggtaacctcggtatttttgaatggggcggtatttctgttaatcaagatagacaagtcgcggtaatgaactttattaccttgccttttatctcaaaactttatttaaaagatcctcaagatagtcaagcaattgacgcaggccacggagagcaaggtttacaacccatgacgggaacaccttatagtgttgatattcatccattcttatcaccactaggattaccttgtaaacaacccccttggggacttgttgctggtgttgatttaacaaaaaatgagcttgtttggcaacaacgatttggcaccattagggatagtttgcctaatttagtggaattaccaccattaaaaattggtgttcctgggctaggaggcgctatctcaaccgcaggtaatgtgatgtttgttgctgcttctcaggataattatattcgagcatttaatgtgacgaatggcaaaatgttatgggaagcacgattacccgcaggtggacaagcaacgccaatgacctactctattggaggcaagcaatatgtggtcattatggccggcggacatggttcatttggtactaaaatgggcgatagcttagtggcctatgggttacctgataatttatag

SEQ ID NO: 307948 - DNA, 270 bp, Proteus mirabilis
  misc_feature (252)..(261): n is a, c, g, or t
atgggtattcctcagaaaagagctatcgaaaagctaggtttggtttttaatcacatagataatctaaccaaattagatcggttcacatttgagcaaatgttaaaagactctgagtatttagatgatgagccgacaatgtacatggttaaagcccttgcgtatggggcttatcaagataatcaaaatgctttaaagtacttcgatattgcaatgaaatatggcgatattagcgttgctaaaaactatataacnnnnnnnnnncttatttga

SEQ ID NO: 307949 - DNA, 966 bp, Proteus mirabilis
atgagtacaaaaaatttatcaacacccttgctgatggtagcaactgtgttagcagggatgctatcaccaatgcagtctgcggtgaatgggcaactgggacatgtattaaaagacggtaatgctagtgcagttatctcttttgccagtggtttagtggtcatgttttttatcattatgtccaaaaaacaatatcgccagcaatttgcttctattccgacattaattaaaacacgtaaaattccattatggaattggtttgctggcctctgtggcgcaatggtggttttttctgaaggagcatcagccagtgcattaggaatagctacattccaaacagcattaatttcagcactgttattatcaggtttattatgtgaccgctttggtataggtgtggatgagaagaaatacttcaccccatatcgtgtattaggtgccgtattagctgttgttgctactctttttgtcgtttctccgcagtggcattcaacctcttttatttacttagctattctaccttttttagcgggtttattagcgggatggcaaccagcaggtaattcaaaagtggctgaagcaacaggttcgatgatggtttctattacttggaactttattgttggatttactgttttaacgattgcgttagtagtacgtatggcgttagggcatataacactggagcttcctgctacatggtggatgtatttaggtgggcctttagggttaatgtctattgcattaatggctattttagtacgaggcttagggttgctgatgttaggtgttgcatcaactgcgggccaattactgggttcggtattaattgacctattattaccttcgttaggaaatactgtttatttagtcacaatcatcggtacgttatttgccttagtcggagccattgttactaccattcctgagtttaaagcgactaaatcagtaaaaagagcaggggcataa

SEQ ID NO: 307950 - DNA, 315 bp, Proteus mirabilis
  misc_feature (254)..(263): n is a, c, g, or t
atgaatgtaaaagagatcattcgtcatgaaccatttggaacattactcggttatgcacctggtggtgttgcgatttactcttcagattacagcagtatagataaagaagattatgccgccaatgattcattccgtagttatattggtaatgagtatatggggcataagtggcaatgtgttgaatttgcacgccgttttctctatttacattacggggttgtttttactgatgtgggaatggcctatgagatctnnnnnnnnnnattttacccttgcaagcttttgcaaatggcagcaaacagccaccgacggtag

SEQ ID NO: 307951 - DNA, 189 bp, Proteus mirabilis; identical to SEQ ID NO: 297739

SEQ ID NO: 307952 - DNA, 927 bp, Proteus mirabilis
atggttgaagatatgcgcaacaatattgctcatcgctacttacgctatgataatcagctccccattgaagaaagagaaataggttggaatagctgggcaaatattctgtacggttatggtacgcaaagtcaacaaggtggaattaacggctacaatacttatcgcactggtattcaaatcggtactgattatgaaataaatcaagatgcgctaattggcatttctttagcatataactacgctaaagccgatgctaaacaacgtaatgcaagcaaagaaattagccattttgaatttatgccttatgccggttggtatagtgatacattattcttaaacggtaatttaaatattggttattacactgtcgatagtgagagggatatcggtggtaatacgggatggcaaggaaataccaaagcaaaaggtgactactctggtgtgcaattaggctatcagattaacgctggcacctatttggattttgattttatccatattaaaccgatgctaacttaccaatatcaatggctcaatattgattcttgggaagaaacaggctctacattatctatgcgtacttatggccaacgctacgcagttaatcaattaggtggctctgttgctttatggaatgactaccaaacctcttatggcaaattaaccccttctcttaaccttcgttatatcaaagatattgcaggtaataacgatattaatcaacgccacagccttacctattttaatactggaggaagcaccttcgatattaaaggaaataccgttggtggtgacatcattagtgctgaattaggtgcaaaccttgatattacccaatcgttaaatttaggtacaacaatgggatatcagcgttatgacaaattcaatgaagggcgtatcggctttactgttagccagcgtttctaa

SEQ ID NO: 307953 - DNA, 846 bp, Proteus mirabilis
atgtctttatatcagggagataaggctctcgaagcactatcattaggcaaagaaacacaataccacacacactatgatgcgagtctattacaaggtgtacctcgtcgcttaaatcgagattcactctctttaactgctgacaatctaccttttcatggtggtgatatctggacaatgtatgagctatcttggctcaacagccaaggtttacctcaagtggctattggccatgtagaattagatgcaacgacagaaaatctcatcgaatcaaaaagctttaagctctatctcaatagctttaatcaaactcgttttgaaaattggcacattgttgaagaaacattactcaaagatttaactgcttgtgctaaaggcagggtgcatctaacgctttacccactttcccattttacctcacagcctattgtcgattttgtaggagagtgcattgataaccaacctattgaaattgataattaccaattcgatagccaatggttaaacggatcaacaacagatacactggttgaggagacgcttgttagtcatctgctaaaatcaaattgcctgatcacgcaccaacctgattggggatctgtgatgatccaatataaaggcaaaaaaatcgaccgtgaaaaactactacgctatcttgtatcctttagacagcataatgaatttcacgagcagtgtgttgagcgaatattccacgatattatgacattttgttcaccagacacattaacggtttatgcaagatacactcgccgtggaggattagatattaatccttggcgtagtaattgtgagtttgttccagaaactggtcgcttagccagacaataa

SEQ ID NO: 307954 - DNA, 384 bp, Proteus mirabilis
atggagtgtccaccccagcaaacgatcatatttggatcttcatcgatatgtagcgctcttgcattacgtaagatagagaaaatggtgtttgttatatgggcgctgttttcaagatttaaatgtaggtcgcgttttgccgtggttatttgcccatgcacaaacaaaatatcgcgcagtacagcaaataggtttgcttgtagagagcgaataatttttccatcaacaaaggcatcttctgggggattaactagctctaattttacaccacgttcgcgacgcagtacgttaatatcaaaatcttggtatttagataacagttctttactactatcagtaaggctaccagagttgagaactgcaagtgaacagttacgaaacagttga

SEQ ID NO: 307955 - DNA, 1050 bp, Proteus mirabilis; identical to SEQ ID NO: 300184

SEQ ID NO: 307956 - DNA, 273 bp, Proteus mirabilis
  misc_feature (9)..(18): n is a, c, g, or t
atgtcaatnnnnnnnnnngcgaacaagctagaattaactgataaggagatatttgagcatcatactgatattaaaaatgatgaggataaatatattgctatgcgccgtaaaacttattccatatatgaaagtagcggtgatgatgaacgtaaagtttcattaggtaaagagggtaaagcattctctgatatatatggggcacaatatgagccttcgatggcattaaccgcagactattttgcagatcctcaactctacgatgtgatcaaataa

SEQ ID NO: 307957 - DNA, 216 bp, Proteus mirabilis
atgttgtctgaagagttacggagagtagtttttcaaaccatagagtcgttacccgaagatttaagggttgctattacacttcgggaacttgacggcttaagctatgaagagatagccgttattatggattgtcctgtaggtacggttcgttcacgtatttttagggcgcgagaagctattgataataaggttcaaccattaatacaagagttataa

SEQ ID NO: 307958 - DNA, 1095 bp, Proteus mirabilis
atgatcatgcaaaaagacgcactcaataatgtcaacatcagcgaagagctggtgttaattacgccggaagagttaaaacaaaaatacccgttgagtcgtaatgatctgcatgccattactcaatcacgtcaaactatttctgaaattgttcaacgtcgtgatccgcgtttattagtggtatgtggcccttgttctattcatgatgtcgatgttgcgttagattacgcaaaacgtctaaaagtcttagcgtctgagttaagtgatagtctgtatattgtgatgcgtgtctattttgaaaaacctcgtacaacagttggttggaaaggtttaattagtgatccgtttatggatggcagttttgagatggaaaaaggcttacatattgcccgtaaactattaacagagttggttcagttaggtttacctttagctacggaagccttagatcctaacaatcctcaatacttaggtgatttatttagttggtcagctattggggcaagaacgaccgagtctcaaacccatcgtgaaatggcatcaggtttatcaatgcctgtcggttttaaaaatggtacagatggtaatttagatacggctatcaatgcgatgaaagcggcttctatgccacatcgttttatgggcattaatcaatcaggacaagtctgtttattacaaacacaaggcaatcctgatggacatgttattttgcgtgggggtaagaaacctaattaccatgaagaagatgtcgcgttatgtgaagctcatatgataaaagcgggattaacaccatcattgatgattgattgcagtcatggtaattcaaataaagattttcgtcgtcaatctgtcgtggttgattcagtgattgagcaaattaaaaaaggtaatcaatcaataacaggaattatgttagaaagccatattaatgaaggcaatcagtcatcagagcagcctcgtagtgagatgaagtacggtgtttctgttactgatgcatgtattagctgggaaaccactgaatcggtgttaagaaatctgcatcagcaaatttcgccagttttagcacagcgtgcagcgcaactaagaaaagttagctaa

SEQ ID NO: 307959 - DNA, 474 bp, Proteus mirabilis
ttgtcaaatttatgcccctgcaatagccaattgccttatagtgagtgctgtgagccttacttattagggacaaaaaatgcccctacagctcaagcgttaatgcgctctcgctatagtgcttttgtgactcataatgcagatcacctaatcaaaacatggcacccttcgtgtcgtacaccttctttacgggatgagttaatcgccacgtttcccaatacacaatggctagggttacatattatatcggcacaagaaaaccctcgtgataacgaagcctttgttgaattctcagcttgctttattgaaataaatgctgatgataagcagtatctacatgaacgctctcgttttctaaaaatagacgactgctggttttatattgatggtgtacagcctaaagtaggacgaaacgatccctgtccttgtggctcaggccgtaaatacaaaaaatgttgtgaacacaacagaaaataa

SEQ ID NO: 307960 - DNA, 1173 bp, Proteus mirabilis
gtggcgggtgaacgtggtgcagctgatgctgagcgcgatattcgtggatttgccttaaaattttatacagaagaaggtaactgggatatggtgggtaataatactcctgtattctatctacgtgatccccttaaattccctgatcttaaccatatcgtaaaacgtgaccctcgcactaatatgcgtaatatggcttataaatgggatttcttttctcatttaccagaatctctacaccaattaactatcgatatgagcgatcgtggtttacctttaagttatcgctttgttcatggttttggtagccacacttatagctttatcaataaagataatgaacgtttctgggttaaattccatttccgttgccaacaaggcatcaaaaacttaatggatgatgaagcggaagctctagtaggtaaagatagagaaagctctcagcgtgatctttttgaagccattgaacgtggtgattatccgcgttggaagttacaaattcagatcatgccagaaaaagaggcatcaaccgtgccttataacccatttgatttaaccaaagtttggccacatgctgattatccgctcatggatgtcggttactttgagttaaaccgtaatccagataactacttctctgatgttgaacaagctgcatttagccctgcgaatattgttccaggtattagtttctcaccagataagatgttacaaggtcgtctattctcttatggtgatgcgcatcgttaccgtttaggcgttaatcatcatcaaatccctgttaatgcaccaaaatgcccattccataattatcatcgtgatggtgctatgcgtgttgatggtaatagtggtaatggtattacttatgagccaaatagtggcggtgtgttccaagagcaacctgactttaaagagccaccactttctattgaaggtgcagccgatcactggaaccatcgtgaagatgaagattatttcagccaacctcgtgcactgtatgagctattaagcgatgacgagcatcaacgtatgtttgcgcgtattgcgggcgaattatcacaagcaagtaaagaaacacaacaacgtcaaatcgacttatttaccaaagttcatcctgaatatggcgctggcgttgaaaaagcgattaaagtgttagaagggaaagacgctaaataa

SEQ ID NO: 307961 - DNA, 1104 bp, Proteus mirabilis; identical to SEQ ID NO: 297084

SEQ ID NO: 307962 - DNA, 177 bp, Proteus mirabilis
atgactggattaattattaccatcgcgttattgggtcttattttttattattacaaccgtattatctctatgcgtgaagcggttatctcaagtgaaacagaaatatcggtacaactcgaccgtcgtggtaaagtgtttgatagcttattagctagaagcaaaagcggcagaagatga

SEQ ID NO: 307963 - DNA, 423 bp, Proteus mirabilis
  misc_feature (6)..(15): n is a, c, g, or t
gtgtgnnnnnnnnnngtaagaatatcggcgactgattgggttgagggaggatgggatctggaaagttctatcgcattaactcaacatcttgaagatctcggttgccactatattcatgtttcttccggtggcttatcagacaaacaagccatcaagctaggacctaattatcaggttccttttgctcaagccatctataatgaaacacaattacccgtaattgcggttggattaattacagagccagagcaagcagaagctattttactgactgaacaagctgattttatcgcattaggcagaggaatactttatgatcctcgttggccttggcatgcggctgaaaagttaaagcagaccattaaagtcgctccgcaatatttgcgttgtgcgccacatggtagtaaagatttttttaaatag

SEQ ID NO: 307964 - DNA, 468 bp, Proteus mirabilis; identical to SEQ ID NO: 307747

SEQ ID NO: 307965 - DNA, 864 bp, Proteus mirabilis
ttgcaagatagtatttgccatgctattgaaaatatagaccaaaaagcaacctttcagcaagataattggcaaagagaagctggcggtggtggtcgtactcgagtgctcacccaaggtgctatttttgaacaagcgggtgttaatttttcccatgtttatggagatgccttacctgcatcagccacggctcatcgccctgaattaagcggtcgtcgttttcaagcaatgggcgtttcattagttattcaccctcttaatccctatattcctacttcacatgcaaatgttcgtttttttattgctgaaaaagagggagaagatcctgtatggtggtttggtggaggctttgacttaacaccttattatggatttgaagaagatgttatccattggcataaagtggctaaatctgtgtgtgatccctttagccaagattattatgctcgatataaaaaatggtgtgatgactatttttatttaaaacatcgtaacgaaccgcgtggtgttggtggtctattttttgatgacttaaatactcctgatttcgatcactgttttgaatttgtacaacgtgtcgggcagggttatctggatgcctacttgccgattgtcggaaaacgcaaatctataccctggggagaacgtgaacgccaattccaactttatcgccgtggccgttatgtcgagtttaatttggtttgggatagaggcacgctatttggtttacaaagtggcggacgtactgaatccattttaatgtcaatgccaccattagtgcgctttgcatatgattatcgccctgaacctaatactcccgaagctaagctgtatactgattttttaattcacaaagagtgggtatag

SEQ ID NO: 307966 - DNA, 660 bp, Proteus mirabilis; identical to SEQ ID NO: 300395

SEQ ID NO: 307967 - DNA, 579 bp, Proteus mirabilis
  misc_feature (557)..(566): n is a, c, g, or t
atgaatcgtcgttcatttttaacatcatcaagcttagtgatcgggggactttcattaagttcgtttgttagcgctgcctatgccgcagaaacttcaaaccctaaacagctatttaatgcagaaaatcctttactgttaaactttaatgaaaactcgctaggcatgtcatccaatgccaaacaggcgattattgatgcacttccccatgcttttcgctatccagatgatgcgcgaagcgcactgatcagtgcattaggtgaagaatttaagctatcagacaaacacatcactctaggtaatggctcctctgaaaccatacaagcagccgtacaatatgtggctaataaagcgcaaaaagcaggtaaaacagtacaactgattgtgcctgatccaacgtttaattatgccgaactttatgctgaacctttaggtgttaatatcgtaaaagtgccggttgataacacattggcttttgatttaaccgccatgcagaaaaaagcacaagcatttgatggtattagcatggtatatctgtgcaatcctaataacccaaccgnnnnnnnnnnacagcggcattaa

SEQ ID NO: 307968 - DNA, 432 bp, Proteus mirabilis
gtgacaacacctgaatttaccagtgcgatagcattagttgctcaaggttataaaaacttgattgttacccgtacattttcaaaaatttatgcattagctggattaagggtaggctatggtgtggcagcccctgaggtaattagtgaagtagatagtttcgtttctatagataataccaatactgccggtgctgttagcgcattagcctcgttaaaagatcacgcttttgtggcatatagtcgcaagtcaattgatgtatcacgacaaatggtggttgatactttaaacgccttaaatatcgagtatgcaccttctcacgccaactttatttttcataaagtcaaaggtgatgtgaaaacttatcaagagagaatgaaagcggcaaatattatggtaggacgtgagtttcctccggaacccctgaggagatga

SEQ ID NO: 307969 - DNA, 675 bp, Proteus mirabilis; identical to SEQ ID NO: 300193

SEQ ID NO: 307970 - DNA, 573 bp, Proteus mirabilis
atggcacaagatgtattagccctgcttgatagcttaaatatcgcaaaagcaatcgttataggtcactcaatgggagggaaaattgcaatggcaatgaccgctctcgcacctcttcgccttgaacgtatcgtagttattgatatgtctcctgttgcttataatgttcgtcgtcatgataaaatttttgcagcccttgaagctgtcactaaagctcacgtcacacaacgtacagaagctattgctattatgcgcccttttattgaggaagacggcgttatccaatttctgcttaaatcatttaaaaaaggtgaatggttatttaatttacccgcaatcaaacaggcttaccccgatattattggttggcaagaggtgcctgcttggcatcatcctgttttgtttatacgtggtggactatccccatatattttagatgaatatcgcgataatattgctcgccaatttccacaagcaaccgcctttgttgtcgccaatacaggacattgggtgcattctgaaaaaccagaaacagtaattaaggccattcgtcgcttcttagccaaaacagtataa

SEQ ID NO: 307971 - DNA, 174 bp, Proteus mirabilis
atggcggcaactgcggcagcatctgccgcatttttatcttgtttacctacccatggcatagccgcaatagcagcagcttctgtgactgatgcgatagaattagttaattcatcatttaatttcatagggttaatatactttgcaaggtctgttatattgaatagtagcctttga

SEQ ID NO: 307972 - DNA, 552 bp, Proteus mirabilis
gtggttaactggaaatcatcaaattttaatttaaccccttgtctcgcaattctaagatcaggtttcactcggcttaatcgtttttctaattcatcatataatccatcaagcaatgctaaacactcatcccatgaatcaatatcttcagccagtgtgcgctcaacaccaacagattttcttaaacgttcaggattgattaatcgctcatcaataccatggctacgctcccataagctttgcccaaatttacctagatttctcactaaggaaataacatccgtaccacgaacatcagcacaggtttctaatcccatctcttgtaatcgagcaaaggtgacttttcctactcccggaattttatttaatggtaattttaaaataaagtcatccatctgttcaggggtgatcacatattgtccattcggtttatttaaatcagatgctattttggcgagaaacttaatcggcgcaataccggcggaagccgtgaggttaagttcagcaaaaatttgctggcggatctgttgcgctatcaatgtggcagagccgtga

SEQ ID NO: 307973 - DNA, 417 bp, Proteus mirabilis
atggcaagcgatgtttttaatgacttgactaatgcttcttctgaatcggtattattaataagtgcttcagatgccacattctgtttctgtgcttgttttaatgtcacttcagcatcatgttttaacgtccgagcatcatcgacttgttgtgctgtgacaaagccttttgctaataaaggttctaatcgatttaatgattgtgtggctaatgataaattgacctgcgcacgttttatttgctcttgtgccacttctgaattggatgtttccgcaataataatacgttgcttattgcttaatgtcgcttgtgcaatctgtagttgctcttttgcttgctctaccctgagtgcgtacattgtgggatcaagtgtaaacagtaaatcgccttttttgactttactattttctttgacataa

SEQ ID NO: 307974 - DNA, 219 bp, Proteus mirabilis
gtgtgtgggcaacaggctgatgatccgcatcacatcatcggtcatggtatgggaggcatgggtactaaagctcatgacctattcactattccattatgccgcattcaccatgatgagttacatcgagacccaaaacaatgggaagcgactcacggcaatcaactcgaattgttatttcattttttaaaccgttctttaggtatcggtgcatttatttaa

SEQ ID NO: 307975 - DNA, 144 bp, Proteus mirabilis; identical to SEQ ID NO: 293753

SEQ ID NO: 307976 - DNA, 537 bp, Proteus mirabilis
atgattttagaaagccaacaacagataaactcgagacaatatcttgcacctgcttatatctatcattccgtttttatgcaaagtaatgctgaacggacaatgggaggcacattatttaacttttatacaatatcaaaagtgatttctcagcttctcgatcttagtcattatttaccaagtgatattggtgctatttttattcatggtaatggttcgattattagtgataaagctgagacggtagctattactaacatctttaaacaacccatccctattattagctataaagggcagataggttatatttctaattgctctggtattattgatttaatgattatagctgattcattaaaaaataatcgattgatcccctcgacttcacattatccaatagatgatggaatggaggttaatttcctcactaatcaagagggtgtgaactatagcgctaaacctattttaaaaatcggcttaggtatggatggctctattattgccatgttattaatcgcaaatggagagcaaggatga

SEQ ID NO: 307977 - DNA, 222 bp, Proteus mirabilis
ttgcgagacaccattgccattgaggggcggacatacaccacaaaaacgcaatcaggggattttttaattaaagcgaatcctgctgttgccatgttggccgatgcagatcgccgttttaaaagttatttagtcgagtttggtttaacccctgccgctcgctcgaaggtgaatatggatggtggagaagaagaggaagatccgctcaaccaatatttcggttga

SEQ ID NO: 307978 - DNA, 222 bp, Proteus mirabilis
ttgcgagacaccattgccattgaaggtcggacatacactacaaaaacgcaattaggggattttttaattaaagcgaatcctgccgttgccatgttagctgatgcagatcgccgttttaaaagttatttagtcgagtttggtttaacccccgccgctcgttcgaaggtgaagatggatggtggagaagaagaggaagatccgctcaaccaatatttcggttga

SEQ ID NO: 307979 - DNA, 273 bp, Proteus mirabilis
atgctgttatatctaattttatttgccatcattataagtggctatttaatttctactgctgatggtcagccaatatctgtattcgattggttctcagtacctgctgttttcacaggggaaggggaacaagctgatttagccggtgatgtacatctttatttagcctgggcggttgttgtgttatcgctattacatgccgcgggtgcattaaaacatcactttatagataaagatattacattgaaacgtatgcttggcataaaaacacaataa

SEQ ID NO: 307980 - DNA, 321 bp, Proteus mirabilis; identical to SEQ ID NO: 298006

SEQ ID NO: 307981 - DNA, 612 bp, Proteus mirabilis
atggaatttaactctttgttattctttgcccttacagtactgcctttaatttgcacacctggccccgatattctttttatctcctcacaaggattagcgggaggaataaaatcagcgtggtttgccaatatcggtgtcatttcaggttatatcacacatgctattcttagtgctttgggtcttgcaacgataatggcaacttctcccattttcttttatctactaaagtggctaggtgtgatttatattacctacttagcaatcaaaatgctgatatctgcatgccaaaaaggccaactcgcactacatgcagataaaaaaacacatctctttcgcaagggctttttaacgagttttcttaatcccaaaggcttactcgtctatctggctattttaccaaattttatcaataaccagaatgatatcgctatgcaatctctgcttttatctgggatatttatcactatttgtctatttatctatggctttttaggtacgattttcgcttatattggtttaaaaggcggattaagtgataaaggacgccgttataatgatggcattgccggcagtttacttacctttgcagccgttaatttagcccttaattag

SEQ ID NO: 307982 - DNA, 402 bp, Proteus mirabilis
ttgtgcttcgagaaagtaaatgcctcacaagatgaaattattgttgaagtggatgctccaagagttaagcgtaagcttaacatcaatgggaaaattatttgctttcgtagttatagccgtaagtctgctactaaaaatactgcatttaaattagccaagacacctcctactcaaggggttgctcgttatgtagcagagctagctcactattataaaatatcttattgctacaatatgatggatcagtgggctgatgctgtaactcgcctagccggtgatgaggtggtacatgatactgttgaggacctccttgtagctctaaaacgagcagggaaaatcaccaagcaagaagttgcgatgctgtcagtcaattacctgcgggagcaaaaacaaagtgtttga

SEQ ID NO: 307983 - DNA, 531 bp, Proteus mirabilis
gtgaataaaattaaagatgatatttattggatgcataaagcgattgagcaggcacataaagcacaacaactcggtgaaattcctgtaggagccgtgttagtcgctgataataaaatcattgctaaaggttggaatcactccattattgataatgatcctactgcacatgcggaaattatggcattgcgtaaaggtgggaaacatctacagaattatcgcctacttgacgccacattatatatcacgttagagccttgcgttatgtgcgctggagcaattgtacatagtcgtgtaaaaagagtggtctatggtgcatctgatctaaaaacaggtgccgcaggctcatttattgatattttgcaacatcccggaatgaaccataaagttgaaataacatcgggtgttttaggtgaggagtgcgcacaactcttgagccagttttttaagatgagaagggcagagaaaaaacaactgaaacaacagcaacgtttaattactcaaggcttaattatacaagagaaagccaaatag

SEQ ID NO: 307984 - DNA, 396 bp, Proteus mirabilis
gtggcccgttttgccaaagtcatcgctgccgcatgtcaagatatcaatattaaagtaacaacaacgcaagtccccacttgggttatctacctgttagttgatgcgttttataccacttacgataatgcacgtaaccttaatttagaacatcgtaaacattggagtatggagtttatcgccaatatggtcgaagcagaggccaatattggcggtgaaaacgcgttatttgcaatttttgatagaaaagatgtctctgaatattatgccgctaatcttaagcgtatttatgaactgtgtgatttaaaagactatctactttcacatcaagaatttgttagaaaagaattagttgaaaaactttcatcaaatatagccagtaggacaagagagccttga

SEQ ID NO: 307985 - DNA, 180 bp, Proteus mirabilis; identical to SEQ ID NO: 307622

SEQ ID NO: 307986 - DNA, 147 bp, Proteus mirabilis; identical to SEQ ID NO: 301819

SEQ ID NO: 307987 - DNA, 477 bp, Proteus mirabilis
ttggatgtttatggtaatcaaataagtcatttgaaattaggttttcaaaccataaaagctatccatcaagcggtaagaagagaaaaactcacgtttgagttgatgacttatcaacaaggcctgattaaccttgaacgtatcatcaacaaaaataacgattacagttcgcatttatcacaaaaaatatctcaacttgaacgacaaaaaaattattttgaaccgctttctgacggattatttaatgctctcgctggcgtttatagtgatgcggtcagccctgtagggccaaaaattcaagttaatggttcgattgagttgcttaaaaaccctattattcaagccaaagttcgtggattacttttgacaggtcttcgtagtgccgtactttggcgtcaagtaggtggtcgccgttttgattttttactccatcaaaaaaccatcttacgacaaactgatgattttctcgctcaatgttaa

SEQ ID NO: 307988 - DNA, 522 bp, Proteus mirabilis
ttgcctgaatttgaagagataataaaaaaagcaggttatacgggtgacggtatgacaaccgctatgtatctctcattgtctgatgcgacttatcccccctataaaaataacccgtgcgatattattttaactaaccatgatcttaaacagtgggcgcaaccattgaaaaccgcctttcctgttggtgacgatacgataactaatgaatatattcgttatcaccaaaaagcgttagataatggtgcgacgatccttcattatgcattattagttgcagggcagcctgtatcatcattaacgctgacattacatgataaactagcaagatttgacgatattgggacggatattgcctatcaaggcaatggttatgccacacatttaattactcacgtattagagttttgtcgagagcaaggtgtcgagcgttgtttcttagatgcgtcagcggatggtctagcgctataccgtaaatttggttttaagccactttttaactatttaagctttattaacgaataa

SEQ ID NO: 307989 - DNA, 303 bp, Proteus mirabilis
atgttaattattcataatgagctttgccatcgagctggcttttcgattgattggcatagaacgaataaaatggattacttgagagccttaagcgctgaaattaaatccccattaaaagggcttttggataactacttatttcagtttataggagatacccgagatcgaaatctttggggggagtctataaatggtattcgtggtttagatggtcaaagtatagaaaattccgtagatggtgagtacacggacatagcagttgctcaaaagtatcaatcattcaagatgaatagaggtctgtga

SEQ ID NO: 307990 - DNA, 231 bp, Proteus mirabilis
atgagtaaaaaattagatattgtactcgctggttttcatgatcctgttatgggatcactaggtatggttgataatactaaagcgcttattgcaacaataagtagtggtttagtacaggtgatcacccatccgggaaaccctaaatatcctatagatattaaggaagtcgcaaaggttgctgctgagttcaatgttgcattagaaatgaataattcttcttttatacattaa

SEQ ID NO: 307991 - DNA, 306 bp, Proteus mirabilis
  misc_feature (217)..(226): n is a, c, g, or t
ttggatgcaaatatcgcgatattctcgtgggataaagcaggcattggtgatagtcaaggaaactggctacatcaatcaatggaagctcgagctgaagaagcggtagcagcattaaaattaatgcaacttcgttatcccgaagttcaagtaggttttttagggttttctcaagcaggatgggttattcctatcgccgctagtcaatcacaaccagctnnnnnnnnnncaaccagctttttctgtgattattggaggtgctgtcaattggcgagaacaaggacaatattatcaaaaattgcgttatga

SEQ ID NO: 307992 - DNA, 264 bp, Proteus mirabilis
atgccaacccctaaggtccaagcacgaataaatcctgctattcccatggttaaagccaccattatcgaggtcgtgatctcttttcttaatactgaccatacattacgcaagctcacctcacctaatgccatggcacgtactaatgttgaggtaatttgtgtaccgctattgccaccagtaccaattaataatggaataaagaaagctaaagagatagcagcttcaagtctgtcttcaaaagcatgtaacaccgtactggtataa

SEQ ID NO: 307993 - DNA, 156 bp, Proteus mirabilis
atggcagaaagctttttacaagagggatcacagaaagtcacagcagataaggtgctgacctatggacaatctatcactgatccttgtctcagttgggaagataccgaacaattactggaattattagctcaagcggttgaaagtcgatttaaataa

SEQ ID NO: 307994 - DNA, 159 bp, Proteus mirabilis; identical to SEQ ID NO: 302338

SEQ ID NO: 307995 - DNA, 159 bp, Proteus mirabilis
atgttttttggtgtattcattattttggcgggtatcttatctttactagaaagctatggcgttattgctggtgacgttaagtggggtttgccactggccgtcatttgctttggggccagtatcgtctatgactccattaagaaaaagaatcaagaataa

SEQ ID NO: 307996 - DNA, 450 bp, Proteus mirabilis
atgaacacgctaactaaggtattagctggactactggcaatatctgcattctggctatggtgggtaatagatgactacgacaaattaagcaaagattacaacatagcaaccaatcagttatcacagcaaatcgatatcaacaaagactatcaagcacgtatcactcgattaaatcaacttgatattaaatatactcaggagctagccagtgcaaagaatgaaatcgataggttgcgcgttagtgctgagcgtaatcctgacagggtgtacatcaaagccgagtgtccaaaaagcaccaccacttccaccgccagcttggcttatgcaaccaccgcccgacctactgacaccgctatcagaaattattggttactcagagagcgaattgcagagtcagaacagatgattaaagggttgcaggattatatcaaacaagaatgcatggaataa

SEQ ID NO: 307997 - DNA, 696 bp, Proteus mirabilis
atgatattaacagcaactttttctatttttaatgcgacacaagctgctgtcacattagatagaactcgtattatatttgaaggaactcagccatcaataaatattacaattcgaaatgataatgcagagttgccttatttagctcaatcttggttagaggacgattcagagaaaaaactggaaataggtcctattattgcaactccgcctattcaacgaatggaaccaaaatcaactagtctagtgcgtttaagcactacacctgatattgctaaactccctcaagatagagaatcattgttctattataacttacgtgaaattccacctaaatcttcagaggcaggagtattacagattgcattacagagtcgtgtaaaattattttatagaccagattctattgtaaaacaaagcaaaagtgattgggtaaaaaaaatcacactaacacgaatttcaaatggctatcaattaaataaccctacaggattttactttacattaatcggtattggtaataatgctaagcagtctgaaattagtgattttaaagctgttatgataccgcctcaatcaacatactttataaaatcagtaagttttacaacaccttaccttacttatattaatgattatggcggtaaaccgacattagcatttcaatgccaatcgaccttatgtaaggtgaaagattaa

SEQ ID NO: 307998 - DNA, 2490 bp, Proteus mirabilis
atggctaaattaaatattttttattatataattatggcatcctttatttcatcaacatcttctatcgcctatgcaatagaatttaatgttgatatgttggataccgaagatacccaaaatattgatttcagtcagttttctcgtcgtgattttattatgccaggatcttatcacttaacactgaaagttaataatgaacgtataggtaatgctcaagatataaatattatattacctaacactacctcttataacttatttgatgtcgcttgtattcctaaagactttgttaaaaatttaggtataaaagaagaatacattagccttattaaatatcgtgataatgataaatgtatagatgcttcatctcttgagggtactttcgcagaaattgatttatcgacattaacattatcaattactattccgcaaagttatttagaatattcagatcctagttggatccctccttatcggtgggaagagggagtgaatggttttattcttgattatagtttgactggttcattaactcgtcgaaattcaggttcaaaagaatcttatctttctgcaaacgggacgacaggtgtcaatattggtgtatggagattacgcgctgattatcaagcaaactatcgaagatcaacaggtaattataatcaccaatatagtgatactagattaagtcgtatatttgcctatagatctttaaaaaagatagcctcagtcctaacgcttggtgaaaattatttctattcatctatttttgattcttggcaatatttaggtttatctatagaaaacgatgaaacaatgatgccacctaaattaacaggttatgcacctgaaatcattggtatagccaaaacaaatgccaccgttattgtcaaaagccatgaacggatagtacttgaaacaacagtccccccagggccttttcgtattcaaacgttagatagttccattcgaggaacattaaaagtcaccatacgagaagaaaacggtgaagagcaacaatttgatataacaacagctgcattgccttatttaactagacctggacagtatcgttataagctagctataggtaagcctcgggttaatggacgggaattacagggagatttaactgcatcaggtgaaatgtcatatggcctaaataatatttggtctatctatggtggtttaattctttctaaaaactatcaaacactatcaacaggttttggtcgtgacctattcactttaggcagcatttcttttgatgttactcagtcaagagcccaaatgttaaataaagtattaacaggccgtagttaccgacttagttattcaaagtcctttgatgaagcaaggacagatataacttttgctggctatcgcttttcagatgaaacatatcgcacactacaacaaactttagatgaatgccgtactggtatagagacgcaatcacataaggaaagttatcaggttaacatcaataaatattttgatagcttttcccttggtgctaactaccaatacaacacatattggaacagtaacaccgaagaacagcataatatttatctcagcactgcatttaactggaagaaattaggcttaaaaaacattaatttaacagcatcggcaacccgttccatacgtactggttatcaagatgattcgttgaatttacaactctctgtaccattaactcaaagtagtagcattagcttctctgaagggtattctcgcgataagaatggccaacatagcacaacacataatatagggtatagcaaatatagcgatcagcgtagttataacttaaatgtgggatatcaaaacaatcaaaatcaagggagtcaaacaagctttagtggttatttaaatcaaaacttagcttatgcctctgtttctggtaacgcgagttatatgcctagtgaatatcatagtatcgggggagcaattaatggtggcattacagtgataaaagaaggtgttgcaatgcatcaagccgcatacggtggaacccgattagttatagatactcctaatgccgcaaatattccattaaatggtggggtttatcagacaaatatatttggattagcggtaatacctaatgtcagtaattataggaaaacgatggcatcaattaatactagtaaactaccttcaaatattgaagcattagaaacagtggtagatgcaactttgactagaggtgctattggttatcgttcgttaaatgttattcaaggcgaaaaaatattttcacgcataaaactggcagataatacatatcctccatttggagccagtattcgtaatcaaaagaatattgaactaggtattgtgggtgaacaaggtatgtcgtggattgtaggtgttcatccacaaggatcattaaatctttattggggtaataaacagcaatgcacgataacaataccagatattattaattcacaagcaagctactcaacactaatttgtcgttag

SEQ ID NO: 307999 - DNA, 567 bp, Proteus mirabilis
atgaaaaatatttatttagtatggttattattatttctaattccaaaattcgcttatgcacttactaattcttacaataagattatagagaataaaggtgaagctgttatgcaaggttatattgtatcaacaccttgttcaatagaaactaatagtcaatatcaatatatcagttatgacagtgtatcgcagcagaatataatttcattatctgaaaaaaaacaatctagaaaaccattttatattgttttaaacaactgcattagtgaatatggtgtaaacaataataaaggtattaatatccaattttcatcattacaagatccttataataatgccattagattatcaggtccaacaaaaggggttattctatttatttatgacattaaaaataatttaataataccaaatacaaaacacgagttgtctcataactctttttattttgataaaaagagtagaaaaaacatattaaaatatgaaatagaattaaatatatcaaataacaaaatagaacctggtgattattttgcaacaataaaatttgatatcacttacgattaa

SEQ ID NO: 308000 - DNA, 552 bp, Proteus mirabilis
atgaaattaaacaaatttacactctctttattacttactgtttcaacattatctacttctgtttttgttagtgctaataatggtgaaatccattttagtggccaagttgttaactcaccatgtaatattgaatctgacagcttaagacaagaggtttcttttggacagctatcacgtacctatttagaagcaggcaatgcaactgaaaaaaatatttctattaaattaaaagaatgtaattttgatgagttcagcaaggatgctcaaggtaattggctacctgtaaaagatattaagattacatttggtggtaaaaactatcaaggagctaacaaagattttttaagtactacaggtagtgcaggtaatatcggtattcaaattaaagattttaattttgatgaagcaaaatcaatattaaaccaaattcgtaataaacaaggtgaaaacgttttagaatttacagcattagccaaacgcgtagatggaactgcgccagtagtagaaggtgaatttagttctattgcagactttaaaattgcctacgaataa

SEQ ID NO: 308001 - DNA, 483 bp, Proteus mirabilis
atgtccagtaattataaaaaaaaatattcactacttctaataatctctcttattttaatatctttaagcatttacacttatatcgggaattctgagtcaattatcccagaatgccaagctattgttaaaataaatacaaaaaatgatgatattaatttaaatggttattatttagcaagtgtaataccgaataatcattcttcacatcagtattcatatctaatgaatggaaatatcaacttcaaaggcgagaaaatcaatatagccaggaaatttatttttaagtattcattgcaaagtaattatatcgtaacacaagtagataaaataattatcgatcctagcgataaagtaaaagagaccataaagttatatattatacctcagaaagaacagctctattatctaagaattaagcgtattaatgataaaaattatattgtagaaaataattattccccattattcatttgcacatcttaa

SEQ ID NO: 308002 - DNA, 777 bp, Proteus mirabilis
atgaactacttaatcaatgattctattatatatgacagtaaattaggattactgtacatagacgctatggagaatgcgataaaactgacaacaacattaaatcgtttattactagttttaattcaaaataacaatgagattttagacagagaaatattattaaaacgcgtgtgggaagagcatgaccaagttgtctctgataataatttaaatagtagtatctctgttttacggcgtcatttatcttctctttcgcatattgaaatcattacgacaatacctaaagtaggtatcaaattctctgctatcataaataatattgatgaaacggatagtaaagaaaaagttagcattgcacctagtattgaacaacctatagaaaaagataaagttttaaatagttatattttaaacaataaatatctagaaatagggttgattgcaataataatattttgcttagtttatctttttaaaaattatttttttactactcgaatagaatatcctgttgtaggccaaatcgatcaatgcactattcgttatattaatagttatcacaagcccgatactcgaacaattaattttacaaacttaaaagaaaaattaaataatttagacttagattgtaaaaaatcggctactcttttctattatgatatgtctattgtcacaaatacgaagaataaagataataactatttattcttatcttactgtcctactatcccgaaaaaaaatactactgttaactgcgaaaacttttatgtccagtaa

SEQ ID NO: 308003 - DNA, 615 bp, Proteus mirabilis
atggggaaaagaattgtttggaaagtcggcgacttagtcaatatcaagctgcgtgatgacctgtatacgataggccaaatgctaacgagcccagctatgcgattttacgacatatctaatactgatggagtatggaaaaatatagatctaaatgaagtaaccccattatttcgggtttttgtaggaaacgtaattaataaatatttaattacggagaaaataaaagaaaagtcagtcatagctagtaataaaccctatgagccctattggataaaaccatacaatataatggattttgagcattaccaaggtgaccgatttagctttccttttcttggaggtaaaattatcgatcttagccctgacggtaatattagcgtcacaagagcgcctgtaattaaagaagatttaacgcttcctaaagatcgtgaattaatagagcaatacgaattaaccaatatgtggggacatgaaccattgagcgaccgattatgtcgctattttgatactggtatcaacagagatgacctaaagtttgaagttttccccggtctctgggatgacagagaaaaattacgccccttgacgagtagcttacctgacccattgagataa

SEQ ID NO: 308004 - DNA, 567 bp, Proteus mirabilis
atgaaaaaatatttagctcttattacatccgcatcattatgtcttatcgcttcgcaagcttttgccgccagcaagccgcctaaagacacaatttgggaatataaaggtgatggaggtaaaactttatggcaagtctgtggtagccaaaacagtacctgtaaaattgtgggttcaaccaaacattatgttgccgtactgaaccgaaaatctgcctctgggtgtgcatttggtgatttttatatcgtagcgagaactgaaggtttttggcaacaacgagataccggcacgtgtagtccaaatgcttatattaaaaagggctacatcaacaatggtcaatactctacggtggacattggtgtcggaggaacgattgtggctcagtaccccatcggttattggagtcagaagaaagaattttcaggtaaaaatcgccctcgttggaaagagaaaaatagaatgcaaggcgggttacaaactaacatgaaagcttatgaggatattcaaaaatatggacgtattcaaaaagagacattagaagaaatggagcgagagaaacaaaatcgataa

SEQ ID NO: 308005 - DNA, 207 bp, Proteus mirabilis
atgacattattaaccccactaacatcgtatcccacacattgccctcactgttcttctgagcaagacatcattgcatggggtacgggttggatgtgccgcgattgcaattttgaatggataacgccgattaaaaatcaagacactatatccagtgagattaaggagagactgcaatttcacggtaaagaaacattcagccattcatga

SEQ ID NO: 308006 - DNA, 708 bp, Proteus mirabilis
atgtttcagaccaaccgaaaatatgagcgcatggctgtgcgactctctgtgttgattgcccgcttaatggcaggagaaagccttgtgctctcgcatttagtccaagaattcaatgtttctgagcgcacgttacaacgggatttacgtgaacgcttggcttatctgggtgtagaaggtcggcaaggttgttatcgcttgcccatcaatacgctaaaagcttaccgagacaaagatgttcttacctttgtgaaacagattgggatgactcgcttgtttccagggttagacagccgcttactagggttactgttaactcagcagcctcatgcaccttgtttgatttggcatcacgcccataagatttcggctttgcatgctgaccatttctatcaattggtgtatgccattaccagtaagcaatctattagcttacttacacctgagcgtcgatttaatccactacaaccttatcaactgatttaccgtgaaggccagtggtatttattagctgaatatcatcagcaagtgcatgttttgctgttagaggatatccagcaagttcaaccacttaatacccccttcacaccgaaacacgtagtgatgcaactgtcacaacaaaacaattttatcgcggccttaccgcattttcgattgatatcacaagtagttacctctcttctatcacacaaagaaaggaaccgaccatga

SEQ ID NO: 308007 - DNA, 837 bp, Proteus mirabilis
atgactcgtttagcttctcgttttggtgcagcgaatagtattcgtcgtgaacgcccgttaaccattgaagagttatttcgcaccgtacccagtgtgttttcagaagaaaagcatgaatctcgtagcgaaaagtacacgtatattcctacgattaccttattggatagcctgcaaaaagaaggcttttatccgttctttgcatgccaaactcgtgtgcgagatgacagccgtcgtgatcatactaagcatatgttacggctccgacgtcatgaccaaattacgggtagccaagtgcctgaaatcatcttacttaatagccatgatggttcaagcagttatcaaatgttaccgggcttttttcgctatgtttgtcaaaatgggctggtttgtggcgatacctttggggaggtcagagtcccccaccgaggtcatgttgtcgataatgtcattgaaggggcttatgaagtattaggcaccttcgataccatcgctgaaaaacgtgaacaaatgcagtccttattattaccgccaccagcacagcaggccttggcgcatgcggctttaacctatcgctttggtgaggaacatcaaccaataactgaagctcaagttttacaacctcgacgcgttgaagataaaaaagaagacctttggacggtgtaccaacgtttacaagaaaatctgattaaagggggattatcaggccgtactgcaaaaggtaaacgcgctcgcactcgttcagttaatgggattgatggcgatatcaaactcaataaagccttgtgggtgatggcggataccttatttaaccaactcgccccttgccaacccaactaa

SEQ ID NO: 308008 - DNA, 873 bp, Proteus mirabilis
atgaatcaacatattgaactgaagaaggctctcgcagcctttcctttttcatttaaaacatcattttttaaccaactcagtcagctcatcaattactcccccaccatcggtttgatgggtaaaacgggagcgggaaaatccagtcttatcaacgcactattccaatcgtcattatcacctgtgagtgatgtttcaggctgcacacgccaagcccaacgcttcagcatgacgatgaacaaccatactctcacttttgtagatttacccggcgtgggggaaagccttgagcgggataaagagtaccaccagctctatcgtaacttattaccagaattcgatttaatcatttggatactcaaggccgatgaccgagcatggtcttctgatgaacagtgttatcgctttctcacgaagaaatgcggttaccaacctaatcaatttctatttgtcttgaaccaagccgataaaatagagccttgtcgccagtggaatgaacacaaccacaagccatcctcagagcaggcatataacttaaaattaaagcaacaagccgtagtaacagcttttaagccgtaccatcctgtgatggttgtatctgcaatcgaaaactatcaactgactgaattagctgagcagctcatacaggcgttaccggtgcaagccagtagcggggtagctaggcaactgaacagctcttaccggacgcaatcggtggaaaacgccgcacgtaacgattttagtcaatgtgtcagtgatattgttgatgccttaatcgatatcattcctttgccgccattgataagaagtacggttagcagcgttaaaaacagtatcgtatccgtcgcaaaatccttgtggagcctattcttttag

SEQ ID NO: 308009 - DNA, 939 bp, Proteus mirabilis
atgataaatataaatgtcaatgataattatttggagtgcagacaatattatgctgttctgttctatatgttttcagaaaaaacactttcgcctaatgagatttataaaatgatatctgaggcaaagaataagaatgtgtgtacattacttagtgagctaaatcaatatgtcgggaatagatttaaaaatgttgattattatttaagaaagatagagaaaaagattatcccaatagaacaattatcttttttaacggatgaaagaatatcatttgttatcttaaactttctcatgaagtcgtataataaacatcttatagaaaatgattacccatcaattatggggggcgtgtataattactctcccttgaacttgaaccctatcatgggcaggaatatcccttttcattatattgtttgttttttggactttttagttttgtttataaaccctaaagattttaatgagacagtcttttacatgaaagataaagcttcgtctatttctaaagaataccccgatccttttttatttttacccagaaagaatgaagcattaaaatggatagccgagaggatgatccgcgccaatattgctgttgatgatgatgttaatgttcttattcaaaatgaaaaatggaaattgattatttcctgctttgattattgggctattatttcaagtgtagaagcggtcaagctttttctatctcaaacaagaaaagcttggagccaaaaaaaatatcgtgatagtgttaaagataaggctgtactgaatacgtatatatccaaatcatcaatggtaaaattaaaaaaaatagccaaaaatcataataaaaatattaacgaaattatcgaggcgatgattgatcaaattgttctaccacgggattccattgaagaactcatactgctagttaaaaagaaaaatttaaaataa

SEQ ID NO: 308010 - DNA, 588 bp, Proteus mirabilis
atgtctagttacacctacaatgagcattacattcaaaagataaaccacactatccgtaaagcacttttaattcacaatcgtgttactgctgttcgagttgacttacgtttcccatctgaaaatatatttcactttaacgattcgagggtcatcactcgattctttgaatcgttaaaagccaaaataaatgctgacctaaaacgtaagaataaaatatggaagcgtaaccacatatgcccgttatcttatgtctgggtcagagagttcggtgtgataaacaacaaaaaacactatcatgttcttttgctgttaaataaagatgtttattgggggttaggtgactttgttaaaactgaagggacgctctatgcattaatacagcaagcatggtgtagtgctattggtgtgaactaccctgcggagcgttattcagttcatatcccggacaacgcagttacttggctagataacaataatgccaacaatgaaagtacgatattcgaattaaaccaacgctgtcgttacttagccaaagaacatacaaaatattatggtgatggtgagcgttcttttggatgtagtcgctaa

SEQ ID NO: 308011 - DNA, 210 bp, Proteus mirabilis
atgactacccaagctattcccttactagatgaccaattcgttgatatgaaatttataacccgcctaaccggcttgacggataaatggttttataaattgatacaagatggagagtttcctaaacccatcaaactgggacgtagctctcgctggctaaagagcgaagttgaaaattggttacaagcacgtattgctgaatccagagtctaa

SEQ ID NO: 308012 - DNA, 405 bp, Proteus mirabilis
atgtggaacgacaaaaagctaagtaaatacaagtatctactgcaatttgaattacggcgatggtacttgtggcctcgatctgggcgataccagcacttgaccctggacggtgtcgtctcagaggtgtttatgggggagctgtcagacttctatcaccgatacatgactggtgaatttcaattctcggagaatttcgggaaaacatggagcaagatggacgaagagattctttacgacatgattgattatgcctgcactgtccggcagatagcagttgaactgaaacggcacccggtaagcgtcattaacaagttggcgaagtacttggacgatgacagtatccagaatcgtattactcaagatttttacgatgtccctgcgcgggagctagtgcgatggtggtag

SEQ ID NO: 308013 - DNA, 2682 bp, Proteus mirabilis
atgctaggactgaagttacgtgaggagttttctggtcgtcgtattaaaggaacgatgatcgaaatgcataaccggaatggcaccggtgcgctcgataagtctgcaagtgaatttctgaagatcacttacccttcaatcgacatgctcaagactgtggaagctgtacaagctggccgggctgagcctgtcgtaattatcggtgcgcggggccaaggtaaatcacaccttatggcagcactgtcacatatgcatcaggataaggatgcaacagtaaactggttgaatgactggtctacccgactgaaaaatccttacattgcaaatctcaaattgcagtatggcatgcatgtcattactgaaagcttgcacttgcaacgctataagcatgtatgggatgttttgttcgaccagcatccgcatggcaatattattaaagccaagtgggaggtgcacggcaccgaggttccaggttatgacctgatactggaaatggcagagaataaaccatttatccttattctggatgaattccagacgtggtttgaaggattaacaaactccaaccagtacaaacgtaaggcctgggcctttaacttcattcaaatcctctcggaaatatctgcaaagtaccctgaacttctgacacttgtcgtatctgtgcgcgaaggcaactccgacgcagcgcagcagctgttccgtgtgaacccagtactgattgatttcaaagggccagaagccaaacgagacagacagcgtttgttgctctatcggatcttcgaaaaccggatgaacattccagagtctgatattgcttcactgataaaaactcatgtggatgaattcctgcgtttgagtcatatctcaggctccgatcacgaaaaacatagacagcaatttatcgagacctggccttactcgccaagactcctgcaattgctggacgatcaggtgcttatcgcaaccgaaactcaagagacacgcgatctcttgcgtattctggtggatgtgtttaaggaatctggtgacgacacagccatacttacacctgccaacttcagcttaaccagtgaaaaatcaggcgttacctcactactggattcggtagcgagtcagctgcatcgggatttgcgtgagaatgcactgcgcaacctcgaagctgttaaaaacggtgtacctattgctcaggtcccacatcttgagcccattctttccgctctctggctgcgttccctatcattggagaatcatgccggtgctgagccgtcagaattgcagctggatattactgagcgaaaagcgattgatgacaacctgtttgccgctgagcttgcagtcatcgaggacaatagcttcaacattcaccgccaagccaaccgtttggtcttcaagaacgaggtgaatccacaggccaaactgttagcacatgctaaaaacgacaagctctttcaaaaggatgaggatgtagaacacctcgccaaagagattcgttacgccctggttggggatggcaatcagtcgaatatctatcgaaccattgtcttaaagaagcagtggcgcacttcgccatgggcggatattgaagaaaaagaccatcctcagcattgggataaccggattccagtgattgttatgcccaaggcatcgctggacaacaaagagctgggagaatggctgaaaacaaatgttgccaaggcaagaaacactgtgcgcttcctgctgccacgtgtgggtactggcgacattttctacgataagtctttgctggtattagcccgtgcggtttatcttgctagcgattggaaaaactccgagcgtgagtacgctcaattgcatctgaaataccagaaggaactgcgtgagcagttgcaatcccgctttgatcgttttgcagtcttggtcgtatggaatttcgcagacccatctcaatgcgaatttgagatttcacagcacggcgcagaagggttacagatcctcgaaaagctggatgcaaaaatctgcagcgagctgttcattccagaagaattcgacaccatactgcttgatgccgcgaccaatagccgtagcgtggccgaccttatcgaacagctcaaagagccagccccaaaaggtgcagaaagcattccttggcttggtgaaacagccgttaaagagcgcattgggcgagcctgtgcagaaggcaaaattgccatcaacgccaaaggcagtctgtacgagaaaaagccgtcagaaaccacggatgatgcttggttgcgagttcgtgggagactgggcagcggtaaagatctggaagatacgacattgcacctgcccggaggctctgttggttcaggcggttctgtccctgttcagcctgttccaggcgtgccagaagaattcaccgccggtggtgttaacgagccaaccgcaggctcaggcaatggcggcacagcatccggtacgacactaacgccgggatcgctattcggtggttccagtggcggcttcgttgctcattacagcgcccagaatacatccacattgagcttgctcggtaagcttgaacaatggggaattaacaaaggcagtaaggtgaaggacgtaaaattgtctacctcgcagctcactggtgcacagttagagcatctgctgaaaaacttaccggatggtgttacttactctctggatttggataaagaacaataa

SEQ ID NO: 308014 - DNA, 999 bp, Proteus mirabilis
atggataagtcactgatcgctgatatacacagactgcccgcacaggaagcatggccgaaaattttttcggccctctggcccctgtttgcagaaccgatcaggcaggatctggcggatgcaaaaacaactgaacgggaccgcgccatcaaaccattagatgacgtgttggcaggcagtgcctgggatttgtgggcatcgttcgagagtgcttcgccaaaaacggcagatgctctgaaagcattctggcaacgccagacaacaccgaaagccatcctgattctggatgcactgtcgctccgcgaagcgccctggattctcgaaagtgcgcagcagcggggctacacagttcacagcgccggtgcgaccgcctctgagctacccggtgataccacaccgtttgcaagggccatgggatttgggcagcgcaccagattgcaaaacaaccaggggaatagtgctgctttccctgaagccttcactgagtccaccgacttgccatggggggattgtgcatctctgatcaaggctgacccgaatattattttctggcatcactggcctgatgaacgtatgcatcatctggccgaacagggagcaggttatcgggtgttggcgaaagaagccgcagccgtattaaccggcgatgaattctgggccttcatcgacaaactagccacgggccgtcgtctggttattactgccgaccatgggtattcaaatcccgcgttatttcctgatgtttacccggaagaccaaaaagcctatctgaaagggcaattcaagtctggccgcaacagcgaagtgaaaaacgcaaaaaccgaacagcattgggtaccgccattatctcaggtactaacgacacagcatggcaactggaacattgtgctgggccgcaagaaatggcgttcacaaggcggctacccaagcttagcccacggtgggttgagcttgttagaggtggccgtaccctttatcgaactgtcgaaaccgaataattaa

SEQ ID NO: 308015 - DNA, 3264 bp, Proteus mirabilis
atggcatctaacaaaacgaaagcagaactgacagaagaattggtggcagaggccgttagtgccggtaaaaaagcacaactggaatcggtagatttttctgaccccaatcgccccttaacctgccttgaggttgatttcccgattctgccaatcaaccagattgcgcagatagaaggtaatgcgggcaagccaatatatcaaatgagtaagtggtgggcacgtcgccgctccagcgtgttccgctctatgttgattgcagctgccaccaaagcgcccgatgaaccatccgaatctgccaaattggtttgggataactactatgccaatcaccaggacaaccaagcgttcagaaaattgaaagtggctgacattttcatggggggcggtaccacattggtcgaaggtgcgcggctcggtatgcagatgacaggcaacgatctcaacccagttgcctggctggttgtaaagaacgagctggctgatgttgatctggatgaagtgaacaaactttttgatcacatcgagcgggaggtaaaaccccagatcatgccgttttacgcttgcgaaggccctgatggcgaaaaaggcaaatggacacagcgttctaccggtagagtcatgggcaatgattttgatccgctggctctgacacctgaagaacgcaaagactacacatacgaaggcccagaagtcatttacaccttctgggctaagcacggcccatgtgcggctcccggatgcggtcaccgcactccattgatgacctctccagtcgtagcggtgaaatccctttcggttaaaacctggcaagatgttgaatgccaaaactgtggaacgagctttgatattgagcgccaggaagcccgtatggctcccgatgttccgctggtcgttagcgattcagaagctccttacgccatcatggatgatgctgggagctatcaatgccctcattgccaacacaaatatcgtgatgaggcggcagcgcagaagggagagtcttcacgtttactcaagaagatgagtaaaaataagaaggttgatttatctctgcttgttcatcctgattggcttaaaggttcttcaaaagcagacgaaacaggaatatttggcggcacctcccttagtgaggtggaagcaacgcagcgttggaatctgcacagaacaaagacacttaagctgctggaagttcggggtaaattgcccgaagaaattacctgtcctgattcaggtttggtgataaacactcggcaaggcactattcctaaaaagtctaatttcacctgtcaggaaagcacttgtggtcgtcaacaagatgttctcgacagtattaaagcttctggccagaccggcccgatggctgcttacgtattacagtgttattcacctggacgtgatgcaacaggtgcaccatacaatggccgctactttgcgccagctgacagcaatgctgccaaaagacaaaatttggcggtatctgagtgggcgcaaaggaaaaattcggatttgcgaggttattggcccgagtcgaaattaccctatggatttatgacacaccacttgcaaggcggcgttcctaatcatggttttacgcactggaacaccatgtttaacccgcttcagcttctaattcatgcacaaattctcaaggctattgatacatctcatggcttcagcgacaccagtaaagaaatagttttgggtgcatttcagcagtatctgcgcaatcagaatatgttctgcttttggaataacaatgccgacaaaatggagccgatgtttagtaacaataactatcaccctaaatcgactgtaattgaaaattcagtatttgctaatttagggagagggaattgggcatcatgcagagcaaacaccctcaaggggctggagtggtgcaagcagccatgggaaactgtatcgaacgagatgctgagcaatatatccgctgacattggcaaattggtcagcgggaaaagctcaaaggccatgccaaacgacccagtgttgccgggaaccttagtgacctgcggctcatcgacggaattaaaacagtatgccgatcagtcgtatgatctcgtcattaccgatccaccatttggtggtttgctgcactacgccgagttagcggatttcttctacgtatggctacgtctgctgctgaaggataaatacccagaggtttatgctggggaatacacgccaaagacgctggaagctgtttctaacaaagcacgccatccagatgatccagatgcgttttataagcgcttgctgaccgaatgttggcgggaggcgaatcggttgctgaaaccagggggcattttggcatttaccttccatcacagcgaagacgagccttggttggatgtattagagagcttatttgacgcaggttactacctggaagcaacgtatcctattcgcagtgatgaaactaaaggaaagggcgagtttggttccaagaccattgaatacgacattattcatgtatgccgtaagcgtactgaagcgcccagtaaaatcagctgggctcgcttgcgtcgcaagattcttgcagatgtgcgtcagttgcaagagttgttggaacatcaccagtcaaaaggtttgccagtagcagatattcaggtcatcaagcgcggtaaggctttagaatatttctcacgccactatggccaggtatatgttgaggaaggccgcgaatttacggttaacgaagcgttagtagggattaaccaaattctggatgaccaatcagaatcagaatcgggtggtaccccggtggtgtgtgagccaaatacacgccaatttctgcgtatttttgcacgccaaccttcagtcgagcgcgatcagatgcagaaattcctgcgcggtagcggcatagcaccatcgacttttatcgctttgggctgggctaccgaaaccacacgaccaaaggcttttcattggcgatctccgctagaaattgcgcaagagcgaatggccagcagtcgcagcgtgagccgcgactttgatcaggccatgttgcttgtgggtgcctgttatccggaaagcggtatcaataccaagaaaattctggatgataactttaagccacacccggcattaggtcatctattagattggcttgttcacaacggagccgacttatctatgcgcaatgcctgcactttggcaaggcaattgtttaatagatgggaagcagatcatcaacaggttatgcaggaacaaatatcattgtttggtatggaagatgaaatatga

SEQ ID NO: 308016 - DNA, 507 bp, Proteus mirabilis
atgagcgatgtgctgaccaacgacaaatggaagcgacgcggtgtctcagtgctttggtgtggcaaaacactggctgaattaaatgctgcaagtcaggtgatcagtctgcgtcagttcatcggctattacgaagcgggctggccggacgatatgcctctgctgaatgacgatggcttatacgtcgcagggttggacgtagctgtagacgctttatcaccagaagatgcactggaatggctggaatcggagatttacgaaatgatctacgactttcagaaccatgccgatgccgcgttgattttctggatgccggatcaggggcgctggaaggaagatctgaccaccagtacctacaactggtgcttggctggtaaatacgatgcgcaaatgttcccgttgggacaatgcatctggaacggcgcacaaaaggacgttcgccggattgaatccgcttttggcggaaaaacgaacgaatggctgggtttatacctagagcggatcagctaa

SEQ ID NO: 308017 - DNA, 510 bp, Proteus mirabilis
atgtctctgtgtatggtcaggaaggcgattggcgagtttaaaaagaccaacaaagtgaaaggtatcgacttcaccaagaaaatgaatatgttagttgaaaagtacaatgagcgtgacgaaaaagatgtccttcgctcggaagtaatcaatgatttttctgatgaaattatcaacctttacaatgaattacgtgctgaaatggcctcgtttggtgaaatggggatagattttgaagaaaaagcgttttacgacatactcatttcactagctcataagtacgactttacctacccagaagagaagctgcttggtctgtccaaagaagtgaagaaagtcattgatgataaagccaagtacaccgattggaacaaacgagacgacatcaaagctgaactgcatttcgacttgattatcttgcttgatgaatggggatacccaccaatcgaccgtgatgaagtgtataaagagattttcgagcaggcagaaaatttcaaacgtaaccgagcataa

SEQ ID NO: 308018 - DNA, 558 bp, Proteus mirabilis
atgaatattctatttcggcttttgctaacatttaatgcgacatcactcttagtgataatttttattgtacaaaaaggatacacgttatcgtatttttttgacacaacaatcagtcagttaagctggattactgtgataccaaatatgacgtcatattttctttatgttcttatcccaatattttttactggtatcagtctattactaagcaaaagacttggaaaagatgagttcaaaaaaggtaatataataagtattgagtatgctaataatagttttttacccagctacctaggctatttttttgttgcactcagcgttggaagttgggaatctttgtggtttgtatacggcattttatttatttttacttttttgtctcaggccctctattttaaccctctattcctggtgtttggttatacgttttacaatgtaacaactataaacggaacagtaatatttttaattagtcgccaaaaatataaaacaccttgtgatatcgaaatatcaactgcctttaggattaataactatacatttattgaacggagctag

SEQ ID NO: 308019 - DNA, 831 bp, Proteus mirabilis
atggatcatgtattaattaaggtaaaagggcttcgtaagaagccatatcgtaagttaatttcagattataagctttttgaaaccgttgatatcaatgttaattattgcgttacatatagccctgatcataatttagatgaggatacatggtttaaagttgaacaattcagtcagcagccgtataacctcggtatatttaatcaaccatttgattctaaagactatgatgacgcaactaaagagcaattttcaaaaatatcatatctagtttcagttcaagatcaggggttttattttcaaaaaatcacaccagcacttttcattcggaaaaaaataatcgcatttggtgagtccgctaaaattgaaaaaagtgaaaaccgattagtaattaacacaattcctgatgcagtttatataaaagcatctgacactttagctttccgtaatttagctactatctctagtatttttcctggaattgacatgctttataaagaagcaacgaatgaagaagttgaggattttttatctgagccttttattgaactcagtaatgaatacgaagcagaaaaagtatcaaagcctaaccgaaaacgaatagcactagcaatggctacacttgccaccatgtcttctgaagacaaagtcaatatgttgacttatattggtggatactgtgaccagcgattaaatttcgatcaggaaaataataaattcctaatttcaacagacgaagagttgaaacatcttctttacgggattgaacaacgcttttatacaactccctttgggcatgaaaaaaggttagctaactctgtacaggctttataa

SEQ ID NO: 308020 - DNA, 576 bp, Proteus mirabilis
atgtgcaataacaagactccaaattatgaaagactcgtttcagattgtaaaaattatatagatgaaattgttaactccggaaatattgaaataaaaaaccctaataaagataattttgatatgatatttcttggttatgaaaataaacaattttggattgaaccagaatataagccttattcagaggaactgttcgattatatacgcgaaaaaatgcatgtagcttattataaaaaactagaggaatacgatgtgctaaatttaatgaaaaataatttagataaattatataaggatttagaccatcatggtgagtattgtaaatttcctatccttgctaaaattaacccactagcatttgtagatacttggttatctttgcagccttataatcaacgtggaattagcgaattattaataaatcgttataacacaggaggtttaaacgactctcttaaagatgaaaaaaattggttaaaagatgtgtttgatgagctagataaaaaagcaaacagtatgacaggtcttcatgcttatagaattgaaaggcttaagttgcatatacctactgagtag

SEQ ID NO: 308021 - DNA, 156 bp, Proteus mirabilis
atgattgatacattggatattgtgaaagaagtagccgaactcaccgcaaaccacagccacagcaatacgggaacgccactgaatactgatgccatcaaaggtacggcaagtaagtcagatggcttgaaagaaaagtatcaaccagttattggttaa

SEQ ID NO: 308022 - DNA, 207 bp, Proteus mirabilis
atgcatcggcaagtcaccgcagatacggaacaacgcacgttagtcacccgaaacaccaccattcaagccaccgataaaacgatggtgcttggcaccgcaacattactggtaggcgctctcaagcaaagtatcgcagtcactaagcaagaaattattgcaccggttgtttggattgtggtagccaagaaattaacgtggcacagctga

SEQ ID NO: 308023 - DNA, 360 bp, Proteus mirabilis
atgagtgctgtacggtacttacgtgaagatggttatcatatctttggtgtgatggattatgagcaggtctgtgagttggctaggatcaacggtgatcttagccgtttgggtggcctattgaagctatggctgccgatcgcgaactgcccagttccggctggtcaacaatccttgctgaggctacacaggagaaaatgggatgggaaaggtcataccgaagatatgaactacaacaggttgattcagagtaagtggccaactggtcgcctttttaatgttaagacaacgaagaatttactgttggattcatgtcagtatatcgattattgtaacaataacggtaaagtagtatatatataa

SEQ ID NO: 308024 - DNA, 612 bp, Proteus mirabilis
atgcgcccaatatctcgtccaccttattccggtagtcaagtaacccattataaaagttatttacctcatttaatcactgcatatgggaattattgttcatattgcgaacgattagataaagctgatgtagaacatgttgttcccacatcacacaatgcggatctcgaacttgaatggtcaaatctgattttaggctgtgctcgctgtaatcgagattttaaaaaaaataaaaatcaatcgagaacaggttatgtttggccagatcaacataatacgtatcatatactaaaatactatacagatggcagagtagagcccgctttacacctcacagaactacttaaacaacaagtgaaaaatacgatagatctcgtttgtctagatgattcggagcagctccaaaaacctttatgtttaggaagaaggcaaacttttcaattggcaaaattgattaagaaaaattatcttgcaggtgtacaaactttagatgaagtaatggattgcgctaaaatcaatttttggtccgtatggtatactgagttttataacgtaccagaagtgaaaatcgcattagaaaatttattaccgaacactgatattcaccgccagtga

SEQ ID NO: 308025 - DNA, 1314 bp, Proteus mirabilis
atgaaaatagctaaaatagcattaactaattttcgttgctttgaatattttgaagcaacctttgatcctcatttaacagtacttattgctcgaaatggtgctggaaaatcaacattacttgatgctattgctctttctctcggatcttttttaacaagattacctaaagtaaaaggattgagttttaaaaaaacagattttcgagttaatcaggaaggactatatcccccttttatgcgtattcgttgtgaaagtactagtggtgttatttgggataggactgaacgaagagatcaagctaaaaagaccataaatgccattccatcaggtgttggtctcaaagctttaaatgaccatgttgataaatatattaatgctcataatgaaaatgagccttataccttacccatttttatttattatggaacaggtcgaggtgtttttgatatacctgcgcgtaaaagggcatttaatcgtcatttttctagatttgaagcatttgaaggttcactagaaagcaaaactaactttaaacgttttgtacagtatttttatcaactagaagacaaagaatcaaggctacaaaaacaagaacgttctttcgatgttgaattaccagaactgagagcaatacgtttagcgatagaaaaattattgcctcaattcagtaatatacgttcagtagaacccgctggtattatggttgattggaaaaaaaagcatggctctgaaaccattattcagccactaagaattgaacaattgagcgatggttaccgtacaacacttgcaatggttatggatatagcttcgagagttgccgaagcaaatcctttttctcaagatcctctagatacagaagggatcattcttattgatgaagtcgatttgcatttgcatccagagtggcaacgtgattttttacctagattagtgcatgttttccctaatattcaatttattgtttcaactcattctccttttattattcaatcagttaagaagggtaaattgattgatttagataaagaaggtgtgatgcgtagcacgtctttagatcaagaattgagtattgaagacatcgctgaagatattatggggatggaaaatgttcagcgaagtgcattatttaatgaacaagttgaaatatctaataagtattatgaattacttaaacagggtaaatcagtaaatgatactgaggtgcgacgtatttccgaccgtctggatgagatagaatcttactttggtgataatccagcatgggtagcattaatgagagcggaaagaagaaaaagtgagaaaggatcataa

SEQ ID NO: 308026 - DNA, 1881 bp, Proteus mirabilis
atgaagaacgagcgttacccagtagacttagttatttcgcttcaggatttcaatgcttcaaactggaaggattcaattgcgcaagctactcgtgagggttatccagctatgtggcaggcactatcgagtgctgcacgtgaagctattgagcaggggagaattgaacatggaaaggtattatggttgcttgcagatgcctgttcgatgatgctttcgctatcaagtcctaatgaaccctttaagccttttgctgtcttccatgaccgcaggtcagtcgtccctgatgatatttctgattcagatattctgttttttgcagagatcgttgatgaggtagacaacgattggctgaaggcacgactcagtgatttgatctggttgaagagtaagcctcgtaacatcgaattcgctttgaaggctatcgacgcttaccgcagccttccactagatactgatacatggatacatggagggcgggactgttggcctcgcgccataagcttggcccgaatgcttaaaggtggcgctggagatagacttcagcaaatagagacagcaatcgttgctgcgtttaatgcgtctatccgaaccgacggttttcttggattgtggttggctgaccttctaaaatcgaaccgtctagggttgtcaaatctaacggatatctctacaaagctagaaatattggcccgcgagtttgatgatgaaggggatttgaataaggcgcgggagtatttttctgccgctgccgagtggtataagattatccctaacgaggtcaaagctgtagaaatgacagtattggtcgctgaagggtgggtcaaagaagccgttgcgcgagttgcatcggaaagccctagccacatggtggcatcgtgcttttacgaaaatgccattcagatatacagaacgattcctcgggccgaacgctctgcatatcaggtcgatgagcgaattgccgagttgcgagcccacctaaacaattcgggagagagagctataggagagatgaagctcattcaaactcctggagtagatctcactcagatcatcgaaaaggcaagggcatccgtcaccgggaaatctgcacaaaatgcgttgctcgcatttgcgaacctacatcgtggcgtgaatgcagaacaactgcgcaacagtgcattggaaagaatgcgtcagtatcccttgcaatcactgtttgccgcaaccgtgatgagtcgcgatggcagagtcattgccaagcgccctgcgatgggactcggtggagaattaacagaggacgacgaaattgcaattcgcgccgagatgattcgtgaccatggaatcttagttagtattgttgttcaagccgacatctggccagcccttgaagtacttttgcttgagcatcggttgcgcgagagcgattttatcgagttagctcgcctttcacccattgtgccaaaagagcgagttggcctttttggcaaggcactatttgcaggttacgaacgtgatttcgttaccgcgcttcatttactgatccctcagattgagcacttggtgcgagtgcatcttaagcaagcaggagccaaaaccactaacctcgacaaggatggaattgagaacgagaatggcatgagcacgttgatgggtttgccagaggccgagcaagtatttggtaaagatctcgtctttgagttcgaatcgttgttttgtaacgcctttggtccaaatttgcggaacgaattggctcatggactattggatgagggtgggtgcaattcccctttcgctatttatgcgtggtggctagctttaagactaacattcaatacatggtggaactcagcaaatactatttctgatcctcaagaaagtagcgacgagcaagcagtgatttaa

SEQ ID NO: 308027 - DNA, 366 bp, Proteus mirabilis
atgaataaatttgatttaaaaactaaaaatgaaatttctatattagtaggttttctttctgctcttgatgaggaagttatcagtgataaagattatttgttaattaacaataaaaatgttaataataaagaagatctacgttctgtttcagaaattgttctcaaaccttggtttttagaatatacaccagccaatagagataaagtgattcagtctattaactttattataaatggaaaaattaatcttgtagatgttgttttttctgaaattaattttatttttgactatgatatagaagataagtctctttttttgacagaaataaaagattttcttgaagaatatgtcagagatattgactaa

SEQ ID NO: 308028 - DNA, 471 bp, Proteus mirabilis
atgccaatccaaacggatcaacccaacccgtcggacaatgcacatacccatatggattcagcccacccaataaccctatcgagtctggggaaaaatactgccctatctccttatcataatagcgaaagcgattataaagccactttctttatcttcatattgccccgcaaaacgaaaaggacattcggtgtaattagggtcattctccgccttgccctcgcggtaacgccaaaactgcatttggccccacgtattcaaccgtactgcccaactggcttgcccaccttcactgaatatctctcgcggggttccttggtggtcggtgaccacataatgcagtttgccctgttgataacgcgcagtgggcgttatctctccggattgatacagccattggatttgctgagactccgcaagagtaccatcggcatatatcggcgtttcttctatcagttggtctcccgaccataa

SEQ ID NO: 308029 - DNA, 810 bp, Proteus mirabilis
atgttatggatgatttcgctttcattattaatatttaatactaaagcaagttatttttcttatattacgggggtcagtcccccagaaacaacttattcttttataatggaatattggaatgccagtagttcaactccaaatccatgtcatatgaggtttggtattgattcgaaatgttacatacatatcaaccacttgcatcaaggggcaacgatgggaggagcgccagaccgagcaccttggcgttgtcggaaagatgtttcatcgcttcctaatgaaaaagcacttgtggattatttaaagaatgagtgtggattaattcttcctatgtctaattccagtaggcatgctggcgatattactactgatgagtgtgttggattctttttaacacaagcacctgagggcggttatggtcaaatagtcccgaatggagtctgtggtgttgctccgccaccagaaggtagatgtgcatttaatgcgagtaacttgacattgtcccatggcagattagatccatctcaagtggataatcatagtgttagtgaagtatttactattacttgtaaccaagatatgtatattaaaatatcaagctcattaatagaggattatttaaaactaacaccaaatggtagtattcgctcctatttaagattaaataatatccctattataaaagggcttaccgttcatacggaaaaaaatgagtacacttatatttatgttgaatctatattaaaaacagtaggcacgccttcattaggtaatttcagtggttcaacgacactggtattatctataccttaa

SEQ ID NO: 308030 - DNA, 537 bp, Proteus mirabilis
atgaggaaattacgtattttttactatataattggttttttcttactactatcttcattctttagtttttctgataacttaaagatccacggttcattaattaatactccttgtaaagtcttaccagaagatactcaatttgaagttgattttggtgaaattcaactgagtgatatatataataataatacccaaattgagagaaaaagttttaaaattaatttatctgaatgcgatccttccatcgcccaacaagtgaaagttaaatttgatgggaaacctcatgctaaattattagggttattagcattagatgatagtgctaataatccagagcttggtattgagattacgaccaaagaaggtaattccataacattaggtgagtttagtaagctatataatattactcatactggtgatattgagctgaattttggtgctaatttaaaatctacctcaaaaggtattgcagataaaactattaatcccgggtattttacggctaaggccatattttctttaaaatatgagtaa

SEQ ID NO: 308031 - DNA, 1071 bp, Proteus mirabilis
atgtctcagagcaatgttgaaattggtgatgaagttcaaggctggctcagtgatcatcactataaagaagggttctataccgatatctcaaccgatacgttagataaagggttgaatgaagcggttgtgcgagctatttcagctaaaagaaatgagccagagtggatgctagagtttcgtcttgatgcttatcgtcattggctagagatggaagagcctcattggctaaaagcagattatccatcgctgaattatcaagattatagttattattcagcgccatcttgcggtgcttgttgtgccaatggcagttgtgctagtggtaacaatgaagcagtctcaacacaagaaactcaagattatttaactaaagaagttgaagacgcatttaatcagttaggcgtgccagtaagagaagggcagtcagtggctgtagatgccatttttgactcagtatcggtttctaccacttatcgtgaagagctagctaaacatggtgttattttctgctccttcggtgaagcgattcaagaatatcccgaattagtacgccaatatttaggtacagttgtttctagccacgataactattttgcagcacttaatgcggcggtcgcttctgatggtacctttgtttatattcctaaaggtgttcgctgccctatggaattatccacctattttcgtattaatgcggcacaaacaggccaatttgaacgtacgattttaattgcggatgaaggaagttacgtcagttacatcgaagggtgttcagcacctgtacgtgatagctatcagcttcatgctgccgttgttgaagttatcattcataaagatgccgaagtgaaatattccacggtacaaaactggttctctggcggtgatagcgaaggcggaattcttaacttcgtcactaagcgtgccctttgtgaaggtgagaacgctaaaatgtcgtggactcaatctgaaacaggttcagcgatcacttggaaatacccaagtgttatcttaaaaggagataattcaacggctgaatttttctcagtggcactgaccaatggtaaccaataa

SEQ ID NO: 308032 - DNA, 768 bp, Proteus mirabilis
gtggacgcatcatttcaaattcaacaagtgcttaattcattaacaaaaatttgtaaagataaattggacacaatttatttgcatggctcatcggttttaggtggacttcaacctactagtgatattgatcttcttgtcatcgttaaaacagctttgactaaaaatgaaaaaaaatcacttattactgatttattagctagttctggtcgatatcctcatgatcaattcggacgtaggcccttagaaatcacgatatttgttggtggccaattacaggatctagaatacccagctagatgtgaatttatttatggagaatggttgagagactcttttgaacaaggcataagtaatatagagcatgatgatccagaatatacattgatgttggcacaggcgaagaaagactcaaaactcctttggggggatggttttatcttacctgagattaatagccaacaaataagaaaagcaattttagattccctacctaatttaacttcttctattgatggtgatgaacgtaatattattttaactctcgcaagaatgtggtttacgatgagaactggacgttttgtatcaaaggatgtcgcggcaaattggtcaatcaataaaatacctaatgaatttattgaagtagtcactgtcgcgcgagatgcatatctgtatgggactaatgttgaatggagtagatataataaattactcccattggttattgattacttttctgtccaaataaaagggagcactattaataaatag

SEQ ID NO: 308033 - DNA, 372 bp, Proteus mirabilis
ttgtttgaaattaccagagttaacgtctcaggatctcttaaagctgtcgttatggcaaccagctacgagaacccgttgtcttcagtcaacgaaattgagatgaaactcactggcctactgggcgagtgtgaaaatggtaaaattcttttcgatctcctatgctctaacggccccgagtggaaccgatttgtgacccttgaaataagattaggccgcatcatgctagattcggcccaaattattgatcagaaggaaataccggcacagattctgagtaaactaacctttattttacagaatcatcctgagtacctagaagcatccgtattgacccctgatgacgtacgccaagtactttcaatggatatgtga

SEQ ID NO: 308034 - DNA, 1074 bp, Proteus mirabilis
atgacagtcagaagttatcaggatttaaatctggacagggctaacatcgaaactgaatgtaggcagttcattcaaactagagcgtatacagttcagtcaattggcccaatgccggggcaaagacccggactccgagtgacattcgcgaaaataggggaaaatttcgcaaccgttaatattttctacaacggcaatggctcatgtacagttcagtatcttacgggggctaatcggcctctaggcaaggagcttgctgattacctttttgaaacaattaatcctgcagaatttgaacatgtaaatatggtcttagaaggattcgtggagaacacaattttacctgtgcttgaattatcagcagaagaaacacatattgagttcagggaacaccttcgtaaccatcactccatcatgtggaaaatcacctctactaccaaccaggatgaattgacagttaccttgcacaccacaacaggcaagcttcagattcagggccgtccactatcctgctatcgggttttcattttcaacatagcagaattgcttaatttgcaaggtctggagaaagtgttaatccgccaagatgatggtaaagcaaacatcgttcaacaggaagtagcccgtgctaatctggagtctataatgggtgatgcttatccttgcttgcacgcagccgctgaaaaattgctcatttcaggtctgtgtgttaagctagccgcccctaaattaccagactactgcatgttgctctacccggaacttcgctccattgagggtgtcttaaagaataagatgtacgcatttggcatgtctgtacagcaacctttaggattcgggccttttttcgataaagttggtttaaattacaccttgaaactacaatatgcgaatactctcaggcctgaacaggttaatatcatcaatgatgcttatacgttctggaatcaggaacgtcatgctgtgtttcacatggaaacagtagttgataccagtcgcatgatttccgatatggctcgactaatgactaaagccactaaagcgtggcaaataatcaaggatttgtatattgtttga

SEQ ID NO: 308035 - DNA, 276 bp, Proteus mirabilis
atgtctcaacagtcattacgaaattatggtaagagtgatcagcttggagatcgggatttattgtcttccaagcgtattttaacccaaattagccagtggctatcacctttaaattctagcattagtcgtattgtatttaggttatctatggtggctcactttaagattatgtttacgttatatgaagtgctttgtgcaaatgcagggataccgatgtatccaataatatttgtagttttaagtgaacgttcgcttatcgctcacagcggaccttaa

SEQ ID NO: 308036 - DNA, 483 bp, Proteus mirabilis
atgtctacaatgactgatccatatgaaggactgataagttatcaacaagctttaaatgataaattaatttcaccatcaccatgttctttatacaaagatatgactatttatcatgatgttgctgaagggaatcaaaggttgacttttgccataatggataatggaatagttaaagcaaccgcagtctatgtttttgccccaaatatagatggtattccttgctttggcattggttactctgtagcagaaaactatagaaaaaaaggaatagcaactgaaattgttaccaatagcatcaaggagttcagccatggaatgaaaggtaaactacctttattttatatagaagcaattattgatttaaataatattgcatcacaaaaagtagcattgaaaaccattagtaacactcccaaagaaaccattgataagatatctggtaagcctgcataccaatttatcaagcttgttaaaaatagctaa

SEQ ID NO: 308037 - DNA, 267 bp, Proteus mirabilis
gtgacacactatgcaacggctggaagtagctacacaaaagaggaaagtgacgggcggtataagaccaaaagatatcaaagagtcggattgatttggaaaagaaatgctgggcagggtcaatctattaaattttatgaaaatattctgggagcttatttaactataaaaaacacatggaattggaatgtacaatttgttgtagtaccttcacttaattatggtattttgttccgggaactggaggtgattatttttatttcactatga

SEQ ID NO: 308038 - DNA, 300 bp, Proteus mirabilis
atgactttaattaaggtgataaaagtgaatatcaaagcagaaaaaaataatcaaaaagtcacattaaactgccctatctgtggtaacacactaatgcaagtagacaaagaaactgaaaaagttacatgttcagactgtgaggcttcatttgaatatgaccaaatcgtggacgagaatggtgaaaatataaatagttatattgaagatatgggcgaaaaagttagagacgatttagcaaaagaattaagcgatacattaaaaaaagcgtttaaaggaaacaaaaacatacggtttaaataa

SEQ ID NO: 308039 - DNA, 720 bp, Proteus mirabilis
gtgaagttgggagatttagttgaaaatcagaatgaaacaattaattcactctatgatgaatatgattcaatcatggaggaaattaaatcttccagcccaaatgaggaaaatataaatagactcaatgatgctggaataaaattatttaatttcatggatcgttgctatgcgtctttagatgcagcgtcagaagatgaaaataacgaaaagcaaactcaacttgataatttatctggattattttctgatgccttcgaagctacgataccaaatcattatttgattatgcgggctttttatggagaggaatttcatccttgtaaacatgccttttctggcatgcagcaattattagtacaaattaaaaataaagatgaaattgaattactaaaagcacaatgcatagaacataatttacctgtaaaagggtttgagaaaaaaagaagattccgtatgactaagacttacgaaagagtattatcaataatattaggtattacaagtctaatatgttttgctttattaataatatttatggatgaacctacgccattaaaatataaattaataagcatacttgtttcattattagctggaatatcagcagcattattaacaggaaatttatatttgaaagttagcgagaaattaaatgctaaaagtggatttgctgtatttgtattttcagtactaattttaaatgggcttaaatttatataa

SEQ ID NO: 308040 - DNA, 276 bp, Proteus mirabilis
atgtctacgtttgttgaagacctaaaaatggcattatctggtgatcataatcttatgattatggatgaattaaccgaagaacaagcattaaatattgcaaatgatttgcataagttaggtagaaagcctacagacgttgaagctcgtgagattatcgagaaatattatgacggacaaatatctagtgcgatgtttgaaagtcgagaccaaatgagaactaaccaactacaacaaacagttctaaaaatgattcaaaatcaaaagaataaggaataa

SEQ ID NO: 308041 - DNA, 738 bp, Proteus mirabilis
  misc_feature (695)..(704): n is a, c, g, or t
atgggttattcaattaagcatctacgcatcgacagcaagcatattctggctttgattgacgatcatacaacgctaccatcactattcgttgctatatactcagtaagacggctttcacttttacgatttcgaactcaagaaaaagagttatttacattaaaatatttctttgagtattgggataaaaaattcagtagaacgtttgattgctgtttcatcaacgctggctacaacatcgtagattttatacctgaacttaatattttttatcattatttacttaataaacagcaccataaaaaaaatcaaaataactcaaatttttatcatacgactcttgagtcacgtaaaagtaacgctgaacatttacggacaatagctaaattttttttatacttaaaccaacgctacatgattcaacggtatcaacagttagataatcttcaattatgcaaaattagagattggaatgaacgaaatgtaaaattgactatccgagaatttagcaaagtacaatcgcagaatatgtccatgtattctgcttatcgtagtttgacaaaagatcagttaattaaattagaaaatatattactgccctcctcacctttaatcaaagatgaattagtaaatgatagttcttatgtgaatatgaaaaaaaatgaatttaatccatttgggacactatttttacaatnnnnnnnnnnatgtactaccttcttcagttatttcattaattga

SEQ ID NO: 308042 - DNA, 501 bp, Proteus mirabilis
atgagagaactatgtaatttatatatttccgagtattctctaaagttggttggcctagaaaaatcaggttcttttgtagaacatgcagatcagattacttctggtgaaaatgcctgtttgcagaaagggcaagtattaccgctcaataataattatatttataagcacattcttcctgggccatctacagaagaagaactaagtaaattgcctccctatgcttctacttcatattatagtggaaagctagtttatcgtagccaaacagatcgcacttgggtcttaactatcccagtaagggatagtagcgaagtaaaaagattaaacgaaaggtctttctcaaatctcaatgaaattctcaacgtagtggatcacttaaagtgtgatatatatgaaaatgctattgttcctattgcattagttaatcaattagtatcacttgcaaatcacccatcgtcaagaatgttggaaaaatttgctatccaatctatgaatgattga

SEQ ID NO: 308043 - DNA, 753 bp, Proteus mirabilis
atggtgaatgatatgaaaaatataaaaatgcttagtgctattataatgcttagcctcttttctcaatctacttatgccgctattgcattggatagaacacgagtattatataatgaaggtgagcgttcagtcagcatggtgttagaaaatgaaaataaatctaaaccttatttagcacaatcttggctggagaatagtcaagatgaaaaaataaattcaccttttgtagttacacctccagtgcaacgtattgaagctggaaataaaagtcagataaaaattcaagcattacctgctataaagacattacctacagatagagaaagtatttactatcttaatgttcgtgaaataccaccacgtagcgattcaccaaatgttttacaaatagcattacaaactaaaataaaaatgttttatcgacctaaaagtattgtggtgccaaatcgtttagaagcaaacccaatggaaaaagattttatactggaaaaacaaggtagccactataatataaaaaatccttccccttattatctgacaataacaaaagttaaaaaaaataatcaagaagtagaggattttgaggctattatggtcgagccttttggagaacattctttaggaaataatattatcgacctaggagaagcaacaaaaattgaatatattaatgattttggtggattagttgaaatcacatttcaatgtaatggaaatcgttgcatagttagtggtgataacaaaaagagataa

SEQ ID NO: 308044 - DNA, 477 bp, Proteus mirabilis
atgaatatactacgaagaataatattttttatctttttgagccttttatcatcttctgtatgggctgtatcaggatttttgaaattaaatgttagtgggagtgtggaggcctctccttgctctattaacaatggccaaacgatagatgttgattttaatgatgtttatatcgataaaatcgaaggtgagtattataaacgaaaaattaactataatataaattgtaaatctggtggtaatcccaaatttttgatgacatttgatggggatagtgaaggatattatttaaaaactaacgtcgataatttatttatttcattcaaaaatggtaataaagattttagtatgggaagtgggatctcaatttattataagacaccaccagatatttatgctgttttaattaagaaaaaaggcgctaacttacgtagtggggaattttacgcacatgccactatgaatttaatgtacctttaa

SEQ ID NO: 308045 - DNA, 984 bp, Proteus mirabilis
atgaaaagtgtcaataacgctataatcgaagattctgatgctatctatacggctcagcttaatgggcatggcggaattatgccgatcacggctaatagcatagcaagtaatgaaaggcctttttgggttcatctcgattatcgtaaacccaaaagtgatcagtggattaatcagactgagttacttcctcctatcgcaaaagatgtgcttttagctgaaaatgttcgacctaaggcacagcgtatcggggaaggggttattattaatttgcaaacgattaataacaaccccgatgatcggccggatgaactgattgcgtatcgtatttatattaatggtcaaatgattatttcgagccgacatcgtcgcgttaattccgttgattcggtgatccactctttagaagtgggtgatggtccagaaaatagtggtagttggttgatcactatggccgatgcagtgacagatgaaataggtgattttgttgaaacacttcatgaccaattaattgagttggaagatatgatcctcgatcagcaaattccggctcgaggtgaattggcattgctacgtaagcaactgattgtgttacgccgttatatggcgccacaacgtgatgtattctcccgactttctatcgaaaaattaccttggatgagcgacagtgatcgcattagtttggttgaaatatcagaacgtctctcgcgtcgattagaagatttagatagtagtatttctcgtacagccgttattgctgatgaaattacttcaatgatggcagatgcgatgaacagacgaacatataccatgtcattgatggcgatgctatttttgcctacgacctttttgacaggactatttggggttaatttaggggggatccccggtaatgaatttccttatggctttgctatattttgcttttcactgtttttcttgattgtgattgttgcttggtggttaaagcgtagtaggtggttgtga

SEQ ID NO: 308046 - DNA, 921 bp, Proteus mirabilis
atgagcatcccaaaagagcaatataattttaacaaattacaaaaacgcttacgccgtaacgttgggcaagctatcgctgattttaatatgattgaaaatggcgataaaatcatggtgtgcctttctggcgggaaagatagctatactctcctatctatcttaatgaatttgcaaaaaagcgcgccaatacaattttccttaattgccgttaatttagatcaaaaacagccgggcttccctgagcatattttacctgaatatcttgagcaactgggtgtagagtataaaattgttgaagagaatacttacggtattgtaaaagagatcattccagaaggtaaaaccacctgttcactttgctctcgcttacgtcgtggtattttataccgtacagccaccgaagttggggcaacaaaaattgctttaggccaccatcgtgatgatattttagaaacgctgtttctgaacatgttttatggtggaaagctaaagggcatgccacctaaattaatgagtgatgacggaaaacatatcgttattcgtccattggcttatgccagagaaaaagacattgagcgttttgctcaagcaaaaaatttccctattattccgtgtaatctttgtggctctcaacctaacttgcaacgccaagtgatcaaagagatgctaagagattgggataaacgttaccctgggcgtattgaaaccatgtttagggcaacccaaaatattgttccctcgcatctatgtgatacccaattatttgactttgctaatatcaaacagggtgatgagattattaacggcggtgatctagcatttgataaggatgatattccaacaagccctattctttccgatgatgaagatgagcgtcctgactttagccaagctagattggatgttgttgaggtaaaataa

SEQ ID NO: 308047 - DNA, 906 bp, Proteus mirabilis
atgtcatcagtggtgcgtaaagtaagaaaagcggtgatccctgttgcagggctaggaacaagaatgttgcctgccaccaaggctatcccaaaagagatgctacctgttgttgataaacctttaattcaatatgttgttaatgaatgtattgcagctggcatcaatgaaattgtgctagttacacactcttcaaaaaattctattgaaaaccattttgataccagttttgaattagaagctattttagaaaaacgagttaaacgtcagttgttggaagaagtacaaggtatttgtccaagtcacgttactattatgcaaactcgccaaggaatagcaaaagggttaggccatgccattttatgtgcaaaacctttggtgggtgatgagcctttcgctgttatcttgccggatgttattttagaccgatatagtgctgatctgactaaggttaatttaaaagagatgctttctcattttgaacaatctggcgcaagtcaaattttagtagagcctgttcctgaagaggaagtatctaactacgggattgttgactgcatgggagaacatttacagcctggcgacagtaaacccattactcgtgtggtagaaaaaccgaagaaagaagaagcaccttcaaatttatctattgttggtcgttatgtgttgtctgaaaacatttggcctttattagccaaaactgcaccaggagcaggggatgaaattcaattaactgacgcgattgcaatgttaattgaaaaagagcctgtagaagcttatcacctacaagggaaaagccacgattgtggtaataaattaggctatatgaaagcttttgttgaatatggtttacagcacgaagagtttggcgaagagttcacgaaatggataaaatcactgcaagcttaa

SEQ ID NO: 308048 - DNA, 705 bp, Proteus mirabilis
atgaaaaaagtattactcagtcttgctatgctggcgataatatctacgccagtgttagctaaatcccctgtagctaacttaaaaatcaatggtgatattaagccaccaacttgtactattaatggggcgacacaaagtgatgttatctttgattacggagtcataagcccaacacttatccctcaatcgactgtctactcttattctgacattggagttcaaaatacagttacgattgaatgtgatgcaaaaacatatttaacatttactgcatctgacacttatgctgatacagaattaagtgttaataatacatcaggctggtttcatttagttgataaagcaaatcctgaaaccgcggttggtgcggctttcttcgcatgggataatgtgactgtcgatagcaaacctgcatatatttcacgagcaaatgatgttgctattacggggaatagctttaataacgtcctatacaaagggccaactaatggttggacatcagaacaacaaacaagcgttgataaaaacgccctgactctaatttcaggtaaaattttccaatcaaatttcagacagggaactgaaagtagttctaatcaaaccttcattttatctagaaatgaattaagtaaaaaaggaatagatttatctaatggcttagattttatgggtgaagctgttctcacttttaactttggtgtctaa

SEQ ID NO: 308049 - DNA, 951 bp, Proteus mirabilis
atgacccgtttacgcactgtatcaaaacacccagagcaattagaaaccacaccattaattgcggaaagtcatcactacgatgatcctttggagcctcaaaaactggtatttttagaggcggtcaatcaacagcgttgtgtgattaactcaccacagcgcaatagccaactcaccaatacaatacccttttttatcgtgcttctagtaatgactttttatactctgtttgggtttatagataatcatctaggtaagaaaacatctatggaacagatgtctaaatacttagaggaaaaatatagttatttatctgaggataagaggaaaaataatagatctgttgttctatattcaccattttttaataaagaaaaaattagctggtgggagtatataaaagcgtataactccggtgaattttttattgatagccaatatgaaaagtacctcgtcattggctggttaatttttttccccggttttttatggctatttggctatctctctttctttacgcctcctgtgtaccttattgctgataggcaaagaggaatactgtatagctatggcatggggaaagtgcgtttaacccgctataaagaggcgcaatttggttatgcgggcaatatgttggcaattaaactatatggcattaatgaaaaaacaggccaattaaaaacgatcctctatcgccccaatgtgtcccactactccagttttctaaccagtaccgacagtgaaaaccaccgttttattactttccttaatgcctatatgcaacaaggtcgagatgccgtttcatctgctgattaccaagcccgtaagccctttttatcttttggcaaaaacccacctcctgctgattttgagcaacaggtcgaacagattctggcaaagcttgatcaggagaaaaaaaccatgcgtaaaattgataaggaaggcacggaatga

SEQ ID NO: 308050 - DNA, 465 bp, Proteus mirabilis
atgaaaatacataaaagcattgtttctaatgagttaattggtagattccctacatcttacccattaaatgcgagtctacctaattttgttgcaaactgcgttggattggaatctattttagcttgcgcaggtttattttgcccagaaatcattgaaattgatggtgcaatttatcgtagtgaaaataacaatcagaaattttcaccatatgaaggatatggaaaagataaaaaaacattagaaatggtaaataatacatttccaatcagtgatttttttttaatggctgcggatgaagcttgtgaagatgaaatattaatgactgaatttagtgaagttcttaaatacttttggggaattagattaaaaagtctttatccaaataaaacatttgaatttattattactgatgacggtttatatgatgaagatggtttttgcatgacattttacgaagttgagtaa

SEQ ID NO: 308051 - DNA, 702 bp, Proteus mirabilis
gtggtcaccgaccaccaaggcaccccgcgagagatattcagtgaaggcgggcaagccagttgggcaggacgattgaatacgtggggccaaatgcagttttggcgttaccgcgacggtaaagctgagaatgatcctaattataccgaatgtccttttcgctttgcggggcaatatgaagatgaagaaagtggcttgtattataatcgctttcgctattatgatagggaaacagggcagtatctttctccagaccccatagggttattgggtgggctgaatccctatgggtatgtgcattgtccgacggggtgggttgatccgtttgggttgagtggaacgtcgaaaattaataacaatgcaagtgaaaacaatacaagattcttagttgactctaaaggccaagttttagatttagagtattttagaaatctaaaagatagcggtgaaataattaaggggggggggcgtggcggtaataagctgcctactatggggacacctaatacttattcaagaaccaacggcggccatgtcattgtttttggtccagatggtcgaagaatggcagatatcagtaaagagcgaattaaaattacagagtggaacaaagctccgaatggacaatattaccctgacgttggtagtgatactaaatttgcaaataggcaaatccctgacgaaattaaaaaattattggaataa

SEQ ID NO: 308052 - DNA, 240 bp, Proteus mirabilis
atgaatgaacaagttatttttaccaaaattcgagaggctctagaacaagccccaagaaaccattacacactcgagctacaccttcagatgcttaaatacgctgattctcttaaacacataacggcaaaagagttttgtgaaggcgtaggtattagagaaagttttggaactgaattttctaagatgcgcaatcttattccaagattaaaaattgctggtttaataactgatttaatctga

SEQ ID NO: 308053 - DNA, 441 bp, Proteus mirabilis
atgaaactacaacttgtccctgaaaaattgatgttcaaaatatctactacagatcttaaagtaatttatactgaatcaggtggagttaaactgaagatcgatattcaatatattgatgactttaaaaatgatatatatcgtgaaatagaaattcactttctgatggtagcggaattaaggtgtgtttctatgaattttttcgatgctaattctgataattattctatagtaaatcaaaatataataactaatacaattaatttttgggaggagaatggatatcaccctgattcaggagtttatcaaattatgaattcaggtatattaaagcataaaaaagcactttatgatccattaaatagatttcatttaaaacattatttaattactggaaatgatagttatattgaaataatttcatctaaatatgaatataattaa

SEQ ID NO: 308054 - DNA, 378 bp, Proteus mirabilis
  misc_feature (362)..(371): n is a, c, g, or t
atgcaaaatgtgttgttaacgttatggcctttatttgcgttaattgcgctaggcgctattttaagaagaaataaagcatttgaacctgcattttgggtaggagctgaaaaattaaattattttttactctttcctgcattacttctcaatagcttggctaatgctcctttatctgatcctcaattacctcaccttgctggggctattttctcagtagtcatcattaccactattttgtgtgttatttttaaaaaaataaccggctggtctgctggccgttttggtgcgatcgttcaaggcaatattcggtttaacacttatttaggtttagctattgtcgctgatttatttggcgttgaagnnnnnnnnnngctttga

SEQ ID NO: 308055 - DNA, 831 bp, Proteus mirabilis
atgattataaaatcaaccattccggttggttttactaaacagatgagagagaaatataataccgataatattatcttctctcctgagttcttacgtgaaggtcgcgccctttacgataacctctatccatctcgtattgtgattggtgagcagtctgcaagagcagagaaatttgctgagcttttacaacaaggggcattaaaaaaagatattgatgttctttttactgattctacagaagcagaagctattaagttatttgctaatacttatctcgcactgcgtgttgcttattttaatgaacttgatagctacgcccaagcttacggtctaaatgcaagacaaattattgaaggtgtttgtttagatccgcgtattggtaatcactataacaacccatcatttggttatggtggctactgcttaccaaaagatactaaacaactgttagcaaattacgaatcagtaccgaataatattattggtgccattgttgaagctaaccgcacccgtaaagactttatcgctgattctattatcgctaaatcaccaaagattgttggcgtttaccgcttaattatgaaatcaggctctgataatttccgctcatcttcaattcaaggcattatgaagcgtattaaagcaaaaggcattgaagtggtaatttatgagccagaaatgaaagaagagactttctttaactcaaaactcattcgtgatttagatgagtttaaagccatgtctgatgtcattattaccaatagaatggctacggcgctaaacgatgtggaagaaaaagtttatactcgtgatctctttggtaacgattag

SEQ ID NO: 308056 - DNA, 417 bp, Proteus mirabilis
atgaaaaatgaaacgaatattcgccgtggcagacattgtgtattcctgatacacgtccatttggtctttgtcacaaaataccggcgaaaaatatttgatcaggatgccattgaaaaatggcgaggctactttgccagtgtttgtgctgattttgatgttgaactggttgaaatggatggggaacgggatcacgttcatttactgattaattacccgccaaaactggcgatatctaatctggttaacagccttaaaggggtatcgagtcgattacttcgacgtgatcgtcctgatattgcccaacgtgattactacaaaggggttctttggtcgccgagttatttcgcggggagttgtggtggcgcaccaatatccattatccgccagtacattgagcaacaggaaacaccgagttag

SEQ ID NO: 308057 - DNA, 417 bp, Proteus mirabilis
atgaaaaatgaaactaatattcgccgtggcagacattgtgtattcctgatgcacatccatttggtctttatcacaaaatacaggcgaaaaatatttgatcaggatgcaattgaaaaattgcgaggctactttgccagtgtttgtgctgattttgatgttgaactggttgaaatggatggggaacgggatcacgttcatttattgattaattacccgccaaaactggcgatatctaatctggttaacagccttaaaggggtatcgagtcgattacttcgacgtgatcgtcctgatattgcccaacgtgattactacaagggggttctttggtcgccgagttatttcgcggggagttgtggtggcgcaccaatatccattatccgccagtacattgagcaacaggaaacacctagttag

SEQ ID NO: 308058 - DNA, 390 bp, Proteus mirabilis
atgtctaaatcggcaaaaggtacgacagaacggcctggacggaacgtaaaagctaaatctggtttaaaccgctcaatactggagcaaggctggtatgaaatgcgccgacagcttgagtacaagcagctctggcgaggaggtcaggtactggcaataccccctgcctacaccagtcagaagtgcgcttgctgtggtcatacagcaaaggaaaaccggcagtcacaaagtcaattcgagtgccttgaatgtggatatacagcgaatgctgatatcaacggggcacgtaacattttagcggcaggacatgccgtgcttgccagtggagggagggtgcagtcagaccgcccgtcgaagcaggaacccgccgaggtgattcagacatcagtctga

SEQ ID NO: 308059 - DNA, 198 bp, Proteus mirabilis
atggactgttcatccttttcttccactataacaggggctaatgtagcaaataattttatttttgaatgttcactattagtcaatgaaaaaaccatattccttgtaacaaatacctcatatttactagagactggtgctatatctatttttactaacttccaattacaccatccccctccatcaataggtacgatatag

SEQ ID NO: 308060 - DNA, 387 bp, Proteus mirabilis
atgaaacgttgcaagtttccatcaactaatcatgaggcagaaaatgatgtcagaaaattcgcttttgatgtagacacaggttcttatcgggacgtaacaactattattgctgtagatggagggtacacagaagtaaccgtacgtaaaaattatcccagttctaaaattgctttttttcagttcggtggtttagagtttagtcttaatgacttaaaagaattaggtgaatcaccttttattcacccagagaaaatggaaaaatttaaaaaattagagcgttttaagctagcaataccaacaaaagcaacttctttagattccttgtcaatgattgattccgtaagaataccattaattgaatttttgctgtctcttatacacatctga

SEQ ID NO: 308061 - DNA, 249 bp, Proteus mirabilis
atgatttttttattaaaatatgaaggaccaggagggagtgataaggttaccgaaggtgttttcagttctaccttatcttttgatgcttacgtcactgatgatatcgtcgaagtttccgacggaagagagaccatgcaaagtgatgccgacggaggagagtccatgcaaagtaatgccgacgaaggattcccagcagcagtcctcctaagtggtgccggcttcgaaaacgtaagattcgacgatgaataa

SEQ ID NO: 308062 - DNA, 258 bp, Proteus mirabilis
atggaattatatgaagttgaagtattaaattcttatattgggaaaaagatccgtaaacgtcgtcttcaaatgggatggtcagctgcagttttaggggagaagataggattaagtcaacaacaaatttcacgttacgaatgtggcatccaaaatattactattatacgtctttatattttagctgatattttacaatgtgatattaattattttatagaagattatctaaataataataacttttccacaacgatatag

SEQ ID NO: 308063 - DNA, 180 bp, Proteus mirabilis
atgtttggatttggtggttctattaatttatttgacgttggacaaccaaccatcggcaaaatcaacgaaattgactataagaccaaagaagtcaaagtcgaaattgatgtcctttcagataagccaaaccaaacgcactaccgcgcattactggttcacccacaacaaatgtttaaataa

SEQ ID NO: 308064 - DNA, 462 bp, Proteus mirabilis
atgaagtattggaaattttatattgtcgttgtgatagtggggattgttgctggtgggtgtgtgctgattaatacacaagctaaaaaaattaacatactggtagaaaataacaaagaactgactaccacactcgaagagcaaaaggctatcaatgttgattatcaagcccgtgtagagcgactaaatcaacttgatacaagacacacacaggagcttgttaatgcaaagaatgaaattaatagcttgcgtgatcttagcgagcgccatcctgagcgggtgtacatcaaagccaactgtccaaaatccgaaagtgttaccacctccggcgtggatgatgcaaccaccgcccgacctactgacaccgctatcagaaattattggttactccgagaacgaattgcagagtcagagcaaatcatcttagggctacaagattacattagggctgagtgtgttcattga

SEQ ID NO: 308065 - DNA, 261 bp, Proteus mirabilis
atggaaattaaaagtttattagatgaaattgaaaaaacgaagtgcgccatacgacaggctgataatttacttgagttgaacgagcgtggatccattacttggatggtctgcgcaaataataacacttcgtacagagcgtttgcagaccaagagtttctcattgatgctgttaagtctcagcgtgaagtgtttataactcgtctgcaaaaactacaagaagcagtagccgtagttgagaaagttatcgatgggcttgtttga

SEQ ID NO: 308066 - DNA, 531 bp, Proteus mirabilis
atgtcttatattgcaacagcaacaaataaacatttctattatctcgatgtacggatcgaagatatagatattcaagatattgcgacaggtttagctaatgaatgtcgctttaatggacaaattgataatttctattctgttgctcagcattctgtgtataccagttatttagttgcacctgaatttgctttagaggccctacttcatgatgccagtgaagcttatgtcaaagacctaccgtcaccacttaaaaagttattgcctgaatataaattaattgaattgcgtgtggaaaagataatccgcaaaaagtttggattacctgaaaatatgtctgatgaagtccattttgctgacttaatgatgttagccacagaaaagcgtgatttagacattgatgcaggtagtaactggttaatgcttgaaggtattccagctagcgattttgctgtcaacccgctaacccctcgacaagcaaaatccctattcttacgccgttttaatgagctttataaagagaaaaatggctaa

SEQ ID NO: 308067 - DNA, 270 bp, Proteus mirabilis; identical to SEQ ID NO: 298615

SEQ ID NO: 308068 - DNA, 705 bp, Proteus mirabilis; identical to SEQ ID NO: 14478

SEQ ID NO: 308069 - DNA, 141 bp, Proteus mirabilis
atgaaattaaattcattacagcttcaacaacacagatataaattatctagtgattcatttaaaaatgaaaataacaattctatttatattgttagtctcattttatttatgggttatttattaatatcagctttaagttaa

SEQ ID NO: 308070 - DNA, 3066 bp, Proteus mirabilis
atgccgatatttcgttttactgcgcttgcaatgacattggggttattatcaaccccctatcatgttattgctgccaccagcaatcctgcatttgatcccaatcatcttatgcaatcagaaatctatcattttgcacaaagtgatccattagctgatttttcatcagataaaaattcaacactaactttatctgataaacgtagcattatgggaaaccaatcccttttatggcaatggaaaggtggtagtagttttactttacataaaaagcttatagttcccacagataaagaagcctctaaagcatggggacgcgcttctacacctgttttatcattttggctttacaacgaaaaacctattgatggttatctcactgttgatttaggggaaaagctcaatgccaccagcgaagcccaagctggctttaaagtaaaactaaatttcactggctggcgtgctattggtatctctttaaataacgatcttgaaaatcgcgagatgactttaaatgcaacaaatacatcatccgatggtactcaagatagtattggtcgctctttaggtgcaaatgtcgacagcattcgttttaaagccccttctaatatcagtcagggtgaaatctatatcgaccgtattatgttttctattgatgacgcccgttatcaatggtctgattatcaaataaaaacacgattatcagagccggaaattgaatttcacactgtacaacctcaattacctgtaacaccagaaaatttagctgcgatagatcttattcgccaacgtcttatcaatgaatttgttggtggtgaaaaagagacgaatcttgctttagaagagaatatcagcaagctaaaaacggattttgaggcactgaatattcgccctctttcggatggaggaatgcaaggtcgacatcttatcaccgataaacaaaccatcatctatcagccagaacagcttaattctcaagacaagcaactttttgataattacgtcattcttggtaactacaccacattaatgtttaatattagccgtgcttatgtgctcgaaaaagatccaacacaaaaagaacagctaaaacagatgtacctcttgatgaccaagcatctattagatcaaggatttgtcaaaggtagtgccctagtaaccactcaccactggggatatagttcacgttggtggtatatctctacattattaatggctgatgcactaaaagaagctaatctacagacagaagtctatgattctctactttggtattcacgagaatttaaaagtagttttgatatgaaagttggcgcaaatagctctgatttagactattttaataccttatctcgtcaacatttagcgctattattacttgaacccgatgatcaaaaacgtattaacttagtcaattcttttagtcattatattactggtgccttaactcaagtaccaccggggagtaaagacggtttgcgtcctgatggtacggcatggcgacatgaaggtaattatcccggctactctttcccagcatttaaaaatgcctcacagctgatttatttattacgagaaacaccttttgctgtaggtgaaagtggctggaataacctaaaaaaggcaatgatttcagcatggatctatagtaatcctgaagttggcttacctttagcgggaagacacccctttaactcaccttccctacaatctatagcacaaggttactattggctcgcgatgtctgcccaaccagcgccagataaacagttagcatctatttatttagcaattagtggtaaatcgcgaaatgaatctcccactatttttggtgaagagataacgccagcgtcccttcctcaagggttctatgcctttaacggtggtgcctttggtattcaccgttggcaagacaaaatggtgacattaaaagcctataataccaatgtatggtcatctgaaatttacaataaagataaccgttatggccgttatcaaagtcatggtgttgctcaaatcgttcgcaatggctctcaactttcacaaggctatcagcaagaaggctgggattggaatagaatgcctggcgccacaaccattcatcttccgcttaaagaacttgatagccctaacccacacaccttgatgcaacgaggtgagcgaggatttagcggcacatcagcccttgaaggaaaatatggcatgatggcgtttgatcttctttatcccgctaatcttgcgcgttttgatgctaactttaccgctaaaaaaaccgtcttagcggcggataaccatttaatttttgtcggtagcaatattaatagcagcgataaagatcaccctgtggaaacaacgttattccaacatgctattacgcctgagttaaacactatttggattaatggccaaaaaatagaaggttttctttatcaaactacgctaaaacaaggagattggataatcgatagtaatggtaacggttatttaattactcaagcagaaaaagtgaatgtcagccgccaacaccagacttcggctgaaaataaaaatcgtcaacccacgcaaggaaattttagctccgcatggatcgaccacggtattcaacccaaagatcatagttatgagtacatggttttcttagatgcaacaccggaaaaaatggcgcaattagccgagaaattccgtgctaacaatgggttataccaagttattcgtaaagataaagatgtacatattatttacgataaactcagtcaaataacaggttatgcattttatcaaccagcagtcattgacgataaatggatcaaaaaagtcgataagccgtccatcgttatgacacatcaggaaggaaatatactgacggtgagtgctgtaacacctgatttaaatatgactcgccaaaaagcggcaacccccgtcaccattaatgtgacagtgaaagggaaatggcaacccacagctcaagacagtgaggtaaaatataacgtttctggggataataccgaacttattttcaccagttactttggcattccacaagaaattaaactctctcctctctcttga

SEQ ID NO: 308071 - DNA, 255 bp, Proteus mirabilis; identical to SEQ ID NO: 297588

SEQ ID NO: 308072 - DNA, 3075 bp, Proteus mirabilis
atgtctgatgaaagaatgttgccggattctcaaaaaggttatgcgcctgttattcgcggtattgcaacaacgactgctcgagtagtgataaaacaaaatggtactgaaatttatcaaacgacggtatcaccagggcaatttgaaataaatgacctttatccaaccagttatgaaggagatttattagtcgaaattcacgaaagtaatggtaaagtttcttctttcacagtgccatttaccgcattacctgaatcagtgagggctggtcgctttaaatacaactttaccgctggtgaggtgaataattttggttcagaaaatagttatttttcagatattgctttacaatatggtatgaataatacggtaacgttaaatactgggatacgtgtaggacatcaatatcaggcaatatttgtcggctctgttattgctacaaaattaggggccataggttttaattcgacattttcaaatgctgaagtggctggtaaaaattatcaaggtggacgattaggtattagttatagccgtactctcagtctaaccaatactgttattacactcgcaggttataaatactcaacagagaatttccgtgaatacaatgatgttttggggttgagaaaaagtgcaagtaatgacatagaatggaattccagcagttataaccaagaaagtcagtttacacttagtgttaatcagtctcttgataagtgggggcaactttatgtttcgggctctatcagcaactattatggtaataaaggacatgatgcccagtatcaaattggttattcaaatacctataaagatattgcttatagtcttgtctatagtcgccaaaaaacagggaaaataacggcgaataatacttttacaccaataactactgatccaatatcggaagatatggtgatgttatctgtttctgtacctttaggacgctctgattattcaccaatgctgtcactatcctctagccactctagtaatgattcgaattaccaaacgaacttatcggggcttttaggggaagataaaacactttcttatagtataaatgcagattatgacacacaaaatagagtggtaggtactggtttgcatttaattaaacaacttccttttaccacgttatcaggcagcatttctaatagtaaacaatacactcaaggtagtgtgggcattcaaggtgcgttagttgcacacagtggcgggataacattagggccaagtattagtgattcttttgctttagtggaagccaaaggtgcaagtggagcgactgtgagtaatggaatgggggcacagattgacccttttggctatgctattgtgccttctcttgtcccttaccaatataacaatgttagtttggatggaaaaaatattagaaataataatattgagctattagaaaatactaaacaaatagcaccatattcaggttctagtaccaaaatcgtttttaaaacccaagtcggataccctgtattgatttcagttaaaccttcaaactcattggcattaggtgaaaatgtttatgataaagatagaaatattgttggcatggtaggacaaagtaaccagatttatgtcagagtcgaaaataaaaaagggacactaactgtcggtaaagatgaagatagttgccaaatcaattactcaataccagaagaaaaagaagacgataaactcattttattatcagctcatcactcctctattttatttttattggccttgatgctattcccttctttagcattggcaacatgttataaaataacaaccacaacgacagatcccaataatgtgtattataccgagccgggcaaaggttcagcgaaaaattggcaaggtgctagagatgattcaggatcaatgggaagtacccccaaagtaattaatgttaataacgatcagtttcaaattccaggtacattagtagcgactggctttatctctttttttgaagcaggttatgaagtttatgatcctgaacaaatattgtttcgttgcacagccgatgaagagggaaaattaagagaattctattcaacgaatggtgactatatctatgggggtagaaatttagttaatccagctttaggcttaaataatacttatattagtttagcaagagggctgggtattcgcattaaaaataccattacaggtgaatattatagtcgctattggaaatctcgtgctttaaataatttagaaagagatagccaaggatggatcttagtaaaagcaaaagacttctctaatatggaagtagagctatttaagattaactatgaaagaataagtgatatgccccccgaacaatcaagtaatgggttaattacgtttgctaaccaaccggcgggttatatcgcctttcaaagctctaacttttcttatttattaaaagatggttcagatcacgccacaaattatcatggcttttatgattcttggccggctgctgtaaatatgtctcgccgtatttacattcgtaatgcgtccacttgttttgtgcgaaatgttacgccttatgtttcattcccgctagtcactattaatgagttagaaagaggcaaaaaagtgactttacctattacgattgatttttattgtcaaatagcaccaccagcaaacgatggcatgagttatatttccagcggaactgggcctgggcaaactgcaatgggatttttacctagacctacaaatgttaataaggcaattgaattaggattaacagtacctaatggtgctgcaattacccatttagtgacagacggttatggtactgatacaaatatggcaaaaggggttggtgtaagaatatatcgcccatcaggtatgccattaaacttattatcaacattagcgaatgaaggacaaggtgaaggttatggttggtaccctattgatgatgatgcaagcgcagtctcatatgacaatggtattgtcgattcaacaaaaacattgtatgcctcattagaagcgttaccgagagaaaaaataactgccggtaaatttaatgcaaaattacaagtaattatacaggtgcaataa

SEQ ID NO: 308073 - DNA, 1770 bp, Proteus mirabilis; identical to SEQ ID NO: 297773

SEQ ID NO: 308074 - DNA, 369 bp, Proteus mirabilis
  misc_feature (335)..(344): n is a, c, g, or t
atgttaacacgcttgtttgttacggggacagataccaacataggtaaaactgttgtcacccgagcacttcttcagtcaataaatcgtggcgggacaacagcagtgggctttaagcctatcgcaaccgaattgcatgaaacggttgagggtaatcgtaatcgtgatgctcagattattcataattcctcacctattgacgctcgctacgacgaaattaaccctattttgctagaaaattgttatgtaagtgaaaatgcaatagacttccatcaaatttcaagtgaactaaataatttgggccaaaaagctgaatgcgttgttatcgaggggaatgnnnnnnnnnnatggtggttggcgctatttacttga

SEQ ID NO: 308075 - DNA, 969 bp, Proteus mirabilis
atgacagatactaataaaaaaaagttaacaatcaatgatatagccaaactttgtggtgtgggcaaatcgactgtttcaagagtacttaatcaagatcctatggttaatgaagaaacaaggaaaaaagttaactcaattattgagaaatataaattcacgccgtcaaaatctgcacgagcaatgcggggatactctaatcgttcttttggtattatcgtcactcgcctggattcttatgcggaaaatcaagcggttagtgccatattaccgatcctttatcaaaacaacattgaccctattattttagaaagccaatttagccaagccaaagtagaagaaaacttaaaaatgctcgcccaccagaaaatcgatggcgtaatattatttgcattttcagggatcaatgcggctaacttagcaagttggaaacaaaaaatggttgttatagcaagaccactagaaggttttgtttccatttgtcatgacgatgaacgagctgttaacgctttaatgcattatttccatcgagacaaacattatcaacatataagttttatcgggatccaaattaatgatgaaacaacgggtttattacgttatcaaacttatcttcaatattgccagcaacatcaattaatatctcaagctcaacttggtgaacttaattatcaaagtggctatttacttgccaaacaagcattagcaagcaagcctcaagctattttatgtgcgaccgactcactggcctttggtgtacaaaaatatttagccgaacagaaaatagatcatattgaggtggcctgtatcggtcgtaatgatctactcacctttttatttcctcaaactaaattctatcgattaggttttagagaaagtggacaagaagctgctaacatattgatacaaatgctagaaaaaaatattcctgcacaaaaaatcattatatcaagtcatgacttaaacccatga

SEQ ID NO: 308076 - DNA, 495 bp, Proteus mirabilis
  misc_feature (471)..(480): n is a, c, g, or t
gtgaggtttgatggtgggcataaatgttgtcatcttgctgctgatgaattatctgagttctttgaatatcaatctacttgcccagaaatggctattggtttaccgacacccagaccagcattacgattagttcagtctaagactggtgaagttaggttaaaatttagtaatggaagtgaaggtgacttaacccaattgatgaatgattactctatcgaatatttgaggaggtttaatcaatttagcggttatatcgtgtgtgcgaaatcacccagttgtggattagaacgtgtccgggtttatgatccaataggcaacggcaataaaaaatcgggtacaggcatttttactgaaaatctgaaaagaataatgccgtggttacctatagaagaagatgggcggttaaacgatccctatattagagaaaattttattacacgggtgtttgcgcttaatgagctaaatcaattnnnnnnnnnntttatcggcaactag

SEQ ID NO: 308077 - DNA, 192 bp, Proteus mirabilis
  misc_feature (171)..(180): n is a, c, g, or t
atgctctctcctcaactaaggggatatgcaccacaagttacagggatcgctgaaactaacgcaagggtagttgttaagcatcaaggacgtattctttacgattcaacagtacccgcaggtccatttgccattcaagatttagacagttcggtgcgtggtaaattggatgtnnnnnnnnnnattggatgttga

SEQ ID NO: 308078 - DNA, 183 bp, Proteus mirabilis
atgacacaagaaacgtataacgcatggaatttaggtatttttgcagcctcgtctataattgcattacttatgctattttctgttagaaatcaaatagctaaggctgttgaagcaaatcgtatcagtaagttgaattcgttattatcaatcgaatctcagatagttttacgcaggcaaggttag

SEQ ID NO: 308079 - DNA, 258 bp, Proteus mirabilis
atgacaattactgaatatgctaaaaaaatagctgataaactagccaactccccctctaactatcgctccatacttgatgaagcagagagggtaattaataattcacacctttctgacctagatataaaacaattctggattgaattatatagagaatatgaatcaagacctcgcacaataacagaaaagcaaggttctagtgaacttgataaaatcattgatgcagccaaagctatcatagcaaaaaaggcaaactaa

SEQ ID NO: 308080 - DNA, 558 bp, Proteus mirabilis
atgtcaaaaaatagtgatattctcagtaatatcgatagagaggaaaatttctcatcggcttttatctgttttgaagattcacctctgatccatttttgtagtaatggttttgattatctttcttcacaaaattgtccagatacttttactcaattacgtattgaagaaatgctcattctattactttcttccgaacaaggtgccaatcttatggcgttactacgccaattaagtcataggcaagttgatcgcttgaaaatatttatggaaaaaaaccatctaaaaaattggaagctaaaacagtttgctcgcgagtttggtatgggtctcaccacatttaaagagttatttaatcatgtttatggaacatcgccaagaacatggatatgcgaaagaagaattatttacgcacatcaattattattaacaacagaaatgagtattgtcgatatttctatggaatcaggattctctagccaatcttactttacacaaagctatcatcgacgttttaatatgacaccgagtaaagcgagacatcttaaattaaaattataa

SEQ ID NO: 308081 - DNA, 414 bp, Proteus mirabilis
atgaattggtcttttattctaattttagctctatttgtagttgttggttgtgttgataaagagaggaatacatctggctctatagaaaaggtggcaacagagatagcgactcctactgttcaatatcaccacgatgaaagtcgttatcccacatttatgttatcaaaacaatctcgttttgaaatgcaagccaaggaggaaaaacagaaattcaatcaattatttaaatttggatttgaagagccaaccacatctactaatagcgaatattcctataaaaaggaacaacgtataagaaagaatgaccagtcaatgattattctgccagaagcgatacctgtatggaataaagataaacaagaagttgaagttaagtggagctacagaccaaaatatgtttttgatgcatattaa

SEQ ID NO: 308082 - DNA, 144 bp, Proteus mirabilis
atgaattttgttgtgcagatacgtcaagatgatcatcttttttttttattattcttcggttcttcttctgctaaggaaggcttagtattgtcttcatcattttctagtgaaaatgtcgtcattttatattgtggatcatcttga

SEQ ID NO: 308083 - DNA, 912 bp, Proteus mirabilis; identical to SEQ ID NO: 305373

SEQ ID NO: 308084 - DNA, 555 bp, Proteus mirabilis
atggatgccagagaaatatggataagacttaatgttgtttcaagattgccagtaaataaagcgattaaggtggtggaatacttacaatcattgacgcaactaaatcgtaaagtgttactagaatgtggcctatcagaacaacaaagtcaccaatttatgaggcttcaggcaaattgtgtcaaaagtacattaaagtggctagataaaaatgaatcatcactcttaacaatttctgattcagattatcctttgctattaaaacaaatatcttctccacctcttttgctttttgttgcaggtaataaagagcatttaaaaagcacacaaattgcattaattggtagtagagatgctacacagtatggaactaagtgggcgacttattttgcacaacagctcgtgaaaaataaattcacaattacaagcgggttggcgcaaggaattgatggtgttggacatcgtagtgctttaaaacatcatggcgtcactattgctgtattagggagtggtttagaacaaatttacccatcatttcatcgtcgactagcagagtaa

SEQ ID NO: 308085 - DNA, 279 bp, Proteus mirabilis
atgaaaagtcattatttaacattaaaccaagctcattgggataaacaagccgcaatgcaaaatcaatggtctaaacccgtggacgataaagaaattatcgaggcaaaaaaaggaaactggaaagtacatttaacgccgaatcccgttaaaaaggagtggttagcagatattaaaggtaaaaacatactctgcttagcttcagctggtgggcaacaagcacctattttagctgctgctggtggcattgtgaccgttttgatttatctgaagggcaactga

SEQ ID NO: 308086 - DNA, 1746 bp, Proteus mirabilis
ttgccacttaactttcgtattttaataaaattagccccactccctctgattagtggcattattatggcaataatctcaacaatgctaagtttagcaccattatggatcatctataaaatcagccagatttgtttttcaacatcacctaatattcaacaaataaataatctagtttatatcactgtgattattttaattttacgttggggattaatggcaataagtcatattgccgcacatcggggtgctttttatattcagcatcaattacaactcgcaatagctaaaaaaatcagtaaagtaccattatcattttttgctcaatatggcagtggaaatctgcgacgtattatcaatgatgatataaaaagcttagaaggttttttcgcacatatgctacctgatctcgtctcagccatagtgactccctttatcgctattatattacttttttatgtaaattggcctcttgccttattatctctaaccccattacccattgcttttatggctcaacttctcatgttgcgtcgagccaataaacaaaccaatgagtggatgaatattcagaaaaaaattgctaatgaaataggagaatatattaaaggaatacgagaaataaaagcgtttaacttaacctcccatacttttggtaaattatctcaatctatcaattcctctgttaaatggataaaaaataatgtcaaagctagtacaggctcttggatggtatttagtgggatattaacagcgaatctcgttattatagcaccagtaggtgggtggatgtatttaaatcaaaatattgatttatctacttatattttatttttaatgacatcccccctcgtacttgcgccgttattacgactaacatttgtgctaggagaacaagctcaacgaaaacaaaccttaaaacatatcagtatgatccttgaactttcagagcataaacaacatgataaacattttactctccctaaaaatagcgatattacttttaaagatgtctgtttggatcatggtgataaaccgatattagagaaaattagttttaatgcccaagcgggtacaacaactgcaattgtaggccacagtggtgcaggaaaatcctcattattaaaactaattccccgtttttatgattgtacttctggccaaataaaaataggtcaatatgatatcaactactggccagaaattgatttactttctcaaataagtgttgtttttcaagatgtatatctatttcatggaactattttagaaaatttactcatagcaaatcctaatgccttatttgaggatattatcaaagcaactaaagcagccaatattcatcatgttattgaaaaactcccagcaggatataatacattaattggtgaacaaggaaataaactttcaggtggagagaaacagcgattatcaattgcaagagcactattaaaaaactctccaatcctacttctcgatgaaattactgccaatgttgatgctgaaaatgaaattttgatctatcgcgcattaaagagtctatgccagaatcggactgttattatgatcactcataacctacatactattattaacgcagataaaattattgtgcttgataatggaaagattattgatacaggtacacacacccatttattaaaccaatgcccaacctatcaaaaattatggaatgattatagtcacactattcattggcaattaatccaggagaataataatgattaa

SEQ ID NO: 308087 - DNA, 933 bp, Proteus mirabilis
atgataagtgtagatgtaaatgataattatttggagtgtagacaatattatgctgtcctattctgtatgctttcagaaaaaacactattacctgaagatttttataaaatgattatcgaggcaagaggtaagaatgttaatacgttaattcgtgagttgaatcagcatgtcgggaatgtcttaaataatgttgatcattatttaagaaaggtggagagaaaaactattccaatagaacaactatcttttttaagggatgaaagaatatcatttgttatcttaaactttctcatgaagtcgtataataaataccttatagaaatgggtcataaatcaattatggctggagtgtataattattcacctttaaatttgatgccaatgatgggtaaaaatataccttttcattatattgtttgttttttggattttgtagttttatttatgacccctaaagattttaatgcgatagtttttcaaatgagagataaagcttcatctattaccaaagaatatccagatcctttttcatttttgtcaaaaaaaactgaagcgttaaaatggataggagagaggatgatgcgcgaaaatattgctgctgatgatgatgttaatgttcttattaaaaatcagaaatggaaaataattgtttcctgttttgattattgggctgttatttcaaccgtagaacgtgtaaagctttttttatttcaaacaaggaaggcatggagccaaaaaaagtatcgtgatggagttaaagataaggctgtactcaatacgtatatttcaaaatcatctatgttgaaattaaaagaaatagctaaaaatcataataaaaatattaacgaaattatcgaggcgatgattgaagaaattgttttgccacgagatccacttaaagaactcatatcgttagttgaaaagaaaaattaa

SEQ ID NO: 308088 - DNA, 123 bp, Proteus mirabilis; identical to SEQ ID NO: 299922

SEQ ID NO: 308089 - DNA, 1326 bp, Proteus mirabilis
atggtgcagttttattcccctaaaaaacgtcctgctaaaaaacaggtaaaaaacttggcggtaaccgctaatgcattggatgctaacggtcaaggtattgctcatgctgagggcaaaactatttttgttaaaggattacttccacaagaaactgcacgcattcgtttgaccgaagaaaaacgccagtttgccaagggagaagtgatcacacggttaaccacaaacccagaaagagtgacaccaccctgtcagtactatcaacattgtggtgggtgccagcaacaacatgtgcctattgattggcaacgcaccactaaagctgaggttttatcacatcttattaaacgtgaaactaatgtggtcatttcagcacagcctgttattgccggtgcggagtatggctatcggcgccgagcaagattagggttacgttatcaccctaaaaagggtttggtgatgggatttcgccaagcactttctaatgacttagtgatggtcaccgaatgcccagtattaaaaccacaacttaatgcattgttgttgccactgtggcagtgtttaaagcaactctctgtcgtgcgtgatttaggtcatgtggaattagtgttagcagataatgggccattagtgattttgcgtcatttatcaccgctatctgagggggataagcaattgttagatgatttttctcatcatgctcaagtgatgatatatctggcgagtgataatggtgagatcgcacaattaacaacgattgagaaggaacccttctatcagatagagggtctaaaattacactttgcaccaacggattttattcaagttaatgatgaaataaatcataagatggttgctcaagcgatagcatggctcgatttatcgccaaacgatcgcgtactagacttgttttgtggcatgggtaacttcacattacctatggcaaagcgtgttgataaagtcgttggtgtcgaaggtgttcctgcactggtggcaatggcgaaaaaaaatgctgaacttaatcaattagataatgttcagttttggcatgctgatttatccgccgatttttctgctatgccttgggcacaggaaggatttaataaagttctgctagatcccgcaagagcgggagctgcacaagtgatgtcacatattgtgacgttatccgcagaaaaaattgtgtatgtttcctgtaatccgaccacgttagccagagatagtaagatattattagattccggatatcagctaacccagttaagaatgttggatatgtttccacaaacagggcatctggaatcaatggcattgtttattcgcaaataa

SEQ ID NO: 308090 - DNA, 1308 bp, Proteus mirabilis
atggctggcttattgaccctcaatgagaaacgtgaaaaacagcatcaagtagaacagcgtaatcaacaggcattaaaacaattctctgcgctatatcaacagcgtaaaggggaagataatttaaatgcacgtaatcactggctacaagtggaaaaagtgggttttccagcttatcgacacgaagattggcattatacgccattagatgagacgctcagtcagcaatatcaaatgttgccaccttttgaggtacaagatttaattgagcaacgggcgctctcatttgattgctaccgtatcgtgatggttaatggtgcattttcaccggctgaaagtagtcaagattttggtccataccaagtgacattactggataaccaaagtgaattaccgcaagccattaatggtgaagtgttcttgcatttagttgaaagtttagcgcaacagccgctattcattaccttgaaaaaaggcgtagtggcagataaaccgctttatatccttaatattacacaaggtcatgcagggcaagaagttaacagtgctaactatcgtttccatcttgatgttggcgctaatgctcagatgcaagtgattgaacactatattagtagtgatggtgaaaaccgtcattttaccggggcgagattaaccgccactattggtgataatgcctcgttcaaccatattaaacttggttttgaaaatggcattagccaacattttgcccataacgatttaagcattggacgagatgctcgtgttaatagttatgcattcttgttggggaataaactgagtcgtcatcatactagcgctgcactgacgggtgagaacagtgagctatcaatgaatagtgtggtattacccaaagcgaacgaaattgccgatactcgtacttggctcgtgcatggtgagaaaaattgcctaagccgtcaattacataaaagtattgcaatggatgcagggaaagccgtatttaatggcatgatcacagtcacccctcaagcgctgaaaacagatggtcaaatgaccaataacaacttgttattaggtgataaagcacaaattgatactaagccacaacttgagatctatgctgatgatgtgaaatgtagtcatggtgcaacggttgggcgtattgatgatgagcaactattttatctacgttcacgaggtattgcgttaagtgaagctcgcaaaatgatcattcatgcatttgctgccgaattaacagaatcattagaaaatagtgtgatcaaaactcatgttctagagagaataaatcaacgcttatcagaggtataa

SEQ ID NO: 308091 - DNA, 3066 bp, Proteus mirabilis
atgccgatatttcgttttactgcgcttgcaatgacattggggttattatcaaccccctatcatgttattgctgccaccagcaatcctgcatttgatcccaatcatcttatgcaatcagaaatctatcattttgcacaaagtgatccattagctgatttttcatcagataaaaattcaacactaactttatctgataaacgtagcattatgggaaaccaatcccttttatggcaatggaaaggtggcagtagttttactttacataaaaagcttatagttcccacagataaagaagcctctaaagcatggggacgcgcttctacacctgttttatcattttggctttacaacgaaaaacctattgatggttatctcactgttgatttaggggaaaagctcaatgccaccagcgaagcccaagctggttttaaagtaaaactaaatttcactggctggcgtgctattggtatctctttaaataacgatcttgaaaatcgtgagatgactttaaatgcaacaaatacatcatccgatggtactcaagatagtattggtcgctctttaggtgcgaatgttgacagcattcgttttaaagccccttctaatatcagtcagggtgaaatctatatcgaccgtattatgttttctattgatgacgcccgttaccaatggtctgattatcaaataaaaacacgattatcagagccggaaattgaatttcacaccgtacaacctcaattacctgtaacaccagaaaatttagttgcgatagatcttattcgccaacgtcttatcaatgaatttgttggtggtgaaaaagagacgaatcttgctttagaagagaatatcagcaagctaaaaacggattttgaggcactaaatattcgccctctttcggatggaggaatgcaaggtcgacatcttatcaccgataaacaaactatcatctatcagccagaacagcttaattctcaagacaagcaactttttgataattacgtcattcttggtaactacaccacattaatgtttaatattagccgtgcttatgtgctcgaaaaagatccaacacaaaaagaacagctaaaacagatgtacctcttgatgaccaagcatctattagatcaaggatttgtcaaaggtagtgccctagtaaccactcaccactggggatatagttcacgttggtggtatatctctacattattaatggctgatgcactaaaagaagctaatctacagacagaagtctatgattctctactttggtattcacgagaatttaaaagtagttttgatatgaaagttggcgcaaatagctctgatttagactattttaataccttatctcgtcaacatttagcgctattattacttgaacccgatgatcaaaaacgtattaacttagtcaattcttttagtcattatatcactggtgccttaactcaagtaccaccggggagtaaagacggtttgcgtcctgatggtacggcatggcgacatgaaggtaattatcccggctactctttcccagcatttaaaaatgcctcacagctgatttatttattacgagaaacaccttttgctgtaggtgaaagtggctggaataacctaaaaaaggcaatgatttcagcatggatctatagtaatcctgaagttggcttacctttagcgggaagacacccctttaactcaccttccctacaatctatagcacaaggttactattggctcgcgatgtctgcccaaccagcgccagataaacagttagcatctatttatttagcaattagtggtaaatcgcgaaatgaatctcccactatttttggtgaagagataacgccagcgtcccttcctcaaggattctatgcctttaacggtggtgcctttggtattcaccgttggcaagacaaaatggtgacattaaaagcctataataccaatgtatggtcatctgaaatttacaataaagataaccgttatggccgttatcaaagtcatggtgttgctcaaatcgttcgcaatggctctcaactttcacaaggctatcagcaagaaggctgggattggaatagaatgcctggcgccacaaccattcatcttccgcttaaagaacttgatagccctaacccacacaccttgatgcaacgaggtgagcgaggatttagcggcacatcagcccttgaaggaaaatatggcatgatggcgtttgatcttctttatcccgctaatcttgcgcgttttgatgctaactttaccgctaaaaaaaccgtcttagcggcggataaccatttaatttttgtcggtagcaatattaatagcagcgataaagatcaccctgtggaaacaacgttattccaacatgctattacgcctgagttaaacactatttggattaatggccaaaaaatagaaggttttccttatcaaactacgctaaaacaaggagattggataatcgatagtaatggtaacggttatttaattactcaagcagaaaaagtgaatgtcagccgccaacaccagacttcggctgaaaataaaaatcgtcaacccacgcaaggaaattttagctccgcatggatcgaccacggtattcaacccaaagatcatagttatgagtacatggttttcttagatgcaacaccggaaaaaatggcgcaattagccgagaaattccgtgctaacaatgggttataccaagttattcgtaaagataaagatgtacatattatttacgataaactcagtcaaataacaggttatgcattttatcaaccagcagtcattgacgataaatggatcaaaaaagtcgataagccgtccattgttatgacacatcaggaaggaaatatactgacggtgagtgctgtaacacctgatttaaatatgactcgccaaaaagcggcaacccccgtcaccattaatgtgacagtgaaagggaaatggcaacccacagctcaagacagtgaggtaaaatataacgtttctggggataatatcgaacttattttcaccagttactttggcattccacaagaaattaaactctctcctctctcttga

SEQ ID NO: 308092 - DNA, 1638 bp, Proteus mirabilis
atgataaatgtaactaaaaaaagtgcgctagcgatcgccattggtactatctttggttttacggcgctcaatgctactgcggctgttgtgcctgatggggtaaaactggctgataaacaagagttagtgcgtaataatggctctgagccacaatcacttgatcctcataaaattgagggtgtacctgaatcagcattagcacgagatctatttgaagggatcacgattgtagggcctgatggtgaaattctaccgggctctgcgactagctgggaaaataaagattttaccgtttggacgttcaaaattcgtgaagacgcgaaatggtcaaatggtgaccctgtaacagcgcaagactttgtttatagctggcaacgtttagcagatccgaatacagcatcaccttatgaaagttatctacaatatgcccatattgttaatattgacgatattatcgccggtaagaaaaaaccgacggaactaggtgttaaagcgcttgataataatacattagaaatcacattatcagaggccgtaccttatttacctaaattgctagctcactcctcgatgtcgccagtgaatcaaaaagtgattgaaaaatttggtgaaaagtggacgcaacctgcgaactttgttggcaatggtgcttatgtactgaaaaattggacggtaaacgaacgtattgaattagagcgtagtccaacctattgggacaataaaaatacggttatcaataaagttacttttttacctatctcatcagaagtcaccgatgtaaaccgctatcgtgcgggtgaaatcgacatgacttatagcaatctgccgattgaatttttccaaaaattgaaaaaagagatcccagatgaattacgtatcagcccatacttatgtacttattattatgaaattaataatgagaaagctccctttgacgatccacgagtacgtgaagcactaaaactatctatggatagagatatcatcacctataaagtgaaaaaccaaggtgatatccctgcttacggatttacaccgcctttcaccgatggcattaaagagagtaaaccagagtggttcgcttcttggacccaagagcaacgtaatgaaaaggcgcgccaattattagaagaggcgggttataacaaagccaatccattaaaattcaagttactgtataacacctctgatctacataaaaaagttgcgattgcggcctcttctatttggaagaaaaacttaggtgctgaggtttctcttgaaaaccaagagtggaaaacgttcttagatacacgtcaccaaggtaattatgatgttgcacgtgcaggatggtgtgcagattataacgaaccttcttcattccttaacatgatgctgtcttacagcagtaataataccgttcactataaaaacaaacaatttgatgcgtatatgaaagaatctttacgcgtgaagtcggatgatgaacgtgcagaaatttatcaaaaagcagaaggtgtattagataaagattctgccattgttccactttactactacgtaaacacccgtttggttaaaccttatgtcggtggttattctggtaaagatccactggataatttacatactaaagacttgtatattattgctaaataa

SEQ ID NO: 308093 - DNA, 2148 bp, Proteus mirabilis; identical to SEQ ID NO: 103785

SEQ ID NO: 308094 - DNA, 198 bp, Proteus mirabilis; identical to SEQ ID NO: 14560

SEQ ID NO: 308095 - DNA, 198 bp, Proteus mirabilis; identical to SEQ ID NO: 299913

SEQ ID NO: 308096 - DNA, 519 bp, Proteus mirabilis; identical to SEQ ID NO: 299914

SEQ ID NO: 308097 - DNA, 249 bp, Proteus mirabilis
atgtggatatttctagaatttgactgtgagcagttcacgcaacttgatatttcatatgcaaataaatcaaatgcatttgtatttgatgaagaagccagaaacctctcaataaaaaacaaaaaagtcatcatgaaatgctattaccgtaagccttacatgactaaaaatttatctattgattacacatgggaacatcaattagttaattttgatgaattatcctttgattttattaataaaaaaagataa

SEQ ID NO: 308098 - DNA, 444 bp, Proteus mirabilis; identical to SEQ ID NO: 299966

SEQ ID NO: 308099 - DNA, 741 bp, Proteus mirabilis; identical to SEQ ID NO: 190889

SEQ ID NO: 308100 - DNA, 663 bp, Proteus mirabilis; identical to SEQ ID NO: 190890

SEQ ID NO: 308101 - DNA, 1011 bp, Proteus mirabilis
atgtattattccttagtaaggaaggcattgtttcggctagatcctgaacgtgcccatgattttacctttcgtcagttaaaacgcttatctcattccccatttcaatttcttattcaacaatcacttcctgccaaacccgtttcttgtatgggactttcatttaaaaatcctctcggtcttgccgccggccttgataaaaatggtgattgcattgatgcattaggggcaatggggtttggctttattgaagtgggtactgttacaccacgagcacaagtaggtaatgacaaaccgcgtctctttcgcttagtagaagctgaaggcttaattaatcgaatggggtttaataatttaggggttgataacctaatagagaatgtaaaacaatctcaatatggtggtgtgctgggtattaatatcggtaaaaataaagatacccccgtagagcaaggaaaagatgattacttaatctgtatggaaaaagtttacccttatgcaggttatattgcgattaacatctcttcacctaacacccccggcttacggacactccaatatggtgaagcattagacgatttattatctgcgattaaaaataaacaacttgagttacaagggaaatatcaaaaatatgtgcctgtggccgttaaaattgcccctgatcttactcatgaagaattaatccaagttgcagatagcttagtgcgtcaccatattgatggcgtaattgcgaccaatacaacattagacaaatcattagtgagtggattagatcactgcaatgaagccggtggattaagcggtcgtccggttcaatcaaaaagtacacaaatcattcgacaactaaatgaagagttaaaaggcgctttacctattattggggtaggggggattgattcattgactgccgcacgcgaaaaaatggatgcaggtgcttctttaatacaagtctattcaggattcatttatcatggtcctgcacttataaaatctataattaatcatatttaa

SEQ ID NO: 308102 - DNA, 672 bp, Proteus mirabilis
atgtctgcttattcacaattaaggaagaggagtaaagaaacctatgagctgactaaaactttttctggaacgggatactatttttacttaaaaagcagtcaaactattataggaggaggaatacaaagtatttttggatatttaacatttaagattgctcgtaaaattagaagtaaagaaatgcaaggagctggaattattggtataacactaggtggcggtaagtttattgaaggtatatcagatatagtgtatgaatttactgagggtggggttaattttggtggagacccagtaaaagagaatattgaaaagggactaagatttttaggtatgaccgagagtcatggagaaataggtgatgatattattgatatgactgtcagtttatataatggatttgctgcttttgttaaatatgattctcctaatcgtattattcatttacctgttatcatggcggggagaacttatagagcgacatattttgatcgtttttttaccagtaaaggtgttcgtttgtttcgttggagtacattagattttaagcagaaatttagcattcaaagtaaacctctattacttactacgctcagctacaatgcagggaaacttattctaatattaaaaaaatataataacgatgagttatctagtgagaatactcaataa

SEQ ID NO: 308103 - DNA, 690 bp, Proteus mirabilis
atgcaatgtttatatattttccaaaaaaatggttatgctataacattaaaagatttgtatttaaatccaacaataaaaggatggtataaaatattagataatatatatacacataaaacaataaaaaatgctggtgagttttcacttacacctatacaacatgcctattttgtcggccgtttgaataaacaaactcttggtggtgttgcttgccaaatttatcaagaatttgatggcacccctaaatttactccggaaagtctagagaaagcattagtattattatcaaaacgtcatcccatgttgaatatagtatttcaccaacagggtacacaattttggtctcctaacccaaatagaaaatatgttacatatcatgattttagtaaattaccaaaagatgagtatgagaaaaaacttttacaattacgggaaaaattaagccatcaggtactaaatgttgaaagcggtcagttaattgattttcacatgatatcgctacctaacaacagatatcgtttatgtactaatattgatatgttgattgcagatggtacaagttattcattactctttactgaactttgtttattattgagcggagaaatactgcctcagttagatgagcactatgacttttaccattatttacaagataaaaaacagtatgaaaacaaagaatcagcataa

SEQ ID NO: 308104 - DNA, 282 bp, Proteus mirabilis
atgtattttggcattaacgtgaataaagaggattattcattattattggataatgataaaaaaacagtagagcaagtagtacgctgtaaaaggttacttgaaaagattaaccaacaatttaatgctaaagagtatcgaaaagagttaatacaaaaaaatgaatttaagaaaagattattagaaagaaaggtattagtaactgatttttcatcatttttaataaaagtaagtgcaaggtggtatttcttgataagaaaaataactaaaaaagctaagaaataa

SEQ ID NO: 308105 - DNA, 519 bp, Proteus mirabilis
atggattacctacccttatttgtggaattaaaacagcgcccagtattactggttggcggtgggcatgtcgctgcgcgtaaagccgtactgttattaaaagcgggcgctcggttacgtgttatcgcgccacagttatgtgatgaattgcatcttgcttatcagcaaaatcaaattgagtggattgctgggcaatatcagtcagagcatttacttggcatgatgctggtgatcgtggcaacagacgataaggtattaaatcaacaagtgtatctagatgcgcaagcacgccacatttttgtcaatgtcgtcgactctcaaccccaatgctcttttatctttcctgccattatcgatagaaatccgatattaattgccatttcatcagcgggcaaagcccctgttttagttcgtatgatacgggaaaagctagaggcattattgcctacctcattaggggctatggcgactattgcggggaaatggcgcaataaagtgaaacaaaaactgactggtttttaa

SEQ ID NO: 308106 - DNA, 423 bp, Proteus mirabilis
atgtattattttagtgcgaaaaaaaatttattttatccagaggaaatgaaagatatttatatatcaacggactcttttcctgacgatgttattttagttgataattctgtttttaatgagtttgtcgccaattcaccaccagaagggaaaacaagaggtgttgataacaaagggaaaccatgttggttagatattgcaccacttagtcatgagcaatggttagataaatcaaaacaacaacaacaatttttactggctcacgctaatgaggttattgctcctcttaaagatgcacaggatggcggatatattgaacatgaagatattgctcgtttaatatcatggcaaaaatatcgttataaattaacgaaagtagacttttctaattatccgaatattcaatggccggagaaaccgcaatga

SEQ ID NO: 308107 - DNA, 705 bp, Proteus mirabilis; identical to SEQ ID NO: 8686

SEQ ID NO: 308108 - DNA, 1167 bp, Proteus mirabilis
gtgaaacagaacactactttggtacgcaaaggtgacagtacattagtacctgtcgcgggtttaacggtatttgctatcgcatcaggctatttaatgagtttaattccactatctatggatagttttggtattgatactttttatgctagctggttagcaagcatttactttattggattacttataggttcagtgatgatcgaacctattattgcaaaaatagggcataggctctcttttgtgctgtttttattgttgttagcattcaccgtgagtattttgccactgttaccttatttatcggtatggctagtatctcgctttttcggtggtatggcggttgcgggtatctttgttgtagtcgaatcatggttattaattggtgataatcctaaagagcgagctaaacgcttgggcttttatatgacatcactttatggtggcacaacattaggtcagcttgctattggtgccattggtacgcaaggggcgattccttttatcgcggtattggcattgctattaattgcagtgttacctcctttgttttttaaacaaggacaaccccaatgccacgagcataaaagtttgtcacttaaacagattagccggctgaataaagcttctttagtaggctgtatggtttctggcgttgtgatggggagtatttatggcatgatgccattggctttaaatcaaggacaatttaacaccgaccaaattggggtgttgatggcagcaattattttaggtggtatggttgttcagcctattattagcaaattgtcggtgatgatgagtaaaaccctattattagccatgatgtgcttagttggggtatttgcgatgggcatgacttatctgtctaatgactatgtggtgttaattattgcattagctttattaggaatgtcatcttttgcactttatcctattgctatcacattagcttgtgatcatgttaatgcgagctatattgtggcaattactcaggtgatgttattaagttacagcgtgggttcagcaatggggccattaggcgcaggtatgtttatgtcacaagcaagtaacggcattatgaactttttctttgtcgtgttattagcgacagctgtatatatgttatttgccagtttacgacgcaaaagccatattgtgcttaactaa

SEQ ID NO: 308109 - DNA, 1125 bp, Proteus mirabilis
  misc_feature (8)..(17): n is a, c, g, or t
gtgatatnnnnnnnnnntgctcaaacactgaaatcaaaagccgtcagtgatatcaaagatcctattggtgaaacattaggtgaaggcaaaacacggactttagtgatcacccaaaaaggtgaaaaagagcctttaaaaatagagttaacagacagtcaaacttctattattgaattacgtgatgctatcaataaaaaagaaggcaacgtttctgccactattgtaaaagcccaagatggcgttaaccatttagttctgacttctcgtaaagaaggtacagattctcaaatggaaatcactgttgaaggtgatagtaagcttaacgattttattagctactccactaaaacaaacagtggtgcaatgacagagatcgttaaggcaaataatgcaaagttaacgattaatgggattgaaattgaacgtcaaactaatgaaattaaagatgcgcctgaagggatcacgttaaatcttaagaaaaaaaccaatgataataaagatggcgtagataagcctgaaattattacggttgcgcgtgatattgagccaatgaaaaaggccataaaagcctggaccgatgcttataatgaattaaataaaacctataaagatttcaccaagtacacccaagttgaaaaaggtgaagatgcctctaaagacaatggtgtgttattaggtgataccactagccggatgattatgtctgagctaaaaagctttatcactcgttctcaatcttcatctgagattgatacccttaataaaatgggcattaaatttaaagtagatggcacattagaagttgatgataaaaaactcgataaagcattaaaagaaaaacctgctaacgtcaaagagttttttatgggtgatggtaaagaaacaggatttggtactcaaacctataattacctgaaaaaaacgctgcaatccaacgacggcacccttgatattgccactgatggtgttaaaaaacgtaaaaaatcgttagataaccaaattaagaataccaaacgtactattgaagcgacgatggaacgttataaaaaacagtttcaattattagataaaatggttaatgccatgactaactcaagtgcatcaattgaacgtttattacgctaa

SEQ ID NO: 308110 - DNA, 1146 bp, Proteus mirabilis
atgaatagtttgattggctcttctgtttatcgtcgccaactcacttgtggcacattaagcgtaacgccaaattgctcattagaacatcttgatgaactttttgatattgcggaaagacgcaaccctaagcgcgcttttttgtttgtcagtaaagtattagggcgccatattcctgtttcacctaagaaaatgcgtgaaacttatcaacaaatggccaaacaatttcctcaatcactcgaaggccctattctttttattggtatggcagaaactgcggtcggtttaggtgcggggatttttgatgaagtaagagatcgctatcctcaagccctctaccttacttcaacgcgccatcctattgctgatggtgaattattctgtaaatttaaagaaaatcacagtcatgcaactgatcacctactttatttgcctcataacctagaacaacgccaatggatcctgcaagcgaaaaccattgtgttaattgatgatgaagcaaccacaggtaatacctttcttaacttgctgtctgcattacgtgaagaaggtaagttaacacaaattaagcagattattgctgtcacattaaccgattggagtggtgatgctctgcaaaagcgttcaccattacccataacaaccttctctttagtgcagggaaaatggcaatggcaagccaatcccgatgcaccattacctgttatgccaaatgtcaatattactgcttcaggacaggttgctatcacaggaaaacaaagttggggacgcttaggcatgacaacccctgctaatgatcttggcctatttattcatgtttctgagggtgaaaaaatattggttttaggctctggtgaatttgtctgggaaccctttttattagcagaacgcttagaaaaacaaggggctattgtaaaatatagctcgacgactcgctcacctattgccactaattttgctatccaatcagcgataacttttactgataattacggattaggcattcctaactttgtctataacgtggctcatcagcaatttgatcgcattctgctttgttgtgaaacccctgccgaaagtattgatagtcaacttattgaggctctctataaagttgcccctattgttgaagtaattagctatgactaa

SEQ ID NO: 308111 - DNA, 423 bp, Proteus mirabilis; identical to SEQ ID NO: 308106

SEQ ID NO: 308112 - DNA, 915 bp, Proteus mirabilis
atgtcatctcagttcaatggacttatcccttccaattctttatcttcgtttaatatagaagtgattaaagaacttctgctctggatcgaggtaaatctagaaaagccgttattacttgatgatgtagcgataaaatcaggttatacaaaatggcatttgcaacgggtgtttaagcaagcaacgggcttaacattagcctcttatattcgtggtagacgactgaccaaagccgccactgagttgcgcttaactaaacttccggtattaactatcgcactacgctatcaatttgattcgcagcaatcttttacacgccgctttaaagctgtttttggcgttactccttcggaataccgtaaagttgatgtgttgtgtagcgacaattttcagccccccatcaattttgaagttaccgacctccctattccaaatattatcgagctacctgaaagctttctttatgttattcaataccaatacttttgctctatcgaggatattggcaaactacatgaagatattcgtcatcagttttggaatgattttttgttgtacacagataaaaactttacggaaagtagcgtgttaatttcttatcaaccaaatacattacgtaaagataagatccagattgattatgaaattggcctaaacaatttagatcactttaccagaccccgtggttttagaaaaaaagcgattgcaggcgggcgttatgttcgtttccaatttaaaggcacgttagaagaatataaacaatttgccatcaagatctacttttatactttaccggctttggggttatgtcgtcgtttagggccagatattgaaaactacatttgtatagaaacagatagcgacataatggaactaccaaaaacactggaaattgattattacgttccaattcattaa

SEQ ID NO: 308113 - DNA, 996 bp, Proteus mirabilis
atgaaaaagatattaaataaaccagaaaattatgttgatgaaacattagctggcttatgccttgcacataatgatatttatcgtcaaccacaaccacgtttaattacgcgagctaacagctcagataaagctaaagtgggaattgttactggcggaggatcagggcaccttcccgttttcaccggatatgtaggtgaaggtttattagatgccgccgcagtcggtgatgtatttgcctcaccgtcagcagatctaatggctgatgcgatacgcgctgcggataatgggcagggggtattactgctctatggtaattatggtggcgatattatgaattttgatatggcctctgaaacggtagattttgaagataatattcgatgtacaacggtgttagcgacagatgatattgcttctgcaacaccagaagaagcgcataaacgtcgtggtgtggctggaatgatttatggttttaaaatggcaggggccaaagctcaagaaggggcatctcttgatgaggtgacccgcattgctcaaaaaaccatggaaaacacgcgaacaataggctgtgccttaacatcttgcaccttacccgctgttggacatcctacctttgaaatagctgacgatgaaatggaaatgggaatggggatccacggtgaaccaggaatttggcgcgataaattacgtagtgcagatgatattgcagaagaaatgtttcaacgtttacaaaccgaattatcactaaaaaagggtgataaagtctcagtattagtcaactcgttaggtgcaacgcctttagaagaactctatattttatataataaagttgttcaacttattgataatacaggggcgactatcattcacccattagtcggccgttatgcaacatcaatggaaatgaccggtgctagcttaactttttgtaaacttgatgatgagcttgaagctttattgaatgcacctgctcactgtgcattttggagagtgtga

SEQ ID NO: 308114 - DNA, 1116 bp, Proteus mirabilis
gtgcagatatttccattaaaaaacacttttgtacaagatagaacctatatattacgtgatgaaaaagtggttttaccaggtataacaacggttttgcaacagctatttatgccatcgggagagaaagaaaaaacagtcagaagagcgcgtgagattatcgaagataatgataaatatcaggatgataaaattaccaacgatatacaagatactcattcaccgattatcactcaaatgggcaaatataatgttgaactcgttcctttacctggatcaaatagcctgttggttaaaacgagtcgagaaggtttagctttagttagctcacttatttcacaattagataaaccgaaaagacaagttgaattgtcattatggataattgatatttctaaaagtaaagccgatagtttgggggtgaattggcaggggagttatggctcgggtaaaaatacatttttctttaataccgctagcttaagtgctgtatctggttttagttttttaagtaaaatcaaagcactcagtgaggaaggggaagctaaaatggtttctcgtcctattttgttaactcaagaaaatacccccgccatatttgataataacaccaccttttatacacaaattaaaggtgagcgagttgcttcattagaatctacaacattcggcactatgatcagtgtgttgcctcgtattagtaatactaaccaagagattgagatgattatcaatcttgaagatggcgccgagaaaaaaagtgatgatgaagatagagaagaagggattgaaaaattacctgttattaatcgcacaaatatcagcaccgtggcccgagtttctgaaggcggtagtttattaattggtggatatacacgagaagataacataaaagcagaaaacaaaattccttttttaagtgctatacctttagttggccgagcatttagctatcagtcagataataataaaaaaatggtgcgtatttttatgttacaaccgcgtttattagataaaactgatacgcacggattggactctttaactgaacacccatttttaccgatggataaaaaaacatctcaagcgctaaaacaaattcaggcatttatgaggtga

SEQ ID NO: 308115 - DNA, 234 bp, Proteus mirabilis
atgatggtgatgggagttatcggctattttcttcaacagcgtaactttcctatctcaccgattatattagggatgattttagggccgatgctagagaagaatttactttcttcgttgatgaaatcggacggagagctaattaattttgttaatagacctatttcaattgtattagccagtgttttcctattaattgtcgctatgcaaattaggagcgcatttaaaaccaaataa

SEQ ID NO: 308116 - DNA, 1173 bp, Proteus mirabilis
atggatatatttattagcgcattagcttatattgattacacgacaatacttgttgtcgtcggcgcttgcttatttggtttatttgttggagcaattccgggattaacatcaaccatggcaattgctttaatggtgccttttactttctttcttgatccaattcctgcattagcactgatgatctccgtaggtgcatcctcgatatttgccggcgatattccaggggcattattaaatattcccggaacacccgcctctgcagcttatactaacgatgcccatacattggttaaagaaggtaaaactaatcgtgtattagggatgtcattaacaagctccgttattggtggggtgatcggcacaattattttagcgtcaaccgctccgttgttagccgagtttgcacttaaatttagctcttacgaatatatgtggcttactttaattggattaagctgcgccactattgtttctggcgctcaaattagaaaaagtttgctagcactgtttttcggtattgctttagccactattggctacgatgaatttacaggacaagcccgttttacctttggtgaagtctctttaatgcaaggtgttagttttattcccgccatgatagggctatttgctatctctggtgcgattaaatattacgtcgatcgctggaaagaaaagcaaattaaattagcagttaatacagataatagctcatataatatttttaaaggggtgggaaaggttgtttgccaacgtaaagggggcattttccgtagtggtattattggtacattgataggtgctttacccggtgctggtgccgatatcgctgcgtggatctcttatgcagtatctaaaaaattatcaaaaaaaccgcaaaagtatgggcaaggctcagaagaaggtattgttgatgcatcagcaagtaataatgctagtttagcaggaagttggataccttcattggtttttggtattcccggtgattctgcggcagctattatcattggtgtattgtatatgaaagatatgcaacctggaccaactctctttttatttaatccagataaactgtacgccgtgataatgcaattctttatccagcaattattttatttagtattgtcggttcatttgctattaccaatacgatgtcatccattgtggttatga

SEQ ID NO: 308117 - DNA, 381 bp, Proteus mirabilis
atggggaaagtgcgtttaatccgctataaagaggcgcaatttggttatgcgggcaatatgttggcgattaaactatatggcattaatgaaaaaacaagccaattaaaaacgatcctctatcgccccaatgtgtcccactactccagtttcctaaccagtactgacagtgaaaaccaccgttttatcactttccttaatgcctatatgcaacaaggtcgagatgccgtttcgcctgttgattaccacgcccgtaagccctttttatcttttggcaaaaacccacctccagctgattttgagcaacaggtcgaacagattctggcaaagcttgatcaggagaaaaaaaccatgcgtaaaattgataaggaaggtacagaatga

SEQ ID NO: 308118 - DNA, 831 bp, Proteus mirabilis
atgtttatatcactaaacattaaattattacaacacattaataatgttttattagatttcgatttttccaataggaatttaatttgtataactggccggaatggaatagggaaaacatctatagtaaaatcattatgcttattaaaagatataagtgtcttaaataagacatcttcaattttcagtataaataaagaaactaatataacaatatctataaataaaaacaattatcattattattgtaataacggagaaattgattcaaaagatattattgatgaaagttttttaaatgttgaactccctattccttatggaaaacgtttctctaattttcctgttttaggtaatattgataaagaattaagagagagttatattaagggagagtttaataaaaatatagaaataatttattttttgagccaaatctatataggagagagattctcatcactcaaagaggtaataataagaggtaataagtattattttcttcctcttgatggatatagatatattagagaggattattttagctctggagagtactttgtaataaatctatataagacagtaacttctgattgtaaattaattgttgtagatgaaattgatatttctcttgatgcctctgctcaagttagattaatacaagccctcaataatttgtgtgataaatataagaaaaaaataatatttacaacacattctcttcctattatgagagtgttatatcaacaggttggtgagtctatattctgtctcttatacacatctccgagcccacgagacgctacgctatctcgtatgccgtcttctgcttga

SEQ ID NO: 308119 - DNA, 450 bp, Proteus mirabilis
ttgattaattttggcccatctcgccgtgagcattatccaaatctgcctttctggcgattagttcgcgatggtttttgggaattgcaacaaccaaaagagagcgatctatcaaaagataataagcaaccatcgaaaaataaattaattcagcaaaatgtgttaggtggatttgaccaagaaagctatcagcttcttataaaaaagccaagtttaatcaataagctagcacaacagattttaagtgaacacttccctgataatgttcaagaagttattgctaaccgtcttgattttccactacaagaaattcgccaaaaccgagatcccacttttagaaaaaatatcttacgtgcttacaattatcagtgtgctatatgtggttataatctacgttatgatagcgccgtggttggcctagaagccgctcatttgacatcctccacgccctaa

SEQ ID NO: 308120 - DNA, 948 bp, Proteus mirabilis
atggactggaaatacgaaattggtactaatttatggatattccctcaaggaatgcaacgttctggtgaggctggtgataattcagttcaatggcaatcaaaatatggtagtgtgattgcatcaggttatgatatttctactactgatggtattaatgaaaaaggattagtggctaatttattatggcttgctgaatcagattacccaagttattccaaagataagcctgcaatggctatttctgcatgggcacaatatgtattagataattttgctactgttgaagaggcggtaactgctttaaaagatgagccttttattgtcttaacagacaaagtacccggacaggatagagtcgcaacgttacatttatcattgtctgacagttctggtgatagcgcaattattgaatatattgatggtaaacaggtgatccaccatagccgaaaatatcaagtgatgactaactcccctatattttctgaacagttagcattaaatagctattggcagcagattggtggtacggtaatgttaccgggtactaatagagcatcggatcgttttgcaagagcctctttttatattaatgctattcctaaatcgcaatcgagcaaaaaatcacttgccagtgtatttggggtgatccgcaatgtttcggtgccttatggattaagtaccgtagaatctccagaaatatcatcgactcgttggagaactgtcgctgatcataaaaatcagctctacttttttgaatctgcattatcaccaaatactttttgggttgatttgaaacaaattgatttttcaaaagaaacaggaaaagtgatgatgttagcgttaggccaagagcagtcaacgatttattcaggagatgcaagctctcagtttaagccagcgaaaccttttaaatttaaagggttagaaaatataccaatacaaaattaa

SEQ ID NO: 308121 - DNA, 423 bp, Proteus mirabilis; identical to SEQ ID NO: 298890

SEQ ID NO: 308122 - DNA, 306 bp, Proteus mirabilis
atgcaaatactcagaaatgtaatcttaaaaaaggtgctaaaattcttagttctagccatatatggtgttaatggtgttgatattgatgaaataaccattactcctgctttatataattgctctgctgcaccatatatagcaacttggtgcattgaaccactcattatgccgataaagaaactaccacatgttgaatataatgaaacgcccagccttgatataaaatattctgttgattctttggctaattcttttattcttcttaagttaaatgatagatattttaatttccatctcttaagataa

SEQ ID NO: 308123 - DNA, 705 bp, Proteus mirabilis
ttggcacaagaagcaaatttagcacaagtagataaatttgttttaatttctacagacaaagctgttaggcccacaaatataatgggagctactaagaggttttcagaactcattttacaagctctagcgaaggaaagtcagtatacatactattcaatggttcgatttggtaatgttttagggtcatcaggttctgtagtacccttatttgaaaaacaaatagcagctggaggaccagtaacattaactcataaagatattactcgattctttatgacaatcccagaagcagctcaattagttattcaagctggtgctatgggaaaaaatggtgatgttttcgtactagatatgggtgagcctgtaaaaatatatgatcttgccgctaaaatgattaatttgtcaggtttaaaaataaaggatacagaacatcctgatggtgatatagaaatagttattactggtttaaggcctggcgaaaaattatatgaagaacttttaattggtgataatgtttcgggtacaatccacccacgaataatgacagcaaatgaaaatcacctagaatggtcagacctctctatattactagagaatattgtagaacattgtaattctagaaatttaatcgaattaataaatttattgcaaaaagctcctttaggttttcatcctcaaaatgagctatccgacttgttaaaataa

SEQ ID NO: 308124 - DNA, 321 bp, Proteus mirabilis
atgaacagttctacacatgatgggcaatttatgaaattcacactgccagaaccagaccctaagaatgtttgcaatctttgcggtggtaatgtcggaaaagataatttaatccaaggtaaggcggcaaatatttgctttgactgctcagatttggcgaaggaaatggcagatgaaaagcgcaaggaaatagctaaaagggaaatagaacgtatcgctgatattatttctattggtgaagagggtttaattgatgttgttaggggctatgcttatgtgtacgcagaacgcttatataaagctggatatagaaaggtggagtga

SEQ ID NO: 308125 - DNA, 609 bp, Proteus mirabilis
atgaagaattgctttaaatgcagaaaagaaaaaccattgagcgaattttacaaacataaaggcacactcgatggacatctaaataaatgcaaagagtgcacaaagttagatgtaaaaagaaactcagaaaaagttaggaacaaatatgacttctcaataaagggagtatttagggttttatataaaactcaaaaaagacatcaaaagttaagaggtcatggtgatatgccgtacaccaaagatgagttaattgagtggtgtatgaataatggttttatttgcctatataaaacttgggagagctcagggtttataacagacctgaaaccaagtgtggacagattaaatgatcttaaaggttacagttttgacaatataaggctttgcacatggagagaaaatagagagcaccagtttaacgatattaaaatggggataggaactggaggaaagcgatgtaaaaaactcatgaagatggacgattcaggaaaggtaatttgcagttatgtatcctacagctccgcagttagagacgtaggttataagctagaatatcaaatcagaaataaaattaagtgtagaaatgggttttattggaaatacgcttaa

SEQ ID NO: 308126 - DNA, 216 bp, Proteus mirabilis
atgttcactgacttaatcgcagctattgaagaatgcaggtttagggcattagcagagcgcactggtgataaaacaaagcgctatttatcagttattcaattaaataacggattcatgaaggttgtcgaaactgtacaggcaaagagatgtggtaaccggattatgtactcagtcggttgcgatagatatcacacagtattaccggaggcgagatga

SEQ ID NO: 308127 - DNA, 441 bp, Proteus mirabilis
atggcgactgaaaagaaaatgggtcgcccttctgattacttaccagaggtggcggacgatgtatgcgctctaattgccgatggtgaaagtttgcgttctgtatgcaagcgaccaggaatgccaaacacaactaaagtcatgcgttggttgcgagaataccctgactttcgtgaacagtacgcgaaagcgatggaatcaagagctgatgccgtgtttgaagagttgtttgatattgctgatgatgtaacagaagaaccatcggcagttgctaaggcaaggttaaggatagataccagaaagtgggctttagcaagaatgagccctaaaaagtatggggacaaggtaactcaggatattgatttgaaatcatctgacggttcaatgtcaccgacaaaaatagttctggttgccggaggtagcaatgacggtagcaaggattga

SEQ ID NO: 308128 - DNA, 1953 bp, Proteus mirabilis
atgtctacaattccaacacaaaacccagttccaagtgaagcagcgaaagacctgaaatttaactcaggtaaaattgacgagttcgttacgtcaatgaaaaacaaatatatcgatagatttgggcaagagcattttacaatcgaagggttgcgatgggttgctcaacaagcaatatctaaatttggatatatcacattagactcattccaaaaaggtgcagaaataacactgccaaatcaagttttgcgtgatgaagttacaggagaatattaccgctgggatggttggttaccaaagtccattcctgttggatcaactccagaaaactccggtggtattggtgtaggaaaatggcttagcgttggtgactctagcttgagaagtgagttaaaggaaaagctggtaactaagctagttcagacggacaaaataaaaatcaatgaaagtgaaataacggttggcggtagtaatgtaacatttcctgataaagatataagaattacaaatgaaagtatttttataggggaaagtagaataggtcgacgtattggtgatatttatttctcaccattcccatcatttgagttggattttggtgagtttgaggcgaatggcgcggtcattccctttagcgatcctgcggcttctgccttattatcacttagtaaggcatataaaatgaggtggggtatttttaaaacagagaatggggtgacactcccatcaatgtatcataaggatggtcgcggtagatacatgcgctcaggaatcgtcgggatgaaaactgatgatacctctcagagaatagttgctgatatacgattaagaaatggaattagctcaaatccaacatacaataatatggttggggccttgcccggtacaaaatcagaactttttgatattaaaaagggagggacggtatccggcacgtcaggatttagctccgctaattcagagtctcagtatacatcagttgaattagacacagggagagtcatacgcacttcaaatgaaacatctgttttagatgttggaatgacacctgttatatatttaggcgttgaaaataaaataaataaaaatgaatttaccttcttaaatactgacatttcatcggagcctttattccaaatctattcagcaaacccacaaaaagacaacctatctcaaggtgtttcaattaggggaaatagagtgtattcgcttcacccttattatcaaggttccgaaaatccagtagagaaaggggttgtaataacagctaattacaaagggtgcgatcagccagacctattattgcaaacagataaaggttggcacgaggggatctgtaacgttgtaattggaggggaggagtatttattattttctgcaaacaatccttctattaatggacacgagggtaatatacggcaaactcatatagcaaaaataaaagtatcatcaccagataatattgaatatataagggtttttgatactggattccctaatgctggttctatgacagcacctaatatttcaagtgattttaaaaaaataaccgttcgccaagttgtttatgagaatggtaacagaacaaacaaaacaagaataagagttattgacgcttatagcctattaatggagaaccaacttgttattgatgaagactttacaacagatgtaaatcaagatcctaattttaactatggtattcaaagcactctgtatcataaaggtaaggtactaactcttacagggggagtaggaacgtcatatccttcagttatcgacgtgtatgataaaggcactattattgaaaccataaatataaaatgcggacaaaatcttataactgatggattctgggagccagagtggatatttagtgatggtgatgatgtatttttatttgttggtataaataaagcacctaacaggaaagagttggtatacaagataatataa

SEQ ID NO: 308129 - DNA, 246 bp, Proteus mirabilis
atgtgtcactcagaacctcggctgacgtttagtcttaaagaccaagcttattttttaacacttcatacggtgttttaccagcatgcgctgagtgagggcgatgacaattataaaaagcctcccattcagctaatttttcatgtaaatcgacatcatccttataatcgatatattgataaacttcttgccatattattaatgcaaagaaaaatatttttgcattattatatatataatttttattaa

SEQ ID NO: 308130 - DNA, 849 bp, Proteus mirabilis; identical to SEQ ID NO: 294005

SEQ ID NO: 308131 - DNA, 699 bp, Proteus mirabilis
atggggaaagttcaagtgttagataaagaaaaaataatttctaaaaatattctttttgaattatttaactataaattgtgttgttttttaaatacaaggaataaggcaaggcgttggaaatatttttcttatgtaaaatgggaggaagatgtttttgatttaaacttacgtattgaaaaaacaaaattagacctaatacattggtttgataatttatccgactttgaggaaagaaaaacggttatattgaaaagtaaatttacatacaacgatattgaatgtataaaaactttattgtctagatttggttatatgtttagaataaataaaatctgttcagataaagattatcgtttgttttattttgttctacagttaattaatgtaaagaatgataatattggagaagaacgaaatgatttgatgacttctttatgtcaacagtttttatgtgagttattcatgtcttatgaggatttttctcgatttattgtaaatgaacagggtattttctttgaaactgaaaatataggacatgtgaatttaatcagtattattaatttgcttttttttgataatggaacagaaagttcccatgcgttagggcaattctatttatctttaattgattttttatttgtaagggatggtaggagatatcaaaatttattcattcaaatatcttcattgattacttaa

SEQ ID NO: 308132 - DNA, 615 bp, Proteus mirabilis
atgtcaattttacctgagcaaaggaaggctcatttattatcgcgcgtagcggaatatggaaagttaagtaagaagtctcaattcggcggttatagcttaatggttgatgaggttatctttgcgattactgctgataatgaattttatttaaaagggagtggttttgctgaaacactctataaagcaaacaacatggatgcatacgtctatctaaaaaaaggtatccccattacattacgttattatcgtattacgcaagcaatatggcataatagcgctaagctcaatcaatatatcgattttgcatatcactatagtactcaggagtttttagggcagcaaaagcagcctcgtcgtatcaaagatttacccaatttgggcatagcattagagaaaaagctgaatcaagttgggattaaccgtatcgaggaattacgtacgatcggtgcgaaggcatgttatttaaaactgattgcgcaacctaagcaaggaaatagcgacttattgcttgcattagcgggtgctattgttggctgtcatcggtctgtgttacctagtcaattaaaaatggaattgttaaattggtataaagagttatccgttaaatcctattaa

SEQ ID NO: 308133 - DNA, 1932 bp, Proteus mirabilis
atgccgttaattagtttgactggggcttatttagcgtttagtgatgcccctttattagataatacagacttgtttattgatgaaaatgaacgcgtttgtttagtcggtcgcaatggtgccggaaaatcgaccctattaagagtgttagccaaagagcagcccttagatgatgggcaagtggtgtatgaacaagatctggtgactgcacgtttacaacaagatccccccagagatatcgaaggcactatttttgattttgtcgcgcaaggcgttgcagaagatgcgcaatatattaccgaatatcatcgtgtttcaaaggtaatagaaacggacccttctgaaaaaaatcttaatcgattagctcagttacaagaagtgctcgataaccgtaatctctggttattagatagccgtattgctgaagtactggaaaaattagggttaaatggcgaagctgagctttcctcactttctggaggatggttaagaaaagccgcattagggcgcgcattagtgagcgcaccgaaagtgctctttttggatgagcccaccaaccatctagatatagaaactatcttatggttagagaaattcttaaaggatttccaaggtagcattgtctttatttcccatgaccgatcatttattcgtaatatggcaacccgcattattgatttagatcgcggaaaactatcctcatggccgggaaattacgataaatatctggaaagtaaagaagaagcattgcgtgttgaagagcaacaaaatgctgagtttgaccggaaattagcgcaagaagaagcatggatacgtcaagggatcaaagctcgccggactcgtaatgaaggtcgtgtacgggcattaaaagcattgcgagttgaacgaagtgaacgtcgcgaagtattaggcagtgctcgtatgcaggtcgaagaagcaacgcgctcaggtaaaattgtgtttgaattagaagatgttaattatagcatcggtacgcgtaggctcgttcgtgacttctctgcaaaagtgcaacgaggagataaaattgccttagttggccctaatggttgtggtaaaaccacactactcaaattgatgttaggggatttaaaagcagatagtggtcgtattcattgcggcactaaattagaagttgcttattttgatcaacaccgtgccacacttgatcctgataaaacagtgatggataaccttgcagaaggtaagcaagaggtgatggtaaatggtcgtcctcgtcatgttttaggttatttgcaagatttcttatttccaccaaaacgtgccatgacacctgttagagcactttcggggggcgaaagaaatcgtctattgcttgctcgtttgttcttaaaaccaagcaatttacttattcttgatgaaccaactaatgatcttgatgttgaaacattagaactattagaagagctggtggatgcttatcaaggcactgtgttgttggttagccatgatcgtgaatttgttgataatagtgttacggagtgttggatctttgaaggtgatggcgtaatcaatagctatgttggcggctattatgatgcgcagcagcagcgtgcacagtctgtttctcttaaaaatgaagcgaataagtcacgtaatgcaccagaaaaaactgaaaaagagactaaaccaaaacagaacgccaaaaaggctacacgaagtaacaataagttaagctatcatttgatccgcgagcttgaacaactgcccgctaaactggaacgtttagaagaggaattaggttgtttacaagaagaagtggctgcagctgatttctttacacgtcctcatgaagagacagaaaaagtgctaaaagcattagctgataaggaaaatgaacttgaaacagcttttgatagatggcaagagctggagatgatgcaaaacggtgaataa

SEQ ID NO: 308134 - DNA, 510 bp, Proteus mirabilis
gtgttgcatctcttcaaatggatgggctatattgttggcgcgttagcaaaatctaacgtcaggcgtgagaacctgaatcagttactggcgacacatgacgcgccaagcgtctttttttgtgtccatatctgcgcaccgataaaaaatacggtattataccgtccttattcaatggtggcgttgatagggcaaccgcaaggttggctggattccagtaactccagtattctcacccctgtcagcgtcaccacccctttagagcgtgagaactctggtggtgactccttaactaagttactggagatcatcatgatgatggctatccctacctctattcaaatcaaattcttatttttgagcgttaatcgaacagatagcaaggctaaaccttgtcgtcttgaaattacagcggttaatgagcaagaagcccgcgcacaatattcttccgattatgccttgtattttgcaggacaaattcccttacatgacacaagagggaatgcacaatga

SEQ ID NO: 308135 - DNA, 1362 bp, Proteus mirabilis
atgattgaaattcttatcggcgccctcgtcgctgtgggtgttgggcgttacattgttaagggatattcgccaacaggtgtgctacttactggtgggctattattgcttatcatcagtgtgattatgggcaaatcagtattaccagctagtgtcacaagtaccggttatcgcttaatcgatattgttgagtatgtaaaaaatctacttatgagccgtggtggtgatctggggatgatgatcatggtgctatgtgggtttgcttcttatatgactcatattggtgccaatgacgtggtcgtgaaacttgcctcacgcccattaaaaatgatcaactcaccttatcttttaatggtagcggcttatattgttgcatgtttaatgtcattagctgtttcatccgcaacaggtcttggtgtgttattgatggcgaccttattcccagtgatggtcaatatgggaattagtcgtggtgcggcggcagctatctgtgcttcacctgcatcaattattttagcgccaacctctggtgacgtgattttagcggcacaagcttctgaaatgccacttattgattttgcgtttaaaacaacactgcctatctctattgccgcaattcttgggatgtgtattgctcactttttctggcaacgttatcttgatcgtaaagagcatatcgaaacagagatgttagatgtgaacgaaatcaaaactcacgcccctaatttctatgcgattttacctttcacacctattattggtgtattagtttttgatggtaaatggttaccagagcttcatattgttgccattattattctttgcatgatgttatctgcggttattgaatttatccgtagctttagtgctaaagaagtttttgccggtttagaagttgcttaccgtggtatggctgatgcatttgcccaagtggtaatgctattagttgccgcaggggtttttgcgcaaggtttaacaacggttggctttattcacgcgttaattgatggtgcacaatcattaggctcaggggcgattgttatgatgattgcattagtcttaattactatgctcgcggcaatgacaacaggctcagggaatgcgcctttctatgctttcgttgaattaattccgcgcttagcaagtaatatgggtgtgaatcctgcttacttaactattccgatgttacaagcatcaaacttaggacggactttatcacctgtatcgggtgtggtagttgctgtatcaggaatggcaaaaatttcaccttttgaagtgatgaaacgcgtttctgtaccagtattggtcgggcttgtgattgtgattgttgcaacggaaatactggtacccagtacattaggttga

SEQ ID NO: 308136 - DNA, 1581 bp, Proteus mirabilis
atggaatggatcgtagatccgacgatatgggtaggtctttccacccttattgttctcgaaatcgtacttggtattgataaccttgtttttattgctattctagcagataaactcccagcaaaattaagagataaagcacgtatcacaggattattgtgtgctcttattatgcggattgtactgctatttagtctctcttggcttatcaccctaaccaaacctcttatcacactgtttgatcatcctttcagtgccagagacttaatcatgctcctcggagggatattcttacttttcaaagccacaatggagcttaatgaacggctagaaggtaaagatcataacgagggaaaacaacgtaaaaccacgagtttttggtctgttgttgcacaaattattgtactagatgctgtattctctctagactctgttatcactgcggtagggatggttgaccatctcggcgttatgattgctgctgtaactattgcgatgttcttgatgatcctcgcaagtaagccattaaccacatttgtcaataatcacccaactattgttattttatgtttaagcttcttattgatgattggttttgccttagttgcagaagggtttggctatccaatacctaaaggctatttatacgctgccattggtttctctattatgatagagatatttaaccaactcgcacagtttaaccgccgacgcttcttatcagcttctcgctctttgcgtgaacgtacagcggaagcggtattgcgcattattaatggtaaaccagaagcctctgaacttgaccctcacacttctgatttagttgctaatacagaagaggtgtttgatcctcaagagcgccaaatgattgtgcgcgttctgggtttaagccagcgaaacgtcaatagtattatgacttcacgccatgatgttgaatatgttgatctaaaagccacccaagatgatattcgccaattactagaagaagatcctcattctcgtcttgttattaccgacgaagaaaatagcgacgaacctatcggcgtggtaaatgttattcaattattaaatcaacagttacgtaatgaaccattagatttgcgtttattaattacacaacccttaatcttccctgaggggttatcactattacaggcattagaacaattccgtaatgctcatactcactttgcctttgtggttgatgagtttggctctgtcgaaggcattgttaccttaaccgatgtaatggaaaccatcgccggtaatttaccagtaagtacagaggaaaatgactctcgtcacgacttagtacaaaatgaagatggctcatggaccgtcaatggttttacaccactggaagacttggtgctttatattcctattaagttggatgaaaaacgtgagtatgaaaccttggctggcttattgatggaacacttacaacgcgttcctgccgtcggtgaaaaagtggttattgatggtattgaatttgaaccattagatgtacacaatcaccgtattaataaagtacgtattgttgaaccaacacctgaagacgaagaaaacgtcgacgaagcttaa

SEQ ID NO: 308137 - DNA, 927 bp, Proteus mirabilis
atgaaaataatatctgttatcaattataagggcggtgtaggtaaaacaactgttacagcaaatttagcggcagaattagctatgaaaggtaagaaagtattacttttagacatggatgctcaatccagtttgacattttcatttgttaaaccagactattgggattcacatttgaaagagaattttacgataaaaaattattttgattctttaactactggtatgaatcctccatcgctatcaaatttcgttatttcaccaggggttaataattttataaaggaatctggaagtgtaggcttcataaatttaatttcatctcacttggggttaattaatgtagatttggagttggcaactcagttagggggggcaaacttaaatcaagcaaagttgaattacttaaaagtacatgggagattaagagattcaattattgagtttgctacaggacattatgatgtagtactaattgattgcccacctaattttaatattgtgactaaaaatgctttaatagcatccgatcaaatattaataccagctaaacctgattatttatctacattagggatcgattatttatgtagaagtgttaatcagcttgttagtgaattcaatgagtttgcttatttggactgtaatgtaagaaagagctcacctatgattttaggtgtaatttttacaatgattcaactatactctggaagtccaattgcatctcagcaacaatatattaatcaaacgtcaaggctggggattcctatatttagtactatattcagagagaataagtcaattttttcatctgcacctgaatatggaattcctgttgttttacatgaatatgcgaaaggtacatattccgatatcgtgacggaaataaattcgtttgttaatgaatttgtgatgcgtgcaggggtttga

SEQ ID NO: 308138 - DNA, 645 bp, Proteus mirabilis
gtgactcgcattgattatgctttagacatatatgatatgcgtctctcagactaccatattggttttaagggggcatgttgtggcgaacgttactcaagtgaaggcgagtttcaagggcaacggcttggtagcaataaatcagagtatcatgcctcttgctatgagaagctggatgttggtgatgacttagactctcttagtgatgaagaattacaactgataatcactaattggcgcgaaatacaggattaccgccgcttcctacgcttagaagttcgttataaaccgagatgtaaagcgctattattacgagatattcgcaatcttcacaatttgctggaacgtattgggttctataaaaagccactgtgtaccaaagaaggggatttagattgggagttgttactgtcgggcatgatattacctgagctacgcgattatgtgaataaaaccaacccaaaggaggctaaaaagatcttaaaacgtctagataatagattgaaaaacaatcaatttgaacttttcgataaagatgaaatttggtgcgactttcatttattggttgagaagctcggtattcttggagttccagctctttggcagaagagtttgcgtgaaaaatgggctcgcaaacacggttattag

SEQ ID NO: 308139 - DNA, 1500 bp, Proteus mirabilis
atgacagcatatatcaccaaggataacattcttgttactgaagctacagttgaagcctataaagcgattgtttttagcgttccctttgataataccgtcgatcaacgtcataaatcccaatattacggtgaaattggcttgttcttacagcatattatctgtagtgcgacggttagcaaaaatacgaagaaaaaagcgaggtttaaaggaaataaaaaatggacgtactctgtgccattttccgctgaactggggaaagagaaattccctatgatttttaagcaaagtcgcgatttaggcttagaacgcggtttagagtatttagaacaagctaaaatcattaaaattatccaacatagctatggaacccataagtgccgagaatttgctttatctaaaagtgtccttaaagctttatttcccggtaaacgaaaggattatcttaaacgtacagatcgctatacctatttgacgaatatttttgataagcgtaagaaacccgaaacactgtatgaattgatgttaaaaagctcttataatgtaaagcctcctaagcataaaacatcgaaacgagccatcgaaaatgccaattttagacagcgtattatcggtgtgtatcaacaactcgaagcattaccgatcaaccttgataaactacaagaatattgtaatgaccatcctactgcaaagaataagagcttttattttaattttatctctcatttgatagatgtgggcgtcaaggtgatgagtgaaacgccgctaatcgttgagtatcgacaagcgtataaaaccgccaaagtgggtagccgttcttttgaaataggtacaggctttcaatatttacccagcaagatgaaatgggcatgtttagccaacgggtataattatgatattaaaagctgtcagttagctatcttagagcaagaattcaaggaatatggaattagcactgattcactatctgtactagaaactgactttatcaaagatacgctaggggtcgatgataacctcgttaaaactatccgctacggtactatatttaatgctggctctgttagtttgtcagcgaagggaagtatggtaaaaaagctacaaaagctctattccgacgattatgtatcagaaatactggaacattggaaattagaaacaacagagctacgcgaaagcataaatcaactcattgacgagtatctaaaaataggaaagaaaaataggcatgggctttctgtcgtgaataaggttgagcaaccatttaatacgacaaagcgaaaaacaaaaaatggggagtggaaaaagtggcgtcgtgatgtgatgcgacgtaagttactcgcccatatgattcaaggcttagagagcagggcagtttatgattatgtaaggtcgcacaacggtgtctgtgcactagaacacgatggatttgtgagcttacatgagcttgatagtgattggaaacacgagtatttgaagatagtgttgaagcatgatgattag

SEQ ID NO: 308140 - DNA, 612 bp, Proteus mirabilis; identical to SEQ ID NO: 285404

SEQ ID NO: 308141 - DNA, 1128 bp, Proteus mirabilis
atgtctatagaattttatggtgagcggcttcggcttgctcgattattaaaaggatatactttacaggagctcggtgatgctgtttgtgtcacccgtcagagtattcatcagtatgaaagtggtattagagccccagctaaagatgtacggaatgcattagctgaatttcttcaagtgtctactgagttttttagtgttccactttctggtgatgttaaaccagagcaatgtcatttcagaaaaagacaaactacacctgcaggtgttaaagagagagtgcaagcatatagtactattttagaacagttagttgcagaacttcacgaacacttagaattaccagtaaatggctttaatttgatcgacaatagtaaaatagtgtcgttgtctgcaccaatgattgaaaaaatagcggaaggagctcgtattcgttggggattaacggcagatgcacctatagataatatggtcaatgttgttgaaaatcagggagctatcattacttgttttgatggaatatctgataaggttgatgccttatcagtcaatagaagattccctattatagtccgtaatacagctaaggagagcgcatgccgaatgcgttttgacatagcacatgaatgtgggcatttaatcatgcatgatggcatagaaactggttgtaagcagactgagcgagaagcagatgcttttgctagtgcttttttattccctagagaatcttttgctagagagtttcctatgtgtttaggattagatggcacaattaactggaagaaaatttatgctttgaaagctcgctggaaagtaagcgccagagcaattatttatagggcgcattttttaggttttattaatgctcaacagtatagaagtgcaaatgtatggtttagccaaacgagacaaactaaaaaagaaaagttagatgaacaaatacccttagaggaacctaatgtattgaaagaaagtttagatattctgagagatgagttgggaatatcattcgatatgttagctagtaaattaaatattaaacctgagttattagctgaaatttctggggttagttatattcaatctgacaaaagtgagtctgattcgatagttgttccgtttaaattttaa

SEQ ID NO: 308142 - DNA, 1068 bp, Proteus mirabilis
atggcggaatcagtaaatattaatgatcctagtaatggtgattacagcgaagaacaaagcgatgatgagattctatcgagtgtagttactgttccagatatgaatcctaatcagcagattaacaaaaacgatgaaaacgttgagaaagtatacgatttaagtaaatctagcgacattcttcaattggttaaggatactgacgaaaacataaaaaaagttgttaaaaatcatataaataatattttatcaaaatctggatttatggagaagtatgcttgtgtatttttgtttgatgaagaaaattctataacgagaggtcatgctgagaggatctatgattcaattcaatctgttaataatgaaaaagatatagttctttttttgcgcagtaaaggcgggagaccagagcctgcatatttgatcagtaaactttgtaatcgatataagaaaaataactttatagtatcgattcctgcagaggcaaaatcagcagctacattgttatcatttggtgctgatgaaattcatatggggccaatgagtgagttaggtcccatagatatgcaagtagatgggttacctttgctgtcggtatctagcgcattaactaaaatagccagcatagtacaggattatccaaactcatctaggatgttttcggattatttaactaaaaacctcaatattggattgattggttactatgaccgagtaactgaatcggcaatacagtatgcattaatattattgggtaataagcattcaagtgatactactaggtcagttgaggacatagctaatagatttaccactcattataaagatcacggctttgttattgataccaaagaatcccaaaacatattaggggaatacattgttaaagatgacactgaaatttatcaagttggttttaaaattttaagcgttatcaatcagatagagtttgcttttgttttggcaggagtgaagaaaaaaattattcttgttggtgatggatgcgagattgggctttgtgatgtaaatcaggatgagatgctattgaaagatataagaatatccatctaa

SEQ ID NO: 308143 - DNA, 219 bp, Proteus mirabilis
atgaatagaatgagcgtaaacctatctcctgaaatggaaaaattaattgatgaaaccgccaaaaaagaaggtatatcaaaagctgatgttgtaagaaaagccttcgctcttttacaagtatcagagtctgaaaaaaagaaaggacgctctctcggtattatttctgatgaacataatggaaatgaaatgagggttgttggaaagataataggtctttaa

SEQ ID NO: 308144 - DNA, 303 bp, Proteus mirabilis
atgacgacgaatgaagacccaacaaaagaacaaccacctttagaaacattagatattcaaactatagggcgtgagcttggtgaattagaattcaatatagagaaggaaaggtttgttcttgctaagtggatactcttatgtttatttctatctatagtttcattgaccatatatagactatcatcagaaacagctgataaatcaataacaaaggaaatattcgacactgtattccatagcgttgtaccaataatatctctaattattggatattactttggtagtaaagataacaaggaataa

SEQ ID NO: 308145 - DNA, 264 bp, Proteus mirabilis
atgtcaagctatctgatttcttatgacttaataaagaataaggattatgaaaaaatatatgatgcaatcaaatctttcggaacatgggctcgagtaacggaatccgtatgggttattactagtgacttaagtagtaccgaaataagagataacctatcagaacacatggatagtgatgaccggctacttgtattaaaatcatctggagttgcagcatggcgaaatgtcagatgttcaaatgaatggctaaaaaaatacttataa

SEQ ID NO: 308146 - DNA, 309 bp, Proteus mirabilis
ttgaagaaaagaaataaacgtatcgaaattgctgtaactgatgacgagtatcagcagttacaagaaaggaaaactaagccacgtttggcggagtggttacgtgaactggcattaggtcagaagccaaagcgtcagccgaaaagcgttgatcctgcattgttgtttgagcttaaccggataggtgtgaacctcaaccagatagcccgtcattgtcatcaggctccggcctcgatggagacggtcaatattgccttagcgttacggcatattgaggcacagcttcgggaggtgctcgaccgtgctgattaa

SEQ ID NO: 308147 - DNA, 789 bp, Proteus mirabilis
atgtgtgcatatagacccccaagtgtaaggaactttaaactattcatcggtgaacttactgcagaagcagcagcagttcatatttcattattagagtctaaaaaatgcgaacataaaaatgagatgtattggagtgaaagggctatagatgcatgtataaagcttgatggtataaaatctgaacgagtactaaatagccaaaataggctcgctattgtatcgctttatagtggatttgatttatttctggaagaaattgaatccgaatgtaagcactttggttttcaatggaaaaaaaatgataaaacctctcccttagtaattctacagaacaattttactaaaaagatattaaatcaaacacacttccaatataaatctgattccgtcgattattttaggttattacgtaattcaattgctcacccaagtgctgaatgcgaaaataaagcaattcattattataattctaagcaggatgctctctgctacttacgagataaatataaaatgatttcagctccaagtgcaccaaataatttatcatttcacgatgttaagttttggtgccaatttcttatagattttacagaacaaattgctgagcatcttgagcccacgaagaaaatgatttttaatagcatcccttttgatacttggagaaagtatgggggaaggcacgatagaataaaaaatgctgctaaaaactatatacgttcacaatattcttataaacttgacgaatgtaatgaaatcatagatagtttctacgatgactcactcgcttaa

SEQ ID NO: 308148 - DNA, 351 bp, Proteus mirabilis
atgtctatcaaagataaattgcaaaaaaatcgagaagaaaacgaagctaacggattaaatgatccggctttatttaaacaacgtttgttcaacggggattttggattagcaaagaccttttggttattttggtttgttccagttttattctcaaatatcgttgaatgttttattactaaaaagatggtattgaatcaaatagaagcattgatgattatttggagcatttattgtttttactttattgtgaaaataccgaaccgtcgggcatggtcttacgtggcgttggtcgtgattgcgctcaatttattagtgggaatactcgcaataatcgggaattttctggggtaa

SEQ ID NO: 308149 - DNA, 477 bp, Proteus mirabilis; identical to SEQ ID NO: 296002

SEQ ID NO: 308150 - DNA, 945 bp, Proteus mirabilis
atggaattaaaggattattacgccattatgggggtaaaacccactgatgacatgaaaacaattaaaactgcttatcgccgtttagcgaaaaaatatcacccagatgtaagtaaagagccagatgctgaggagcgttttaaagaaatagcgcaagcttgggaaattcttggtgatgaacagcgcagagctgaatatgacgaactttgggctcaccgcaatgatccgaaatttaagcaatttacacagcacaacaattcacattcaaaccaacaaagttttagtcaggaagattttgacgatctttatgcttctttctttggtcaaggttcgccttttgaagggcgccattcacgtcaagcacctagacaacgtggacaagatctagaaattgaattaccggtttttcttgaagaagcacaagaagagcataagcgtaccattagctatcatttaccggtttataatgtctttggcatgatagagaaagaaattcctaagaccttgaatgtcaaaattcctgccggtgttgttgatggacaacgtattcgtttaaaaggccaaggtactgctggggagaatggcggagaaaatggtgatttatggctaactattcgtattgcacctcacccattatttgatgtaaaagggcatgatcttgaaattgtggttcctattgcaccttgggaagccgcattaggtactaaaattgctattcctacacttaaagataaaattttacttactattcctcccgctagtcaggcaggtcaacgcctgagaattaaaggaaaaggcttagtaagtaagcaaaagagtggtgatctctatgccattttgaaagttgtcatgccacctaaagtggatgaaaaaacacattcattatggcaacaactcgccgaagcccaagccgattataatccacgtaaaaactgggagaataaataa

SEQ ID NO: 308151 - DNA, 1419 bp, Proteus mirabilis
atgagtaaaataaaaacccgttttgcaccaagtcctacaggctatctacatgttggtggtgctcgtactgcactgtattcctggttatttagccgtcacaacaagggtgagtttgtacttcgtattgaagacaccgatttagaacgttctactcaacctgccattgatgcaattatggacggtatgaattggttaaatctaaactgggatgaaggtccttactatcaaaccaaacgctttgatcgttataatcaagttatcgatcaaatgttagcagctggtactgcttatcgttgttattgttctaaagaacgtttagagaaactacgtgaagatcaaatggcgaaaggtgagaaacctcgctacgatggttgttgccgtcacggtgatcacaaccataccccagatgaacctcatgtagttcgttttttaaatcctcaagaaggatctgtgatttttgatgacaaaattcgtggcccgattgagtttagtaaccaagagcttgatgacttaattatccgtcgtactgatggttcacctacctataatttctgtgtagtgattgatgactgggatatggaaattacacacgttattcgtggtgaagatcatatcaacaataccccacgtcagatcaatatattaaaagcacttggtgctccagtacctgaatatgcacacgtatccatgatcttaggtgatgatggtaaaaaattatctaaacgctataacgcagtaagtgtaatgcaatatcgtgatgacggttatttaccagaagcgttattaaactacttagtacgtttaggttggtctcatggcgaccaagagatctttagcattgatgaaatgattaaagatttcactttagaagctattagtaaatcagcaagtgcatttaatactgacaaattactttggttaaaccatcactatattaataccttacctgctgaacaagtagccgtacacctagattggcatatcaaacaacaaaatattgatactagtaatggcccatcactggttgaattgattaaattactcggcgagcgttgcaaaacattaaaagagatggcggaaagttgtcactacttttatgttgactttgatagtttcgaagaaaccgcggcgaaaaaacacttacgtcctgtcgctcgtcaaccattagaagtagttcgtgataaattatcagcaattactgattggacagcggaaaatgtacataaagcaatccaagaaaccgctgaagaattagaagttggtatgggtaaagtcggtatgcctctacgtgttgctgtcacaggtgcgggtcaatctcctgcactagatgttactgttcatgctattggtaaatctcgtagcatcgctcgtattaataaagcattagattttattactgacagagaaaatcaagcttaa

SEQ ID NO: 308152 - DNA, 237 bp, Proteus mirabilis
atgaaaaacatcaacctaaatttagcttatgttttaacaaaactaagacataaagcttcaatatcccaagaagaactagctgaaaaagctggagtgcatcgtacatatgttagtcaaatagaaagggctcaaaaatgcccgacactacaaattcttaacaaaatagctagcgcattaaatataccaatgtcagaaataataaaagaaatggaagaatatgagttacataaaaaatga

SEQ ID NO: 308153 - DNA, 675 bp, Proteus mirabilis
atgagttacataaaaaatgaaagatttaatataaatgttggatttaacgttaacattacccatgttaaccaagccgtcatgcaaacaaataaaatattaaaaaacttaccatcaactttattccaaagcattgactacaaaacaactagtgcaatgattggttcaatatattgtgataatcttgcattaattacaggctccattgtaaatcctatagaaaaaggccacccagatatattaccaattacagctaaaagcgctaaagaagaagaccttagaaattaccatgaaggattagaaataaagtgtactgttggaaatatagaatcaggtgctaatttaagggctggtcaaaatagaataaataaattaacaagtattacttggcaagcccaccaccaagaagtatcagagcttatggggctggtttgggatttttttaatatagatgaaaatgatggctttaatttccctatcattacatcagttttctatacagatgatttaacgaatgatgattggggagctataagtggaacaacaggaaggaatacaaaagtatctggaatgaaagcatcaggtaaaaataaaatgggaagaggatgggttaccattttagataaccctgaatatataaaaaagtacaccagaatattaaactttagagttaactaa

SEQ ID NO: 308154 - DNA, 1251 bp, Proteus mirabilis
atggtatatgtaagtctattttcaggggctggattcggagatatggggtttagggaagcaggaatagctcctgacattttgtgtgaaatcgacccaaaaagaacggcatttacatcacgtaatttccccaattcgcaggtattaacatgtgatgtaacacaaaacattgacttaatagttaaccatataaaaaataaggttataacaacaggtgatgagttttttttattatatgcaactccaccatgtcaaggtatgtcaaaaaatggaataggaacaattttgaaagctatggctgaaaataaaaggtcagtcatagatgaaagaaatcgcctttatttgccagtgattgaagttgtaaagaaaacaaaaccaaaatggattttttttgaaaatgtttgtcgtttgtttaattttaatgatgttgataaaaacggtaatgttttaccaattacctctatcatagaaaatgaatttagagaaataggatattcaggtaggtttgagttggttcagctagctgattatgggttaccacagacaagatcaagaagcgtagggttgtttaggttcgatgaaaacttcctatttgaaagggaacaatcatttattcctaataaaataattgaatgtccagagaatagagttaagctaagagatgttatcataaataacgaaccgttgtgtgctacagataaaaataaaagagtttcaaaaataaatccgttacatagagttccaaagtggcgtagtgaattagacttttggatgagaaacactccagaagggtgttctgcttttgataacaataattgtatttcatgcgattttgttaatgacaaggctgatattttttgtaaaaaatgtggcgaattgttacccaagcctgttattgaaaaaaatggggaattacatttaataaaaggttttgtttcgtcttataaaagaatgtattgggataagcctgcttctacagtgacaactagatctgcgtatgcatgctctgaccataaagttcatccatgtgaaaatagagtattatctacttatgaggtggctgtacttcaaggtattaatgttaatgatgtggtttggaccgatacaagtggtaagttgtatccagatacattattgagagaactaataggagagtgtgtccctcctatgtttacaaaaataattggtgagcatataaaaaaaatagaaagaagtatattaattgattttaatttagttaactctaaagtttaa

SEQ ID NO: 308155 - DNA, 780 bp, Proteus mirabilis
atgaattttcaagcctctgatcctgataagatgtgtcatattggtaaagtgggtagccagaaaaaagcctttttattaggggattcccatgctaatcatttttggggatttatggatattttaggtaaagatgctgagcttgatgtctatgcgcaagcaacttcatcatgcattactattcctaatatttatctttatgattggtctaatcataagaatacggtttatcaacgttgttatgatcaaacagcaaaatattaccagattattaaacataatcggtttgattatgtgatttttggacaggtttggaataattacgcctcaaatcatgttattaataaaataggtgataaaagaacggttgaggcatctcgtcaacgtgtggaaaaatcgatgcgtgaagcgcttgatatcattgttgctactggagccaaacctgtttttataaaaaccgtttattcaatgcctagtggttttatgacctgtttttatgaaaatgccaagttaagaaaagattttgctgataacaactgtaatcccaaaaactataaaggtgaggggaatacatggatgaaccaattatttgctaaattaaaacaggactatccaagcttaattattatcgatcctaaagatgtacaatgcgataaagatacctgcttaacagatattgaaggagtgccggtttatcgtgatgtaggacatattactgattatgcatcaacgatttttggcatgatgtatcttaataagatgggtaatccatttaaggaataa

SEQ ID NO: 308156 - DNA, 198 bp, Proteus mirabilis
atgcaacacgaacactttttaacaatgaaacaagttttagaaatcactaaggtctcacgcgcgacaatttaccgctggatccgtgcaggggggttccctgcgcaatattctttgactgcatcagggcgtactgctcgttggaaagcgagtgaagtacagaagtggatcgacgagtgtgtgtcaaaaggggggcaataa

SEQ ID NO: 308157 - DNA, 570 bp, Proteus mirabilis
atggcaaaaccaagaaaaggcaaaaaaaaagatgatcgcttaagagcggaaacaagtagagaaaaaaggaaagaggaattaggtgccccattcaccattaacatgcatgatgaaaataaaacaagattaagagaaatctgtgtttattttggacatgatggaatgatggaaagagaaaaagccacaggacgaattttcagtcaaacaattatgaatgttgtcgacttctattatattacctcaatattaaaaccaaaaaatagaagtatttcgctattaataaattcgtttgaagctatttggaaggaagcaaggtcaaaaaaaaacttagtattctccagaaatgattttgaatctctgaaagagaaagaaacagtcaaaaaagaactagaatcaatagcaactgaaatgatggaaaacgaatatccatcaccaccctatttatttaataatcgtattaataaaaaaaatagattaacatggactacaaatgatgttttagatttattaaatattaaatttgtaatcaataaaataaaagagatggaaaagtttaaaaataaaaggtaa

SEQ ID NO: 308158 - DNA, 600 bp, Proteus mirabilis
gtgagcaaggcggatgccgcacagaaaaccgctaacgatgcagtaagcaaagctaacacagcacaaactgccgcaaataatgccaacactaatgctaatgggcgagtgcctaacacgcgtaaagtgaatggcaaaccattaagtgctgatattagtttaactgcgggtgatgtgggtgctgcaacaccggcacaagtgaatgaggccaagactgccgcaaacaatgctaacaataatgctaatggacgggtgcctaacacgcgtaaagtaaatggtaagccactaagtgctgatattcgtttaacggcgggtgatgttggggcgggggctaaaaatactgcaagtaaagctgaaaatggttggtggaaatgtggtgatacaggaattatttatcaatgggggaaaaagacaattacctataatgattattttattaatttcccgattgcgtttcctaataaattgttatcatttcatgccattgattatgatggagcaaataatccagggcttaaattaagcaaatcaaatttatctaaagcagcaatggaaatgccatcagggataattgctgttatgtggcttgcagtggggtattaa

SEQ ID NO: 308159 - DNA, 450 bp, Proteus mirabilis
ttgctgttatgtggcttgcagtggggtattaatatgtatttttttagtgaaaagacaaactcattttattatgaagatatgaaggatgcttatattgcagcgggtacactgcctgatgatattgttttagttagtgatgatatttttgaaaaatacacacaatcaccacctcaaggtaaggttaggggtataaagaaaggcatgccagcgtggattgattctccaccgttaactcaatatgaattattcaatattgcagaacaacaaaaaattaagttaattagtgaggcatctattatcattgagccaatggtggatgctaaaaatggtggttatatcgaaaaagaagatataaaaagattggatctgtggcagcgttatcgatatgcgttaacaaaagtcgacatatcattaacccctaatatcgaatggccacaaaaaccagaataa

SEQ ID NO: 308160 - DNA, 675 bp, Proteus mirabilis
gtggttgatcctggtcttgatacggtgaaaattgaacatatcgaccagactaatgagtcagacggcagttttttaacccgcctagggcaattaaacggtgccaccgcttgtgttaaaaacggcaatttgttgtttatggtacaagggggcaataccaccgccagtggtcaagcattaccgctagtacaaatcacccgaagtgcgggagatggacaccgtttctcattagtggatagaggggcttacaccggtgtgacggccaattatttaaatacccgtaaaccgcaagaaaaaacacaatcacaaattcgccgtagaaaacccactaccaataaaccgaaaaaagaagagcagaaacaaggggagtaccttatcggtgaagaaggtaatgtgatggtgttgtctcatacttatgcgagtaaaaccaatgctgaacgtgccgcgaaagccgcgtgggaaaaaatacagcgaggtgttgcctcttttagtattacccttgcaaaagggcgtgcagatctctttcctgaattacctgtaaaggttagcggatttaagcctgagattgatgaggcctattggacgttggtcacggtgagtcattcattgaacaatagcggatttaccacctcgttagaattagaagttaaaagcagtgatgtaaaaagttataaataa

SEQ ID NO: 308161 - DNA, 927 bp, Proteus mirabilis
atggaatactttagcgatatagaaaaaggattaccgcttagaaacattaatgatatagatcataatgtatgggctggtatagcttcatatatagatatgttagctaaaaaaggatactttggccgagattttccagaacaatgtcttgataatcaaggatgcattggtactgataatgatgcttttaaaaaagcactacaagcggaaattccagatcttgattggccattggttacggaaaaatcagatgacaaatcacctacctgttttttgaatcaaaccaaaacaccgtatataccaaactttttagatataatggatctaattcaattttgttttaaacatattgcgaaaccaataaatggaaaattccacgaattctatgggcattatcatataaataattttgatgagcaaagtggtagagatgaatttgtggataaaataaatactatattttatagaaatgggctagcgtatgaattaaaatcatctggagagataaaaaaaattcttagtcttgctcttgagcaaatggcatcaacttttaaagttcctaaagaaatagaattaaataatttatttataagtgctaatgagaaaatctatagtccaaatgttatgattaggtatgaagctcttaaagatctctgggatttttgggaacgaatgaaaagtgcccataacccagcgcaaaataagaagaaagaatccgttactacattattagataattcatctaaagaaatagaatttcgtagtttattagaaagtgaagctatatatttgactgaaattggtaataaatattttattagacattcagaaatgtcacaaattaagatacaagatagtgaccatatagaatatttatatcaaagaatgtttagtatgcttcatttattatctaaaaacttccctttttga

SEQ ID NO: 308162 - DNA, 348 bp, Proteus mirabilis
atgcaaaactcaaaaggccccggcaatttccgcaacctgtttatccacgcgccgaacggcaagaaagacggagtgcaagttattccattaagtgagattgcggcaaaagatgaatttctcaatatcaagaatgtcagccgtgacgatatgttagcagcacaccgcgtaccgcctcaaatgatggggatcattccacagaataccggtggctttggtgatgttgaaaaagcagcaaaggttttctttcgtaatgagttggcaccactgcaaagcaagatattacaaattaatgattggctaggtgaagaagtaattaagtttgataagtacacattagatgatgagtaa

SEQ ID NO: 308163 - DNA, 780 bp, Proteus mirabilis
atgctagatattatttatcaagatgaatatcttgtggcggtgaataaaccggcgggatggcttgttcaccgcagttggcttgataggcatgaaaccgtgtttgtgatgcagacattaagagatcaaattggtcagcatgtttttcctgttcatcgtttagatagacccacatccggagtgctattaatggcgctctcttccgaggttgcaagaacactttcagtctgttttgaacaacatcaaatggagaaagtgtatcatgcggttgtgcgtggctatgttgaagagccaatgataattgatagcccacttgttgaagagcatgacaaaatcgctgacaaatttgcctctcacccccctaaaattcaacactgtattacgcattgtgtgccacttgcaaaagtggaaaaagaagtggcgatagggcgctatccaacatcacgttttagcttattggaattacgtcctgaaacggggcgtaaacatcaattgcgccgtcatatgtctcatattcgtcaccctattattggggatacagcccatggcgatttacgacaaaatcgtggggtcgtaaatcattttcaatcacatcgtttgatgttacacgcaagtcagctaaacttaattcatccgatcactcaacagccacttaacttaacagcgaagtgggatctgccatggcaacatctgattaatcagtttggctggcgtggtctaaagcccgaattagagcaattcggtgaggatttagctcaccattttgtactttctgatatttga

SEQ ID NO: 308164 - DNA, 189 bp, Proteus mirabilis
atgacgaagcagaaaaaagctgtcgtaaacatggcaaagtttttacaggctcaaagtctgctcttactggaaaagctaaatgagctggattcagataaactcgatacagaaactatcctttgcgaagaactccatgaacaagcggagtcactacacagacaactaagcgcaaagctaggcgaagaatag

SEQ ID NO: 308165 - DNA, 312 bp, Proteus mirabilis
atgacgaccaaacgcacagaaaccgtgattattcgcctgacccctgacgagaaacaatcgttacttctgcggaaaaccaaaccccgtttagcggagtggttacgtgaactggcgttaggtcagaagccaaggcgtcagccgaaaagcgttgacccagcattactgtttgagcttaaccggataggtgtgaaccttaatcagatagcccgtcattgccatcaggctccggtttcgatggagacggtcaatattgctttagcgttacggcatattgaggcacagcttcgggaggtgcttgaccgtgctgattaa

SEQ ID NO: 308166 - DNA, 312 bp, Proteus mirabilis; identical to SEQ ID NO: 308165

SEQ ID NO: 308167 - DNA, 336 bp, Proteus mirabilis; identical to SEQ ID NO: 305878

SEQ ID NO: 308168 - DNA, 312 bp, Proteus mirabilis; identical to SEQ ID NO: 308165

SEQ ID NO: 308169 - DNA, 750 bp, Proteus mirabilis
ttgtcattatggataattgatatttctaaaagtaaagccgatagtttgggggtgaattggcaggggagttatggctcgggtaaaaatacatttttctttaataccgctagcttaagtgctgtatctggttttagttttttaagtaaaatcaaagcactcagtgaggaaggggaagctaaaatggtttctcgtcctattttgttaactcaagaaaatacccccgccatatttgataataacaccaccttttatacacaaattaaaggtgagcgagttgcttcattagaatctacaacattcggcactatgatcagtgtgttgcctcgtattagtaatactaaccaagagattgagatgattatcaatcttgaagatggcgccgagaaaaaaagtgatgatgaagatagagaagaagggattgaaaaattacctgttattaatcgcacaaatatcagcaccgtggcccgagtttctgaaggcggtagtttattaattggtggatatacacgagaagataacataaaagcagaaaacaaaattccttttttaagtgctatacctttagttggccgagcatttagctatcagtcagataataataaaaaaatggtgcgtatttttatgttacaaccgcgtttattagataaaactgatacgcacggattggactctttaactgaacacccatttttaccgatggataaaaaaacatctcaagcgctaaaacaaattcaggcatttatgaggtga

SEQ ID NO: 308170 - DNA, 327 bp, Proteus mirabilis
atgatgcttgataagccagagcaagttatcgttgctttagtttgttttatgaaaattaacaatgaaccattattagaaaaactaaaaagaaggaatacaactccagaagaagtacttaccatgctgaatataccattggatcagaatttatttgatacatcaattcactatttgtatatggtactacgctatgaattgcttactggtatagagtttaaaaaacttaaagatgaaaattatttcagagatatagaaggttataacggtagtaaagtaaaatatttagaaacgataaccgattactttgaaaacatgtcgattgattaa

SEQ ID NO: 308171 - DNA, 852 bp, Proteus mirabilis
gtggcatttttacctttaatttcgattccagaattagaaacttgggtagaaacatggtcgttctctgaaaccatccattcacgctcttatacccatattattcgtaatatcgtcaacgatccgtcggtcgtttttgatgatattgttgaaaatgaagagattttaaaacgtgctcgtgatatctcatcttattatgatgagttaatcaatttaactaacctttaccatatgtttggtgaaggtacgcatcaaataaaaggtaaaactgttgaagttactttacgtaagctcaaaaaacagctttacctatgcttaatgagtgttaatgctttagaagcgattcgtttctatgtcagctttgcctgttcatttgcctttgcagagcgcgaactgatggaaggtaacgctaaaatcattaaattgattgcccgtgatgaagcattacacttaactggcacacagcatatgctcaatttactgcgttcaggtcaagatgatcctgaaatggccgaaattgctgcagaatgcgaacaagaatgttatgacctatttgttgaagcagcagagcaagaaaaagagtgggcagaatacctattctcagaaggctctatgatcggtttaaataaagagatcctttgccaatatgttgaatatattactaatattcgtatgcaggcagtaggacttaaattgccgtttaaagcacgttcaaaccctattccatggattaatgcttggttagtatctgataatgtgcaagttgcaccacaagaagttgaagtaagctcatatctagtaggtcaaatcgactcacaagtagatactgatgatttaagtaacttcgaactgtaa

SEQ ID NO: 308172 - DNA, 321 bp, Proteus mirabilis
gtgattaccttatcgggggcgctttatccctcattaacgggtggtaaagtttcattgttagcgttggagttaatggcagatagcggtaaagcatggtcatttattgatggtacgggcaccattcatggcatgtttgtgatcaccgatttacaacgcacccataccgaatttttccaagatggtgctgccagaaaaattgatttctcgctgacattaaaacgggtggatgactccattagtcagatattgggagatttaagcgaccaattaggcatgatggccaatggtgccggtgaagcgatgaaaggagttttatcataa

SEQ ID NO: 308173 - DNA, 438 bp, Proteus mirabilis
gtgagtcctaaattatcagactcaacatggaaaaaattacgactacatggggattgtcatcccggcaatatattgtggcgtgatgaagtcgttatggttgattttgatgattctcgtatgggaagtgcaattcaagatttttggatgttattaagtggctcaaagcaagatcagcttatacagctagatacattgcttgagtcttataatgaatatcaagattttgatgtgagagaactatcattaattgaacctctacgtgcgatgagaatggtgcattatatcgcatgggtattaaagcgctggaaggatcctgcttttccaagaacctttgtttggtttcaagagcaagacttttggtttaaacaactcgctttatttaaagggcaagtggagcaattaaatgagccacctttacaacttagcccaatgtattaa

SEQ ID NO: 308174 - DNA, 924 bp, Proteus mirabilis
atgttactacaaaccattttagcagcgctgggccctattatcttagggcttttagttggctggctttccggtaaatatggatttattaaaagagagtattcacaagcctttgctgattttgtcgttaaaattgctctgcctttttcactctttttagcggcaacccaagcttctccgtcggttttctttaatatcgactatctattagctctcgcggtaggattaattgtttcttatcttattggttttttaggcggcaagttcttttttaaacatgataaaaagaactcagcaatgcaggcattatcggtttcatttcctgatatggcttattgtggaccaccagtattactggcaacagtcggctcatctggtttgattgctatggtggtgggaaatttgatctacacggtaattattttaccttttactatcatgatcattagtggtgccaaacaaggaaaaagcattttacagtcattgcttaatgctatctctcagccattagttttcctgcctattttgggggctatgctagctatttttggcgttaagctaccagagattttacaaaactcagtgaatgaaatagggaaaacatctggtggtgtagcattatttttcttaggactattaatttcagggctcaaactcaaagttaatactgaaattgtttttaatgtgataataaagaatgttgtacaaggggcattaattttaggaacgggatttgcacttggattagaaactgaattattaaaagccgtctttctaattggtgtattgcctactgcaacagcggtgcctgctttagctattacaaataaggcctatgctgatatggcaacgggcactgtattattaagtacgctatgttcattactttctattattggtggtatcactattgtagaaatgatgtaa

SEQ ID NO: 308175 - DNA, 222 bp, Proteus mirabilis
atgtctaaagaaatggatttagcctgtgaacaatcacagttattgcaagatattcaaataaaagcagtaacagggcgttgcgtcggtgtatccgcgtttgaatgtgaagattgcggtcgtgaaatccacgaaaagcgccgtattgcggtaatgggatgcacccgctgtgctgattgccagacagtgcatgagctgaaatctagacattatcggagtgtgtga

SEQ ID NO: 308176 - DNA, 555 bp, Proteus mirabilis
ttggatcaagcatcattattaagtgttgtagaaaaaaatgataatgaaagtagggttattattcatgaggaagttgcaagccaacatatagaaatgttgctacctaactcatattcacgcttagatgatacctataaaaatttgctagtttcctcttactgtgtgaaactagcatccccggagttacccgaatactcaattttagtctatgctgacttaagagttttagaaggggtaattagggagttaatgatgcttcatgacctttacacgtctagtagtgaagaacgtttagatattggagactattttaactgtagtggtgctactagcaaacttaaaagttgctaccatgataatttctctactgaacaaaaaattaactgccttgaagaagcttatcatttttaccgtaaaaacagacatggcttgtttcatatgggagagataggtgcagaagcaagaactactgatactctcaacgaagttatgaagttaagccatgaaattattaaacttattgatagtttatatgagaactgtgatagattatga

SEQ ID NO: 308177 - DNA, 345 bp, Proteus mirabilis
atgacatttgaaattaagcaaaatgccaacatgttagtggtttgtagtacaagctacgagaaccctcttcatgagcttacaaccatagctcaggaattggttttgcttaatttttgtggtgatgttatttttgatttgttatgcgtcaatggtataagtagaaaccgctttatttctattaaatttgatccgctaaaaggctttgatcgaaaatcaaaaaaagcatttaagtctcattctttggaaaatgagcaaaaccacttctactctacaaaacgaaattatttatataattctgttttagctaaagaaactgtagatgcattcttacatgcatctacataa

SEQ ID NO: 308178 - DNA, 285 bp, Proteus mirabilis
atggtgttatctcacacttacgcgagtaaaaccaatgccgaacgcgctgctaaagccgcatgggaaaaaatacagcggggcgttgcttcatttagtattacccttgcaaaagggcgtgcggatctctttcctgaattgccggtacaagtgagcggttttaaacctgagattgatgaggcctattggacgttggtcacggtgagtcattcattgaacaatagcggatttactacctcgttagaattagaagttaaaagcagtgagatagatatggataaggaatag

SEQ ID NO: 308179 - DNA, 219 bp, Proteus mirabilis
atgatgatttgtcctgtttgtggtcatgccgcccatacccgtagtagtcaacaaatatcttccgataccaaagaacgttataaccagtgccagaatatcaattgtggcgcgacgttcgtcagccatgaaaccgtaacgcggtttatttcaaagcctcacttgattgaacgagtagagccacatgttgataagtgttgccaacaggcattagcgatttga

SEQ ID NO: 308180 - DNA, 423 bp, Proteus mirabilis
atgctattaaaaaaaatatttttagtgtcttttttattccctactctctcttacgctaataccttaccaacatcaaatatagataattcactaactcccaaccatgataatcttgcccgtttttcactcggtgacaatagtcaagcatccggcagcggtgccactgctataggtatcaatagccaagccaccaatactcgttcggttgctattggttatggtgcattagccaatgaggaaaatacggtttcatttggtaatagtgaagagaaacaaacagcacgactcaccaatgtcagtgaaggtaaaaataatactgatgcagtcaatctggcacaaacaaaagcactacttagtaaaaataaaaggttaactgatagccaaaaaaagtctatgcaggtattgcttcctcaattgccatga

SEQ ID NO: 308181 - DNA, 192 bp, Proteus mirabilis
atgaccaatattccttatcttactcatcatacttttagtggtggcatcggtattagtaattatcgtactggcatagcacttgctggaggtatccaatatcagccaaataacgatatagcatttcgatttaactcatcaattaatagtgaacaagagcttatttttggtggcggattagcttatggctggtga

SEQ ID NO: 308182 - DNA, 312 bp, Proteus mirabilis
atgacgaccaaacgcacagaaaccgtgattattcgcctgacccctgacgagaaacaatcgttacttctgcggaaaaccaaaccccgtttagcggagtggttacgtgaactggcgttaggtcagaagccaaggcgtcagccgaaaagcgttgacccagcattactgtttgagcttaaccggataggtgtgaaccttaatcagatagcccgtcattgccatcaggctccggtttcgatggagacggtcaatattgctttagcgttacggcatattgaggcacagcttcgggaggtgctcgaccgtgctgattaa

SEQ ID NO: 308183 - DNA, 171 bp, Proteus mirabilis
atgaaattacattttatctatcgctataatgcattaacttatcaaggaaaatggctaagtggcaacgttgtcgctcaatctaaacatgaagttattgatcaacttattcaacaacaaaaattaccagtaaaaattcgcctatataccgcattcaacttcttgaacagttag

SEQ ID NO: 308184 - DNA, 312 bp, Proteus mirabilis
atgacgaccaaacgcacagaaaccgtgattattcgcctgacccctgacgagaaacaatcgttacttctgcggaaaaccaaaccccgtttagcggagtggttacgtgaactggcgttaggtcagaagccaaggcgtcagccgaaaagcgttgacccagcattactgtttgagcttaaccggataggtgtgaaccttaatcagatagcccgtcattgtcatcaggctccggcctcgatggagacggtcaatattgccttagcgttacggcatattgaggcacagcttcgggaggtgctcgaccgtgctgattaa

SEQ ID NO: 308185 - DNA, 339 bp, Proteus mirabilis
atggaggatttcacaactcttgcatatggtgtaaaagtttttactgactcagatgactattctggtaatagtctaaccaatcctacaattccggatatttacaaaccagggaaaatatctaaacctatattgataaaaaaacattctattgttggtgccaattctttaatatttccaggagtgacactagaagaaggtaccgctataggcgctaactccatggtaataagctcaacagaaccttggaccatatatgttggttcacctgctaagaaactaaaaaatagagaaaaacatattttattattagaaaaggaatataaaaagagctttaaatga

SEQ ID NO: 308186 - DNA, 195 bp, Proteus mirabilis
atgaccgagacagaacaactcttagagaacgccttgaacaccttgttacaacaggaaaagaccgttatcagcaatttatctcagcgtgtcagggaactcgagacacagaacagtcagttagccatgcaatacagggaaatcagtcaacagttagcgactttaaccggactgctgaacaggtatcagaacggctga

SEQ ID NO: 308187 - DNA, 273 bp, Proteus mirabilis
atgaataaaacagcagaagttagggctgatttattaagtaagttaaataaaaatagtgatgatattttgattggtgagtttcttgattatttaagaaatgaaaataatcgtatatatcagatgatttattaccttgctgagatagaaaaagaaaagaacggaatagattatttattattaaagaggaaagataaaataaaaatcattaatgcacttcatcaaataaaagtattaagcgcattaatcccgaataaattagcaatgcctatttaa

SEQ ID NO: 308188 - DNA, 195 bp, Proteus mirabilis; identical to SEQ ID NO: 307555

SEQ ID NO: 308189 - DNA, 195 bp, Proteus mirabilis; identical to SEQ ID NO: 307555

SEQ ID NO: 308190 - DNA, 156 bp, Proteus mirabilis
atgattatttatgtagcattatatagtgatatttcaattattttacgcaaagtgacttatgctagagagatactaaatatgggagctatttacagtttattaataagcttttattatcctttattcaagtcttattgtacgcattggctaaggtag

SEQ ID NO: 308191 - DNA, 447 bp, Proteus mirabilis
atgaaaagaataattaatgtttttatcattatcattatctcattgttcgcttcatctgtgatgagcgtaagaccagatccgtctttaatatctacattgtatacagtgtctggaatcatgttttcaattgggttgggtttaattgttacttttaatatgaatggggttaaaaataagtcttatataattgaaataagaaaaaacttaaactctgtacgtaactcttttttgttttacttctcattatcaacgatagctacaattatcaccctttacacgccaaaggacgacatagaattatttaacgcattctcatttggcattgtacttaactaccacatgactatgtgtttatttgttgcattctctatattgttttttataatcaacttcttagatgtgcaaaagctaaatcaagatttatttgatgagctaaacaaagaataa

SEQ ID NO: 308192 - DNA, 1017 bp, Proteus mirabilis
atgacaagtaaaaaaactgagactgttgaaaaagatacacaagtaaaaatgaaagatataaaactcaaagcatttaaagttgagaataattcagtatcgaagtcatcatctaatcttttctcatgtgttgtgggagccttggatggtagtgaaagcgtcgaagatagatgtatgagagtaagcgctgacgatccagaaaaggagcaatatctcatttcaaactacctgtcacatgcaggtgaatttatctgttgcactttcatgaaaattgcaccaggtgatcaggctgaacatgtcactaaagaactatttgcaaagaaaaaattcactctagaagagcttggttcagagaccatagaaacagcagcaatatgtaaggagtatcattatttagtcgcaagtgacaattttttagttacgaaccaaccaataaatagaacaataattagtctgcaaacctatttgcgatggttaacgaaaaatgatgccatatcgttaaccccagtaattgatatgactaataaaacaaagattgaagatataagatctattataatgagggacccatcagtaggggcttcggaagatgcgcctgaaaattcagtatccgataataaaaatgcaataactagatcgtttgagaaagctgtgcgattatcaaaactctcagttgatgtaattagagggttaataaaggaagctgataaattcagtgacatgcagttaaatcaattgatttcagcagaactagtattaaaattgaagaaaaagcccaaagaaatgactgataaagattatgagtccataattggtgctacactgaagccagttagtgaacttgataacatttcttttaagagaagaaatggtccaacagaaataaaagggaaagacctaattagaataaaagaggttaaagtagaaaaaaccaactcaggaaagttgtccgagccacaattattccaagaaatgaggcgtttcatatcagaactcgaaaaaaatgaaaagaataattaa

SEQ ID NO: 308193 - DNA, 267 bp, Proteus mirabilis
atgaatttagagcagttagatactgatgattttattgaaagacttgaagtgttgcgttctattttaaaagttgaaggtaatcattttgttttccagttaagtgacaatgaagttgatcaatatgagatttctatctcctcatgtaacaccgcagagaagttgctttcatgggtatttcatttgactgaaaagcagtggatgaacactgagctactacgttatttcattcgtgtagcaagcgttaaatcgaatatcaaaattaactaa

SEQ ID NO: 308194 - DNA, 240 bp, Proteus mirabilis
atgcagggaactaattgggttaataggaaagagaaagcacctgatatagatggtaaatattttacattcggctctcatggtcggactactgcatggtggaaaggcaatatccaaaagtttcaaaatgctgaatctggcgaaaatgaaggaatgcaagatatggatggtgaagtttacatggtcacgcattggatgaatttaccagaaaagccagagctaccaatgccagagggtgaatga

SEQ ID NO: 308195 - DNA, 660 bp, Proteus mirabilis
atgctgattatttcagagaaattcagaaattcactgctacccatgcatggatatatgaaagggggcggtgatggtggtgctggtgctcaagctgatgcgactcgtgaagctacagcgttacagcgtgaaatatggcagacaaccatgaataacttggctccttttacacctatggcgcaacagtacattggacaaatgcaaaatctgtcaacattagaggggcaaggtaacgcactaaaccaatactacaattctcaacagtttaatgatttagcaaaccaagccagataccagcagttagcaggtgcggaagctatgggtggacttggttccactgcgacaagtaatcagcttgcttctatcgcgccaatgttaggacaaagctggctttctgaccaaatgaacaactatcagaatctggcgaatataggtctaggcgcattacaaggtcaggccaacgcaggccaatcctacgcgaacaacacaggccagctactacagcagcaagcggctctctcggcggccaatgctaacagaccatcaaagcttggaggtgcactccaaggagcggcagcgggtgcggcggcaggtacggcaattatgccgggatgggggacagctatcggggcgggcgttggtgcccttggttcactattttaa

SEQ ID NO: 308196 - DNA, 300 bp, Proteus mirabilis
atgaatatcgatgaattaattattcttcctaatttaagcaaattaccagaaagcgaattaggtaaattaagagcaaacctagacttgtctattgattcactcattacaggaatgaatatattcggtgaatttatgttttgggctgataataatgaaaattactccgatggtaaggaacatcttggggatgtgggattatttttaagccagctatcgtcatttatatcaatattaaatgacaaacttggtggagttgaatacgaaatatcaaatcgaaaaataaaaggaacacgggaatga

SEQ ID NO: 308197 - DNA, 318 bp, Proteus mirabilis
atgattacgactgatcctgtcttaattaaacttatttcagacaacatggctgctcctggtgatgtgacagatgctgtatggaaagccggttatcgtaaaacagattttaccactgagcagatcattgacattacggtgagtatgacgggtgactctatccttttaaagctacctcatgacaccttgcctaagactttagatgacattagcaaatatcagttaaacgatatcatttttgatgcccattgggataacccaccagcgactatcgcacagtgcattatggagaacgggtatagggaaggaaataaaaaatga

SEQ ID NO: 308198 - DNA, 789 bp, Proteus mirabilis
atggatgagaaatataatagatttgtagatgaaacaatgttttcaagacaattattgggaattggtctcactagtttaagaaaagctagctttgctaatcgaggattgtattttcaagctttatctagcattagtttaggtttggaaagattaatgaagctttgcttacttcttgatgactataataaaaatgggaaatatacatcgagaaaagagatgaaagattatggtcataatttacagaaattatttaagcaaataacagagtgctctaaaaaaacaaataatcttagtgatatccatattcgagtacttgagttactaacagaattcgcccaatcatctagatatagtaatgtcgattttattactaatgatcacgataatgatcctatgaaaacttggcataatagtatagataaatatatatatgaaaagattttaaatgatagacaaagaaatcgcatagaagaaaaatgtgaattatctagaaacattggtgatggactacctgcttttactataggttattacgatgaaaatagaaaaccgatagatagtgttggcgagttatattctttagaaaaaagaagtgaaatacttgcaggatataggactcttttagtaattaatattatagaatgtatatataagatacttcattcgatgtctcgtgaatcaactgatccttattttcgttgccttgagctaaatcgtatttttgcaaccataacttatggttcagatagcgaaaaaattaaacgaaaagatttcaatagaatgtcttaa

SEQ ID NO: 308199 - DNA, 1407 bp, Proteus mirabilis
atgaaagcaatattaaaacgccaatttttacagcttcatcgccaaacaggcactttatttggcatcctattatttattattttatttacaggtacatggtcattagtacatgaaaatttaaatttgtgggttaaatttaagccgttaaataaagaattattgtcactagatcagctattaataaagggtgaataccttttaggtgaaaatggttttaatcgtgtgaaattagcttctgttgatcatcctattatttatttttgccaaggaatggagagatgttcactgcatttagatgcacaaacgggtgaagaaattaaactcactgaagttatttcacctattgttaatttacataaaaatctatttatgggtttttctggacgattatttattagcttatttggttttgcttttgcgctattgctaataacgggtattgttatttatcaccgtaaaatccatcaactattttggctccgttttaatcaagggcgtaggctgtttttctttgatttacataatttcattgggttattgagttatccgtggcttgttgtatttgctttaacaggggcattatcaggattaggggcattcggtacattaatgctcgcaaaatatgtcgagccagaagcaccagcgcaagtgatgatgaacttaatgggacaatcgacacctatttcagctgagttttttgcatcttctcctcgctcattgttaattaaactgtcacaagaaaaaccagaatttattcctgagactatttattggaaaaatagaggtaatgctgaacagcaaattacggtgagtggtattcatttatatttacccagtactgcaaattttgaacagttctcctttttggatttagataatcatcggattacagaaaaaagttctgtgtctcagcagttttggacgcgtgcatttattgccgttcaacctctgcattatgggcaatatttatgggcaggttcatcgagctttgttttattggcgcttcattgcttaatgggaatgatggcctgtgtattaacctttagtggattaatgatttgggtattaaaaagacccattaatatcagttcccgtttagtgctaggaagttgcattggcttaatttttgccagcacatgtttaattcctattgctattttctccgcgttatcaccgatactacctttttttagtatctggttaataacgcttcttttttattctttttattcgcaagtgatccaacttactttccttattttaaccataagcagtgcgattttattaatgagtgtttttagccacttatttattactcatgcttctttatggtggataagttgtgcgttgctgataagtgccattttttattttttgataggtcttttcctactgaaaagagcgtaa

SEQ ID NO: 308200 - DNA, 144 bp, Proteus mirabilis
atgcataatgaattatgggcgttattgcgcccttatcgccctttgttaataggtgccttgttgctacaagctgtcgctggttttagttctttagtaccttggttagctctttatcaacttcttctttctttctttcccttttaa

SEQ ID NO: 308201 - DNA, 381 bp, Proteus mirabilis
gtgatcacattgcctaaatgttgtttttcagtcagtgtgatttcagaaggtaaaagcggacgcgttaaaggggaggtcgcatcggtcaggggtacatctgttttatcactggtttttatttcggtattgacggtttgtttctccactccatcaatattaaatcccagcggattacgctcgaactcagcgcgctctgccttaactgcgtttaatgcggcttcaatttcattaatttgtgccgcattcaccgtggtattagtgatcgatgttccgttgatcgccacatcgccattacctgaaataatactatcaatggtggctaatgcgatggtttcatcgttatcaaaacttggataccaatgtttagtatccttatcatag

SEQ ID NO: 308202 - DNA, 342 bp, Proteus mirabilis
gtgaataaatacaccgaactatctgatttcgagattaatttagctgttgctcacattgcgcttggcaagggtagctatgattggtgccctgataaaaaagaggtttactttgcaggtattgatggtggtgaatttttacatcatggatacttcgacccatgcaacaatccatccgacgcaatgccgattatcattgagaataagatagccttagttcctcaacttaatggcgatttatggatttgcagtcatcacccattttactcaactacgggaaatttatatcgcgcagctatggaaatttatttattaatgaaggatgcggagaatgaaaaagtatga

SEQ ID NO: 308203 - DNA, 135 bp, Proteus mirabilis
atgctaatacaggattctgctgtgcctgttacggaagatatatacacgcaatcggaatgcaataaacgtgttgaatatttaatgtcagtgaggaatgttgatgttatttgtggagaggtatggaatgaaagataa

SEQ ID NO: 308204 - DNA, 183 bp, Proteus mirabilis; identical to SEQ ID NO: 302971

SEQ ID NO: 308205 - DNA, 918 bp, Proteus mirabilis
gtgcagatcacttctgatattgaactgtcaggagctggctgcacaacagccattacgcccaatcaactggtgcagtcgtcttctgaaaatgacatccatgcccagcccgtgcgcgagctggatcaccgcccgcacgatagtttggtcacgggcatcatccgggagcctggcgacaaaggattggtcgattttcaatgtggtgatggggcagcatttcagatgttgcaggcaggaatagccggtgccgaagtcgtcggcggcgaagcgcacgccgatggcgcgcaaggcgtcgaaactggcgaacagggctggattgccgaatgcgaccgattcggtcagttcgatctccagaagctcggcgggcagggccatatcggccagcacccgctttacctcgtcgtcgaacgttggcccaacctggctggcggacacattgatggcaagacggaacggttgccatgccggtccttgccacttgtgcatctggcgacaggcctcgcccagcacccacgcgcctatttccggcatcaggccgaacgactcggccagcggcaggaactggccgggcggcaacaggccaagcctcggatgccgccagcgcatcaacgcttccgcgccagcgatccggtgatcgcgcagatcgaccagcggctggtaatgcaggtcaagctgtccgcgcgccgccgcctgcgccaactcggccgccgtccatccggcgggctgcgaactcgtcatgatccgccccggaaggcgcgcagcagccgcgttacggccagaacgaacaagccggtcagcgcgagcgcggcaacaccccaatgctcgccaaggaaggcaccggcggtcgtcccggccagcacggcggcgagaatcggcagatggcaggggcaggtcaacacggccagcgcaccccacaggtag

SEQ ID NO: 308206 - DNA, 330 bp, Proteus mirabilis
atgaacgatcaagttatatatcaaaaaattggacagttacttgttgattcaagtccatctgacgctaagaaagttattgtacgagctgagctttttcaagaaagagatggttgtacttatgagtttgattatgtaaataaaaataatgagttaaattggtacgatcctgatggtaaagctataagtgatttaactgatacattagaaaatttgagaagtttttatattgataatataaaatcgaaagaaagttcattttggaatgggtgtgaaattactttagacttagaaacaatgaaaattaatatagattttaaatacaaagactaa

SEQ ID NO: 308207 - DNA, 522 bp, Proteus mirabilis
atgaataatgaattaattaagtatctgcattctggttaccccgaattactgatcgatgttggctatatgcgaggttattcagttgatgagatccagaaaattgagcgattatatgatattgaagtaaaagatcaattatatgactttttaacatcaattgggcgttgtagcggtggcttattcggtgatgaccctcttcttttttatagaaaccaaaaaactataagaggaagtatattaatgcaatcaggaatgagagaagatcttgcagctatccaacagtacgacttgctagataaaaaaccattttttatctctgtagaaagctatacacagtatttttttgttctaacaacatccgatacccctaatgttgtttatcaatatgacgaaaatgaagaaacggtacaggcaactaattgggatcttaagaactatttaaaacatgttgttaatgtgtacactcgaaattacgatgtgaaggcatctttcgatcaacatggggaacttatcattatttaa

SEQ ID NO: 308208 - DNA, 528 bp, Proteus mirabilis
gtgtcggaaagagttgttgttgagaataactatttagattcaacagataaaagcgaaaaaacgaggttagagtataaagagcagaaagaccagataacggatatggaacaacatcggttatctgaattgggaattaaagatattcaaagtacacaaaaacttgtagatgcttgttctaacggcatttctccagcatatacgaattccaagaaaaatcaggcacttgaaattttgatagtatggggtaatctgacaggtattccgcttgatgtatttttaacacagcaggaaatcacacctgaaaaagttgctgaaatattaaatagcacacctccaacaacagaggcgaaagctcttcaatttgcgactgcaatggcgtatttagcttttgcaaaaaacggtaaggaaatacccagttgggatgcagtaacagatcaatatagctttaaagatacagacaaagtgatagatattgagcatcctaatggtcagttgagggttagggttgggtttaccgttgttcggtaa

SEQ ID NO: 308209 - DNA, 339 bp, Proteus mirabilis
atgaatagtaagctttcaaaaccacaatcttcagaagttgataaagggcatttcgacgatttttatctaaaacagaacgatgaaatcgatctgtttgagttattttctgttctttataaatcaaaatttgtcattattgggatcacacttttatttgctatcgtaggttttactgttgcgagctttctgccccagaaatggacaagccaagcagctattacaaaaccaatgttagatgagatgaagcagttaagagctaccttaaatgatttaagcttggttgatgttgatactggcgtaaatgcttcttctgtttaccaaaaatttatcaataactaa

SEQ ID NO: 308210 - DNA, 1263 bp, Proteus mirabilis
ttgatagtaataccccacaatagtaataccccgcaagacgctaccgtttatgatccaacttgcggttcaggttcattattattaaaagcgagtgatgaagcaccgcgtggcttgagtatttttggccaagaaatggacaacgccaccagtgccttggctcgtatgaatatgatcctacacaacaacgccaccgcgaaaatttggaaaggcaacaccatttcagatccacagtggaaagaagccaacgggcaactgaaaaccttcgattttgctgtcgctaccccccctttctccaacaaaaactggactaacggcattaatcctaaaaaggatgaatttgatcgctttagctggggaattcccccagaaaaaaatggtgactacgccttcttgttgcatattatcaaaagcttaaaaagcacgggtaaaggcgccgtcattctcccccacggtgtattgttccggggcaacgccgaagcgcgtattcgtgaaaatctgattaagcaaggttatatcaaaggaattatcggtttacctgccaacctattctacggcacgggtattcctgcctgtattatcgtgatcgacaaagaacacgcacaggcgagagaaagtatttttatggtcgatgccagcaaaggctttatcaaagatggcaataaaaaccgcctgcgtagtcaggatatttataaaattgttgagatatttaccaagcaattagaacaacctcgctttagccggatggtgccattaagcgaaatagtggctaatgactacaatctaaatataccgcgttatattgattccagtgaaccagaagacttgcacgacctcagtgcccatctacaaggtggtattcccaatcgtgatatcgatgccttagaacactactggcagatattcccaagtattcgtgcgaccttattcaaaccagcacgtgaaggttatagcgaagttttagttaaagcctctgaagtgaagaataccattctaaaccatgatgaatttaaacagtttgcgacgaatagcttgcagtattatcacgcttgggctcgcgcatctaatttagctgagatcggtgtaggtgatcagcctaaagcgttaatcgctgaaattagcgaaagtttgttacaaagctattcacaaacaccgttgctgagcaaatacgatatctaccagatcctgatggattactggagtgatacaatacggtatggtcaggaaaatatggacgctttggttttgttcgcaatagcccattaa

SEQ ID NO: 308211 - DNA, 549 bp, Proteus mirabilis
atggccattaagaaaaacgaactatactcctcactatgggccagttgcgacgaattacgcggtgggatggatgccagccagtacaaagactatgtactgaccatgctgtttatgaagtatgtatctgataagtataaaggcgacccatacggtatgattgtcgtaccccaaggtgccagctttgatgatatggttgcgcttaaaggcgataaagaaatcggcgataaaataaacaaaatcatcagtgcgttagccgaagaaaacgatctcaaaagtgtcatcgatgtcgccgattttaacgacgaagataaactaggaaaaggcaaagagatgattgaccgcctttccaagctgataggcatatttgaagggctagatctctcttccaaccgcgcggatggtgacgatttattgggtgatgcttacgaatacctaatgcgtcactttgcgactgagtcaggtaagtccaaagaccagttttacaccccatccgaagtttcacgcattctttcgaaagtgattggtattgatagtaataccccacaatag

SEQ ID NO: 308212 - DNA, 579 bp, Proteus mirabilis
atgttagacattaataaaaataatttatctcagctaacagagaaactcgttaaaaagcagtgtactttaatgagtatcattgccatgctgggattacttgcgggtattatctgtattattaaccctttttcttcaggggtcgtggtcagtgttttcctcggtgtagtgttttttgcttgtgcaataaccagcataatggcggcctttaatagccggatctcttctggttggtcgatgttaattactttacttgctggttttatctatctatttttaggttatatttttattaccgatcctttaaatggcatgttaagccttgcatttattatcggttatttatttatctttgcaggaatactccgcttagtactcggctttaagcaaattaaagatagcttttatggctggtttaatattttagtgggctttttagatcttgttttagcctatttcttactagcttttggccctgaaacttctataacactggtgatggcattgattggcatacaacttattttaagttctataactattctatcaatagccagtgcaatcaagcggatgactcgttaa

SEQ ID NO: 308213 - DNA, 213 bp, Proteus mirabilis; identical to SEQ ID NO: 25793

SEQ ID NO: 308214 - DNA, 255 bp, Proteus mirabilis
atggcattttatattttaatacataaaaatattgaagatgaaactatggctcgttatagttttttcccaagtgaattagaagaattcaatgatcagcatggaatcttagaaataaataaaaaaaatggtgaagttacattaattaaagctgttaatcccgatcacggaaaccattatttcatgagagcatcccgcaaggtatttgttaattggcgaaataatgaatatccagatataacaacatgggcatcgtag

SEQ ID NO: 308215 - DNA, 735 bp, Proteus mirabilis
gtggtcacagaccaccaaggaaccccgcgagagatattcagtgaaggcgggcaagccagttgggcaggacggctgaatacatggggccaaatgcagttttggcgttaccgagagggtaaggcggagaatgaccctaattataccgaatgtccttttcgctttgcggggcaatatgaagatgaagaaagtggcttgtattataatcgcttccgctattatgatagggaaacagggcagtatctttccccagaccccatagggttattgggtgggctgaatccctatggatatgtgcattgcccgacggggtgggttgatccgtttgggttgagtgggacgtctaagattaaacaaacaggcggtaggcaagttctcgatcctgagagccttgcaggttgggaaaaagcagagcttttctataacaaaataagaacagaccccactgatattgctcaaatagcaaaaaatacgggctggaaagaatctcatgtcgcccgagtgaaagatcatgttttcttcaaaaaacatcagttggatgataggtttggcaagtttgacgcagacccttctatggtaaatgcatgggagcgactaaagaaaggtgattacattaaatcagatattgatttattgagacatgagtattttgagtctaggtttgaaggtattttttcaaccatttatagaacggcgcatgaggcggcagttaaatctggaagagattggaaaccttaa

SEQ ID NO: 308216 - DNA, 318 bp, Proteus mirabilis
ttggttgatgctaaaggtcaagttttagatttagagtattttagaaatctaaaatttgatgggcagataattaatgctggaagaagcggtaataagttacctgcaataggagagcctggtacttactctaaaacaacaggcggacatgtaattgtttacggatctgatggtagacgaatggctgatatatctaaggagcgaattaaaattgtcgagtggaataaggatccaagaggacagtatcattatagaactggaagtgatacgaaatttgcagatagagaaataccagatgaaattaaaaagttattggagtga

SEQ ID NO: 308217 - DNA, 315 bp, Proteus mirabilis
atggattattatcaacagcagctacaggaaaggggcttaaaacaaagtatgtcaagaaaaggaaactgtttagataatacgtcaatggaaagctttttcgagatatttaaatctgagtgctttcacggaaaagaatttaaatcagttaatgaattagatcagaccgtgaaagaatgtatacattattataaccatgagagaatcaaggttaaattgaaaggactgagccctgtagagtacagaactcagttattcagttattcagttattcagttattcagttattcagttattcagttattgaaaaccgcttaa

SEQ ID NO: 308218 - DNA, 579 bp, Proteus mirabilis
ttgtattataatcgctttcgctattatgatagggaaacaggacagtatctttctccagacccgatagggctattgggtgggctgaatccctatgggtatgtgcattgtccgacggggtgggttgacccgttaggacttgcaggtgactgctgtaatgaattaaaaattgtatatggagagctagactatctaaacagacctacaggtgtatgggccagaatagataaaagctttattaatacaggcactcatgctaacccaaatatacaacctcccggatttattacaggtcaaggttctaatcgagctagaggtcatttatttggacgtcaattaggtgggtcaggtgatgatgttagaaacttagtcacacttcaacaaaggcctgcgaacacaccatttatgagtggaatcgaaggccgaataagaaaggctgctgaacaaggtcaaattattgaaatgagttctgttccttattataaaggtgtatctagaattcccgccggtattacaatcaaagctgaaggaaccggcggattttatgaatatgttaccgtacttaaccctccaggaatgtaa

SEQ ID NO: 308219 - DNA, 237 bp, Proteus mirabilis
atggcatatctagatatactttttaataacattcatctgcacataaatcttatgaaaaaattacttcttgttgttatcgcactactggcttttggctcccttgggggcgtttttcttgccggactaaatatttatacgcgctcaaccacaccggtagacacagagcaaactcaacctaatcgctcaccagcacagcaatttccagctctaccagatagctcaccatcgacgaaataa

SEQ ID NO: 308220 - DNA, 846 bp, Proteus mirabilis
atggaatttgattattttgttactccacaatggctttttgaacatcacgacgatcaagatctggtgatagttgatgtcagtgcgcccatgcctacgcaagatattgactatcatcaacgctatcttgaacgtcatatccctggtgcccatttttttgatctggatgaaatcgccgataaaacaacatcattaccacatatgttgccatctgacacactgttttctgaaaccttaactcagttaggtatttcaaataatacaacagtgatcctctatgatatcggcaatctcttttcagcacctcgtggctggtggacttttactaccttaggttgtcacaaggtgcgtattctggccggtggtttacaagcttggcaagaagcggggttcccccttgaacaaggagaaacgcccaaagtcccagccacttacccttttatcgtcacacgccacactcaacgctgtgtcgataaacaacaaatactggataatctgaccacgcaacaaaatcaaatcattgatgctcgctcggcggatagattttatggtagagcaccagagcctcgtcccggtttacgtaggggccatattcccaatagtaaaaatgttccttgggatagcttagtcattaatggacaattaaaagataaagcgcaattacagcacatttttgaacaagcaggtgtcgatttatctcaaccaattattgtcagttgtggctcaggtatgacagcagctattctatttttagctttaactctattgggctgccaaaacatcgcactgtatgatggctcttgggcgcagtggggagcagaaaacgcattaccttgcgtgtgcatttaa

SEQ ID NO: 308221 - DNA, 435 bp, Proteus mirabilis
atgttaacacctaaattagttgaatattttaaaagtaaaaattggtggtttgatgaaccttcaagtgaataccgcgatgctttgttaagtattgatgttgatattgactctgattttgcacagttttacttacatgttgaagattgtccaacatttttaggccaaaatagagagatctatcagattggttggtttttaattaatagtaatgattatttattaatcctgaaaagtgctcatgatgttctaaaattacctaaagaatatttgccattagataattttgaaggtgaatacggatatttttataatcaaaaaacaggtgaagttattggcctaggtttaggtcaagagctgcgggattttatagcaggcaaattaaagccacaatggcctagttttaatgattttttagagtttttctttgatgtttaa

SEQ ID NO: 308222 - DNA, 474 bp, Proteus mirabilis
atgattgaaatttcgacatttttaaaggtaggaaatgattttatagatatatataactatgaaggtgatctagatgatgatttctatgttgaaggggcattagaattgtcaatcaataatactaagttaattgataagagtatgtgggattgtattgatcagctttggtgttattttattgaaggtctcatattaatatcaaaaaatgaggggtttagaactaattttcctgatcagcctattgaagttacgtttacaccaattaaaaaacacgtattgattagtgtaaaagccaatgttcaaaaaaaagtttttattgaaaaagatatgttcataacatgtatggcattacatgctaaaaaatttcttgctaagctagtcactttaggtaatgcaaatgtaaatacatacatgccgtacatgcatgatattgatattttacttaaggaacacccctctattgccttagattaa

SEQ ID NO: 308223 - DNA, 687 bp, Proteus mirabilis
atgaaaaaattgctatttagtcttgctacactgattgtaatgtcaacaccagcattagctactccaccaggcgctaacttaaaaataaacggtgatattactccccctacttgcaccgttaatgctggtgataatgatattattattgattatggtgtaatatccccctcttttattcctgctgaggaaaattacgcactaggagctaagagtgccaatatcaaaatatcctgtgatgcaagcaattatttaacacttaaggtatcagatacttataaaacaagttcaacagattcagcgaaaattagcgtttttggattagttaatgcaaaaaatacagaacaagagattggtggatatataattgatgtcattgatatcaaagttgataataaacgagcttatttaggaagagtggcagataagatttggactggatcgtccgcaactatttttaaagataccttaacagcgttaactagtgaacctcaagcccaggttgataaaaacaatttaaaacttatagctggaaaagtgtttaatgcaaaaatacaaataggaacttataacgaaagtaggtatgcgtatattttatcaagaaaaaaattggcacaaaacaatatcgatttaactgatggaattgattatataggtgaagctgtttttacttttaactttggtgtctaa

SEQ ID NO: 308224 - DNA, 423 bp, Proteus mirabilis
atgtataaagaatttgatttatgtattactgattttagtaatgataatgaacctggagattattggtatgattgtgctgtcattgagtctgctgaaattttaagtaaattcaatgagtcagactgggcatgcctatttaatgagttagcgcataaatctatattttggaaaactagattggtcgaatgtttaggggatttaaaaaatagccatgagctagatatcatcttagcactcattgacactgataattatgatttatttatcagttgtgtcgactcgctaagagctatggatatatgtgatttatctgaagatgatttgggtaagattaacgataaaatataccatcttgaacaaaatgcttctttgccagtgaaaagtattttagaaagtttttcacgtaagtttaagtgtaaataa

SEQ ID NO: 308225 - DNA, 1518 bp, Proteus mirabilis
atggacattattcgcactgaacgggatattgcgggctataaagcccaaaaagaccccgatgcgttagccatcgcaaaaaaacaactggaagcggcgggtaaaacacctaccgagcaagccattaaagaccaagcctacaacaatgccatggcacaatatggcaccggcagtgatttccaaaaagccgctcaagcggtgacaggattactacaagggctggcaggtgataatttagcaggtgcattggcgaatgcttcatcgccgtacttagcaacattgataaaacagcaggttggtgaagataataaagccgcgaatgccatggcacatgctgtgttaggcgctgttgttgctgaactaaataaccaatccgctgctgcgggtggattaggtgctggtggcggcgagctgtccgcccatgttatcttaaacaccctcttcccgggcaagaaggtttcagacttaaccgagagtgagaaacagcaagtcagcgcattgagtcagctagcctctggtcttgccggtggactgactaccggtgatatagcgggtgcgattactggctcgcaagctggaaagaatgcggttgagaacaactttttacattctgaacaaattatgagttttgttgatgctcaagcgaaaactaagaccccagaagagagaaaacagttacaaaaagatattgatacactagacaagcaacttcaatcacaagcggaaagatggggaatatcaaccaatgatatgaagagcgctttagatagcttgaaaacattggaagatttgccagattgtaatgcacaatgccaagacatggtgaaagattcaatatctaaacttgagcaagcattagaaaatagaattgctaagcattcatcacaaacagagaacctcaaagagctaacaggtattttagcgacggtgattgtactgaatgaaagcggattgattgatggccgatccactacatcaggaggtggaaaagggatatctagcgttacaggttcttctaagattgataatgctgtacaaggcggcgggcaaaaagggaaagaaactaacccgataattaatcaaccgaatataacagtaatctcaccggaaatagaaaccaagatacttgcgggacaaagggttggaaactcaaacaaattaattgggggacactcgtcttcagtgagtaatgaaaatccaaattatgctgtagaaacaataaaattgaatccagacggtaccagagttgtgaagtttactactcagttcccagatggaaacttatcaaaaattaagacaagtacactttttccagagaattggtcagataaaagtattattgattctttcaataaaattggtaactcctcagctattggacaaagaagctcaacaggtgaaacgttacatcgtggtgtaattaatggtgtagaaattgatgtaattaaaaaaggaaatcaagttacagctgggtatcctgtaggtggaaaaccgactcctggctttaatccaatcgattga

SEQ ID NO: 308226 - DNA, 327 bp, Proteus mirabilis
atgttaagccctcgggatttacaaattgtgatctcttacagtggcaaaagaaaagatatgctggtcgctgcatctgtggctaaaaaacaaggtgctaaaattatagcgatcacaggagaaaaacattcaccactaggtctgatggccgattatatattagaaactattgctgatgaaggtgagtggcgtagtgctgctatttcttctcgcactgcacaaaacaccattaccgatcttatctttatggcattattaaagaagcgtgatgaaaatgcgaagactttagtattaagctctcaagcactaattaatagtctggatgattaa

SEQ ID NO: 308227 - DNA, 351 bp, Proteus mirabilis
atgaataataaacaacttttcgaagacatagattataacaatgatactgagtgggttataaaagagttttttaactctatatattctcagcacaagtttttatgggcattgccatttattctgaaaagatatggatgctgtgttaatgaaactgattgtacttttccagatttagatgatccagatcctaagtatcattttgaaggaattatgttcagtgtctatgacggagaggttatcgtacctgaatctgtaggttttaattacgtcaggcttgcatgtgaaatatatataaaactccatccgagtgatcaaaaaacagtcaatgacctgttgatgcaaatatgctaa

SEQ ID NO: 308228 - DNA, 2142 bp, Proteus mirabilis
gtgaaagaacaaaccggtatttttgccggcaaaggtggctttgatgtcaacgtcaaagagcacactcagcttgatggtgcggtgattgcctccacggcggacaaagataaaaaccgccttgatacgggcacattaggctggaaagatatcgacaacaaagccgactttaccgccgagcacacgggcggctcgatgggcaccggtggcccaattggaggccaacttctcaccaatgccgcaggcgggttactctctaacgccaataacagtggccacgccgaaggcaccacgcaatcggcggtcagtgacggtacattaattgtccgtgatagcgacaaacaaaaacaagatattgatacccttagccgagatactgagcacgccaatgatggcagtattaacccgatattcgataaagaaaaagaacaaaaccgcttaaaacaatcccagttgattggtgaaatcggcaatcaggcgatggatatcatccgcactgaaggggatattgctggtctgaaagcgcagaaagaccccgatgcattagcagtcgcgaaaaaacagctggaattagaggggaaaacactcaccgatgacgccattaagcaacaagcctacaacaacgccatggcacaatatggcacgggcagcgacttccaaaaagccgcccaagcggttacagggttgctgcaagggctggcaggtgataatttagcaggcgcactggcaaatgcatcttctccgtacttagcgaccaagattaaagagctgacaactgacccaactactggtgaggttaacaaagcaaccaatgccatggcgcacgcagtattgggtgctgtagtcgctgagctaaataaccaatctgccgctgctggtggtttaggtgctggtggcggtgagttgtccgctaaagtgattatggataccctcttcccgggcaagaaggtttcagacttaaccgaaagtgagaagcaacaagtcagcgcactgagccaattggcttcaggattagctggcggactgactaccggtgatgtggccggtgcgattactggctcgcaagcagcgaagaatacggttgagaataactttttaagtccagatgatcgagatataagagacaaggcactcgaagatcaaaaggcaggtaaaaatctcaaagaagcgtctcaaaatattatctatctaacagataaagataattataccgacaaattactctatcaatatggtcaaggtactttagataaagcgggggaaaccgcattgactgaataccttaacgcatatgctacacagttacagttaagaggaatgagtgagtcagatgcactcaaggctgtagaacagatattgaaatatccaagcagtgcgacacctgatttatcagcagaatataataaggcattaggtcaactcagcactgaagaaagacatgcatggcaagcgatgattggcacagatgcattattggctggtccgggacgagcaagccaattaatgcggttagcgttgatttcaggcggttcttatcaaacgggaatagggattggtcaaattgcagatgggaagatcgcagaaggtagtgtcaacattggtcttggtggattggctgtatcaggtggctacttaggaaataaagttacaacaggtaagccaaatggtgggactactatatcgaaagagataacttatgcagatggtattcatttcgctctggagcagaaaaatcatttaaccacttttgatggaataactagcaagggtgtatatggaacgcataatctgaatgaatttactcaagcagcatctgaaaatggaataaagattattagtcagacgcctagtaacgttaagggaattagtgaagttgtgtatcaagtacctaaaaaaaatagagaagggaacattattcctggagaatttaaagataaaccttatgttaaaacagtatatgacccgaaagtttttcctgatcaaaaaatgttagatttaggtcagcaagctgcttccaatggttataaagatgctatatcccaaggtcgacgcgagtatcaatcaaccgctggaggggtaaaattccaagtatatttggatcaacaaacaggtagagttacgaacttttttccggtggccgaatga

SEQ ID NO: 308229 - DNA, 1263 bp, Proteus mirabilis; identical to SEQ ID NO: 67462

SEQ ID NO: 308230 - DNA, 1422 bp, Proteus mirabilis
atgtcgatacctcaagacaaccaagccattgaagagttaattactcttgttggaggttcagataatgttattagcgtttcacactgtctaaccagattacgttttgttctgaatgatcccaatctcgctgatatagataaaattaaaaaaatgtcttttgttaaaggctgttttaataatgcgggtcaatttcaagttattgttggtatggatgttgatatctactataaattattaattgataagctttcattaaaagctaaatctaaagatgatataaaatctgatgcgaaaaagaatatgggattctggcaaaagctgattgccaatttagccgaaatttttgttccattattacctatcttaatttgcggcggtttattgttaggattaagaaatgttattggcgaaatgcctatatcagataataaacccctcacttatttttatccttggttaacgccaatatatgattttctctggttaccttgtgaagccatcttccattttctgcctgtaagtatttgctggtcgagtgtaaaaaagatgggcggtacacctgcactaggtattgtactaggtataaccttagtttctccacagctaatgaatgcttacaatttaggttcacaaattcctgaggtttggaattttggtttatttactattgagaaagtaggttatcaagcccaagtgatcccttcgattttagcgggactatttctgggatggtttgagactaaattacgtcgttttatccctgattacctaaaattagttattgtgccaattgtaacccttattgtcgccgtttttgttgcccatgttattttaggccctatcggtagaagcataggtgatggtctcgcccaactgatcaagtttttaatgttaggtgattttgcccctattggttcaactatttttgcctttttctattcccccatggtgatcaccggcttacatcacacaacgttagcgattgatttacaaatgactcaaagttatggcggtacacctatttggccgattatcgctctgtctaatattgctcaagcatccgccgttgtaggcattattatcgttagtcgcaaattaaatgaacaagaaattactattccggcagctatctctgcttatttaggtgtgacagagccggccatgtatggcgtcaacttaaaatatggctttcctatgctgtgcgccatgattggtgctgcgctagcgggtttgatttgtggattaaataatgtgttatctaatggtattggtgtcggcggattacccggtattttatctatccaacctacttattggttagtttatttattggcaatgatagtggctattgtcgtccctattggattaaccattctagtctatcgctataaagaaaaagcaggcaccttgcaagtcgattaa

SEQ ID NO: 308231 - DNA, 393 bp, Proteus mirabilis
gtgtctattaaattaatgcataagaaagtagagcggctggaattaagagccttatcaaaaggagaaatcgagcagaaaaaagaagtgcatattaatattgggtcaaccatttatgcacactctaccgataaaaaaatggtgagaattaactacccagtatctttatcaataaaagataatgtacatatttcaataagttatgatttctatttctcatcaagtgaagaaataactgaagaatttaataattcagaagttgccagaaaagatgctcctgcattggcttatccatatataaaatcatacatagaaggcgttctcactatgtctggatataaggactttgaaataccttttatagactttgcggaagaccccttcgagtttaattaa

SEQ ID NO: 308232 - DNA, 555 bp, Proteus mirabilis
atgagtgtatttaaaccgcgaattttaaaaaacgataacgattacaatgaggcgatggatcgcataactgagttaatggggttagacccagatgtggatagtgaggatggtaatgaattagaaatgatagctcttcttattgaggattatgaaaagaagaactgtcatatagaaaaaccatctccaatagaagctataaaatttagaatggatcaagagggactaacgcaacaggatatggaaaaatatcttggttctcgctcaaaggtttctgaagtgcttgctggcaaaagaaatctcagcatatctatgattaccaagctgcattatgatcttggtataccactagatgttttggttcaaaaaccagaggatattgttagtgataatgaaagtctgatttctgttccccagtcaaaaatccagctttctctttcaagaatggtagatgaaaattctgagtggtatcaaaccttaaatacagctaaagaaaaaaccatagattattctcataataaatttgataccaagggggctcagtgtctattaaattaa

SEQ ID NO: 308233 - DNA, 288 bp, Proteus mirabilis
atgagagtgctaggaaaaaaagatatagctacattcattaaaaaacacaaccaatctaaaggaagtcttgaagcgtggcttaatgaagttgaaagagccacttggaaagatactcatgatattaagaatagatactctaccgctagttttttagaagggaatagagtagtttttaatataaaaggtaatgattacagattagttgttcaggttatataccttaacgggattgttagaattgagcgtatagggactcacgctgaatataacaagtggagattgaaatga

SEQ ID NO: 308234 - DNA, 411 bp, Proteus mirabilis
atgagccgtaaagacaaaatgttagcccaacttggaattcgtcaatgggttcttcgtaagcctgctgtattaaaaggcgaacattctgtgcaatttccggataccactcgtttacttatcattactgatgatgttgttgatctaaataacgggcttttctctgatatttttagcactatgggaatagataaaagtgaaatctattgtattacctcagaggatgtgagcctgctcacaggatcatttacaccagcctgttggctattaggtactgatatcactctacctgctcaatatacttctctgagaagcccttcattacatcaattatattttgatgccaatgcaaaacgcgatctttggaaacaaatctatcaacatgaagaccatttccccattaaaccctgctga

SEQ ID NO: 308235 - DNA, 321 bp, Proteus mirabilis
atgtgtataagagacagggttcataatgaagtaaatggaaaaatattatttaataatgcgttcgctggaaaacggcactatgatgtacctattttcaaaatatcttatgatgatcacgaaagaaatgttattaaaaatttcaaatcaggcttaaattttatcgatgggattgctcattggattggtattgagaatgataaattaaatataggatatgatatttttactaataaagatgaccaaaatgattatgggttatcggatagaataaaagcaattaataaagaagatgatcctgcgatagatataaaggataaatag

SEQ ID NO: 308236 - DNA, 306 bp, Proteus mirabilis
atgtttattatatatttatgggataaagctattggtgaaagcattagatcattagatgacttttcaggtaatgagaattttttaatcagggatgatctctgcaaatatccattgttatctaagttatccaactgtgatatggagcttttcagtgacggacaacttatagatcttcgtcaagaaattaatagcctgatgaaagatgagttattagatcaaaatgcatatgattacttgcgatctgtggtatcactaatagatgatgcttatcataataataaagggattttgttttctccgttttaa

SEQ ID NO: 308237 - DNA, 936 bp, Proteus mirabilis
atgggtcaaaatatgaaatatcattccttattaaaaaatttattttatgcaacactttccatcatggcgttaaattttagtggcgtcactatggcaaaaaacaccatgaatgatatttatgttattaatttatcctcaaataatgcagtttgtggcgtgaaaattaatgaaatgttagtaatgcataataaaaaataccctaaaggtcattattccgctggtcaaaatatatctagcatattaactaatggggaaaataccttaggtgtaattatgtttaatggctctattttaacaggtgaagaaaaacttacccctgatatgtggtgtgaagtcgaacttaaaaaattatctgcaaacggcgataactccttaatatcgggacttagattaaacggaaataatgatgggaaaatggtggtctctgataaatatcaaaataacagtgagcatatctattttggcggccccagtagagatagtgagtataatgttttagaagcaaaaaaccaatttaatatacaaggcctcccccaatggcaatgggaaaaagcaactcccgttactgaggacgatcttcctaaaattcgtgctttttataccgaactacgacaagcatttattgataaaaatctagataaattaaaaactatgggaaaaatatcgtgggaagaaatggcccatgccgataatggctctcctgatattttttggagttctttagagtttaaagagttactcaaggatggatataaaccctcagatatagattggaatcgatacgaattaaatacctataacaataaccgtttgtttcgctatgaaataggatttagcagattatcgccaataaaactagttaatcctgaagagagaacatttcattataacccttacctttctattattgatgggaaagtgactattgtccgataa

SEQ ID NO: 308238 - DNA, 141 bp, Proteus mirabilis
atgcctaccattattcttataggtgattcggacactggccatgatcatcatggccctaccaacgtcatcacaggttcatcaacggtaaacttgttgctcgagcaaaagctcccattagttgataatgtaggtatgaaatga

SEQ ID NO: 308239 - DNA, 333 bp, Proteus mirabilis
atgcacattgaaaaaagtgttactttagattgttctaaattcattaatgaaggcgttttctatgatgagttgattagtgtatttggttttcctaattttttcggtagaaacatacatgctctaatagattgtttatctggattgagatatccagaagaaggaatgataaaagttaatataactaaaacgggaactctactattgaaactaaaaaattatagtttagctgatgatactacacagaaaatacttatgttttctgtagagtctgtaaattctagagctcaacaagagcaacttagtcctccaatattattatgcctagaaaaataa

SEQ ID NO: 308240 - DNA, 774 bp, Proteus mirabilis
gtgtctcagcaaatccaatggctgtatcaacccggagagataacgcccaccgcgcgttatcaacagggaaaactgcactatgtggtcaccgatcaccaaggaaccccgcgagagatattcagtgaaggcggacaagccagttgggcaggacggctgaatacgtggggccaaatgcagttttggcgttaccgagagggcaaggcggagaatgaccctaattacaccgaatgtccttttcgctttgcggggcaatatgaagatgaagaaagtggcttgtattataatcgctttcgctattatgataaggagactgggcagtatctttccccagaccccatagggttattaggtgggtttaatccctatgggtatgtgcattgtccgacgggatatattgatccgtttgggttggcatgttgcttctttgcgaagaatcctaaacaggctcatgcgatcattcaagaaaagtgggggcatgccatgtctaaacgagacatgagagaattacagctcaccgttgatcgaataaaattaaatcagcctaaatattcaaatgatggaaaaatatttgagaataatcaccaggtaggtaattcaaatagtcagagattggatacaggcagcgggccatataaagaatggacggttaagacacctgatgtcgggactaatggagctagacgtattgttgttgatactaaatcaggtaaagcatattacacgcatgaccactatgattcattcatagaaatagatttaaaaggttggaaataa

SEQ ID NO: 308241 - DNA, 495 bp, Proteus mirabilis
gtgcccgggcaccatgttcaagttgatgtgaagttcctattttttaatacgccagatggtcaacgaattaaacgttttcaatatacggagattgatgatgcgacacggatcagagcacttaaaatttatgaaaagcacaatctggctaatgccattgattttattaattatgttgtaaataaatttccctttagaatcaaaacgattagaacggataatggtcacgaattccaatcaaagtttaattggcatattcatgatctcgggatggagcatgtttatatcaagcctgcaacccccagattgaatggaaaagtagagcgttctcatttaacagataaacaagagttttatcaattaatcgattataaggatgatgtcgatttacatgaaaaattagctgaatgggaggctttttataattgtcatcgccctcactcagcgcatgctggtaaaacaccgtatgaagtgttaaaaaataagcttggtctttaa

SEQ ID NO: 308242 - DNA, 489 bp, Proteus mirabilis
atgcctgacccgattgggttattgggtgggttgaatttgtatgcttatgcaccaaatccgttgggctggattgatccttgggggttatgtcgacgtggtaatgcagcgactaaatcacatatggatgaagtaagggatcagtttgctaaggataatcctcggtttactcatttagagggaggccgtgatgcaatttcaaaagttgaacttcgagaaacctatttaaaaccgctttctggaaatacaggacgaaaaggtggttcatatacggatatgacatttaaagatccaaatggaaaaactgtttatatacaaactgtagataagggaaatatcaatggaatgacgcaacgtgagtggaataatgctatcagaattaccaaacaagaccctagtgcaatagtaattacagttccaaaaggaagctcccttaaacctggtgctttagatactactggcatgacgcctggtacagtaactcaaagataa

SEQ ID NO: 308243 - DNA, 471 bp, Proteus mirabilis
gtgattaaagatgaattattttctgctataaatataagtgaatttgaatatgttattaaaaccaatttattagggacttgtcaatttactaaacagttattgcttttattaagatcggcagaaaaagcgaccattattaatgttgcttctattgcagggattgttccaagtattggtcaaagtaactatagcgccgctaaggctggaattataggttttactcatacgttggctgcagagttggcaggtaaaggaattcgagtcaatgcggtggcaccgggtatgattgagtctgacatggtcaaaaaagtgtcacgccaagtcgtacgtcatattaaatcggttattccattacaacgattgggagcaagtgctgaagttgccaataccattgtatttttaagctccgaagcatccagctatattgttgggcaaacattaatcgttgatggtgggatggtgatgcgatga

SEQ ID NO: 308244 - DNA, 948 bp, Proteus mirabilis
atgaaccatttgatgggtaaaagactttttttattaggtacaatcttctttttttctgctgacgcctttgcagcttgtattcaaaatcctaatttaaaaaatattcaggctcggatccccaataaaacctattcaattcaatatgatgatatagggacaagagtattagatgagtttcagattaattatgccaatggacctattaaaacttatttggataagaatggggactgtggggatgcttctctttcaggatattatacaaatggatggatacccgataataataaagttgtaaaattaaatagtttaggttttattaacctaacttggtctaaggttgagccgccaaactcaccttatcggataattaatccttcttggacggttcaaattataaaaacaggcagagtaacgcaatcaggaagccttcaatggggcaagattgctcaagcagtacaaaataatacacaacctaaaaacacaacttggaatttaacttcactttatttgcctcttaatgcaataaagataaattcattaaaatgtactacaaaatcatcaaattataatattaatatggggacttggtatgatactcaatttaaaaatattggtgatgtcagtaaaagtgtagatgttcctattacattaaactgtgcggctggcactaacattaaagcgacagtgacaagtagtgctggatatatagatgtaaatacagggaaattaaacttatcgggcactaatcgagccactggtgttgccattcagttattagataaaaacaataacccgataaaactaaatacaaaaaatagtctacaaaatggggtctcctccggtgattatatatttggttggaaagcaagatatataaaaacaggtaataaaataacgcctggtagtgctaactcaacagcaacagtaaatatcttatatgagtga

SEQ ID NO: 308245 - DNA, 198 bp, Proteus mirabilis
atggattttcttttgtttgtcgtagttcaaatcgagctagtaagcttgtataccggtggctttggtgatgttgaaaaagcagtaaaaattttctttcgtaatgagttgacgccgctacaaagcaagatattacaaattaatgattggctaggtgaagaagtgattaagcttgataagtacacactagatgataagtaa

SEQ ID NO: 308246 - DNA, 774 bp, Proteus mirabilis
gtgtataagagacagattataaaagcatcacaatatgaaagccgccagttaaatgcattctataaagatttaaatattgaacaagatgaaaaaaaagaaaatttagcgaaattaatggttgttaatgcatatcaatcgtacccacaaaataaaaaatttatccaagatgcagaaaaagaggcattgatgggagcggcagatattatcactaatactggcgaaaaaattagtaaacacttgggggaaaaatacaaaactattgctaatgagatcgctagtgatttacgtaactttcagggaaagaaattacgtagcttgtctgatgcattaaaaatgatggaaaaaatcaaccgtaatcctaatattaagataaaacaagcggatagagtggtactggctaatgcagtgcgccatgtggatacaaaaatcctgtctgaaaattttcagcgtttaggtaagtcattcggggtattgggtaaagtcttgagtgttgaaaagcttcgcgaaaaagcagctattggttttgagactggtaactggaaaccattgatgctggaagtggaagctatgataatcagtggatatgctacggggatagcgataagtatagcaataagttttatctcatcaattgcatcatttttagctataggagcattacctacaaccttagcaattatagcaactataatgttaattagttatttagcatccttaattgatgataaagttgttgataaaattaacaacttacttattccagaagctcattaa

SEQ ID NO: 308247 - DNA, 321 bp, Proteus mirabilis
atggtaattgttagtttaatagaccaatctccattctctttttttagaaatattattacctctggtcagaaagtaaaagaagaattagttaaattaaattcttttgataaagaaaatagatggggtaatacaagattaactaacaattcaaaatatgatgattatattttagttataggtgaaactccatttatgagtgcgtcaaatggcgtattagtagatggttttacatctgcagggacaaatactattgcatcgttacgattaatgctaacaaaacctaatctaaaaaatgggaacctgattatagccttaatttaa

SEQ ID NO: 308248 - DNA, 186 bp, Proteus mirabilis
atggtaatcgctaataaatctaaaaattcaagatgcttaccattaaaagtgacattacctaacattgccactaaggtgacgaccgcaacagatacgggacttgcgataattcccatttgtgaaccaatagtactagcggccatcggtctttctggacgaatattatttttgatcgatacatcatag

SEQ ID NO: 308249 - DNA, 231 bp, Proteus mirabilis
atgcatcgaggtttagcatcacaagccgctttgaatgggttattccaaccttatggtgttgggaaatttaatcttactgcagcggtaggaggatataactctgaaacagcgattgctgttggctctggttatcgtataaatgaaagtgttgcaataaaagcaggtattgccacgaatactggaaactttgaaggtgttacttacaatgctggtgtaaatttcgaatggtaa

SEQ ID NO: 308250 - DNA, 384 bp, Proteus mirabilis
atgcgaagagataaactaagagcaccagattattttccttctaatatcggagttcctgttttttcgcaaaaagcggtatctatatttgaacttagaattgcatctgaaatgtcattctataagtgtactgtggaaaatacgcatgaaacgatgtttttatgtaaggtgaataattaccttccgattattgacgaggagaaaacaacattcagggaacttattgatggtactaaattgatcgatattcccacctataaatgtgataaagatttctttatagcgagagatagcgttttttgtgagcaaatgattctctctcaacaatttgtcgatttatgtaatgatgagggattgaatattgaatttttcaatgttaatgaatag

SEQ ID NO: 308251 - DNA, 1011 bp, Proteus mirabilis
atgagaaatttaaccacatggacttgttccgaaataacaaagttgattgggactattgacgaaccattcttcattgaaaaaatatgcaaatttaccggacgtagtgtaaatgatgtcctctctaaattgttgcacatgggattgtgtgaaataaactataaggataataagatatctacggctaggaatacaaatttaaaccatctcattccttattcatcatttattcctaaattattagaacttggttggatatatgagttattaaatagggaggaatctcttaaagcccccaagtggtgggtaaataatgatcagttccctataagtaacactatcgaattgaatcgtaatgaaacagtatgggttaatgaggaaattcatacagttatctccatgatacaaaacaagatgaacctaagctcaatcgcaaataaaatacatagaaatcaatcatctattaccgcaatgttaatagatcttggtattttagaatgcattgataaacaagaaatctttttgtctgaagttaatgaattgaaactttcaaagtatacatttaataatgcgcttgttcttattaatcatggatgggttgttaccaacaataatttatctgcgcctaattggtggcttgaaaataacaaggataataagaatgttcataatagccactacgatgaaaggaaagaaataaccggtaatgatagcagacaattgtatatgtttattaaatcagaattagagggcatactaaacactattcatgaaaataagcgtatcgaagaattgtcagatgtaacgtatttaggttatacacttgcagatttaacgacctacattggtattacttcagttaaggtagcagggcaggtcacaaagaacaataaaacccacatgagctattttatggataaaccttataatataaagaaaatgttgattaactttggttggaaagtttcagatgattcattagcagctcctgaatggtggtctaatgaagaataa

SEQ ID NO: 308252 - DNA, 423 bp, Proteus mirabilis
atgaagaataaatacatctctttcattcaaattattttttttaccgttgcttgtgtatatccagcgtatttattaatacgcagaaaaaacataattgatatttccatgttaatatttattgtattaattgcagtaattggagattttattgagtgcataacattaattgaattatctaagatgttagcatcattctttcttattgcaatttatgtgaattgctaccgcagctattttaagtactctaaaagtaatattgatttaattagttttaaagcagtagataataagatggggtatcttgttttttccagtgaaactatatgttatttcttgcctttaaaaataagtagccactttaatatgttatggttttatggatatttgaaagccataaccatgcaccttcaaaatagaaagtga

SEQ ID NO: 308253 - DNA, 750 bp, Proteus mirabilis; identical to SEQ ID NO: 289251

SEQ ID NO: 308254 - DNA, 351 bp, Proteus mirabilis; identical to SEQ ID NO: 291750

SEQ ID NO: 308255 - DNA, 570 bp, Proteus mirabilis; identical to SEQ ID NO: 291751

SEQ ID NO: 308256 - DNA, 936 bp, Proteus mirabilis; identical to SEQ ID NO: 291752

SEQ ID NO: 308257 - DNA, 963 bp, Proteus mirabilis; identical to SEQ ID NO: 291753

SEQ ID NO: 308258 - DNA, 558 bp, Proteus mirabilis; identical to SEQ ID NO: 291754

SEQ ID NO: 308259 - DNA, 315 bp, Proteus mirabilis
atgccagatttagaatattacttactttcccctgcttcacacaaaggtgtagaaaacgaacatgcaaactcaggtagaatgttagaccgatatttgaatactaatggtcgctggagtgcatttccacccaagaagaatattagcttattatattggagctcaagagaggaaatattaaaagccgcagaaatagcaatcaattcagggcgagatgtgcatatttgcaaaatatcaacaaatggaaaagtaaaccaagatagaatgattaattacaacgaaaatcatttaccctgcctaacaggatatataaagtaa

SEQ ID NO: 308260 - DNA, 438 bp, Proteus mirabilis; identical to SEQ ID NO: 291755

SEQ ID NO: 308261 - DNA, 1536 bp, Proteus mirabilis; identical to SEQ ID NO: 291756

SEQ ID NO: 308262 - DNA, 360 bp, Proteus mirabilis; identical to SEQ ID NO: 291757

SEQ ID NO: 308263 - DNA, 807 bp, Proteus mirabilis
atgaataaattatcaacgtatcaaaaatcagtgattgcacttttaactacaatagttggcgtaggaataaccagtacctatttaaccacaagtgagctaaagcaaactaatatactattggcttcgtcaattactattcaaaatgctacaaaaacagaaagtgctggtgtaaaccagtctttaagcaaaattttgtctctgtctgaaaatactgagccggtccaacagcctgaagctcaacctgaagaaccaaatctcaatctttcccaagtccagcttgattccaacacactaacttatggcaatgagaatgcgagattttcacttgtaacatacatggatttccaatgtccatattgccaacgtttcgcatctactcctaaaacactagttgataaggcgaatggtggtttagtcaattggaaatggaaaaacagccctctaccattccacgagccaaatgctactgattatgccgtgaaaatgctctgtgctggtgctcaaaacactgacaatcactggaagatcatttcaatgtgggggaatcatgaatttgattttgctaccgcagatatgatcggaatgtttgagttagaccctgttgcgtataacacatgtcttaaaactgactctgtaaagttaactttagataaagacaaggcagaaagccgttctcttggtgtttcaggcacacctacaacggtaatagttgataataaaactggagaaaaacgtgtgatagaaggtgctgtaccaatggatatgtttgtaaacaccatcgaagctatgatgaaaaaatcacaataa

SEQ ID NO: 308264 - DNA, 642 bp, Proteus mirabilis; identical to SEQ ID NO: 291758

SEQ ID NO: 308265 - DNA, 2502 bp, Proteus mirabilis
atgaactatttaggtgcagtttttcccgatataacaatgcaaaacggttctaattatgaaattgcaaatttaaaaacaggtaacattgttgcatcaaataatcttaaaaatttagagaagcaggttcgccgaatgtttataaactggttaaaatccatactgaaatcagggaaagatcccttctcagtagatgtgtcaacatcgccagatatgcaggaatcacagcattccatacttcaaaaaggtgagattgaaattccggatgatattaaatctcaaatagaaacattcaaaatgccgattggatatccgccaaaaattgaaggatatcctgcaagaatcagcggaaaacaattgctgattaaaacccaagcggaaatgatcacaaaaatcaaaagagaaatgcaaatcggtgagctatttgatgaattggtcatgccactactatgtaatactgctgattttatacacttactaccggcttctgaagcacatcaccacagagctcaaggagggcttttacgacacagtttagaagtctgttacatcgcagttaagcacacaaagaccactgactttgatagcaatgaaacccctgaagaacggtctgctaacgctttgaaatggcgtcttgcagtggctgtaacagcattactgcacgacattggtaaaccagtgtctgactatgaaatttgggatcagactggtgtatatcagtggaaaccgagtggaaaaaacctgtttcattgggctgttgaacacgatatagaaagatattttttacagtggaacaagaaaaggcataacaatcatagaattatagcaccttcgcttattgaaaaaattgttcctgcgaaagtgatagaactacttcagcaaaatagtaaaaacctatatttcaaagttatagaggcaatttctaacagcgataacatggaactggcggataaaaaaacaatcaatggcaatcagttgtttaatattctgttactcgcagaccgagcctctgttgcaaatgaccttaaattgacatcaggtgatgcgatacgcgctgccggttctggtgtatcaactattcagcgtctggttgatactatgcgccaatttatatcatcaggtcgttggaccccaaacgttcctcctagtccgatttggtcaacgccagatggggtctacattatttgggctagtgccgctgaagaattatgcaaagagataaaaaaccttggaatttttatcccacaatcagcagatagtttaggtgagatactattagctcatgatgtaatcattgaagcgccaagaggttcactctattggaagattgcaccaaaaaagttactcaaatcagcgtcgtttataaaagatccagacacgttcttttactgcgtgaaattagcttcagacgaattactatttggcgaaaatataaagccaacacatgcatctgtttatgtcaaaaacgaaacgagttgggttagttttgaaccaaaaacaggaactaatgtagaaatcacaggtgaaaaaactgaaccaactatcgtaaacaatgattttaagcatcaaccgattgatattgtagataaaataataaatgatacacctccagaatctgataatgtaactagcataatggaaacgcttgaagaactagccattatcgagccggtatgtaatgaacaagccgttgaagtacctgaagttcaagttatagcagcatgtgatctcaagatacagggtggtgatacactgccagtaggcaatcctgcttctgagataacccataaacacagcctagggttaaaagaacggattattgccatgagtaaaccgtcagtagcactaccaatgaaatcactgactgatataccagtagctactcaattatctgagcagaaatcattgtttgcagacgtgaaacttgatgacaccgactccgtagagattacaactcaaaagggtatgcatagtgatatctatattacagctgatcttcatatcagagaggcttttgaaatatatctattagggctttcaaaaaaacagttaattagcaacataaatcaaaatcacttactggttgatgataaactcgaaataccctcggcatggaaagccagaagccctcaagcatcgcgttctaaagatgatgaagcgctggtgcttttaagatcaaatttctatcttgttttgaaaaaagaattactcattgatgtatttatcatcactggattttctgaaattgaacaaatgttaaatccagtcattcctgacttagcaacttcattaattgaagatgtcatattttctattcacaatgaaaacgacatttcagaaaaccaatttaaaacgattcaatatatagagttgagtcggacagaacttattgaaatatctgctaagttgggggtgtctcaaacgacattcaaacaaatcatggctgttaggtttgaaagctacaacagccattttggacttcaatttatgcgagaaaaacaatga

SEQ ID NO: 308266 - DNA, 1914 bp, Proteus mirabilis
atgagtgattggaaacatttaatgccatttcgtactaactacgagatgtatgaagtttgtggttggggaaccggtgtattagctacggtcggtgttggtacatatctatcaatgcctctaactgctacgctatctgctgctgcgatacaaagcattttcgctatgaaatcattgccaaatgcaattaaaattgcagtcttgcataaaaacctaaaaaccagaccggctcctacgtttacttcagcctatgatgttgtcaaagaaatgatgaacaatcgcgacacgacattgataggtaaaggctttacatggcggcatgagcatggacaacgggcatatgaaattttaaaaagtggtgttgctgacaggtttttacctaatgatcatgaaagcatggggcacggttggattcataaattagggaattcaaatgagtggatcagcgtacctgacgacttaatgacgctacatacgtcattaactggtactacgggttccggtaaaacgactctttacaaattacttattctgcaagctgctttaaaacggcaacctcttattctaattgaccctaaaaatgatgaggaacttgctgattatatgtacaagtgcatgaaactaatggaacgagaagatgatttttattatctttccattgcacacttggataaatccaaccggatttcaccaatatcaaattattccaactcaactgaagtagccagccgtattatttccgttatccagaaggctgataacacaactgatccatttatttcatttgcgacaatgacgttgacaactattgtgcagttgatgaatttcgcaaacgtaaagcctactcttgtaaatataaaagcacagcttggtactaatttgggtaattttgctgaattacttgttaaagcaatcgacaaattaggatatgagctatttcctgatgtatacgactcacttcttgatcgtagactagaacatcaatcaatgactagaacgacaggaactatcgagaaccatgccggaataagaatcactatctatctgaatgatattgcaaaaattaaggaatatacattcattaaaagtggaattgacctatttcagcataatcgtgaacatttccaaaagatgatattaacggcactacctgtattaagcatgttaactagtgatgggttagatgaagtattgtcaccgtccagtgagaatattgatgatgaaagagtcattactaatatgaaagatatcatcaatacaaacgggatgatgtatttagggcttaattctcttgctgatggtgataaaggaaacgctgttggctcaatatttctaagcgatatcactgctgttgcggctgatatttataactatgcaaaaccgcgcggtgaaaagaaacgcgatacaaatattcttattgatgaagctgctgaagttatcaacgatcaggttattcggcttcaaaataaagggagaggggcagggtttaagttattcattgcctcacagtctaccactgactacgttgctacccttggctctgaagcgaaaaaagaacaagttagtataaatgcgaaccataacattgcattacggactatcaatattcaaggtcaaaaagatttaatagaaagaataccaactacaaatttcaagtacatccaaagagggcatggtacgagttcgggggaagatccagaaaaaatcaccggaagtattggtgagcgattgatggaggttgagagtgagttatttcctccacaactattaggaaacctcccaaatctagagttttgcgctattttaaaagcggggaatatatgtaaaggtcaaattccaattgtacaattaccaaccagcgaaaaagaagtattaaagttaaagatgctaatcaaagaatttaataaggcacgttaa

SEQ ID NO: 308267 - DNA, 351 bp, Proteus mirabilis; identical to SEQ ID NO: 289243

SEQ ID NO: 308268 - DNA, 660 bp, Proteus mirabilis
atgtcagccgatacacaatctaacggtagctcaattaaaaaactgttacttacggtaacagttttactcattatcatgtcattgtttatccctgctgaatggtataaatcaaacatggttagcgagttaaaaatgggcgaattgattactggtaaaagtggttttcatagccagattctcccatttgccaatgagttatataatgacttttttgttcaaaccggtatcaactctgcgttaacaaattactatgcaccattgccagtgtcagctgatccgctggagcaaacgtttaacaatataagtgggattttctatccatttttcattaacttagcgaaaatgataaattaccataactatatgattgtatatcgtatggctcttttatcattttggttgccgttcttttgtatcattttagtaccctcactcattgccggtgtttgcagatggaagcggaagcaatacgacttctcatatgtatcaccctttttaaacagacgtagtatgaagctcatagggttgactgttttcttggttgcagtatcaattttgataccactgcccgtaccaccagttataaatgcagtcatgacattatttgttataccgacttccattattttaatgatcagtaacctccctaagcaaatctaa

SEQ ID NO: 308269 - DNA, 303 bp, Proteus mirabilis
atgcctctgtcggggggtcctatgcttaataaatccagtcatttaattacgtcagttttagcgagtatttttgttttcaatatcattacgttggctgtcaattttcatttgtctaacacgcttagaacatttaatagcgatatttcaaaagtcacattgagctctgtctatcttgaagatgaaagcgaacttgtattgaagttatttgagctcactaaagatgaactcgaagcgactaatcaaatgccacaaaggaaaatgatttctcgtagcgatttaatagaacttggtcagaagaaatga

SEQ ID NO: 308270 - DNA, 792 bp, Proteus mirabilis
atgaaaaaaataacttttacacacgtcagtgttgttgctcttgcagcattaactgcttttacgggtacgaaaacatactttttaaatgctgatatgaatgaaattcagatagcagttgacagtattgaaatacctaaaatagccaatgatgatgatttggcgaacttttttagcacgtatatcgctgcaactggttataaaccaacaactctaaaaacacctgaacaaatctcagagagcaataaaagtacactcgaacaaccgtcaccaacgaatgatcgcgtttacgggaacataaatgcaccatttttattgattcactattctgattttgagtgtccgtattgcggtcaggagtttcctgaattactcgatttcgttgattcatccggcggtaacgtagctcttgtgttcaaacacacacttggtcatggtcaacgctcgctgtatctatcaacgttgacagagtgtgcatatgcgcaaaagggtaattatggtttttttgaagttgcgaaattcattttcgattctcaacgaagtggcggatttagcacgcctattgctcaattagcaagtagttatagtctcgatgagacagtgtttcagagctgcgtaaacagcaatagcagcaacgcgaaaattttattcgatacacaagaagccattggtcttaactttgaccgaactccaagcactatcgtttcatatcaagaaaaagcggttccgttacaaggcgcagttccattaaacgaaatcaaagcagtaatgggacagttaacacaagtcaattag

SEQ ID NO: 308271 - DNA, 285 bp, Proteus mirabilis
atgagtaaggtagtaaatatatctcacagtgttgatgatccacctaagctatttttctggaccgttgacgagctatttccattcatggtcatgatcggtattggagtttttactggaaaattattaaccatgatcgcggttggcgttgttcttagcaagatatatggacgttttcttgataaagcatctgataaatatttagcccatttggtctactggcgatttggcatcggtgacaacaaaattacatttattcctgattcatttgacagagaattctactga

SEQ ID NO: 308272 - DNA, 654 bp, Proteus mirabilis
atgaaatttttcaaaatgacaaaaacagtttccagattacaggaaacatcaaaagtcctatcactatctaatttatgcactggcttcattgcgattgggttactgttacttctgtacggaaagaatgaaaagatcattattgttccgcctaacttacaaacaactggctggattgatgaaaatgaaggttctacggcatatatgcaatcgtgggcgagttatatcgcaacgttacttggcaacactaatccctcatcagtaaatttcgttaaatcctcattagcgccgtttctttctcccaatagctaccaacggatcatgctaagtattgatgatgcaatcagtcagataaatcgtgaccgtgtatcactgtcatttacaccaactcgcatttcaacagacccgaaagcgaagggcgtctactttgtcgagggttcacaagaagttaaaagtgtgacagggagaactacgactaagacagttcattacattgtcacagtttatattcgtggctataagcccgttatcgaagatattcaattaaagaatggggatgcatatttgccgacttatgagcaggaagcaaacggcggtgtgttaccagatgattcacagtctaaagaaattatcgaaggaagtagaataaatgattaa

SEQ ID NO: 308273 - DNA, 1002 bp, Proteus mirabilis
atgattaattatcaggcgaagttcaattgtaaggttttgcttctttcactagctttgagctcattcgcttcagcgaaaactatttctgtctatggtcaggatcaacaaccttcaggcggtgctgagaatcaatccagctcgattaaagagattgcttcagacgacctaaatattcaaccggtgccatcgtctgtcatttcatcaaaagctaaaactaattcccgtatgacatacacaattcgttcaggtgaaaacacgttaattccagtctcgttaggacaacctaacagaattgttacaccgttttcagaaccggttgttcaaacgataaaaaagaatgaaataaaaataagacaggagggtaatgtaatttactttactgcattcaaagataaccctgttgctatgtacatcacgaataaaggtgatgaaagtaaagcaatctcattatcccttcacccacaaaaaagaccacctgttgaagcaacccttcttttagaaaaagatgatggaaacatggctgtatataacagcggtaagtattacacccccacagcctcgggtaataaggacgtggcggataaatgggaaaaaagtgactcatacactcgtaccattactaaattactcaggagtgttgcattaggtgatgtacccgctggctatgaaattatggggatcaataatgctggcatttctatacctaattgcgcgttcagaacaaatagcccacaagataatatcaaatacaccttcagcgaagggcagtatctgtccggcagtaatttcggcgtaataattggtgtagcgaaaaacgttggtaacacaactgtcactgttgatgagtcactgtgtacgcacccaagattagcggcaagagcactttggagtaataacacgttagaaccacagcaatctactgaggcttattttgtaattcgtaaatctaatacggcagaggaaacacgttctgaaaattctcgccctcgtttagcggagtaa

SEQ ID NO: 308274 - DNA, 1293 bp, Proteus mirabilis
atgtctatcaaagaccaatacgaaaacctgagccccaaacagaaaaaaatagtcttatggggtgggggagggttattactggtaactgctttgtattttttaaccagtgaacctgattatccaactgctgtatcggctgtgaataataaaccagtgacaaatttactcactaatgctgacacgcagggcgttagccaagaatcaatcgccgctgatttgcgacgaattgatgacagaattgatagcctgttatcagtacaagaatcgtataaaaaggaagttacacaactgtatgctcaacaaaaaatattagagaatcaaaaaaatgatcttgctactgagctaaaagaacagcttgataagcaagtaaaagagaagatgaacacaccggattatacgaatagtttctccaataccggcagatcatcaaatcaggtgggaggtggtcgtaatctgaatgatgtttatgaaaatgatataccgtacagtccgaacacaacacaggaagcaaatacgtccggatcagatgaagaataccctgagctgacgacctatgatggtacaaataatcacgactcagaatccaaagcgaataatacattatcaaaatccgaaacggatgcaaatgtgagccctgagctggaaggaacgtacttaccggctggctctattatttccacagttgctttgtcagggatggatgcacccacagcgaaagcggcaagagaacacccttatccaatgttagtgcgagtgaaaagagaagccattttacctaataactacactgcggatattcgtgattgtgcaattattagcagtggctatggcgagctatcatcagaacgtgcctacttacgcagtaacacgatctcctgcatcagagaagatggggcagttattgaagcaacctttgattcgtatgccgtcggagaggatgggaaaatcggtattcgtgggcgcttagtaacaaaacaggggcaatatcttgcgaaagcgcttattgcaggatttcttcaagctggctcggaaatgttcagtgttcagcaaattccgtctatcacgttaacacaggacggaataggaccaacacagtcaccttatcaacaaattaacagcaataaggtacaaggtgcagcaatgaaaggcgtaggcagcgcactcaatcggttagctgacttttacatggatatggcacaagacctgttccctgtaattgaaattgaccctgccagatcaatagattttgttgtcacaaaaggcgttcaacttcaattcagacaaactaattaa

SEQ ID NO: 308275 - DNA, 513 bp, Proteus mirabilis
atgaaatttttactattgccactgatggttttaactaccctttcattaaccgcctgttcatctcttatggtcggtgaaacagagtttggctgtaaaggtatgcctaattcagtaacgtgtatgagtgttcgtgacgtacacaaattgactgatggtgaaaactatcaagaaaaaattgatactgtttctcaaatgcagctcaacggagaagtagtaagcaaaagcgatatggataacatactcaaatcagaaaatagtaaatgggttggtacggagtctggacaatatgtgcctgtgccaaaacctgcggcaaacccacaacccattagaagcgagtcgatggtaatgcgtgttttaatcgacccatacgaaaacacagatggagatcttatcatcacagggtatgtctacacggagatatcgcctcgtaaatgggaagtcggtgtttctcgtccagatcgcaagcacaatgcggttctcaaaccactacaaacaccagataaccgaaaatag

SEQ ID NO: 308276 - DNA, 765 bp, Proteus mirabilis
atgaaaaataagatacaccttagtttaatctcattagctttagcattcacaaccgcacacgctcatgcgaactatgctgatatcgaaaaaacaaatactcagactgttttcaatcaagaagcattaaaagcacatcccacaaaaacgcctgatattcccaaatttctattaccaagcaatgggataattgcgctaaataacaatggtagtttacagcttcttacctcgaatgggcgctttgttatcaagggaactttatatgatacatgggcgaaaaaagatttaacctcgtttgaagaaattcaaaagtacggctcaattattcctgtaaagaacctcaatattaaaatggatgatttgcagtctgcaacgtggggaaaaggtccaaagcagaccattattttcactgacccgttctgcgttcagtgccatgaaacgttacaacaactaaatgatcttgaccctgagaaatacactgttcatgtactttccgtaggcgttttaaacagtaatagccagcaacgcaattttgaattgtattgtgcaaaagacagatacagagctgacagggcaatcattactgggaataacagtgttcgtttcgagcaaattgaaaactgtgaccgtgaggctttgatgaaaagggaaattaccgcacaagtttttggtgtgagcatgattccattcattattcgtgacgatggtacttacaacgttggtaaaccagttgaagggttaaagtcatttttggagagtggtaaataa

SEQ ID NO: 308277 - DNA, 2550 bp, Proteus mirabilis
atggcaacagcttctatcttaaaaaaaatgcaaacctttaagcgtttttcatctttatgtccagttttagctattcatgacgatgaaaacatttttatttgtgaaaataactatattggttttggatttaaatgtattcccttgtctggtacaaccggaaaagagctctctcaattaaaaacacttttatctgggtatttcccaaatagtaccgttattcagatatctttatttgcctctccaaatatcagccacattgcaaatagatctgatttcttacgcatgaattgtcagaatcaggttatgaaaacgacgagcttaaaacgctcgcgttttctgttggctcacacatcgaaagcgtttaacggcacaaatacaaaggctcgtaactgtgaattatactttacagttaaagtgcctattaaaaatgatctttctccttctctgaatgaattaaacactgttagagagatgcagggtaactttgaaaccacacttagaatgacgggtttcgcacctcagcaactaacaagagaaatatatcttaccgctatcacttcaatgataaatcaaggcagtaatgcgacatggcgcgacagaatgccgattgaagttgatgaagacaaaatgatttcggaacagctactagaactggatagtttgtttttcgttcgctctaattatgtcggttttggcaatccggaagatgagagtagtaaggcagagacaaacactacttttgcaagaacaatttcagctaaaaagttacctcgtagatttcaagaaggttctgctcagtattttttaggcgatttgatgaacggtgcaactggtattaaaaacccttgcattatcacaatgacactggtttatccggaccagcagaatgctaaaagtacatttacatcaaaacgtacagttgctacgcgcaacgctgatggaccatcttccagatgggttccatcaatgaaaactacgagtgcgggatttgatgtgttggcacagaaaattgatgatggacagccaatttataaagctgcttttactgtttcaatttttgccaactctgtgcaacaacttaatcaatcagtacaagaggcaaccagttacctcaacaatctatctttcaaaatgattcccgatgtcaattttgttgcaccgatatttttaggaacgctgccattattttatgaagcaaatgctgacaaagttttaggtcgttctaaaactcttgcggtagaggaagctctcgttctttctccactttactctgattggcaaggtactggtaatccggttctaactcttacatcacgaaatggtcaggtccagacaatggactttttccaaagcgatacaaactacaacgtttgtattgctgcatcatccggctcaggtaaatcattcttaactaactatattatctctgcataccgctcactaggcgcgaaggtatgggtaattgacgctggcgactcatataaaaaattgtgtcagatgtttgatggttcgtatgtagatttccatccatcgactaaaccatgtcttaatttctttgaaattattgaggattattttggagaggatgaagatgctgaagaaggaaccggtgaagaagatttagttattggtttgctgtcagtcatggctgcaccacaagacgggttgggggattttgaaacatcccgtttgaaaaatcatgttgccaaattagtcaggaaacacggtaaagaaacaactatcgacatggtagcagactcctgcaaaagcgatcctgatcagcgcattaaagatattggtgagcagttatatcctttcacaaaagaaggtcaatacggcaaatattttactggtaaaaacaacatctcttttgataatccgtttactgtacttgagttgggtcgtattgaaaaatccgaacacctgaaacaaatcattttgatgcaattaatttatcagattcaacaagatatgtatcttggtgatcgtgatcaaatgaaaattgtgatcatagatgaagcatgggcgttactgacagggaacatcggtgcatttattgagaaaggctaccgccggttccgtaagtattacggcagtgctattacgattacccaatctatcaatgatatgtataaggaccgtgtcggtcttgctatcactgataattccgcatttcttgccatgcttggacaaaccgaatctgcggtgaataaagcacgaagggaagaacgtttgccgctcgacgaagccggttacgaatttttgaaaacagttaaaagccaaacggggatctattctgaagtctactttatgagtgctatgggtggcggaatttgccggttcctcgttgataagttttcttacatgctttacacaacaagagcttctgaagtacaggcgattgaggatcgtctgaaacagggacaagacgtcattgatgcaatcgatcaatatttaatagaacctgaaaactgtgccataattttcacgtcgagatgtttcgacgcgaagcaatggagatcagctggtgacgcaaagcgttatagataa

SEQ ID NO: 308278 - DNA, 243 bp, Proteus mirabilis
gtgacgcaaagcgttatagataaagttcgtgaagctcttgctgcgaggaacctgacgctggttagtagtctttctcgcatcattgttctgttgcctgagcttggccgagtcaatgtgctggtgcgtagagatgatggcttagaagacacggcaacgttactgcttgatgaaagcggtgtagtgagcgtgctactgtcagaagaaggtgagaacgttaggtttttgcctcgttccggggagtaa

SEQ ID NO: 308279 - DNA, 324 bp, Proteus mirabilis
atgaccactcatcaggaaacactggccgctttgatcgacgcactggaatggattgacgcagtaccttccgacgttccgttgccatctatgccgggttttgaccgtgatagcgtgaatgagctggtggagagagctcggcaagagattaagcaaggtgttgaagtgacgttctacctgccgggaacctaccagacatcctgtgaagaaggtgagaaatatctttgccctcaagaggtggaagaagcaattatgactgcgggcagtaatgtcgggcagcaatgtcgagcatcttggactgagattttaggtggaaagtgccgctga

SEQ ID NO: 308280 - DNA, 279 bp, Proteus mirabilis
atgataaaatctttcaagcacaaaggattgaaactgctttttgaaaagggtgttacttctggtgtgcctgcgcaagatgtagacagaatcaatgaccgtttgcaggccatcgatacagcgacagagattggtgaactaaaccgccagatttacaaattacatccattaaagggggatcgggaaggttactggtctatcactgtccgggcgaattggcgcattacttttcagttcattaacggtgatgcttacattttaaattatgaggattatcactaa

SEQ ID NO: 308281 - DNA, 315 bp, Proteus mirabilis
atgagacaattcaaggtttcacatccgggtgagatgatagcccgcgatttagaggatatgggagtgagtggtcgtcgttttgctcacaatattggtgttacaccagcaaccgtatcccgtctacttgcggggaaaactgcgttgaccccttctctttcgattcgtattgctgcggcactggggagtacgcctgagttttggttacggctacagagcaattatgatctgcgccagttagaaaaccaaatcgatacatccgggatcgtcttgtacggtgagtcgaacgaacagcagcagaacgcgcaagagcattaa

SEQ ID NO: 308282 - DNA, 369 bp, Proteus mirabilis
atgaaccagccactgaccactgaaattcttgagtctgcacctatcttaccctttacctgcgagcattgtggtcgtgtctatgatgatgaggctgcttgtcgatctgatgattgccccggcgagaaaacgccgcttcgcatttcagaaggtaagaagcaggtctgtatccaaggtgtagcctattcaattcctgcatgggtgaattttgtcgtagctgattcaaattttgactggtggggttttcgtgatcatccaaagtgcggccacactatctggtatggttcgctggtggctgattcaaggatgtgccttatcgtcagtaatgttcaaccggataagcactggacgaaaacacttttaaccgtctga

SEQ ID NO: 308283 - DNA, 921 bp, Proteus mirabilis
atgtacggcaaaatcagcaaaatggtgatcggtcttttcagtttgttattggctctatccttctcagtggaggctggctataaatccagctacaagagttcgtatcgttcatcctacaaatcgtcatccagctatagcaaaccttcatcctcgcccagcagcagctccagcagcaaaaacaacgccagcagcagcaataaaaccagtgccgaatctacagcgacgggaagcggcgtaaagaatgagccctcagccgcaagcagtccggtggcgaagaaaagcatcagtggcgcgaagctggtggagaacaaaggcaaaattggcacaaaagaaaatccggccgcattttcagcccgagataattcttctcaaaagttttccggtacgtcggggcgaagtgcttcgtacatcgggacaaaagccccacctgagaaagtgagctccataattgatgagcgcaagcgtagcggtactgactggacaacgctcgcgatgatgtactggatgttgagcagcagtaatagtcatgcctcatctctgtcctcaagtgataaagcgtggatccagcagcaaatccatgagcaggaaagtgtgggtgaaagccgggaagtggccctgaacgagctgaaatcagccggagttgatatttctgatgtacaggccagtgatagcccaccagtagagtttcgctatgacatgccgaaaaacctgaccgctggtgtggcatgggtctttacggtaaaggctacccgcagtggtgaaactaaggcaccggaatgcaaactggaaggtgctgagatcttaacgcgtggtaataccgtgttcatcaaatggaaagccccggctcttgctggcgaatcagctgagctgacgtgcaaggctttcgggaaagaagaagtgaaaacgctggtgtctgtctga

SEQ ID NO: 308284 - DNA, 177 bp, Proteus mirabilis
atggctgattttgcatcgacaaaagccacgagctcttttgaggaatggtttgagcagctgagcctgattgctgagcttaacggtgacagcgtgggtgaaagtagcggctgggaagatacctacaatgcaggtacgcctgtagacgtcgcctactacgatgcttttggcagtgactaa

SEQ ID NO: 308285 - DNA, 438 bp, Proteus mirabilis
atgatggataacgaggatgctgtgaacattcttaccagtattggcgcgaatatggactggagccggatgatacgcacgtcatctcatccagcttttgggcagtttgtcattaccgggccaaacagcttgccagtaagtaaccgggtggggttctgtgtgcaggtgcgtcgtaaggtcggtcagttcggatcagacatggtaatcctgcgtcatgcagatggcagcttatgtatccatgagaacaactgctacgttgctcttactgaggaacaggaagagctggcgcggggcgtttttaaggtgctgccggaagacgagagcagtgagcgcgaatacggcgcaaatggcgtgtgggaaactgggtttgtcattgagaactcagaaactaaaggcacgcccgatgtacctttcgttatagcgatcaccactgaaaaatag

SEQ ID NO: 308286 - DNA, 516 bp, Proteus mirabilis
atgcgtacaatttgtgtgaaagatgcgaaattccatgtggtgaacatgccacgggtaaattacaagcagttcagcaacaagatggcgctgaaacgtcgcttgctagatatcgctatccggttttctgtgcgaatgggtatcccggtgtttctggttggacagccgggggtgggtaaatcactcatgctgaacagtgcccttcccggacgcgtgaccgatgcacgagagctgatggttgctcaggactgggaaatgcccgctatgttcagtaccgaatatgtgcctgctggcccagtgggtatagacgagacaatatatttcgacaaagacagtctcttagcgtgtgctgatgagttcaaaaatcgcggcgtggcttttgcgatacaaagactggatgacgctatcagcgtagccagtgaactaaagataagccgtgcatggtttatttatctcggtgagcctgagcacttcaaacgtgaatgcagatatcagctgtactcgcagggattagaataa

SEQ ID NO: 308287 - DNA, 315 bp, Proteus mirabilis
atggagttttctcactactattgggctatctgcggtaactgcgatggcgaaggcaaaacgggccatgaggcgtttgctaatggcattacggcaagcgagtggaacgaatgggatcttgaagaccgtcagaactacatggatggtcggtttgatgtcacttgtagcgtctgtaaaggccgtgggtcggttaaactgccggacgtgtcccgtatgaactttgcggagaaacgtaagcttgtggaactgcgtagagatgcgcgtattgaaaatgaactgagaagagaacaagcctatgaacgttctatgggcgcttaa

SEQ ID NO: 308288 - DNA, 261 bp, Proteus mirabilis
atggcaaaaagccggggtatcgatctgaccttttccgaaggcatcgggcatgatgatgggacattgctgtgcttctgggaacttgaagaggaaagcgagtggctattcagctatcaggtgtcaggccaccagcttgagtggcacggcaacatctacgcctctgacagtattgtggctggccttcccccggtgatcgctgatgatgcggccctgcgtgctgtagtgcgacaacttgccgttatgatgcagaaagaaaagtaa

SEQ ID NO: 308289 - DNA, 1068 bp, Proteus mirabilis
atgagcgacatcaacgtacaggaaatttttgttaaatctcaggacaactcagctttgggtgagctggcagtaaaaatggcggaaatggaaaaaaaacctacttcacttcgtcagatcagcgatttgttggcgaaagtgaaaaaggaaaattctaccgttctgtttgatgaggccagtgtgggacgtaacaacgggtacaacgtttctcctgcatggctgtatgttgaagtcggttttaacctgcgcaacctcaatcttgagcaggtggaaatgttcaaagggatgtggatgcgtggggatcgaatcccaccaatcttggttaaagccgttattcttaatggcgtgacgcgactcaagatcattgacgggcaccaccgttttgctggcctgatggctgcgattcaagctggtgcgaagattgcttcactgccgattgaagaatacacaggtaactctgccggtgaagtgtttgagatgctcaagagcgctcagggactggctctgaaacctatcgaacgtgcagaaggtttccgtcgtcttcgtggctggaatctctccattgaagaaatagcggcgggctcaggtaataacatccagaccgttcgccgctctctaattctggttgaggcagaggaaaacgttaaggagttggttcgcgaggacaaagtttctgctgacgtcgctatcaacctgctggtggagtgcaagggcactgagcgtaacgtttacgaagagctgatggcctctctgggtgaagcgaagaaagcaggtaaggacaaggttacggcgcgttttgtgaagtctaaaaaagtcaccgtgaaaccaaaggctatccgtgaaaccttcacctctctgctgccagccagcaatcaaatccgtttgcagatcgaacgtgtgaaaacggaagacacgaaagacccggatgatgtgagcattaatatcccggctgatgctgcccgaatgctgctggctatccttgagcagtatgaagcaaatcagaaaacagatactgatgctgatgctgatgctggcgaagataacacagccaccgaaacaggagcggcttga

SEQ ID NO: 308290 - DNA, 330 bp, Proteus mirabilis
atggatattcaggaaaaacaaattgttgaacgccggattgtagaaactgcggctcaggggctggtggatgccggattcggtatcgccgtttatgacggtgaagaactggtaacggaggtaacagacaacgttagcagcatcatggaagcaatgttctctactgatgaagagtttctttacgcctacgacagtgatggtaagcatgtaggctgggtacatctcgtttacggcaatagcggctgggacgttatctctgataacaccaataaccttgaagatgccctgatcgcggcaaccgaattggctgaggaaatcgcagaccagtcgtag

SEQ ID NO: 308291 - DNA, 555 bp, Proteus mirabilis
atgaggctgtatcgcccggtacggcctcacccaccagccagatacttcgaccttgccctaccctgtgttaactctgtatgcagcgaatttgacgttatgtatgggttaatcatgaatggattcctcgggcaatctattgctctcatttttacaggcgcgggcctaatgctcttctgcgtgatcccttcggtacttctgacgttaagacagatattgaatgcagacagtcacgcgctcagcgcgtcggtcagtgagcctgcggtggtactgtactctgctggagtgacgaacctaaaactgtttttcgtctatgcggtggtgtgccctgtgtacccggaactttcgggccttgtgctagtggtcgtatcagggatggccatcattaccaacgcgatacattctgtatggaaatgccgcctcatcatccggctcattgagagcgggcttatccagcaaagcgctccccaccatcgtcgttacgccaagaagctgacaaggcaacacgacaaccttcgttgcctcgcggccctgttctggcgaatgaaaaataaatga

SEQ ID NO: 308292 - DNA, 519 bp, Proteus mirabilis
atgtctgcattaaccccattacaagcgctggatgtgatgatcgactggctaaacgctaacgttgatcagggcaccgatatcatttttgataacgatgaagataactctgactctgcggctgtccttcctccgttgcaggtactgaggaaagcattcaagcccggagaaggagaagctaagtctaaatctgaaagcgatacgcaaaacgattttgagaagcgcaataccaatgcagggtttttacatcgctatgtgtctgatgattataagggagaggcccatatcgttgagtgccccagctgccttgccgtgtatcccagctatgaatcctatgaaggaaaccaagtcagtgatgaatacggcatacattgcccgcattgccacgctaaagacccggatgtgtgtaccaacgtcgggttggcgtggaacgtgcaacaaaagcgcattaatgatctggaagcgcaacttcaattcctgcgggaaacttacgggctgcaacataatttcaatcaggactaa

SEQ ID NO: 308293 - DNA, 423 bp, Proteus mirabilis
atgaaaaaaaacatcaaggaatggtcatttgttctcagtgttgtactgctcattgcaactgcatttgtttttttgagtaccacaaacgaaaagctgacaagcgatcccgattacttcaatatcctgtcgttaacggataatgaagattatcagccgcaaggtatccgtgaggaagttgcacgtattcctcagacgagtcaggtcgctattgtcggttatgaaaagcagatcgatatgccgactcggacgttagtcatgttcaatggcgaaccagtgtttctcaaacgtgttttgactaaagaggatactgctaacgaattggattttgtgctaatggcagataacagtgtgtttatctgcctgcatgagcgcattgatgaatgctggcctgctgatagtctgtcagcaacaccggagaactaa

SEQ ID NO: 308294 - DNA, 744 bp, Proteus mirabilis
atgagtatccatcaggctattgccagcaacatcaggcagtacagaacaatcccgaaaggcagctttctctggctcgatgtgcccggcgcggatgatttgcttgatagccgggaggtgaagagtatcccagccctgcttgagcgctacgggccgcttaacgaggtgatcgttcaccttgataccccggaaggtgactttgaagatgaatttcacttcgatgttatcgacctcaaaatgccaccagctgtaccactgaaaagcaatggtgcgagagaggcgcgggatgcagtcatagcgaacttcgggcaaaagagaattgagcatgtagagtcgctggtggagttttacgccgggcacctgctgtcgcgatttcgcaagagtcatcagtacactggcccggccccgaaaatcaggacacgctggcacacaaaaacttcatggggtagtcgtaaccggataaccatttcgccgggatatctgtatcgccctgagtccgactacttcggatacaccttttgggagtaccagcacgttcgccaatcccccttaataggctgtttcttttcgctgaaccgcctaaatcatgtcaaagcgctggtggctcatgagctggcacacttcctgcaattcaactcaaggtatgccgtattgcctgagttggattatgctacagcccacggcgagggatggcagtatatctactccattacccgcgccgatcttaaccggtacatcaataactaa

SEQ ID NO: 308295 - DNA, 282 bp, Proteus mirabilis
atgaaagtaaaagaacttattaaattattgcaagattatgatcaggattcagaggttgttatcgccgggtatgaaaccatatgttcggcatacgttgcagaagctgatctggtgaaagcatgtaaaactgtacagcgtcgttctcctgacagcttagatggaaacaaagagttgaccaatgaaggggatccatctgtctggataggatggagtggcgactacagaacaccgcaacaacttgctgctattgaagacccggatgaaatgaaggatcggccatga

SEQ ID NO: 308296 - DNA, 378 bp, Proteus mirabilis
atggcaatgaataagaaagagaaagaagcgtttgaagaagcccggagctatcgcgccctgcgcttcactgaccatcctacttctaaggatctggcaccgggaagcgagttgataactgggtacgattacagaaaaccatcttttactgaaagcatgatttcgattaaaacagcatggtctacccggtcaaagcatggcgagggcaaagccccaccaccagcgaacacgtttggtggcgtgtctcgtgatggtatctctctatactccagtcgtaagcgtgctctgggtgcattgcgccgtgagcttgaaagggagttcgccagaatactcatgaaaattgatgatgagatcgcagcagaagaagcaaaagaaggataa

SEQ ID NO: 308297 - DNA, 294 bp, Proteus mirabilis
atgacaacgcctaacgccccaataatctcgaccgataatacctctaccctgccctctgtgcgccggatggtgccgcgccatactgggaaactcgttcgtatcaccagaactacccggctaagcagcgctcatctcggtaactgtgagatttgcgatcagcatatgacggaagcttttcattcccgcgtggggagggaaatggtacgcgccaatggtactgtctacattgagcatacctacggcggggtttatgcacatgaatcctgcatagcaaaagcagcagaaaacgactga

SEQ ID NO: 308298 - DNA, 366 bp, Proteus mirabilis
atgttcgacaaccttattgataatatgaaattttacaccgcaacaatcttctcgattgttatctggggggctgctattgctctgttcgtctactatcacatgagcagacactcatttttaaatgattttttatctccagcagtcgttaacacagtaacagcagcgttagcctatattgggttacttccccttctcaactatgcggctgacaaagaacagttcggctctgttgtcggggctgcgcgtcaaatgagaatgttctctgaacgtccttggtatggggagggaagttatcaattccttatctttctcgtgataatcctgagtggtttcatcattgcatgggttaatcgccgtcgttactaa

SEQ ID NO: 308299 - DNA, 660 bp, Proteus mirabilis
atgggcaaccatacgtttttaatggcttcgctgcgagacaccgtgggcagcaatatgtcgtttcattgtgttgatggcgcaggttacaccactaatattgataaagcgcacacgttcactaaggaagaggcgcagaagtattgggatcatgcccgctcgtttgatttacccgtatccctgcactgtataagcgccctttctgtttatcacgttgattgccagaacgtcccggctgaaacaatgctggtggaaggatgcgagcaatatgttggctttaaaaaatcccgctgggatggtaatgacctgtactggttgtgtgctgatggtgccccagtaacagactttgaacgcgccaaaatctacagtaagcctgacctgagccgcgatgatactatctggctaccctttaccgttgcagatgtcgttaagcgccggacgtttgcggtggatgcccttaaccgccggacgatgattcagtctaaagggttggttatgccggggtggttaaagcgtgagaatcgccgcaaagcgaacttcacgggtaaggttcgatggaactgtccgggatgtggcaaaatccactggcaattaaatccctatgatttcgacggatgcgctcactgggattgtcctgaatacgttcgtcgctttgaagactga

SEQ ID NO: 308300 - DNA, 426 bp, Proteus mirabilis
atgaacgagaaaatagagataggcagtctggtcttttgttacctgagagagcgttatgttggccgttgctatggcctgaaaacagttgtagagatagttcaggaaaatgggcttgatatgtaccgggtgacgcgggctgactgtgatgatgagtggtatcccgctaataatcttgtgcttgctcaattcccaccagcagggacagaaacaaaatttaaagtcggggatcacgtccattgcttcggcacataccagaatcattacacgaccgcgcatatcgagcacatcctgtggtcagatgatgggaagcctgaatactacattaccccgacagatacgccgtggtgtcctgtgcgtgaggatgcaatgaaactcgtcgttgagatgtttgtcgctgatccagatttgcccgtcatgattttttaa

SEQ ID NO: 308301 - DNA, 276 bp, Proteus mirabilis
atggttacgccagaacagcattacgaatttctaaaacagcactaccgcgcctcacgctttgaagagcgcaacaatagttcgtggggaacagcctactcacagcatatagctgactatcggtacgaagagttacagacggtcggctacagccttatcagtagtcacgaatcagcgaccggtgatgcgattatctacgatgcagagctaaacaagctcgatacaatccccggcgaaaaaaagagttacaccactcaggagcacatcagcaatgactaa

SEQ ID NO: 308302 - DNA, 516 bp, Proteus mirabilis
atgactaacaccatccgcctgaattatcctcagcacgttgtatccctgacaatgctggaggctatcgaggtacttaaatccgggccttttggtgtgttcctgacatttaacgacccgcgtaccggcgagttagtacaaaagctattcccgttcttctacagaccacacaatacctatgggctgaaagggcgctgctttgtttctgagtggctcgggcttcctgtctacatcccttcggatctgtccttgttcattgagggacagcaagacctgaattgccagacaagattcttgatacaggaaggcgggtttttatgtgcgggcgattataagaacgaaactttccgtctggagtttttaacaaatatccgagtagacacgacgtttgacactgactttctggaactgctttcgcgctcaggtcacgggcatcttgccacagacgttccgcccggcagagcagggcgcggggaatctgccactgctaaccgcaaaaatgaatcagtggtgtcgtaa

SEQ ID NO: 308303 - DNA, 723 bp, Proteus mirabilis
atggcttccaccgcgcttgtacctctaaaccgactccagcagtgcgccatgtctgccattgcctacattgaagcccggacagaagccgggcgttcactaggcgaatatccctatgcaaaagcctttttccgtgagttcacggggaaggcggggatcacgtccgctcatgtgcgacaggttgacccggcatataaccccagctaccggggagaagccacaaagaccgactacatacgggctatcgacacgataatagaaagcagggggaaaacgtggatcatccccctgtcaaaagcggttatcactgctatgttcccggctgtccagtctggtgagcatcagcgaataagtcatcgggagaaaatcgccactgcccggagtgcccgccgcgagcaaaaacaaaaacgcgaagaaatgtctgcgtctgaaaatgcccaaagtgcggtatgggtaggtttgcaattttgcctgccgggggaacataaggcgtggctggctcactggcgagacgaattagaaatggctggtgtcagtgactgggaacttagaaatatactggttcgctggtggggtgcattctggattgcttctgcccctacagactggcgctggtgcgataccctgtatgacctgcttaatgaactggattacgtgataagcacatctagcgagcgcgacctgtgcctgtgtcgctcagcccttcctctggcactaccggcataa

SEQ ID NO: 308304 - DNA, 282 bp, Proteus mirabilis
gtgtatctgcggtatgtctcaggtttgatgggttacgacgcaggtttccatcccgatcagaaacaggtggtgctgtctgatttgcttcaacctgagagtgctgtcagttcctgccaactacaggtgcgcggggtgatgggaaacccaaaagcaatcgctccgatggcacactctccatcaaaggagagaacgagtggtaactctggcaactatcctgctggttttgcagattgtgcatatcagcttgcagattatcgttgtgatcaagcaactgacccgtag

SEQ ID NO: 308305 - DNA, 324 bp, Proteus mirabilis
atgattgatacacttaattactatcaagacctcagcccctcagcaaaggctactgcccgtactcaggttgtcgcctgtgaagcagctgcctataagaccgaattggctctcgcggtgtcctgtgctgcaaccagcagtattcattctcgcatcagccataacccaaaccgcatacgtgcgctctcaaataagctgcgtctgatccgtcattatcagaccgcaccaacggaaaaagttgaaaaattcattgaagaaaatctgtgcatgtttgatgctggtggacgtttttacctgttcttaaagaaagcattctttcaggcgtga

SEQ ID NO: 308306 - DNA, 1293 bp, Proteus mirabilis
atgatgttgtttgtagttttgcaaaaactagaacgtgtcgatatttctgatataatcctaaaaaaacaacacatcaaaggggttcatatgtcagataattttgacagattgttggacacgggtaagcgtgccagcatcatgcttaactggctcaccgaccagatccaatctaaaagggatgagcttgaccagacggagttctataaaacgtattcaaaagccgccgtcgtaaaaatgccgcacctgaccaaacgcgctgtagataatgccgttgaggaaatggaggcaaatggttatcagttcggaaaacgtcatgggggcgttgccactcagtatgctatgaccattcagaacatcagcgatatctatgcgcaccggggtataaaaacctaccgggaaaagcgcggaaaagcgttcgttatttttgttgttaacctgaaaggcggggtttcaaaaaccgtatccaccgtgacgatggcgcatggtatgcgtacccatcccaccttgctgcatgaaaacttgcgcatccttgttattgacctcgaccctcaatcgtcctcaaccatgttcctgaaccatcaccatagtatcggtactgtcgataattccagtgctcaggccatgctcaataaagacctgacccgtgaagaaattctgaatgagttcgttaagccttctatcgtgccgggcgttgatatcatccctgcatcaatagaagatgcgtttatcgcctctcgctggtcatctctatgcagccagtaccttccgggcatgaacgagcacaacgttctaaatgagaatatcatcgacaaaatcagcgacgactacgatttcatttttgtggataccggccctcatttagatccgttcctgattaatactttagcggcaagtcacatgctgatgacccctgtaccgcctccgcaagtggatttccactcaacactgaaatacctcactcgactgcctgagctgattcagatgctggaggactccggtttaccaagcaaaattatcgccaatgtcggctatatgtcgaaagtctcaaataaagatgaccacaaaaagacacatagttttgcgagagatgtttttggcgcggatatgctcgatgccacactccctcgtctggaggggtttgaacgctgcggagaatcatttgacaccgtaatcagcgcgaaccctcaaacgtatgcaggcagtcaggatgcactaagagccgcccgtgttgcagctgaggacttttcccgtgccgtgtttgaccgtattgagctattgaggggtgccgcatga

SEQ ID NO: 308307 - DNA, 987 bp, Proteus mirabilis
atgacccagaaaaaaccaagagaagttctcggaagaacatttagcgaatcacctctttccgggattaacgttccattatccgctgcctctggcgagagtctccgctttgtcctgaaatcaggcagaaaggttatgtttcaaactgagactatcacagccgagcaggttgaaactcgcacctacgttgaccccaaaattaacgggcgtgaccaaaacgctctgacacaggaatcccttgcagacatcaccagtacactgcaaaaccaacagttctttcctgccattggtcggctggtggaagggcggattgaaatccttgatgggtcacgccgtcgtgcagctgcattactttgtggtgttggcctccgggttatgtacactaaaagtgagatgaccgccgaagaagcccgccagctcgcagctgagatacagacagcaaaagagcataacatccgtgaagtagggatgactctcatcgctatgcgtgatcagggtataacgcagaaggatattgcggaacggcaaaacatgtctaccgctgccgtttcccgtgccattcaggctgcaacagttcccgaaaagatggtttctgttttccctattcagtcgttgctggtattcgctgattataaaattcttctgaatatttctattcaggcagagaaaaaaaagattgatatagataccctcgtagcgaatgtcgttcttgcagcaaaagaattagaaaaagagtccctgcaaccagacctttacaaagaacgcgttatgaagctttttgaaagcaatttctcaacgctggaaaacaagccggtaatagaaaaacctgtttttgaaacgctaaaagagtatgacgataagcgtaaatacgcgcgtaaaaaatcagataccagagcgcgaaagtttacgtatgagttcagtcgcatcagcaaagaagcccatgaaaaaattgacgcgtttatccggtctgtcatcgaagaagatagttaa

SEQ ID NO: 308308 - DNA, 651 bp, Proteus mirabilis
atgtcttctaatagcacggcaaccctcaccttcacttttgacggtaacgctccctcagcatggataagcgctctgtcacggcctaacccgtccgattcatggattgacccagaatcgccgggcagcgtggtactgagagagattatgacccattcctctgtcgataccgatgtggccgggaaaaccaaaacacttactgccaacatccctgagcaagcagatgtactgtctgcgctgctcgaggtgtatgtttccgctgatgtgaaaatactgctaatggcagggtgtgagaaggtggataatctgatctgcgtcacgagcaaaacaacgcgtctcatgcctaacggctttgttatcagctgtgagcaaaaggcagaacgcctcatgtacttcatgacgcaaaacggtatctgtgtgctggctgatccaaccattaatctgtcagctgaaaagctgcccggcgcaaccttctttgccagtgagcaagagatggactcggaggggttagcccgctggggggagaacggcggggaagggtggcgaacccatgccaccattcagaacggcagacctgtcctgctgaacggcttcggtaatatgattgaactgggcgatgaacccgaagtaacgattaactctctcagcaattga

SEQ ID NO: 308309 - DNA, 513 bp, Proteus mirabilis
atgaagaatttttcatttaaagcatattggcgtggttttctgctggtggggttaagcgcgggaggctgcgcccttttctttcatgagctgaccatctacctttcaggattgcaaaagccctttccgcttgagttggccttttctggatcgctcatgctggcgctgataatggaacttcgccacggcattaaccggctcgtgttcgttcaggccacggtaacaattatcatttttgttactgctgtgtaccttgccgaacacctgcgctttttttacatggttactgttaacgccctgaaagcggagccactggcaaaagaggtaataggggaggaatactactctgttatcactaacgcggcggtagggtacggcggatgctttgcaatctccattactctcgttcgtctgtgcctatgggggattttgagaaaaatacttttaagggtattaactgaggaaggacaaagcaagatatgcccgtgctgtgggtctgtcatgaaaaccttctga

SEQ ID NO: 308310 - DNA, 258 bp, Proteus mirabilis
atgtacggtacagttaaagaaatcatcgctcatctttctcaatacaaaaatcaagatgaacagattggtacaattatctggcattccgatgatgtcaaagctgctgtacaagattttaacaatgaagagattagtgatgaaattgctcgtgatgccctgaaacatgcgatcagctcacatgatgctaactatggtatcactcatgaaacgctggtatgtgccgctgaattcgttattgaagaacgaaaaaaggcatag

SEQ ID NO: 308311 - DNA, 363 bp, Proteus mirabilis
atgcacgaaaatagctttctcgatgtcaatacactcgtcattacccggcacgctcaggaacgatggaaagagcgtggtttccgtggcacctatggattactggaagaattatcaaaggcgcagctcttcaccgaagaggtgaggggggtggatattatcctcactgagtttatgcgcgtcacgtcaatgtattatgagtgcaaagaagagagaaaatatttcttcactaattggtttatatttgttgtatgtcaatcaacgctgatcacctgcatatcccgaaattctcatgtgaaatacaggaagaaactcgctaaaagcaccaacaaaaagagggtgaacaaccagtacgcacaccgctaa

SEQ ID NO: 308312 - DNA, 657 bp, Proteus mirabilis
atggcatcaagattatctaaatggtttttctggagctactggctaacactgatagtcatggtgttcatcgcagttataggtagtcaggccgtcactcgtagtgatgatttacgtgtctacctcatggcctctcgggtcgccccttacaataccaactgggtatctgtgatacgggacagggaaaagccggataccacggcattactggttaacgtgcccggaacgaacgataaggcgcatatgcgctacatagagtacatgacagctgatttagcaggtatgggtagggaagatctaaagcgcctcatacagagcgatacagaggcttctgtggctaatgaacctgtttatgggaaactggtagatgttgaccctaaaatggcaaaattgcttttttatgatacgaaaagcgacatgttgttgctgggtctgacgctgttctctctgccggaagttatttttctcattgtcacaaccgctgttagcctgctgcgattcgttgtaaagggcagagggcgtcaggcgctggtggttttcacctactggacaaagatatcgtattttgtctcgttcttctgtatgtgcgcggccttgtgggctatgtcattccctgtgtaccgtccggctattcatttcctgagtagcgttttgaaataa

SEQ ID NO: 308313 - DNA, 279 bp, Proteus mirabilis
atgaaaatcatcaaaatctatacacctcatgaactggctctgttgagagatcctgctttcagattgatagtgatagaggctattggtacagatggattcgttgagcaatataatctactaaataatgtctcacttaatcagcctaagaacggtctggaggtattaatcgatcaggctacaggggcagcagataagcatcaacgcgtatacttcaacggacttcttaaatttatctatgaaactgtatacttacggttagaaccgatggctttggggtag

SEQ ID NO: 308314 - DNA, 1002 bp, Proteus mirabilis
gtgtgtgctgaggggaagaaagtgtgtgttacggggatttgggtgtgtgctgaggggaaaaaaggtgggcgtcacggggaaaatgtgatacttttccacaatcgtagcatttacgtgggggggaattattttattatggaaactcaactagttatatctgatgtgttatttggtaacacggaagaaaaacaaaaaccattaacagttaatgaactgaatacaattcaaccagtggcctttatgcgccttggcctgtttgtgcctaaaccatcaaggtcatctgactacagcccgatgattgatgtcagtgaattaagttctacctttgaatttgcaagacttgaggggtttactgacataaaaatcactggtgaacgtcttgatatggatactgatttcaaggtgtggatcggcatagtcaaagcgttcagcaagtacgggatttcgtcaaaccgcatcaaactaaagttttctgagttcgcaaaagattgtggtttccccggtaaaaaactggacaagaaactgagagcgcatatagatgaatcgcttcgtaaaatcagggggaaatcgatctcatttaagcgaggcaaagattcacaatctgcatatcataccggcctcataaagatagcctatttcaatgccgatacagacgttgtggaactggaagcagacgagcgattatgggagttatactactttgattatcgtgttgttcttcaactacatgcaataaaagcccttccacgtctagaagttgcacaagccctgtataccttccttgcaagccttccaagtaacccggctcctatctcttttgaacgcctacgtgaaaggttgtctctgatcagtcaggttaaagaacagaatcgaatcatcaaaaaagcgattactaagctgatagatatcggctatttggacgcttctatggtgaaaaaaggacaagagaattacctcatcattcacaagcgaagtccaaagctaagtgtaatcaacgaataa

SEQ ID NO: 308315 - DNA, 486 bp, Proteus mirabilis
atgggcgaaaataaattcgaagaagccattaagttttatggggataatcagcgtgacgcaagcaaatgtactgccctcagtgtgcagtacactaaaaaagaaaaaaccagtgaactgaccgtgaatgttgagatggcaaaaataatcgacagctcggcagactgggcaaacaaaatctatctccagctctcgaaggatgaactgaccgggctatgcgagttgctttttggcctgcaaaaaacgcttgatgtgagctatcacggtacgaaaaaaaacaagggtctgaaagtccacaataacgatgctaaaggcgttatgctgatcatctccgaagggggaacgactattcagcacatgcttagtcataatcagcgaattgagttaggcgtttttattatccgacgtcaggcagctgcatggcagatatcagtcagtgatgtgctggccgtgttgcgtcagtccgtagctatcagccggatcagttag

SEQ ID NO: 308316 - DNA, 639 bp, Proteus mirabilis
atgtccttatctgcaaaatatatttacgccactgccaaagtttctatgtctcacgtactggatcagaacgcattcttcgacatcgcgtttaacgaaaacacggagtacgtctactcgggcatcaacaaaagcatcatcgtgaatctggacgctgccgggaaagactgggaaagcattgaggccagactgcttaatgacggatggagcactgagcgttttccggggctgctcggcatctttcaatcgctcgttgcccagcggatcgcctgcgtggagttccatgaacatcaccctaaaatgcagtggcataactggttcaccccggagacattcatggaagtaaaacccatcggttacgataagcctctctttgcctataaagaactgccggacgaacagcagaaggaggccaacaaattaatggtagtcgtttcccctgaaacgctaaccgacaaggtttttgcggtcgtaggcaacggtcgagtcgtgaaggtagatggcttgtacgagatggtgcgggagccggatgaaattaaacccgactatgaccgactgatttttaccccaaccaaagagcggctggtgctgaaagtgaataaagataaagacacagttaacatcgcaatgattatgagctga

SEQ ID NO: 308317 - DNA, 219 bp, Proteus mirabilis
atgcggagtttcagccataaaaaaggtaaaggaaaagacaggtttctcagcgcgttagtcttttatcgctatattgcatgttggtttaatttatccataaatgtcgctgtgataaaaattaaaatgaacaatgaaaagggtagggggagaatgtcccttgccgataaaactgttcccggtttgttatttctctgcccgctgttaaaagttgaaagttga

SEQ ID NO: 308318 - DNA, 438 bp, Proteus mirabilis
atgtcactaaaacctatgaaatcagcccctgacaccaaagaaactatccctttctttggcgagctcgtacccgcaggtttccctagccctgctgctgggtgggaagaggctgaacttaatcttcatacgctggtggttactcatccagccagcacgtacttcttgcgcgtgacaggtgactccatgcaggatgctcggatacattctggtgacgtgctggtggttgatcgctcagaaactccagagcagggtagtattgttgttgccagcatcgacaacgaatttacagtcaagaaactcatcttgcggccacgttcatgccttatgccgatgaacccggcatacccacctatctattttgaccctgaaagtaacgacgttgaaatttggggtgtggtgacttactcattaatgaagcacaaaaaatgtatggcctga

SEQ ID NO: 308319 - DNA, 888 bp, Proteus mirabilis
atgggcgagccattctttaaaatcaaagatctcatagaacggaacaatgtcgctgttttcagttcaaactatgccctttattccgcatttagttcccggtttgcatctgttatagagtcactgactccgcgtagctcagtgtattcaatcgatgaactttggtttgatgccacgaatatcactggtttaatgactcttgatgcctatggccgcatgttgcgagaagaggtacagcgtcagacaacgcttacttgtggtgttgggatagcaccgacaaaaacactcgcgaaattgtgttctcatgcttcaaaaacctatccggcaactggcggagttgtcgcgcttgatgatgttacccgtttagaaaagctgatgcggcttgtgcccgttgaagacgtgtggggtgttggcccacggctgggtaaaaggcttcggtttatgggagtggaaaccgcgtttcaactatcctgccttgatcctgttcgggtacgaaagcagttcaatgttgtccttgagcgtaccgtcagggaactccggggggagccttgcatggcgcttgacgaaaatgatgtgatgaaacagcaaatagtcgtttcccgctccttcggtgagcgagtcaccaaccttcatgaaatgcagcaagccataaccgattatgcggctcgcgctgccgaaaaactccggcaagaaaaagggtatgtctctgtaattggtgtttttatacgcaccagcccctacgcagtaaatgatgtaccttattccaatcaggctactgaaatgctggtgactccctccaacgacagcagggatattattaatgctgcacaacgcgcattaaggggtcagtttggatatcgaaaattattgtacgttaggctcattttttga

SEQ ID NO: 308320 - DNA, 885 bp, Proteus mirabilis
atgaacatcgcagaaaccttccatcgcctggaagactctctggcgttgctcaagcgcgtgctggcacaaaagtcgcctctttatgctcgtgtttgtgtaattccgccagttgctgacggcgatgagactttacccgttaaccgcatcgaaccagaattactgtacggtgcccaggctattgaacaaactcagaaagcctttaccgatctgcatatcaaagacgggttatcccaaaaatcgacacgtcgtaccgctggcgtgctttggtatgatgatgaaacgcctgagttcgcggcagaagtcatggcgctaataacgagcattaacgcaataaagctgtcgattcaagagcacattattactggattcagttcgcagaatgcgcgcttctccgcactgcataatgcctgtccgggcgtaatgacgctgcatctataccggcaaattagagcctggcataaggccgatattcagtccattcgtttctcgtggcagaagaagtctttattgcggatcccggataaggccaaactactcgccagcatgcaggccgatgtcatagataatagtgaagtgactgtaccggtcggtaatttggctcagcggatagctaataccccgcaagacaaattacgtctgcgtcgtccggctaaaatacagccggtggcaaacattcagtttcgcgcagatatcgaaggtgaaccgccaacgctgaaaactgtaactgcattaatgccatacatcatcatccagaatcagcggttagaagtgaaaccacttcagaactattcaccgcgcgatattcagcgaagtaaagaccgactcgcaaccgaggtgatcgggactttccacggcgagactattgaaatgctattagggagataa

SEQ ID NO: 308321 - DNA, 324 bp, Proteus mirabilis
atgaattactataaaatatacaataaggatgtcgatgcctggctaagacaagatcagtcaggctttaccgatgaagaacatgcaggcttctggccggagcctgctatcatcaatattgaacagagtgacgttcaaaaacctgtgtatttctcaccttcagcaaccaccttgaaactcattgagttcggggtgtacgacttttgtggtcgctggccggagcgtccagagctggcccaaaagcatcttttctcttgtcagaaccttgaatttcgtcacctgaaagcgacgtattactataaggaaaccttaggtaatacgacctga

SEQ ID NO: 308322 - DNA, 879 bp, Proteus mirabilis
atgaaatattatgaaagtacgctgcgcttgaggtttgctgcccgtcttgccccttcgcctgaccaaattggacgatctgtttccatcgtactaagtggccttatggtcggcactgtcatcggcttgccgttaagccatttcatcgcaacgcagtgggactggcaatcctgtttctacctgcttggtgttgccgcattactagtaagttatatcgtcctaaaatggctccccaatctggctaaagcgacggaagacgaatcagtcgctgacattcaaaaccttaagtcacctaaattatggtcacgatacttggttagttttctgacgatcggtgcagcatacggctctttttccttctttacacctttacttcaacagaatgccggtttcagttctgatgcgacaaccttaatcttgcttggttatggactctgtacagtaatcggcaacctcattgttggccgattcgcagatgcacaccccgttggtgtcttacgaattgggcatagcgctttattgattgccttggttgtcttgtcattattcagcgacgttaaagaattgacgctggttatggtgctggtggttggcttgatcggtatatccatgaatcctgccttaatcacgcgagtcactgaggcaggcggaactgggtacttagtcactacagtgcataccgcggttatcacgatgggcgtcacactcggtaccatgtttagtgcgttctcaatgaatattttcggacaagatcccgtgattgcgacctggacaggtgcggcattagtcgtggtcgtattaatcgttctagccatgcaaacaatgcgatttagtaataccaaacaaccccttgcgcgggtcaactcattgaacaagtcctaa

SEQ ID NO: 308323 - DNA, 549 bp, Proteus mirabilis
atggtcaatttaaccacaacagcatcagaaaaaattgccttggtaacggggggttcaagaggtattggcagagaaattgtcttgtcgctggcgagggatggggtcggttatatagggatccactgtggtaaaaatcaggaggctgcacgtcatgtcgtaaccgaactgcgcgcgcttaatgttgaggccgacattttcaccgcagatttcgggaacaacgcggaacaagcggcactcgggctatgggaagcattctataaccggctgaaggacaaaggctataacgatgttgatattctgattaactgcgctgggatagcaccatctacgtcactcattgagacaacattgaatgactaccaggcagtcatgtctgttaatgttgaagctccattctttctgttgaaggccgccgcacctcatatcaatacggggggccgcgttatcaacgtttcaactgttttaacccgagtctccgatccgcagcgagcaatttacgccgcttcaaaaggcgctatcaacgcgttgacactttcgttggcaacttga

SEQ ID NO: 308324 - DNA, 666 bp, Proteus mirabilis
atgttaggggcccagttgcgccaagaaggctatgttatcagtgattatcgaacacgaaagttgatgaagcaattagggctagtggttaagcaaagaaaacgatatcgaggcgcttcaaaaggtaaagcgattgccactgccgataatttattgaatcaaaattttaatccggttacagcgaatgaaatctgggcaggtgatatcacctatttaaaaacgccagacggttggctctatctggccatcgtgatggatttatattctcggcgtattgtcggctggcacatgtcacctaagattgatactgcattgattagcaaagctttaatgatggcctataacttgcgttcgccctcaaaaggttgtgtgtttcacagtgaccgcgggagtcaatatacgagcggacactatcaagcgttactgaaaagttatgacatgcgctcaagccaaggcgatgtaggggcttgttgggataatgcggtcgttgaacgattttttggtagcttaaaacatgattggttatttaaaaaatcgcatgcaaatcgaatggaaatgagacaagacgtactagattatcttcgttattacaatttaacgcgattacacacggctaataattatttatcgccagtggcgtatgaaaactccttcagaaaagtgtcctaa

SEQ ID NO: 308325 - DNA, 288 bp, Proteus mirabilis
atgaaacgaaaatcaccaaagcaatatactgaagactttaagaaagaagcgattaatttagtcgctgaacaaggctacaccgtttcgcaagcggctaacgctctcggaataacaactaaacttctctatgcttggcgaaaacatcgtgaagctgaaaataaacccaatgcattaaccttccttgaacgacaggaattactcactttacgtaaagaagttaagcaattgaaaatggagaaagaaatcctaaaaaaggcgagtgccttctttgcgaaagagttgctataa

SEQ ID NO: 308326 - DNA, 579 bp, Proteus mirabilis
ttgataatcagcgaaatgcaacgcaagcttgccacatgggcagccaccgatccgtccctacggattcaacggctgctgcgtctgataacacaaccagaatggctggctgaagcggcgcggatcacgctttcatcaaaaggggcccatacccccggcgttgatggcgtgaacaaaacaatgctacaggccagactggctgttgagctgcaaatcctcagggatgaattactctcaggccactaccagcccttgcccgccagacgggtttacatccctaaaagcaacggcaaactgcgaccactgggtatccccgcgttgcgggatcgtattgttcagcgggccatgctgatggcgatggagccgatatgggagagtgattttcatacgctctcatatggcttccggcctgagcgcagtgtccaccacgcgatccgcacggtgaaattacagctcacagactgtggtgaaacccggggacgctgggtgattgaaggcgacctgtccagttacttcgacaccgtacatctgttgtgctttaataaatgtggacattttgataaaggaatctattcactttaa

SEQ ID NO: 308327 - DNA, 1353 bp, Proteus mirabilis
atgtcaaaattaaaaccaaaatcccaatcacttcctgtcatcaatcctaatgctgcgggtatagatataggtggccgttttcatgttgtcgccgttcctcctgatcgcagtgacaaatccgttcaaacgtttaaagcttttactggcgatatccataacatggcacgttggttaactaaatgtagaataacgaccgtcgctatggagtcgaccggcgtatactgggtacctgtgtatgaaattttggatgaacatggttttgaggttgtcctttccaacgcacgtgatacccgagcagtaccaggtaggaaaactgatgtgggagatgcacaatggatccagcggcttcatgcatgtggtttgctaaaagccagttttagacccgatgctacaatagctgaacttcggacatatatgcgagtcagagaacgtatgttggattatgcagcagcacatattcaacatatgcaaaaagcactcacattcatgaacgttcaattgcatatagtcgtttctgatatcacaggtgtaacggggatgaagattgtaagagccatcgttgcgggcgagcacgacccagctatattagcaaaattcagagatccacgttgtaaagcggatgaacaaacaatttgtgcggccctaaaaggtaactatcagccagaacatctatttgctctacgtcaagctattattttgtatgatgtgtaccagcgacaagtaaatgaatgtgatgtacaaattgaagctgtactcgataggctttgcataaattcgagcgaacccgatgagcctatccccaaaccaaagcacagagcaaagcaggcaaacgcaatgacatttgatgtgcgagaaaagctttatcgtttaataggggctgatctcacgcaaattcacggcataggcccttttcttgcgttacgactgatatctgagtgtggtacagatatgaataaatggccgactgaaaagcattttacatcgtggttaacattatgcccaggctcaaaaattagtggtggtaaagtcatgtcttctcactcccgaaagagtaataatcgagttgtcgctcatctcaggctagcagcaacgaccgttggtcgttcagatacagcccttggtgcattttatcgaaggctctcatctaggattggtaaagcaaaagcggtaactgccactgcaagaaagatagctatactgttttacaatgcaatgaaatatggcacaaagtataaagatcctggcgctgaatattacgaagagcggtacaaagaaagggtactaaaaaatctcaaacgccaagccgagagaatggggatgactttacaggcaaaagaagaatgtgtttcttag

SEQ ID NO: 308328 - DNA, 309 bp, Proteus mirabilis
atggcagttggatattttttacgtgtaggagactcaactacatgcggaggtcatattctgacaggtgataatacattccagtggtacggtgttgctggtgcgcgagaaggtgacttggtgacctgtggaaaacattcaggcgcatactatattattggcggagttaacgatgtatggatggaaaacaggaagcacgcaggttgtagtggcatagttaatttggtcaccaactcagaggtgatatcatcacctcacaaacagataggtgacaattatggcaaaacgaataagacggcttttcagtgctga

SEQ ID NO: 308329 - DNA, 549 bp, Proteus mirabilis
atgtctggagtcaggcccatcatcatgggtaaggcaatggccttaaatggagacaaaaccaccactggtgccacctgcattgcaactatacaaacggtcacatgctttaataaacaagctttaagagtgggcgatccgacaacaccctgtcctaagtgtggtcagccaggcactgtcgtttctgggcagcaaggctttctaaatcatgggaaacttcaagctgttcacggatcaatggttagttgcggctgtctttcaggaagtaatacagttgatgtatataagtcggacattgaatcctcaccattgaaaagtgttcagttaattaaagaaaagctgacatcaggcattaataatatctcagacacaacaaggcatcatataaggtatttgtgtaccgatgattttggcaaccctttgtgtgattgcaagtacataatgcataacgtaaacggcaactcttatcatggaacaactgacaatcaagggtacaccatgagccatacaacatcggaaaaagagaatatttcaattcatttacttcaataa

SEQ ID NO: 308330 - DNA, 210 bp, Proteus mirabilis
atgagcactaaagaaaaaaaccttgaattgctatacaacgcctggctgtcgcgttctgtatcctgggagtttggttgtgaagatgagcgaaaaacccaatgccgtgattgggctgagtcatctttagaaagcatcactgatgccgaagagttcgaccaggatgaagccgattacatcgtggatgatgagctcacgcactggacggaataa

SEQ ID NO: 308331 - DNA, 315 bp, Proteus mirabilis
atgagcaacatgccccaagacgaactgagcgctatcgcactgttcaacgacattggccgaaatgaagtcactgctcgttttgatatgctgagcgcaaccgcacaagtgcgtttcgatgagagctatcgtatacacggcaccatgcccgtcggttttaccgctctcaatttcatgaccgctgatgagcagaagcagcgccaccagctcttgctggcgatacagttatgtaccgatccccaagctgaagcccacgaccgtattaaagccaggcgagcagaaatgaaaagaaaaaaccatgtcgttaccactgggtaa

SEQ ID NO: 308332 - DNA, 219 bp, Proteus mirabilis
atgtctcatcttactggtgtgatttcgagtgtaattcaggatctagatacaatcggcgaaaggattaattcagccattaataaagcttcttccgacgcagaaattctattgctggaggatgcgttaatatcactgtctgaaacccgaactcgcctgcaaggcaaagcgccggtaaaccaggttaacgccagtgtgacccggatccacccattaccataa

SEQ ID NO: 308333 - DNA, 525 bp, Proteus mirabilis
atgtcagaccaactacctgcaaacgaaactgaacctctggtgccgaaagctaaagtcccttcagcccacctggagacgctatttaactacctggttaaatgcatcaaagaagacggggcacccccaacttacgatgaaatcggcaaagcgttgggttattcaaaaggactggtcgcccggcgtgtgaagcagctgcatgagcaaggccgtatcgttatagatggagagaaaaccacggccaggactatgcgcattgctattgggcagggctatgatgaactggttgataaggtgtacctgacagaagatcgcaaagccattattaaagcggtgaaaagcatgatgaagcgcaccggcatcggtccttctatcaatatgctggcgcatgggctcggcttttcgaacagcaagacaaaacgccacgttgagtacctggataaaaacgaattactccgatacagccccgaactgggtgaagttattgccactgaaccaggtgactacgagccaaaaccaaatgcgtaa

SEQ ID NO: 308334 - DNA, 378 bp, Proteus mirabilis
atgattcagaagaagagtgtctttttcaaggtgcaggaagggaaagcactacgatttgaggacgaaaaaagccaccccggcgcaggcgatgcaggttgtcatcaccaataccccgaaatagcgataaagcgaagaaaggaatatgaagataatcagcccaatcagaggcgcgagccaaacacccggcactatcccgaaggcataccaggcatcagctggaacccaataccccggccagtagatagagatgagcgccctgccaaaaagaatgcatccaatcaacagacagatcagcagagcatagtggaaaaagcgaaagtagagcccaccattacgcatttggttttggctcgtagtcacctggttcagtggcaataa

SEQ ID NO: 308335 - DNA, 402 bp, Proteus mirabilis
atgaaacacaaggttcttgcgctggtgggcgcactaggtctgttggccggtagcgtaatggctgcaccacagttcaacccgaattcagtctatgcaggcaaaaatgagcagcctgcggcacagcctggaacaccaacccagaacggtgaaaaggggagcgtcaccgttctccgcctaaacagctacgcacacctgggggaattcaccgtgccggaggggattcaaaaggcaagcgttgagcaattcaacaacaaggtttacgtcctgtcagagaaaccagacaagcgcctggccggattgtggatcggccgcgatactaacggaaaggaggggctctgcgggtatatcaacaacagcatgcgcatacaaaaatgctactttattttatatagggaaaagtag

SEQ ID NO: 308336 - DNA, 837 bp, Proteus mirabilis
atgaacgatacaacgaaatttttttttatagatgagtcaggcgataaaggttattcaaactcaaagcctcgtgatgggcttggtgtaatggctggcttccttatcgatgattgggatctgcccaaattaaaaatcaggataagtgaaggattaagcactctcaatttaaaccagtcaaataaactgcacatggctgaattagatgacacacagaaaaccaatgccgttaacttggttgcatctttatttagagagtttagtctcaattttatatactcagcaatatacactgaatcatataaagatttcgttggcccttccgataaaaaagagttattgcattcgcagttactacaaaataatttaataagcgccctgacattgctgacaacattaattgagaaattccgcgttaatgtgaatctaaaaatagtaagcgataatatagatgctggtgttttaaagatcatggaaaaagagtgcgaaaatatagttaattacatgaataatgccccaaataagcgctattattcgaaaggaaagtatatcgaaacgcaagttgttaatgcatcaccagatcccagacctaaaaacggaaaatttcacgttgaaatgagtgttgaaacttcagaaattacctttatttctgatgtattggcctacacaaccttccaacacttaatggaattcatgaaggaaaatgaaggactatcactcaatacaacaaaatcaatatcaggccatcccttggaagagtttatagcattggtataccctccagaattagaggatgagaacattttcggaaaagtgcttggaccaggcagggggaaatag

SEQ ID NO: 308337 - DNA, 300 bp, Proteus mirabilis
atgtccactttaaatgaactacttgcaaaacaatccccagaggcgttggctaaaattgaagcgcgtgcggaagagatccgtagggaaataacgctggctaaaattcgtgaggaactcaatctttcccagtcagaattagccaagtcccttggcgtttcacaaccctctattgccaagcttgagaatgttgataacgatccaaagttatctacgttgaaacgttatataaaagctttaggcggcgagctttctattgatgtaacgctaccgaatggtaagcgtattggattgcatctttaa

SEQ ID NO: 308338 - DNA, 579 bp, Proteus mirabilis
ttgcgcctatttgggtatgctagggtgtccaccagccaacaatctcttgacattcagacgaaagcgttaattgaggcgggagtggcaaagcaccgtttatttacagacaaggagtcaggaagtcacattaatagagaggggttacagttactcaaagttaaagtcgagaagggtgacattattctcgtgaaaaaattagaccgtcttggccgtgataccgccgacatgatccaactaattaaagaattcgactcaatgggtgtggctgttcgttttttggatgatggtataagcactgaaggctcaatgggaaaaatggtggtcaccattttatccgcagtcgctgaagcggagagacaaaggattctggagcgaacaaatgagggtaggcaagaagcgttactcaaaggcgtgaaatttggccgcaagcggtccgttgatcgtgagagaattttaaagatgagggaaagcggattaggtggtactgcaattgccaaagaaatgcagatcgcgcgatcaaccgtttataaaatacttgaagaggtcaatactgatgatataaatcacgcagaaaagtga

SEQ ID NO: 308339 - DNA, 1212 bp, Proteus mirabilis
atgtcagaagagggcaataaatattttaagggtggtgagccaacatgggccaatgcatgtgtgggggaaaatgggaatccttcatatactgagtattacaaaggatactctaaagcagctaatgtcttacttgatgctgtaatctcagataagggagtgcgtctgtggttagacgattttatatatccaatatgttttaacttcaggcactctatcgaattaagattgaaagatatttgtcagcattatattagtgaaatctttaccattaaaaatacaccttttagctttgaccatactggatctcacgacataggaattatttgggagttcgttaaacaaaaggcagttattgcagaaagaaattcagaaaggtttatagaagagattgatgaatttataatagaactatcagccattgatgcgacagggcaagtttttagatatccattttcaaagagaaacgaaaaacacttggtgagggaaagcatcattaatgtcattgaccttaagacacaatttaatagggttgaatccgtgcttgataaattctctaactttatgtccgaggcattagacaactatagattgggatacttttctggtgatttatcaagaaatgatctaattgatatcgccaatcatcttcctgatagaaacacatggcgcgagccattattcaaacaggttagagagtcgctaaagtcaaaatatgcgttaagcaacagggcattcagtaaggctatagctgttatcgaaaacacacatgatttagctaaaatgattggtttggaattgccattatacggatgtgataaagatactgtaagactcgcctttctgatgtccggattttatcttcgccgtagtagtatcaatgagttagttgttgtaaatggcgctattaacccttgtgatgggaataatgcagagaaaataaagaatcgaattatggcatccttaaaacgccgcactatattagaaagaaaattccgtgataggtttgactcagtctctatttcaggcctcttggctttattctatagtaaccaaggcaactcaaaagattatcaaagagaatatgaacgccgtgctcgttatgaagctaattttgaagatttaatgcatgtagtagaaaaattaaattttccctttgaggttgtaaaaaacctttatagtttgggcggcactgttgcaaatagtcggtggtga

SEQ ID NO: 308340 - DNA, 705 bp, Proteus mirabilis; identical to SEQ ID NO: 8686

SEQ ID NO: 308341 - DNA, 1053 bp, Proteus mirabilis; identical to SEQ ID NO: 289166

SEQ ID NO: 308342 - DNA, 417 bp, Proteus mirabilis; identical to SEQ ID NO: 289165

SEQ ID NO: 308343 - DNA, 264 bp, Proteus mirabilis
atgtttgccttagttgatgtaaacagtttctacgccagttgtgagcgcatttttcgccctgatattgccaataagccagttattgttttatcaaacaacgatggttgtgttattgcacgttcaaaggaagtgaagttgcttgggataaaaatgggggctctatactttgagattcagtctctgattaaaaagcatgatattcaggtgtttagtagtaactacgcccttacagttggaaaatattttagatgccacatgttgtaa

SEQ ID NO: 308344 - DNA, 1410 bp, Proteus mirabilis; identical to SEQ ID NO: 284996

SEQ ID NO: 308345 - DNA, 2469 bp, Proteus mirabilis; identical to SEQ ID NO: 284997

SEQ ID NO: 308346 - DNA, 2190 bp, Proteus mirabilis
atgctgtcttttgaaaactcacaagatatggattcaaccttagataccatgcgttcgattggtgatagaggcgactatttgcaacaggaacttctccctgcgctactgcgaggcgattgggaagagttagataaaatggtggtctatcaagatcaaaaaaagaccatcttgtttggcgaggatatatgggcgtttagagattctgactacaaagggagtgggatcgcgaacttgatttttaatattgagccaaagcaagaaaaaaatgtcatggcacttcatcaaaaagggcgtcaaatgcttaatcaaatgaagtgtgtagcattggcagagatgtggttttcaattaaatatacagaactggcctcaattaataataaaaaaaactctcttcgaacggatattgctcaactaatcaaacgtggcatcaattcgtttgaggaattgaatcaagagtatttagaaattttggttattgagggatggtatgatatttctagaagctattgttttatagggttgaatagccttgttcacttgaaagggctgctacctttcaaggtcaacttttcacatcaaactcataagatatataacgtgaattctgatgcgcaaaacggaaaagtagtgattcccccacgaatctattttgcggcattaaaagggtacagtgaagacatcgtaaaagcctacagattaagagatgaaatagagcaagctgttgagcagatgatttcgctttatgagaatgaattagaaagaaaaatcctgaggattagaagaggttatagccacaaacctggtagcagctacgtaaaatcatgggaacaatttacgcaggctctcaataaaaatggaataaccttagtggataaaggtgaggatcatcggtggatgcaaatattcacatctattcaaccccgaattcaaataaacggaggacgtcttagcaccttcagagcacacattgacaacacttgttacggctggggtgattttaggcgatatttgaggagcttaaatacaaaatcttcatggctttgtctggcattgtcaggaatgcgtgtagacgagctgtacaaaatgagccctgtttacggtgcacaaagaatgactttcgataaaaatggctgtgagtcggaaacgggcaaggaaaccatctactttctaactacacgccaatcaaagattacgctcagtagtcaaaccaaaaatgacacgtttgtaaccacggaagctggctggaaagcattccatatactgaatgctattaatacgccctatcgcaacagatttgcaaagaaatataatcatcgaatgtttgcaaacttgaaggatatcgcttttccctaccctataggaaagagcgcattgcacacagtaattaatacgaagtttaaccgcgataaatttaattttacacttacagcagaagatatggggtatttacagacttcagacccaacccaaacatcttttaatcagggcgataaatttcacttctctccacatcagacacggcgctccctcgcatactacttaattggttatgaattgtgttctttccccgccttgaagcaacagttttcgcatttgtcgatggcgatgacgcgatggtatgcccgaaatgcctattcatttgaaaaactatacagcgaaatacaaaaagagcgtgtcacacaacaagctgagatatttgctcgcatatatcaaaaaatggcgaatggtgagcgtatcgcgggcggtaaaggtcaagcagccgttgctgaaattagtcgccaaggtgaaagttattttgaagatggggtaagcaaacgcaagctatcaattgactactggatagatcggttgaccaacgggaaagaacacttacacgctattgctccttcgatgtattgtactaacactcaatgttcaatgcgtatcaacattgatttaagtgaatgtgtagactgcgaatatgactttattgaaaatgctgcttatgctgaatcctcccgtatggacgcaatgcgcaacattgagtttttaaaagaaaacaatgaattaaattccagttctgcaaccaaatacatgatgcaggtaaaagctgcggaagcgatcatggatgatctagggtttaaatatgaaaagtatgaatttgcagaagatgtgctgaatttagtgatcgaaacgacaatggggacgtaa

SEQ ID NO: 308347 - DNA, 537 bp, Proteus mirabilis; identical to SEQ ID NO: 284999

SEQ ID NO: 308348 - DNA, 348 bp, Proteus mirabilis; identical to SEQ ID NO: 285000

SEQ ID NO: 308349 - DNA, 663 bp, Proteus mirabilis; identical to SEQ ID NO: 291748

SEQ ID NO: 308350 - DNA, 825 bp, Proteus mirabilis; identical to SEQ ID NO: 284978

SEQ ID NO: 308351 - DNA, 1227 bp, Proteus mirabilis; identical to SEQ ID NO: 284977

SEQ ID NO: 308352 - DNA, 1488 bp, Proteus mirabilis; identical to SEQ ID NO: 284976

SEQ ID NO: 308353 - DNA, 852 bp, Proteus mirabilis; identical to SEQ ID NO: 284975

SEQ ID NO: 308354 - DNA, 1011 bp, Proteus mirabilis
atggacacactatctgattttgccccaagagtagaaacgtatagtatcgacgagcagtatctagatatgaccggcatgtctagaaactttccattagaagattacggtcgcaagatacaacaacgaattttgcagatagctcatgtaccggtcggtgttggttttgctcaaactaaaacactggctaaactggcaaaccatgctgctaaaacatggaccaaaacaggcggtgtagtcgatttgagtgctacttcacgccagaaacggctcatgtcccttgtgcctgttaatgaagtatggggtgtgggtagaaaaataagtaaccggctaaatgctatggggatagttacagcgcttgatttggctagggctgaaacaaccatgatccgtaaaacattcggtgtggttgtagaacgcactgtgagagagctgaacggtgaatcttgcatcgagcttgaagaagtagcaaaaactaaagagcaaatcatttgttcacgttcatttggaaaaaaaattgagctctatgagcatatgcatcaggctatctgcgagtattcagagagagcagcagagaaacttcgagctgaaaaacgagtctgttcctttgtttctgtttttatccaaaccagccattacgccagcggacctcaatactacaaccaccgttctgaacggttagaatatccaagtgctgatacaagagacattatcaatgcagcagtgcgtctgttaaagaccatctggaaatcgggagttaaatatcacaaagctggcatcatgctcactgatttttctgatccatcagttactcaacttaatttattttctgatagtaaaccctacaaaggaagtgaacaattgatgaaaaccttggaccagataaataatcgaggtgttagcaaaatatggttcgctggaaagggaatggacacaaactggcgcatgaagcgagaaatgctttcaccggcatacactacgagaatttcagatcttcccgtagtgaagatttag

SEQ ID NO: 308355 - DNA, 1047 bp, Proteus mirabilis; identical to SEQ ID NO: 289161

SEQ ID NO: 308356 - DNA, 345 bp, Proteus mirabilis
atggaattacttaacaaggtgcaactgatcgcacgattaggttcgtccccgaaagataatctgaagtattcagaacgtaacggtgaggcaatgacctacttctctgttgcaattaaccggcatgactcgaaaggaaacccgataacagattggtttaacattagtgcatacggaaaaatagcagaaatagcagctaattttggtcagaaaggacaacttgtttacatcgaagcaaggctacaaccgactaataattcctgttctataataatgaattaccagacaggtgtgtttagagtattacctaatagtaaaaatacaaatgcaggagagcagaatggctaa

SEQ ID NO: 308357 - DNA, 423 bp, Proteus mirabilis; identical to SEQ ID NO: 289159

SEQ ID NO: 308358 - DNA, 393 bp, Proteus mirabilis
atgaaactgacaatatccttgcctttcattctgataactacgctgatctcagtgccagcgttgggtaatagttattctgcaatggaagggattgaaggacagcgatattctgatttagagaaatacaaagccaactgtccagcttgtatgagtgttgtacaaaacattaaagatatccgctatcgggcatgtgcacaatcagtcacggcagatgatgtgataattagggacccattatatggctatttgaatagtttgaaattcatgttgaatgatgatgcttataaacaggtattgacaatcattggtcatgagaaggattgttctaatagtatgaattggctagaaaaggctaattcaaagatcgagccacagctaaacaagacatattga

SEQ ID NO: 308359 - DNA, 369 bp, Proteus mirabilis
atgtttgtttttaatgaagaaacgttccaacggaaccccagtaatccatgtccagataatgaattcaatagtgacgtgattgattttataaaggaaataagaaagttttatcctgagttagaacattggagcaataccggtgtactgtttgcttgggaaggatatctgcaagatgtatacgcggtcggttggactgaattggtacgcaagagagagaacggctttctcgcatactgctacatatcgcagttacgaccatgctttgattttggtggaacagggacatacaacactgaagtttgggatcttggagagcaagagccgtggaaaaaacaactattgccaaaactaccagattggctcgaataa

SEQ ID NO: 308360 - DNA, 228 bp, Proteus mirabilis
atggcacttaaaaaagttaacgaatcagcaaattcacagaaaatgaaattcggtgaaaacagagacttagataaaattcttgataaaagtacaaaaaccaaacgcattaatgtagatcttgacgaagatactcaaattcgattcaaagctgcatgtgtcaaacgaaacaccacaatgaaagatgtaatatcagattatgttcatcagtggctaaaggaaaatgaatag

SEQ ID NO: 308361 - DNA, 624 bp, Proteus mirabilis
gtgaaagtaatttcttttttaaatccgaaaggcggctctggaaaaacaaccaccgtcataaatgttgctactgctatgcagaaagcaggttatttattagcagttgtagatacagatcctcaaatgagcctatctaactggtctaaagaagggaactgtgattatgatgttttcaccgccgccagtgagaaagacgtttatagcatccgtaaagatctaagtgattatgattttgtcattgtagatggagctggttcactttctgtcattacatcagcagcagttatggttagtgatctagttataattccagtctcgccaagccctcttgatttttccgcagccggtagtgttacatcggtcctcgaagctcaagcatacagccgtaaagtagaagctagatttctgattactcgtaaaattgaccaaacaactatgttgcaagtattaaaagacaacctcaaagatactggcttgccttctttcaaaacagctatttctcaacggcagagctatatcaaatctattctagatggtaagagtatttttgaaactaatgatggaaatgcaaaaggcgagatagaaatactaaccagagaaattttgactatttttgagtcataa

SEQ ID NO: 308362 - DNA, 246 bp, Proteus mirabilis
atggctcaggtcacagtaaaaaaatggggcaatagcccgtctgtacggcttcctgttgcaatcatgcaaaaagcggcacttagcgttgatgatacggttgaaatagcggtagaagaaggtcgtatcatcattacgccagttaaagcagtagaatactcattagaaaatttgttagccggtatcacgccggagaatattcatgagaaagtagacttcggagctcgaacaggtaaggaattaatttaa

SEQ ID NO: 308363 - DNA, 333 bp, Proteus mirabilis
atggtatctcgatacgttcctgattctggcgatttgatttggattgactttgatccagttgaaggacatgagcagggcggtcatcgtccagcagttgtcctcagcccatttgcatacaataataaagtagggctcttattatgcgtaccatgtacaactaagggcaaaggctatccatttgaatgcgaactctcgaacgaaagagacagctacgcattagcggatcaagttacatgtgttgactggagagctcgtaaggttactaaaaagggcaaagtggaggcatcagaactggcagagataaaagctaaagcaaaggcgttaataggttag

SEQ ID NO: 308364 - DNA, 381 bp, Proteus mirabilis
atggaaaatgaaacactacacacagcaacaggtaatcaaactcctttagataatgctatatcatcattaagctctattttagatgttattttcacagtaaatgattatgttttgttttttataattttaataatgattttcgctaaatcgaaatcaagactattcaaattggcatttggttattctggtatatcagttgtatttttactctctagctattttatcagggatgatttactgtttgatattaataatacaccgcgattcggattattaatgatcaatataggcatgattacaacagcattatatttaatatactggcttatctatctattcaacgaaagtggtatgattgatagcaaaaagagtgaaccatag

SEQ ID NO: 308365 - DNA, 798 bp, Proteus mirabilis; identical to SEQ ID NO: 291763

SEQ ID NO: 308366 - DNA, 957 bp, Proteus mirabilis
atgggagagttaattttacgtgacaccgtaacagatattgttgatgtaaataacatgacgaaaaacaccaacaatccagcaaccagctacttgctacggctccgttccaaacaaagtcaaaagacaatgcgatcctgtctagtgtcagtggtgaaattgtttcgtgctatggacccgtttactttcgattggtcaatcatggatcgagatgccgttcaattggtacttcagaaattaatactggagaaaaagaccccaaatagtatcaacttgatattgagtgccattaaaggggtggctgaagaagccagagcatcacgagtcatagatagtgatacatatcaggatattagaagcatacgccggattcgtgggaaccgtattggtcgagggcgttcactgagtagtagtgaaataacgcacatttatcagcatcttgatagcataaataccgcagtctcggtacgtgatgcagcgattgtatcattaatgcttggctgtggtttgcgccgtgctgaagtcactttgttggatatggaagatatcaattttgataattactccattaaaatcatgggtaaaggaaacaaagaaagaactaacttcatgccaagtgacacgctccgtcgtattcgcttatggatagaaactgtaagaggggatcataccggtgcagtttttacccgcatacgtaaaaatgatgatgtaacttgcgatagaataacaaccgatggtttacggtatattattgataaattggtgaaagattcagactcagattcatttacaccgcatgattgccgacgaacctatgccactaagttgttagaactaggtgaggacctacttactgtcagagaagctatgggacacagtagtgtcgctactacacagcgatatgataaacgaggtgtaacacgcttagaggctgctgcacgtaatctgcaatattattag

SEQ ID NO: 308367 - DNA, 918 bp, Proteus mirabilis; identical to SEQ ID NO: 289881

SEQ ID NO: 308368 - DNA, 408 bp, Proteus mirabilis; identical to SEQ ID NO: 298989

SEQ ID NO: 308369 - DNA, 915 bp, Proteus mirabilis
atgacaaacaaaatttacctacaaataaatgatgaaattgttcaagtatctgactggaatgtcataaaaaatagagaacattatactgaaacacttgatataaaaggaaaatcattagagaaaataataggttactatgagcttgatgaaaaaatatcttgtggtctaaaaaattgtaatacccctcatttacgagggtatattgtaaaaaccgatgcagaaatagaaacaaatattggtaatgcctgtggtaataaatactttgatgttatttttggtgaaatgtcatcagagtttttaaataaagttgaatatgaaaaattaaaacaaagtgcccgactggctaaactagaaatattcactttgtggaagaaaataaatgaattaactgtgggtccaaaaaacattttatgggcaatacgcttatttaaagatatatccgaccctaatataattgggaggtctgcttataatagacttcaaattatgtatggcaataatgacaataaggtctacttaaccacgctcacaacagctaaagaaaaagagttagcagaagttgcaggccgacgtattgatgaaacagtcgatatcgttgttgggcaaatcaagtatatagattttttatcaaaggatgatagtttggattctatcttttattctgaattaaaagcaccagtatcggaattggaatcctgcgaacccgaaagaacatcaagaactaagctaaagaaaataatggtaaaaataaacgccataaatacaaatataactagattaaaagataaactggaaatagcgaggctatttttcacaaacgaaaatttatcacaattacttaattggatggaaaaagatgagaatgtaagtaatgctgatatagagcggtataaaacatttttggaaaagctataa

SEQ ID NO: 308370 - DNA, 858 bp, Proteus mirabilis
gtgctagctttactcttaattcccattttggttagcggttatataatggtaatcgctaacccataccactacttcagactacatagacacgatggacaattactttatctgaaggttgcaacacatggtactctttgtttaatagcgtctgtgattattgcaacagtagtaaaattcctcttccctgattttcatttaattaatttgataatcacagaatttaaagtcactggtaataaagagactgatagaatctatgcttggttaataattttatcttttacatccatcatttcatcaataatttatgtcatagctgtatggataaaaaattccttcaaaggaatgcaacatagaaaaaaacacgcaaatttatataaaaaaatcagacaagcaaaaaatgcaaaaatactgagaaaaaccatttcgccaggaacgatggattcaatgttgtatgatgcgcttgagtcaacacctaaacgttcggtacttatcaatctttcatcaaaaaaagtttatgtagggctcattaatggtttaactgaaccaaatgaaaaagaaggccctaataagtttatttccatattccccataatgtcaggatatagaaacaaagataccttgttagttgaatttactaatatttacccttcaactaaagaggttcgttctggaagaacagtgaaaaccaaaagaattattaaaaataaacttgatataatcttgtcaacagaagatataacacatatttcttggtttgattttgatgtttttaaagaagttaatgattcaattaataatgataaaaaagattctatgcccaaaatgctacctcgtaggggtagaaacaaaaaatag

SEQ ID NO: 308371 - DNA, 219 bp, Proteus mirabilis
atgtttggatatttttcaagaaatcgttcaatacgttcatccactcctcaacaatctcaaaatgttgaagtaaaagcttatgttcgtgttagtaagagaggttcagtgcatattccttctgatgaactcgccgagttaccagaagttaaaaaaatgcaggaaatggctcgcactatagttgctggcaacagacaaaagagcattgctaaacaaggataa

SEQ ID NO: 308372 - DNA, 2445 bp, Proteus mirabilis; identical to SEQ ID NO: 305624

SEQ ID NO: 308373 - DNA, 189 bp, Proteus mirabilis
atgttcgattacataaacaaaacctacggtttaaatatcaaaaagggcgaccgtgttcgatatacattcggtaatggctcaaaagaagggacaatagttggagttcactcagctagcctgaaaataaaaatggatggcgatgattatgcagatatctatcaccctacgtgggaacttgagtatctatag

SEQ ID NO: 308374 - DNA, 2268 bp, Proteus mirabilis
atgaacaaagaaatagctttaagtcaccatcccattaatcagaaaaaaaataccacaaactctctatttcaactctcccttattacttcggcacttcttttttctggctatgctgttgcatattcagaagttggacaattaggtaataaacaaagttgggaaagccctgaatatcaaaaagactgggggcttgcagccatgaatgcctctagtgcttatgctctgggttttcatggtcaaggtgctaaagtcggggtgatggactctggtgcactgctctcacatcaagagttgagtggatctcgttttcatgcagtaaaagccaaaggtgaatatggctctacgggaatgcgctatccacaagaaatgggcggacattatgaaaaaggccaagtctttgatgttgatggtaattggatcaaaggggtgaatgatacccatggcacacatgtcactggtactgtgggggctaaccgtgatggtaatggtatgcatggtgtggcgtggggggctgatatttatttagggaatactggggcaacagacagcaataactatggcccttatcaagactatacctatttctatactggctggaaagcgatggtcgatgcgggtgcgcaagtgattaataatagctgggggactaacccgcgtattattaatacagataaaacagaggggcctgatggtggtaataccacgatacatatgcctgttaacaccacggcacagacagaatacgaatatttctactttaaaaaagtctatggtgataaaccttcctttgttgatgctgcttatgatgcagttaaaggaacgaatgttgttcaggtctttacaacgggtaatcgcgactttgctcaaccttattatcgtcctctttatccttattttaatcccgaagccgaacagaattggattgcggtggcaggattgaagcaaaatgcggataacaccggttatgtattagaaaaagtcttcaatgaagcgggtaatgcaaaatggtggacagtggttgcaccgggtcgaaatatctattctacagtggttgataaagagggaaatccaggttgggatacctttagtggtacttcaatggcagctcctcatgtgacgggggcgatgggagtattaatgtctcgttatccttccatgaacgccattcaagttcgtgatgtcatgttcactaccgctaaccatcgtgatcctgatggctctttatatgagagctggacggccgcagaaggtactcctgatgtacgttatgggtggggaacaccagatttagataaagggatgtatggtccgggtcaattgctaggtaaatttgaatataacctaaatgcgacaccgcttgatgtgtggactaatgatatttcccaaacagctttagatctacgtaagcaagaagatctcgcatggttgaaagaatataccgaaaaaggtattgcggcaggaggtgattatcatctcggtactgattttgtgattaatgatggcaatcctgatcctacatcgcatattgttagccaagaagatgctgaaaaatggcgtcaagaatattaccaaaaacgcgctgatgctattcaagctaaaattgatgctggcttatatgatggtgctttggtgaagcgaggcgaaggtatgttagtcatgacgggaaataatagttaccgtggtggtacaactgtcgaacaaggtactttatatggctttagcggatcttttgggacgcaagccgtcaatgttaatggtgggaaattaggtattattgagcgttataacgatacttttactcaaaaaggccaattaacctcaaaccaaaaccataaagtaaacattaatattaatgataaaggtcgttatttagtgaccgcaggacacaatgttaatattggtaacttagtgcttaatcaaggagccgatattgatgtgggggcggataatgttgggcaactaaaagatatttatcttaataatagtgttgttgtcggtgaggtgaatacagatagtttagttgataatcgcactaaaacgaaaatgttagccagtaaccgtgtggttgcagagtcagccacaaccactactgtcaccaatagtgattatgctttatttgataaacatatcacgataacagataaaaccatcagtggtagtttaactaagaaagaaaatacgactttagccacctttgctgataatgaaaatggtcgtgctattgctaatgcattagataatacagggcgtattctgcgcctgtcctga

SEQ ID NO: 308375 - DNA, 750 bp, Proteus mirabilis
atggaagttacgcgagttcctggttgcttctctacgatgggcgggttaaaaatcaatgtggggaataaatacagttacggtacacaggtatcagatacaggtcatgagatagacacgaattctggtatcagtttctatcactatcattactactcagctccactgttacgtatattagatttgtggttgccaaaaggttgtcaaccagacgcatacagtgactttgatatcattagtttttcagagattgacccaacttggcatagcgccacgctagcctttttccaacatcctgagtctgttgcggtagcaaatataattgcacatcaagcatgtacaatggaatccgttgccattactggcggaggaaagcctatgaataagctgtggtggtgcgccggatcatggggtggtcaatatccattaaccggttctacatcatcgagagacacaccacggacaaccagcctgacagcagcaaaatcattatcacttgaacaccgcagagggctagcacgtctaaccgtggggcgtgaagtggcttgtaagcctcgtgtttacccaactatccctaaacagcaatataagttcaatatggtgtttcctacaccggagaccaaaagctcacacgtacttggtgagacaccttacaaatggcaggggggctcattcagataccctacgggatcaggacaagaaagtacgtatatgatctttcagtggatggattgttgtagaatcatactttaa

SEQ ID NO: 308376 - DNA, 636 bp, Proteus mirabilis
atgataactaaaatttatgctgttcctgaaattaaaataaacttatttgaaaagttatatcattggacatctattaaatcagccatatcaattttagaaagtgaaaatatttatagtaataaagatgtaggcagacatgctaattttcacataaaggataaaatagaagattacgaaacaaacgcgcaaatacgacttatattcaagtttaaagggattcataaattagcatttggtaacacatttgatcagcccctccccccgccagaatttgaaaatagtatttttcacttgataacttcagatgaagtaaaatatgacccaaataacatatcaacatttagcacactaaatcattggcaatcagtcgtatatccgaatactcgcgggcttatttttcaaggtgtagactggaatccatcccctactgtggttagaaataaagactggtatctacatccaatttataatttagataccgagcctaaaaaaccctcaattcttaacagaaaggcacataaacaatataaaatagatattgaaatttataggttgagagaaaagataatgttgctagaatcgaatgcaaaagataaagaatttacagttattccaccaaatagtaatgaattataa

SEQ ID NO: 308377 - DNA, 765 bp, Proteus mirabilis
atgcaagtcccttttttgattacaacttttattgctatcatgaaaagttcttttttattggtacgtataatgaaggtctttgaaaccggttttggagaaaacatgagtcaggataaagaagttgtcgattcagtaactacacgaaaaacaagacggaaaaaagtaacttctgtaccgtcgtctgaataccaaatgcatttagataccactattgcgattgatgcctatcatcaacggttctttgtagcaagccaagccgcctatttgttggaacagcgccttgaacgctgtcttatgcatcgagacaaaattatgcgtgatcgagctgctgctatcatgaagtcactcaatcaggcagttgatagtaatttttctgatatagaaaactataagcagacattggcacaggtcatagctgaagtagaggctgaacggggtactaaatatgagttattgagttactctactccccgcgatatgacgattgaaaaccgtacctatctggctacacgaatgtgcagtggtttagaaacactggatctcataatcaagtaccttgatgtttgccgacattactcgttagtaccattggctgaaatactggaaactcaaatcactgccgataagcgtattcgcggtatatttagtacgattattcgtcatggcgaaacaatgaagcgtttagaaatcgatcattcgataaatgcaaaaaatgctaaaaatgaattaaataataatgacagcactggtgctgaagataaataa

SEQ ID NO: 308378 - DNA, 729 bp, Proteus mirabilis
atgttaatcatatcaatactagtgattggtgtgcttgttcacgcctgcctgaactataaattcacggttgcatacgcttcaataatgtttgcgcttgtgtttttgtgggatggatcactaccaaacgtagaaagttttagcactaaaaatctggtttcgattgctatcagtacaactatcttcatgattttgtatctgaataaacgcaatagagatcagcttaatagacgaaaggcacattttcgcaatgccgatgatgtgaacctatatccaaacgctgaagttccaacttcacacgagttaatgattgcacacgattgtgagcaaaaagacgactcaagcaataattatccggaaatttgcgccttaaatagcgatagattggatagaaatgaagcacagctttcatcttctaacgactgtcgaaagggctctcacaaagaataccacggtattttacgtgatttcggagtagcgcactaccagttcaaacctcaaaacagacggtcctattacgttcgtattgatgaagatatcatttggggtttaggtctggcagatgcaattgctaactcaacggtgcagaaaggtgatttcatcacactcaaaaaagagcgtgaagaagttgttgaatatgcccgtataattgatgagtcaggaaaccgactcggtagtgagaaactggcatctcccaaacggagatctttctggttaatcacaactgtttag

SEQ ID NO: 308379 - DNA, 498 bp, Proteus mirabilis
atgtgtgaattatcattctcaggtaaaataaatattattcgctcgactcaagtaaaagacaaaatagtctatgatgttatgcttgaagatcaaagtgcttactttcatatagtttgtaaggacaccaaacttgcagagatattatcaaatgctaaaagcaatgatacgatatttgcaaagggtgaagttaaattaaaagaatctgtaattaacaatattgttaaagaaagattctatattcttccatttatattatcaatcaatggcgttaatacttaccaaacaaaatcagagattgaaatagatgaggaagcaagacaacagcgcgttagaagtttagaacgcatcagagagttaacggatatattaaactttaataaatccagaaattcgcttgatgaatcaaataaaaaattggaagaaaataaatatgataataatcagcttttgttaaaaagccaattattaagttcattaaatagtaaaaaatctatttga

SEQ ID NO: 308380 - DNA, 651 bp, Proteus mirabilis
atgtcatcatcgaatatagttcaaggtagcaaagctgtttctaacataatcgcaagtttaaaaccgaaatttactgagaactctcttagtgaaacatcgtattttaatgaagcaatttttgctaagaatcagattgataacaacaaaaaactaatggcgattgctattaataatcccgctagttttaaaactgcttttttacagcttgcaacaacgtcactaacgttagaccctgctcaaaaattagcatacttagtacccagagatgagcgtgttattcttgatgtctcgtatttgggtttaattaaaatggctattgaagctcaaatgtgcaaaaacttaattatagatttagtttttgaaaaagataaatttgagttcaatggcagacggacaccaccaacacatcactatgacccttttgctgatgttggaaatattcttatagaccaattcgacaaaggctcaatcggtgaaagaggtaatttcaggggggtgtatgttgactaccttctgcatgacgatactcacttgatttacttcataaccagacgtgatattgcaagcgcccgtttaaaatctgcaagttggctgtatagtcctgataaatctccgtggtcgttgtttactataggaatactgcaagtgtaa

SEQ ID NO: 308381 - DNA, 978 bp, Proteus mirabilis
atgaatgaaaatgatctgaaaaccacttatcaatcattgggtagtgatatgtatttaaatgccaataatgccagtattgttaatgtattgggtttaactcgtacagtgaaagatcaggctattggtatcggtgatggtcgtcatgcacaactaggtaatagtaatgcgcgtatttggatcagcggcatgggtcagtggggtaagacggattatggccacagtgatatggatgttgatttctatgttgggttattaggtgctgaaattgatgttactgaaaatactaaagcgggtctatttttcggtgcaggctccaccaaatataaaggtaatcaatatggaaagatagatagtaatgatattcatattggtgcttatgggatctctaatctttatgatgttgcctcattaaattatggatttacacatacaaaccaagatagagatgccaaaagaacactctggataggacaaactgcaggttataactcaaccagttacgatgcgaaaattagtcaattctttttagaaggtgcttatactcaattgaatactagccagtactcaattgaaccttatgctggatttagttggttaagagtatccactgataatatcaatgaaaatgtgggtaatatgaagtttaccactaaaacagatgcacaagatattcaagttgctacggttggtttacgtggtggatatccatttatggcaggcaatattaatatggcattaaaaggtgatatatcagcaagccatctgtttggtgataatcgccctgaatcacgtctatggttatccaattcaggtgaggcatcactacgaggtggtaaactagataatttatttggtgttggtctaggtgttgatgcgcagttaagtaaatcaaccactttcggtatctcttatcaaggtcaatataatagtgatatcaattcgagtggtattaatgcaatattgaaaattaatttctaa

SEQ ID NO: 308382 - DNA, 687 bp, Proteus mirabilis
atgggtaaatatggcattattataaaaggaaaggatcgccatgttcaaatagatagctttaatacggttatgaactgtattagaaagcagactgttgtaatgaaaggtgggatagtatctggaaatcaaggatattatactgaattaccgattaccccacatttatctacaaagttatttgctgtatcacctaataatgtttttgttaaagttattgggggagccataaaaggaagtgataaaaatatccagatatcccaaccttataatgactcttcgggtagtgttgatttatttgaatttggtgattttccgaataatatttttaaagaaaaatatggagtcgttataaaaaatagtagtacaaaacagactgtttataactctaattggggggtgctaaaaatagtaggatattttattgcatcatggaaagaagatattgattatcaattaccaaatataaaagatttagctttcgtttttggtggcggaatgggaggaatatgggaagatggatttgaaggggcttggatggatacttttattaaaagagtgggaaatacgttacaagtaagatataaagaagctgttctttggggcacaggcagtgcaaatcgtgatttatctagatttccatctacttgcttaataatagatgtgagcgatattaagaaggtattatga

SEQ ID NO: 308383 - DNA, 1974 bp, Proteus mirabilis
atggatggattagtttttacctgtcaatttaaaggaattcctgaagaaacattcactgtgacagaatttcaactgactgagcatttatctgagttatttacactttctttaactgcggtaagttcattaccgtctatctgttttgatgatatgttggggtttgcttgttccttaacggttacgcgcaatggtaaacctattcgtactgtacgtgggctattagctagtgcggagcaacaaaatacagatggtaatcaaacgtggtatcactttattattcgacctgaaatttgggtcatgtctttagggcaaaacagtcgaatttttcgacaaataacggtgcctgacttacttcagcaattattatttgagtctcatattaaagcggattgcaaactctatgctgaggatgcttatcctaagcgtgattatataacacaaaagcgtgaatcagattatcagtttttttgccgtttagctgcagaagagggaataagcttttggtttgaagatgcaggaattgagccacggatgttttacagcgattctcacttaggtatgacggcagatattgacttaatctacaacccacaatatgaaacagatactagagatcatactgcatatcattggcgttatagagagtcactgctttcagataaaattctttacaaagattataattctaaacgtccttcttatccccttgaaagtaaaatagaaggggaaatacataatcagcatccattttatgaaagttatgggcgttttcagacgcaagatgatgcagatcgttataccaaaattcgaatggaagagatacaacaacaacgttgtgtcggcaatgcattaactaattgttttgctttgatgccaggaaaaattttttcgttatcttctcacccatgctcaaatatgaatcgccgttggcaagtcattgctattactcatcacggcactcaacccttagctgataatagggaagggcaagggacaacattatcgaataatttaacctttattcctgataatttaaattggcgcccgccttttattcataaaccaacagctgatggcgatgaactagccacagtagttggccctgaaggtgaagaaatctataccaatgaagaaggggctgtacaagtttattttcattgggatcgcatgcgagaaccagaattaggaagctcatgttgggttcgggtagcgcagggatggaatggtaacggttatggctttatggcaatacctaggattgggcaagaagtgcttatcagttatctaaatggagatatagatagacctataatttcaggttgtacatataatggacgcaatactccgccactaaacctaccttatgagatgacgcgtactacgtttaaaacaaaaacgcataaaggagaagggtttaacgagttacgctttgatgataaagcaggccgagaagaaatctatcttcatgcacaacacgatatgaatgctcatattaaacataacgcacatttccatattcagcatgatgcaaaaaaacggattaataatgatcaatttaccgaaatcgcaggtaatgatcactttattttaaaaggctcacaaaaaaatcatatcactggaaatgtatcattacatattgaaggtgatgaaaagacgaaagtaaatggaaatgcggtgcatgaaagcactctgcaaacttattttgtgagtggcggtaaaattgtgcttgatgcggggacagaaatcacccttaaagtgggagagagttttatacggatcactcccaatatgatatttacttcgaataatttggtcgtcggtggtggtagtgcaggaagtgggacttctatcgatttggagctaccgcaaggcgtccctcctttagagttatctccgtatcctgtaaaaaaatactgtgcagtagcagcacagcactcagggggaataattataaaaccaaatgaggatgaataa

SEQ ID NO: 308384 - DNA, 1422 bp, Proteus mirabilis
atgtcgatacctcaaaacaaccaagccattgaagagttaattactcttgttggaggttcagataatgttattagcgtttcacactgtctaaccagattacgttttgttctgaatgatcccaatctcgctgatatagataaaattaaaaaaatatcttttgttaaaggctgttttaataatgcgggtcaatttcaagttattgttggtatggatgttgatatctactataaattattaattgataagctttcattaaaagctaaatctaaagatgatataaaatctgacgcgaaaaagaatatgggatcctggcaaaagctgattgccaatttagccgaaatttttgttccattattacctatcttaatttgcggcggtttattgttaggattaagaaatgttattggcgaaatgcctatatcagataataaacccctcacttatttttatccttggttaacaccaatatatgattttctctggttaccttgtgaagccatcttccattttctgcctgtaagtatttgctggtcgagtgtaaaaaagatgggcggtacacctgcactaggtatcgtactaggtataaccttagtttctccacagctaatgaatgcttacaatttaggttcacaacttcctgaagtttggaattttggtttatttactattgagaaagtaggttatcaagcccaagtgatcccttcgattttagcgggactatttctgggatggtttgagactaaattacgtcgttttatccctgattacctaaaattagttattgtgccgattgtaacccttattgtcgccgtttttgttgcccatgttattttaggccctatcggtagaagcataggtgatggtctcgcccaactgatcaagtttttaatgttaggtgattttgcccctattggttcaactatttttgcctttttctattcccccatggtgatcaccggcttacatcacacaacgttagcgatagatttacaaatgactcaaagttatggcggtacacctatttggccgattatcgctctgtctaatattgctcaagcatccgccgttgtaggcattattatcgttagtcgcaaattaaatgaacaagaaattactattccggcagctatctctgcttatttaggtgtgacagagccggccatgtatggcgtcaacttaaaatatggctttcctatgctgtgcgccatgattggcgctgcgctagcgggtttgatttgtggattaaataatgtgctatctaatggtattggtgtcggcggattacccggtattttatctatccaacctacttattggttagtttatttattagcaatgattgtggctattgtcgtccctattggattaaccattctggtctatcgctataaagaaaaagcaggcaccttgcaagtcgattaa

SEQ ID NO: 308385 - DNA, 2535 bp, Proteus mirabilis
atgaattttaataaccaattacacctcatttcctatcgttattctcttccgttttgtgtcgctttagggattggggtgataacaacttcttcattcgctgctgaagaagctgaatttgaccctagctttttgcattcagtgcaaggaaagaatgcgattgatatacgtcgctttaattatggcaaccctattcctgagggcaagtattacgctgatatctatctcaataatgaatggaaaggaaaagctaatgtacagtatttatatactgacaatgcgaatacgtcgacgttatgtctaacgccggaattactttcattaattgatgtcgtcaaaggcactgttcctgaaaacagttataaagccacttgttatcccgcctcagaaggactcccctcagcaaaatttcattttgatttatccactttaaagctgaatatagaaattcctcaggcacaagtgaatactcgacctcgaggatatattgcccctgcacagtggcaaagtggagtccctgccgcatttgtcaactatgatgttaactattatcaatacaatactccggatataaataatgagcagacttaccttgggttaaaagcgggactcaatttatggggatgggcttttcgtcaccgtggtggtgaaagctggaataatggtcattctactgggtatcagaatatcgaaacaaatgtgacgcatgatattgctcagttacgggcacaattcacattaggtgatttttatacgaatggcgagttaatggatagccttagcttacggggaattcgattagcatcggatgaacgaatgttacccaactctttacgtggctacgctccgatcgtgcgaggcattgctaatagtaatgctaaagttacgatttatcaaaatgctcacatcctttatgaaacaactgtgcctgctggcccctttgtcattaatgatttgtatcccagtggatatgctggcgaccttcttgtgcaaataaccgaatctaatggacaaacaagaacatttacggttccttttgcttctgttgcccaacttattcgtcccggatttagccgttggcaaatgtcagtgggacgctatcgttatgcaaatgagacatatcatgatttaattgcacaaggcacatatcaatatggtttgacaaatgatatcactttaaatagtggactgaccacaagctcaaaatataccgcaggattggctggtgttgcttttaacacgccgattggggcaattgcatctgacattacattgtccagaacaacatttaatcactctaacgtaacgcgtaaaggctacagtttacatactagctatagcgtcaatattccgaccacgagtacaaatatcacgttagcagcctatcgttattcatctaaagatttttaccatttgaaagatgcgctattggctaatcacagtgaatttattgatgatgtttccataaaaagtgccgcattttatcgccctaaaaatcaattccaagtttcaattaatcaagaattaggtgaaaaatggggaaatatatttttaactggtaccacttataattactgggaacataaaggaagtcgtaatgagtatcaaatgggatatagccatttttggaaaaaacttggttatcagattggcttttctcaatcacgagataatgagcaacaacgccgagatgacagattttatgtgaactttacgcttcctttgggagagcgtgttcaaagccccattttttctactgtcttaaattataataaaggcgagaaaaacagcattcaaacatccatcagcggtatcgctggggaagataatcaattctcttatggtatttcaggtaatagtcaggaaagtggaccttccggctatgcgatgaatggaggctatcgttcaccttatgtaaatgtaaccgcaaccgtcgggcaagatactcaacataatcgtcaaatgtcattgggtgcgtcgggggccgttgtcgtacatccttatggagtgacgttaagtaatgatttaagtgatacttttaccattatccatgcaaaaggagcacaaggtgcggtcattaataatgcaccaggtagccgattagatttttggggaaatggtattgtgccttatgtcacgccttatgaaaaaaatcaaattagcatcgaccccactaatttggatttgaatgttgagttatcagcaacagaacaagaaatcattcctcgcgctaatagtgccacgttagtgacatttaatactcaaacagggagaagcctactatttgatattcgaatgccagatggtagtactcctccaatggcttccgaggttttggatgagcataagcagttagtcggatatgtggctcaagctggacgcttatttacccgcggtcttcctaaacaaggtcaacttgatgtgatatggggaccaaatcatgacgataaatgctcatttacatatcatgcgacacgcaatgaaactgacatgcgacctcaaaccattcctgttcagtgtataccgcactctaattag

SEQ ID NO: 308386 - DNA, 2733 bp, Proteus mirabilis
gtgcgtcaatcgcgtgactcgctaaaaaaactcaatcagcaagcctcacaaattgacggctttcgcaagattaaacagcagttaacctctacacagcaggcgtatcaatccgccacacaacgtgttgctactctcgccaaagaaattgccaatactgaaaatccgacaaaaaaacagttagaggcgtttaaaaaagcgcaacgggaggcggggcaacttaaaaccaagtatgagcaattacagcagtcggcacagcgacagcgctcggcattacaagccaatggcatttcaacaaaccaactcggtcaagcgcaacggcgactgaatagtgatattgaacgcactacgcaacagctccgccggcaagaaaaccagctaaggcgcagtgccgaacaagaacggcgcatggcggcagctaaatcgcagtatcaaaaaacgcttgatgtacgaaataaaatggcgggcactggtgccaccatgacggcaaccggtgccggtatgttgtattccgcgaaacaaaccttaatgccggggtacgagtttaatgtcgggatgtcaaaggtgcaggcattaacgcgcttagataaaaactctgatgaatttaagatgttgcgtgagcaagcgcgagagctaggcgcaaccacagcctttactgccaaccaagtggcgcaaggtcaggcattctacgccatggcgggttttaagcctgagcaaattaaaaatgctatgccgggcacactggcaatgtcattggcgggtgatattgatttaggtaccacggcagatatcggctccaatattttaaccggctttaaactcgactctgaccaaatggggcgagtgagtgatgtgttggtcggggccttcactcgttcaaataccagtttaaccatgcttggcgacaccatgaaatatgttgcaccggtggcgtcagggttaggggttgatttagaaacggcggcagctgcaacgggtaaattgggtgatgcgggtattcaaggttcaatggcgggtacttcattacgcgctatcttagggcgtcttgctgaaccgccgaaaatggccgccaaagcattagaagaactcggtattaaaacccgtgatgctaaagggaacttacgcgactttcctgagttattagctgagttggataagaaaaccgctaagatgggtaatgcgcaacgggcggggttctttaaacatattgccggtgaagaagctttttcggctttatcggtactggccgaacaagcgggtaaaggggagttacaaactcttgttgctgacttaaaacaagctaaaggtgaagcgcaaaaagtcgcgggcaccatgacggataacttaagcggggatatgaaaaacctgcaatctgcatgggaagatttaggtattcaaatttttgacggtattgatagcccgctacggcagatatcacaaagcattacccgtgtgatttctaaagtcggtgtgtggatgaaagaaaaccctgaattggctaagacgctgacgatgatcggtttagcgatagcgggcattattaccacgctgggtattctctcgttatccattgcggcaatgttagggccattagccgccgcgaaattaagcttgtcaattttaggcattaaaggcggtagtgcgctaacactgttattaaaaccgataaaattattaggtagtgcatttttagggttgggtaaagccatgttagctaaccctattttattggttattgccgctattgcggctgctgtttatctgatttataaaaactgggacaccattggcccctacgtttacaaggtatgggctaccgttaaaagatatactgctatcgcatggcaagcgctaaaagatactattaagagtgcatgggaggccatcaagtatatattctttaattggacaccgcttgggctcattattaaacattgggattcgatagtcagctacacccaaacaacatggacgatgataaaaactaaaatttcagatgtttgggaaggaattaaaacaacacttaaaaacggttggaataatattgttaagtctgtacaagaaacgtgggaaacaattaaaaccacgatatcaacaaaatgggatgagattgtagaagataccaaagcattaccggctaaatttttgcagtttggtagtgacctgattgatgccattattcaggggatcaaaaacaaatggacggactttaaaaatagcattggggaattggcaaccgcagctaaagaagcactcacccctgagtttatgaaaagtaatgatccgaaagtgcagtctgcgttagattcttacaacaacaactttgccggtatgtatgattccggcggttatatcccgcgtggtaaatttggtattgcgggagaaaatggccctgaaattgtcgaaggccctgcgaatatcaccagtcgtaaacacactgcgatgttagcggctgccgcattatcgttaggcagcgccttttcgttacaggcacaaaatgccccgttgcacccacacagtttgccggttgaaaactatcgtcctgctccggctaatgtgaatattcaacaacagcgttatcaaggcgcgccggcacattatgaaattaatattcatcctcaaccaaaccaatccgcgcaagatattgcccagcttgttatcgcggaaattgagcgccgtgagcgtgaaaaacaagcacgattaaatagccgttatcaagacagtgaggtgtggtaa

SEQ ID NO: 308387 - DNA, 465 bp, Proteus mirabilis
atgatggcagcacttggggtatttgtgtttgagttacgcaccgtaccttatcaatccctacaaaaacaacaaacgtggcgacatggttttactcaacgtgtcgcacgccgaccggcacaacaatttattggccctgataccgatgtgatcaccttatcgggggcgctttatccttcattaactggcggtaaagtgtcgttgctggcattagagttaatggcagatagcggtaaagcgtggtcgtttattgatggtacgggcaccattcacggcatgtttgtgatcaccgatttacaacgcacccataccgaatttttccaagatggtgctgccagaaaaattgatttctcgctgacattaaaacgggtggatgactctatcagtcagatgttaggggatttaagcgaccaattaggcatgatggccaatggtgccggtgaagcgatgaaaggagttttatcataa

SEQ ID NO: 308388 - DNA, 1098 bp, Proteus mirabilis
atgttgccagaaatgatcaccggtaaaagtagcatgccggcttttgtgttaattgctggtgatgaagatatcagtgccaaaattcaagggcgattaatttcgctttcattaacggacaatcggggctttgaagctgaccggcttgatattgagttagatgattctgacggcgcattaatgatgccaaaacggggtgaggtgttgactttgcatcttggttggcagggtgaaaaccttattcataaaggctcatttacagttgatgagatagagcattcaggtgtacccgataaaatgacattgcgcgctcgtagtgccgattttagggcaacgctgaatgtgcgccgtgaaatgtcttaccaccaaaaaacattaggcgatatcgtcagaaccattgcagggcgtaataatgtcacggcggtggttgatcctggtcttgatacggtaaagattgagcatatcgatcagaccaatgagtcagacggcagttttttaacccgcctagggcaattaaacggtgccaccgcctgtgttaaaaacggcaatttgttgtttatggtacaagggggcaatactaccgccagtggtcaagcattaccgctagtacaaattacccgaagtgtgggtgatggacaccgtttttcattagtggataggggcgcttacaccggtgtgacggccaattatttaaatacccgtaaaccgcaagaaaaaacacaatcacaaattcgccgtagaaaacccactaccaataaaccgaaaaaagaagagcagaaacaaggggagtaccttgtcggtgaagaaggtaatgtgatggtgttgtctcatacttatgcgagtaaaaccaatgctgaacgtgccgcgaaagccgcgtgggaaaaaatacagcgaggtgttgcctcttttagtattacccttgcgaaagggcgtgcggatctctttcctgaattacctgtaaaggttagcggatttaagcctgagattgatgaggcctattggacgttagtcacggtgagtcactcattaaacaatagcggatttaccacctcgttagaattagaagtcaaaagcagtgagatagatatggataaggaatag

SEQ ID NO: 308389 - DNA, 219 bp, Proteus mirabilis
atgatgatttgtcctgtttgtggtcatgccgcgcatactcgtagtagtcagcaaatatcttccgataccaaagaacgttataaccagtgccagaatatcaattgtggcgcgacgttcgtcagccatgaaaccgtaacgcggtttatttcaaagcctcagttgattgaacgagtagagccgcatgttgataagtgttgccaacaggcattagcgatttga

SEQ ID NO: 308390 - DNA, 708 bp, Proteus mirabilis
atggaatttctattcattgtatcaatttttttatttttaatatctgtcgtttgcataactctaggcatgataaaacctagcatcatcaagttaaaaaaccgcaaacaatcatttattgcttttcttgttaccttcgtcttatcaatcattggggttcttaatttcgctcccgatacccctaacaaccaaatcaccgaaacacaagaaacaataaccgattcttttgtatgtaataataaaaatgcaatttacccttcaatttctgccatgatagaagattttaacgactatccatcagaaatgaatggctttgagcttattagcgaaaacccattaaaaattagattatccgcttttgctttagataatgattttagtgatgttaaagataatttagctaaacgagctcttgtttatggcatattccgtacatttattaacacaaacaatgatagtattactatcgtttctaatttagttgattacaacaatagttataaaaagctaaaagatagtccagaatacacagctacaattaccaaagatcaagctctaaaaattacccagaaatatattccaatcaattcattgaatgacttaattgatgaaaactgctcattcacaaaacagtttaatgaattacgttatgacgatagtggtaaaaaaggttttgataaattctttaatgaattaacagcaaataaataa

SEQ ID NO: 308391 - DNA, 351 bp, Proteus mirabilis
atggcactttccgatactaaggttcgttctgcaaaatctgaagataaagcgtataagctgacagatggtaacggactatttcttctggttcatcccaatggttctaaatattggcgcttccgttatcgcttcggcggtaaagaaaagatgctagcatttggcgtgtaccctgatatctcgctagcgaatgctcgagaaaaacgagatgaagcaagaaagcttgttgctagtggtgtagatccaagtgaaaaacgcaaagaagtgaaagaagagcaacaaaaggaatttaatacattcgagaaagttgctcgcgattggcacgcgaccaataaggcgcggttttttaactaa

SEQ ID NO: 308392 - DNA, 348 bp, Proteus mirabilis
atgcaaaactcaaaaggccccggcaatttccgcaacctatttatccatgcgccgaacggcaaaaaagacggggtacaagttattccactaagtgagattgcggcgaaagatgaatttctcaatattaagaatgtcagtcgtgacgatatgttagcagcacaccgcgtaccgcctcaaatgatggggattattccacagaataccggtggctttggtgacgtagaaaaagcggcaaaggttttctttcgtaatgagttggctccactgcaaagcaagatattacaaatcaatgattggctaggtgaagaagtgattaagtttgataagtacacgctagatgatgaataa

SEQ ID NO: 308393 - DNA, 327 bp, Proteus mirabilis
atgctttctctcgaattggtgaagcagcattgcaatatcgatcctgattttacggatgacgataatttattgacgctgtatatcggttccgccgtgaaatatgttgaaaattacacgcgtcgaacattacataaaactcaggagatggataaagcacaagaagatcctgaagccttgttcttaacggatgatgtgattgcggcaatgctcttattaattgcgcaatggtatgaaaatcgtgagggggtaatttcggggcaagctttttctacacaaccttttgcggtcaccgcactacttcaaccttaccggatttatgggttgtag

SEQ ID NO: 308394 - DNA, 330 bp, Proteus mirabilis
atgcgtgcaggacgattacgccacaccattaatattcaaaaatcagtattagcacccgatgccatcagtggcagtgatgtgatttggacggagcatgcgacaaaagtacgtgcagcgatcatgccttatcaaggacgggaatattttcaagcccagcaagtacaaagtgaggccacaacgcgaattcttattcgctatatcgcggatattgatacctcaatgcgtattgtatggggtaagcgaatatttaatattatttcgattattgacccttatgagcgtcatcgtgagcttcaattgatgtgcaaagagggcgtgaatgatgggtga

SEQ ID NO: 308395 - DNA, 471 bp, Proteus mirabilis; identical to SEQ ID NO: 301634

SEQ ID NO: 308396 - DNA, 969 bp, Proteus mirabilis; identical to SEQ ID NO: 300180

SEQ ID NO: 308397 - DNA, 540 bp, Proteus mirabilis
ttgcgtttacgcattcccgccgcgtttgaggggctaagtgttgcggggccggtgggcagttatgaatttcatgcccgtagtgccgatggtcgggtatccgatgtgtccgcgatcagcccaacgccggcaaatgtcactatctcggtgttatctcgtgagggtgacggcaccgcatcggaagaattactgcgcattgttgagcacgcgttaaacgatgaagatgtgcgaccagttgctgatcgcatcaaagtgcaatccgcccaaattatcccttatcaaattgatgccacgttgtttttatttccggggcctgagtcggagccgatacgcaaagaagcaaatcaacgtttgacgcaatacatcacagagcaacaccgcttagggcgtgatattcgcctgtcagcgatttatgccgcgttgcatgtggaaggcgtgcaacgtgtggaattaaaacaacccactaaagatgtggtactggataaaacgcaagcctcctattgtacccaaagcaccttaatcattggtggttcggatgaatag

SEQ ID NO: 308398 - DNA, 279 bp, Proteus mirabilis
atgatagatagtgatcagctaagtgacgatgttcgcgcttttatccataatgcttttaatgatatggatgagagtaatattactgttttattatatccacggaatatcaataaatttacgatattaaataatcaacttcaccaagataatacgacatcattgagtaactcttggttactcatagggttatcagtaattagtttaattataataattatggtcatattgattatttatcgtcgtaaacaagtcaataaaatggtaagcgagaatgagtaa

SEQ ID NO: 308399 - DNA, 375 bp, Proteus mirabilis
atggtaaaagctttaggtttaggtgttagtctagacgatatgaatattgaccctctactctgggttaattcaatatcaaaaataactcctttagaactagttcaactagaattatcacaaataaaagttgatgaacatgccttagctagaatgcaaatttcaagcagtaaagatttacgaaaatactacgaaaaatcattcaataatgaaaaacctcccagaattgataaagttcatatttcaatgctacatcctaactactcaggaaaagttaaaatatctcgaacaggattagtaactatagaaactaaacatgagagagatgtaacggatctacttttcaattcattattaaaaacttatgctgaaatataa

SEQ ID NO: 308400 - DNA, 408 bp, Proteus mirabilis
atgacctatttggtggctgatagaaaacgacagatcttatattcttatgtagatggcattgtgatggcaacccgttataaagatgctcaattcggttatgccggtaaaatgttagcatttaaattattctatatacatcctgaaactggtgagctaggaatacatatatatcgtcccaatgtctctcattacacaggttttttattaagtagtgatactgaagatcaccgctttattacttttcttaatgcctatatgcaacaagggcgtgatgcagtctgcacaagtgactattatgcacgagcaccactattctgctttgcgaaaaaccctcttcctgctgattttgagcaacaggtcgaacagattttgacaaagtttgatcaggagaaagaacatcatgcgtag

SEQ ID NO: 308401 - DNA, 231 bp, Proteus mirabilis
atgctatcaaactttcaaattctaacagaaaataaaaagatagatatcagattagtccatgctcatcctcacattgaagcacctcaaaatttcattaatgctaaaaagaaatatagttcttgctggttactaggtgaacaagaacgtttctttaaaaaaatcaacatggaaatgtgcgaaacaactattgttaattttaacctagaagaaattggaatggggattagataa

SEQ ID NO: 308402 - DNA, 201 bp, Proteus mirabilis
atgtcggccaatgataaaggtgtcaccctctcttttgcccctcaagttgcaggcattgctgcggtgcatcattacggtttaaaagagcgtgtgcggggcaagtcattagaaatccaataccctgaaagaaagttactaggcttttcaccagcggatatcaaacatatcgaaaatcaattactggaattcatttcccgttaa

SEQ ID NO: 308403 - DNA, 423 bp, Proteus mirabilis
atgaaatatctagtattaacaatcggattgttattatctctaaatgtatctgcaaaaatgactaactgtgatattgcaaaagaagcttttagagattctggttctataattagtgatacttttctttttggtatgaatagtgatgggaaaccagctgaatataattactatcatacatggtataaaaattactaccctaaaaaaattggcgctattaaagataggtatgattcatatacaaaaaaagtagatagtaataatccaatatttttaggcattacctctattatccaagccaataatattgcaaagggaatggatttatatttagaagacaaatctaataaagataagctcaaagaagcgcaagaattatacaattcaatgtaccaacaattagtgaaagactgtggaaaaatttag

SEQ ID NO: 308404 - DNA, 2433 bp, Proteus mirabilis; identical to SEQ ID NO: 297648

SEQ ID NO: 308405 - DNA, 732 bp, Proteus mirabilis
atgtttaattttagtcgtgggttatattgtattcttgttgggtattccatatttatttcgatggcggcacatagtgctgtgacattagatagaacgcgtattattttccctggaacggaaaagtcaattaatattactatttctaatgataatcctgaagaagcttatctcgcacaaagttggatagaagatttgcaggggaataaattaactaaaggtgttattttagcaacgcctccattacagagaatcgagccaaatagttatagtttagttaggttaagtacaacaccagaattacataaattaccacaagatagagagtcggtattttattttaatttacgtgaagtaccaccgaaatcaacagatggcaatacattacaaattgctttgcaatctcgtgtaaaactattttatcgtccaaatagtattttatctgaagcagaaactaaatggacacataaagtgacattaaccaaaacggctcaaggctaccgagttaataatataacgccttttaatttaacaataattggatttggaaatagtaaagcagccgctgaaaaaaatccttttgatgttgtcatggtgcctcctaaatcgactcatgatattgcgtcttctatattatctacaccttatcttacttatattaatgattatggtggtaaaccatcgttggtatttcgttgccaaggtgatacctgtgtggtaactggtgaacaataa

SEQ ID NO: 308406 - DNA, 1095 bp, Proteus mirabilis
atgtctaaattaagaccgaatatttttggtaaggctatggccataaatggtgataaaacaacaacgggtgctacttgtattgctaccattcaaaatgtaagttgtcatcaaaaaatggcgcttagagtaggagatcctaccactatttgtcctaaatgtgggcaagctggaaaaattgctacaggcgaaaatagaatcaataatcatgggaaagtacaggctgtcgaaggttctgtagtggaatgtgggtgtcctttcggttcaaatgttgttattgcgtcaaccacacatactagtgctagatttgcaaatgtaacaataacccctgaagaatctttttacaaaaataatatcagtcaagaaaataaatcatatgccacaccaattatagatatcgctgagcataaatatacagttactatttacactgcttatcctggaacaccaatgtctgacgataacggctctcctagatttgaagggggtaatagctcaataagaaaaacatcttctgctggtcatatgtggttacaaataaaagaatttaataaatataataaaatcataggtgatcactcttatggatttgcacctataaatacagggattaaaggagatggcatagtaacaaaaacagataccattcattatgaaaatccatattacaatcgaacaattgaaatcacaaaacaacaatataataagatatatgaatttggtcagatggcggttaataaatcagaaacctacttcaatttatattatcacggtattacaaatagttgtatcgatttcacatggaaaacattacgccatgcaggcattacaccaaacgtaaacttatatgacagcgctcaattaagcaatataaatggaaatataaaaatttttgaaaaacaacaaggtaaattcgatggtgatctaaaagtcattgataatataccccatataaaatccatcacaccaccatttcctaatagtgatttaaatactgaaaaatataataagatacccgaaagagatctcttgcaatggtccctatctaaaaataatgatgaaaacggtgataaaaacatagatctcgtgaaaaggtag

SEQ ID NO: 308407 - DNA, 537 bp, Proteus mirabilis; identical to SEQ ID NO: 298335

SEQ ID NO: 308408 - DNA, 150 bp, Proteus mirabilis
atgatgtgggatggttatagctattatgaacatttggtgaatcccaagggaaataatgatcccaagatagccccttttcacattctatttcttgctgagttccaagcatgtggtcaaccacctcaaataattgagagttacggtggttag

SEQ ID NO: 308409 - DNA, 480 bp, Proteus mirabilis
atggctaaccgtctaagtattattgagaaaattgaacaggagcgattaaatattgcgacaccttcatctttttgtcttgggattattgattgtgataaattcaaaacgattaatgatcaatatggccatgctattggtgatcatgttttatgtgagatagcgcagcgtttattagccttagaacgccagcaggtttactgtggacgacttggtggcgatgaatttgcggtacttttccctgctggattacgttcttgctctttattgttattggagatcatcgaatcgctatggcgaggaatggaaaaaccgataaaaatcaataaagaaaaaacaattgttccttctattagcttaggtattgctgaataccctaaggatggcaagacattatctgaactattaaagtcagcagataaacagctttatgcaataaaagagaaaggaggaaataaatacggtttttattctgttatttaa

SEQ ID NO: 308410 - DNA, 135 bp, Proteus mirabilis; identical to SEQ ID NO: 286968

SEQ ID NO: 308411 - DNA, 612 bp, Proteus mirabilis
atgttaaatgaaaagaaaataacagctatactaagaaaatccaagaaaaacataagtaatatcaatgagctaagtttttcagtgttgagcgaaattgataaagtaatacataaatcaaacagaatagattgtcattctggatgtagccattgttgttatttacgtgtatccgcatatgattttgaattaatttcaatatatcaatatattatgagcgaaataaataaaagtgatagaagaaagatattaaaggaattaaacgaacaatacgaaatagtaaaagacctttctctcgaagaacatcatcatagaaatatcaaatgcccatttctaatagaaaataagtgttctatatatcctgtaaggcctgtttcatgtgcaggataccattcaacaaaaaaagaactttgcattaaatctaacgaagatccaactgatgaatcatttggaatacctagagatattcaaattgaaatggtgaaagaaaatacccacgcatttattcaaacgtttattgataatactggtgaggaaataaaggaattaatttcaggaatgcaccagttagttaataataaaagtaaaataatacagtggcaaaaaggaaaatag

SEQ ID NO: 308412 - DNA, 471 bp, Proteus mirabilis
atgagaataaaccccaaaacccccaaaaaaatcaatggcactgtccgctttttagtaagaagcttaggtttgaaaacaaccccaatgtttttgccattaacacgcgtttctaatgcgagggctggctactgttttaacaatgttgaagactatataaaagaacatggtggccaagcagtttatggttggatgatatgggaagatagaaaaaaaggttttattgaagctgaatttcatgttgtcgtgaaaaatggaaaccagtacatcgatattacgcctcgatataactatgaagataaaatcctttttgttgaagataacatccgtaattcagggcgaatggaagaacatcctgactcatggtattcatggtctaatataaaaataataaatgaatatgtagctgaaatggcagaaccattacaagtaaaagaattaaatgatgaagatagtgaaattattccattgtaa

SEQ ID NO: 308413 - DNA, 1704 bp, Proteus mirabilis
atgagggaaacttcattaggaattcaaaaatatgagctggtacaacttacagagagactggagttgttacttaatagtgaaggaactcaatatacagagattattgaaccagaggtttatggcctatctgacgaaatgctgactctacttcaaagttcgttgacagcatcgtccgatacaccattttcagccattattcagcagttaggtaacgctgattgggttcatagtggaacaggttatattaaagataatatttgtccattttgccaacaaaaatttgattctcagcatcttcttcatgaattgacactcatgtttgataaatcttatgaagatgctctggcaacgcttacccacagtcagacagtcatttcccatgaattagacttattggagtcattccatgagcatttacgacaacaccctgtagttagtgatgatcaccaagtttttagtattattaaatctctgcaacaaactttacgtaataatctacaatcactcagacaaaagctactacagccttcgcaatccatacaacctgacgttattacagatatacgtcagcatttgaaccagatactggtaactttaaatagtaacattagagacaataatcagctggcagccaattttagtcaggagcgagctcgcttggcggcagattcctttgcatatcttagagaagtgagtgatccttatttgcgtcaatgtgatcaggaattagcagaaatacaacaacaattgcaagctgagataaatcaagttgatttattgagagatgaagagcgagcactttcggtcgaaactactcatcttatagggcaattatcagttatacagcctacaattgataacattaattataatctgacacaattagggatcaatgatttcaatattatttgtcatgatgagagcttgaaactatatcgcttacatagacaaaaccagccagatgattctgaggtctttaaatctttgagtgaaggcgaaaaaacaatcatatctcttctctatttcctagaatcatgcattggtcacgtacctgatagccagacaatacaacctaaactgattgttattgacgatcctatttccagcctgtcacataactatatttatgaagttgcttcgatgataaaacataaattaattttaccgaagattgcgcaacacattgttatattgacgcataatatatttttctttcaagagattctactttcagtttataaacgactggctcccgaacgtacaacaccaaaggggtgtgcactttatcgcatcattaaaggagaatatagtgattgtatcccattatcgatgcacgacatgctgaatgagtatcaggctttatggcaaaccatacgggatgtccgcgatggaagaagtttaccggtagtattacctaatacaatgcgaaatattcttgagtactatttcagtttttcttgcaaacaggaaaaactggataaagcgctaaataagctagcagttgaatattcagcaggggaatatgactcattttatcgagcaattaaccgtcattcccattctgatggcagaaatatcatggctacaggagtgattaatgtagaaatgtatttccgtttatttcagaaaatttttgaagaaacgaaggattctgatcattacaacacgatgatggggattactgttgagcaaacagaaggttga

SEQ ID NO: 308414 - DNA, 1539 bp, Proteus mirabilis
atgaagcccgtccttgatgaaaccggcaggcttatcccccgcgaggactaccggctttccacgctgaactgcggcggggaggattttgccgttgcgtgtatgcgggcaaatctccgctatgggaagaaccagcggcgggaagatgtgaaaagccaccactatatcatcagctttgacccacgggacgggccggacaacggcttgaccgtagaccgggcgcaggagttgggcgagaagttttgcgccgagcatttccccggccaccaagcccttgtatgcacccacccggacgggcataaccacagcggaaatatccatgtgcatatcgtcattaacagcctgcggattgaggaagtgccgttcctgccctacatggacaggccagccgacacgaaagccggttgcaaacaccgctgtaccgacgcggccttgcgctacttcaagtccgaagtcatggagatgtgccaccgggaggggctttaccaaatcgacctcttgaacggcagcaagaaccgcgtcacagaccgggagtattgggcgcagaaaaagggacaggccgcactggacaggcagaacgcccccatgattgcaggcggtatcacgccccggcagaccaagtttgaaacgaacaaggagaagctgcggcagaccatacgcgccgcgctgtctacagcggcctcattcgaggacttttcctctctgctgctgcgggagggcgtggccgtcaaggagagccgggggcggctttcctaccttacgccggacaggacaaagcccattaccgcccggaagctgggtgacgactttgaccgcgccgctgtccttgccgttttggagcagaacgccgccagagccacagaaaaggccgcggccatactcgaatacccccggcgtgggaaaaccggcatacagcccacaaaagcccctcaaaccgccccgaaacaggacggtgtgcagcggcttgtggacattgagcagaagaaagccgagggcaaaggccggggctatgaacgctgggcgaccatgcacaacctcaaacaaatggccgcgacgctgaatgtgtatcaggaatacggcttcacttccccggagcagttggaagccgccgttgataccgcctatcaggaaatgcgccagaccagcggcaagctgaaagcactggaaacgaagctgcaagggaaaaaggagttgcagcggcaggtacttgcctacgccaagaccaagcccgcccgcgacgggctgaaagcgcagaaatccgagaaagcccgcgccgcataccggcaggcacatgagagtgattttatcatagccgacgcagccgcccggtatttccgggagcatggcatcaccaagctgcccgcccggaaagcgttgcaggacgagatcgagcagcttgtttccaagaaatccagcctgtataacacctaccacgaacagaagcagcggtacacggagttgcagaccgtcaagcggaacatcgaccagattttgcgccggagcgagccgcaccgcagaaaggagcagagccatgagcgataa

SEQ ID NO: 308415 - DNA, 576 bp, Proteus mirabilis
gtgagagaaagtttgcagtcacggagagcaagtttctaccacggtgccaaaatccgcaattctgcggttttgtccctcgcgggaaacttgttggggagtgccttccccaaaccctgctttgcggcttgcgccgcttatccccgccgcgctcatgcggcaagaaaggaggtcacgaccatgcgaaagaaatacaaaacaccccaccgcagccgcgttgtgaaaacccggctgtccgaagatgaatacgccgacttcacagagcggcttgcgccctatggtatcagccagtctgaatttctccggcaggcgatatggcgggcgaccatacgccccgttatccatgtgtcagcggtcaatgacgaactgctctccgctgtcgggaagctggccgccgagtacggcaagattggcggcaacctcaaccagatagcccggtatctgaacgagtacggcgcaccctacaacgccctctccggcgaggtacgcgccgccatagccgaccttgccgccctcaagtatgaagtcttacagaaagtaggtgacgcggttggcaacactcaagcatatcaactctaa

SEQ ID NO: 308416 - DNA, 768 bp, Proteus mirabilis
atggaatatagtaaggaagatttaatggaagcaaaaaagcaaatttggggagtgggagagaacatgggaacagaggaaagtaaaaaaatctgggaggagaacgcacaattttgggataatgcaatgggtgacgaatctaatgaatttcacagagaggtagtgcgtcccaaagtaacggaacttctatctcctaatcctgcggattacattttggatattgcgtgtggcaatggaaattattcttcgtatcttgcacaaagaggcgcttcggttgtcgcttttgattacagcaaaaaaatgatagaattggctaaaagacggcaatcacaatatgcaaaacaaattgaattttgtgtggcggatgcgaccgatagaaaaagtatattagaattaaaaagaaatcgagcctttacgaaagcagtttctaatatggcaattatggatattacggatattgaaccacttcttatggctgtttatgaactgttgcaggaaagcggaatttttgtctttgcaacgcaacacccttgttttgtcacgttgactgaaaaatatatgacaccgcacagttactatgatatagcgattgaagggcaaccgaaagagcagatttattatcatcgttccatacaagatatttttaacctttgttttagagctggatttgtcattgatggattttatgaagaatgttttaaaaccaacaaagaaattcctatggtaatgatagtaaggcttaagaaggtaaaacgtgatagcttaaaataa

SEQ ID NO: 308417 - DNA, 888 bp, Proteus mirabilis
atgctgcggacgacgattgcgccgaaaacggcagcgcaaagagaacggctgctggacgctcttacgcaacttgcggatactgacccgcttttgcgttgcgaagtggattccatcacccatgagatcattctttcttttttgggccgggtgcagttggaggttgtttccgctttgctgtcggaaaaatacaagcttgaaacagtggtaaaggaaccctccgtcatttatatggagcggccgctcaaagcagccagccacaccatccatatcgaggtgccgcccaacccgttttgggcatccataggactgtctgttacaccactctcgcttggctccggtgtacaatacgagagccgggtttcgctgggatacttgaaccagagttttcaaaacgctgtcagggatggtatccgttacgggctggagcagggcttgttcggctggaacgtaacggactgtaagatttgctttgaatacgggctttattacagtccggtcagcacgccggcggacttccgctcattggccccgattgtattggaacaggcattgaaggaatcggggacgcagctgctggaaccttatctctccttcatcctctatgcgccccaggaatacctttccagggcttatcatgatgcaccgaaatactgtgccaccatcgaaacggcccaggtaaaaaaggatgaagttgtctttactggcgagattcccgcccgctgtatacaggcataccgtactgatctggccttttacaccaacgggcggagcgtatgccttacagagctgaaaggatatcaggccgctgtcggtcagccggtcatccagccccgccgtccaaacagccgcctggacaaggtgcgccatatgtttcagaaggtaatgtaa

SEQ ID NO: 308418 - DNA, 390 bp, Proteus mirabilis
atgtctaaatcggcaaaaggtacgacagaacggcctggacggaacgtaaaagctaaatctggtttaaaccgctcaatactggagcagggctggtatgaaatgcgccgacagcttgagtacaagcagctctggcgaggtggtcaggtactggcaataccaccagcctacaccagtcagaagtgcgcttactgtggtcatacagcaaaggaaaaccgccagtcacaaagtcaattcgagtgccttgaatgtggatatacagcgaatgctgatatcaacggggcacgtaacattttagcggcaggacatgccgtgcttgcctgtggagggagggtgcagtcagaccgcccgtcgaagcaggaacccgccgaggtgattcagacatcagtctga

SEQ ID NO: 308419 - DNA, 459 bp, Proteus mirabilis
atgcacgaaaatgaatggctggagaaacggctcgcatatattcgcggactgaacgcaccgaacgaacagcagcgccttttgctgatgctggcgcagttgtcccagccaacaccgaatgaccgccgcaagctgggagtgctcattcgtgctgaaaaagccgcagagagggcgctaaaggctcgcgctgatgccgctaaagtgctgaatgccgaacgtcgcgccgtccgcaaagcgcgtgaccacgaactctacaaggcggctggtctgatgggcgtggccggcgtggttgaccgtgaaaccgggcggctcaatgtggatgccggcctgcttgtcggattgctcatggagctggctgccggtacactgccggaaaacctgcaccaggaagcacttaaatctcgcggtgatgctgctatcgctgcccgtgagaaaaaaaataaaacgaatcaggctggctga

SEQ ID NO: 308420 - DNA, 702 bp, Proteus mirabilis
atgtctgacctagtagcctacaaatccaacgcccttatcgaggccagttacaagctcaccttgcaggaacagcgtttcctgctggtctgtatcagtcgcctgaaatccggggaggacgccccctcttcggatgaacaaaaaaccatgaccatcacggccgctgagtttcattcggccttcccggatatgggaagacaaaacgcagaaaccaaactcaaggaagcgatagatcgcctctgggacaggtcagtcatcatcaaaaacgaggagaaacgcgaggagttccgttgggtgcagtaccgggcacagtatttcaaaggtgaggctaaagtcgagatcaccttctccgatgccatcatgccgtatctgacacagctcaaggggcagtttacacgggtcgtcgtgaagaacgtctccagcctctccagcacctacagcatccgcatttacgagctgctccagcagttccgcagcaccggagacagaacgatagccattgaggatttcagggctatgttgggtttagatgggaaatacaaaacgtttaaatcattgaaccaattactaataacaccggccatcgccgaactgaacgaaaaaagcgatctggccgtcaccgtcgagacggtgaaaaaggggcgaaccgttgtcgcgttgcggttccggttcaaagaggacaagcagatcaagatggccgtatga

SEQ ID NO: 308421 - DNA, 951 bp, Proteus mirabilis
ttggcctcccaacggccgcgcacgctggagcagcggcgcgaggaacttgtcgccctgcgcggccgttgggaggccaaagctaacgaacatcttgagcgagccggccagcgcgaacgtatcgacatgcgcagctatacagcgcagggcaaggacgccattcctgaaaaaaagcagctaccgagtgaatggcgcgacgagcggaagcgtgcagaaatactggatttccgcgctgcaaaagccgagcaggaacaggcacagaaagacgccggcaaggtgctttatgagcacaacagcgcggtagagcactatcgcggcgttgtggccgcggtgccggagcaccggctgaaaaactcctcaccggacagcatcgctctggatttgcgagaaaaactcgtcgggcagcgcgttgacagcgatccggccgtactggccgcacgggagcaggaagaaaaaaccggtaaggcgctggagaatgcgcggcaggaacgggacaaaacccggcaggaagccgagcagcagcggcaggagcagcaacgatgggaagaagaaaaccggatgcgccgctggctccatgacaagggcatcaaaaaggacgagcgttataccggactgcaacagcaacgggaaaaatcagagcagcaggcacaggccgccgtgcagaaggagcaacaggcagaaatgcagcaccggcaggccgtcactgcgcgggaagaaaccgaaactgatgtccgtcagcaggccaatgaaaaatggttcgagcatcatcatacggccgtgaaagaggctgccgccgaacgccagcgggaacttgagcggcaggagcgggagcagcagcaggcaaaacaggctgaatatcagcagttgatcgcccagcaacagcggcaacgtgagcaggaaaaagagcaggaacacacaccggaacggcagcacgggcgcggaatgagcatgtaa

SEQ ID NO: 308422 - DNA, 459 bp, Proteus mirabilis
  misc_feature (9)..(18): n is a, c, g, or t
gtgataaannnnnnnnnnacaccagatattgaaaagttacctaacgatagagaaacattattttattttaatgttagagaagttccacctaaagctgaagacaataatgtattacaaattgccttacatacaaaaataaaattgttttatagaccgaaacaaatattgagagagccaaatgctatttggcaagatcaattagttttaaataagctatctgacggttatgaaatagagaatccaacaccttattacgtcactgtattcggtattggtggttcaaagaaagaagcggttgattctgagtttaatgcagtcatgattgcccctaaatcgtcacaaagggttaatagtaaagtgtactcaacgccatacttatcttatataaatgattatggtggaagaccgacaattaaatttcaatgtcaagctaatcgttgtgtagcagagaaaaaataa

SEQ ID NO: 308423 - DNA, 273 bp, Proteus mirabilis
  misc_feature (250)..(259): n is a, c, g, or t
atgaaaaaaatatcatttttattattaggattaatggttacatcaaactcctatgcagcaatttctttagatagaacaagagctatatacgaaggtgggtcaaatgcattagttattaatattactaatgataataaacaattaccttatttagcccaaacatggattgaaaatgataagaatgaaaaaattgagctagggccattaattgccacaccattagttcagcgattagagcctggtgataaannnnnnnnnnacaccagatattga

SEQ ID NO: 308424 - DNA, 438 bp, Proteus mirabilis; identical to SEQ ID NO: 296602

SEQ ID NO: 308425 - DNA, 843 bp, Proteus mirabilis
atgaagaacgaaatcaacgctgttttggagaatatgaccgctgccaccccggagccggaggactacaccggcgaggacggtttactgtactgcggcaggtgccgcaagccgaaagaagcctattttgtgccggataaggccgctatctttggccgtgaccgccacccggcagagtgcgactgccagagagtcgcccgcgaggaacgggaggccgctgagaagcggcgcaggcaccttgacaccgtggaggaactgaaacgccggggctttaccgaccccaccatgcgggactggacttttgagaacgacaacggcaggaacccgcaggccgggattgcccgccggtatgtggaacactgggaggatatgcgagccgacaatatcggctgcctgttctggggcggcgtgggaaccgggaaaagctaccttgcgggctgtatcgcaaacgccctcatggagaaagaaatccccgtccacatgacgaactttgcccttatccttaacgaccttgccgccagcttcgagggcaggaacgagtacatttcccgcctttgccgctatccgctgcttatccttgacgattttggcatggagcgcgggacggaatacgggctggaacaggttttcaatgtgattgacagccgctaccgcagcggcaggccgctgatcgtcacgaccaacctcgcgctggacgacctgcgaaacccggaggacaccgcccattcccggatttatgaccggctgctctccatgtgcgtcccggtgcgcttcaccggcgagaatttccggcaggaaaccgcgcagcggaaaatgaagagcatgaagaaactgattgctgactga

SEQ ID NO: 308426 - DNA, 189 bp, Proteus mirabilis
atggcagagaacaagcagcacgacacccgcaccgcccgccgccccgactgcgtgacggaaatccgcatgggcaattccgtccttgtcgtgtccggctatttcaagaaagacactaccaccaccgccgccgacaaaatggcgcgggtactggaagcggaagccgctgctacacaaaaatcggcaatttga

SEQ ID NO: 308427 - DNA, 1617 bp, Proteus mirabilis
atgttaagacaagccacccaaaacctcattaccgccctttatccgagattgtcccatgaggacgagttgcaaggtgagagtaattccatatcgaaccagaaaaggattttggaaacctacgccaagcagaacggctttaccaatctgcgctggtacaccgacgacggcttctccggcgcgaacttccagcgccccggttttcaagccatgcttgcagacattgaagccggaaaagtcggaaccgtcattgtgaaagacatgagccggttagggagaaactacttgcaggtagggttttacacggaaatgctgttccctcaaaagggagtgcggtttatcgctgtcaacgacaatgtggacagcgcaaacggcggcatggacaacgattttacccctctgcgaaatctgttcaacgaatggctggtgagagatacgagcaagaaaatcaaggcagtaaaacgagcaaaaggcatgagcggcaagcctgttaccagcaagccggtatatggctacctcatggacgaggacgagaactatctcgttgacgaggaaacctcgccggttgtccagcagatataccagctttgccttgccgggaatggcccgaccaagattgcccgtatgcttacggagcagcaaatccctacgccggggacgctggaataccgcaggacgggcagcacccgccgctaccaccccggctatgagtgcaagtgggcgacgaacaccgtcgttcatatcctcgaaaaccgggagtacaccggctgtctggtaaacttcaagacggagaagccctcttacaaggtcaagcacagtgtagagaaccccgtggagaagcaggccattttccccgaccaccatgagccgattatcgacacggaaacatgggagcgtgtgcaggagttacgcaagcagcgcaaacgcccgaaccgctatgatgaagtggggctgttctccggtatgctgttctgcgccgactgcggccatgtgatgtaccagcagcggtatcagaacaaaacccgcaagcaggactgttacatctgcggcagctacaagaagcgcacccgcgactgtacggcacactttatccgcaccgacctgttgaccgctggtgtcctctccaatctccggcaagtgacggaatacgccgccaagcatgagagccgctttgtgaagctgcttatccagcagaacgagatcggcggcaagagaaagagcgccgcagccaccaagcagcttgaacaggcgcaggagcgtattgccgaagtgagccgcattatcaagcggctgtatgaggacaatgtaaacggcaaaatcagcgacgagcgtttcatggaactgtcggcagactatgagcaggagcagcgggaactgaaagaccgcgccgccgctttgcaggccgaactggacaagtcgcaggccgccaccgtcaacgcggaaaagtttatggggattgtccgaaagcaccttgcctttgaggaacttacccccaccctcttgcgggaaatgattgagaaaatcgtcgtgcatgagtgcagctatgacgagaacggcacccgcaggcaggacattgagatttattacagctttgtcggcaagattgacttgccagaataa

SEQ ID NO: 308428 - DNA, 204 bp, Proteus mirabilis
gtgcttaccggctcttctattgctaaacaaacccaaggggttgcctgtgtaggtgatcctgtttattgcccagcgtgtaaaaaaacaggcactattattgaaggggataatttaatgaaaattaaaggtatccctgtcgccctcgaagggcataaagtcgcttgtggctgttcagatggctgtatactcgttgcaacagattaa

SEQ ID NO: 308429 - DNA, 780 bp, Proteus mirabilis
  misc_feature (747)..(756): n is a, c, g, or t
atggttggagaaaataactataaaaactatcactcaggacagccattttctactcaaaaaataggtaattttagtgctaaaaatattccctttttttcgtcggctattgataatgcaagggttcactttgatagagcaaaacaacaatatgcattaaaaaaatatggtgcaatggtaaaagatatcgcgaaaagtcttgatcctggttttagagggatgttttctactataaaagctatagttaattctgctacattaccgagaacaattaaaacagatgctctaaatgatgtaaaaaaagcgattaaacatgattatcatctgcttaataaatatattactggaattaacaatggtaaatctcaaggtgaggttgtttattctttagtagaacaattaaatgataaagagagtattacaattagccaatataatgatatccgtgcattctttggcattagtgcatttaatttacctaaaagcattgatgtaaatgcatttcttttagctaattatgcaaaaacacatgctctgacaatttcaaaaaataagcaagatgaagttgtattctcatttgtaaataaaatggatgcggggattgctacgggcttatctgctggggtttttagctatgatcaaaaatggagagaagggccgattgattatggttttgttacaccgttaatggccagtgtgatacctgtctcttatacacatctgacgctgccgacgatactccttgtgtannnnnnnnnntgtgatactcgattatcattatga

SEQ ID NO: 308430 - DNA, 468 bp, Proteus mirabilis
atgaaagaaaatattgctgtaagatcgatagaaaacatatggcaagacccacaatgtttttgtataagtgaatttattagagatgagtttttttattatttcaaatgtttagatattgtatcaatgaagaaaggaagtatagtcgatgcagaatatcttggttgttttaatattgaaaacatgttggcagtaaaacatacaagatttacaaaaacagaaatttatcctgtggatatagaccatgattataaatgctactattatgaggttaatgactccaattggttgaataatatattgaatgaaagaactaaaaatgatagtgattggaataaatatgatactaatacctataaacactttattttggaaaataaagaatattgggtagaagttataggaagtaatttgattttttctaaaaaagaaaaggatgaggctaaattagtactttgggatactatttaa

SEQ ID NO: 308431 - DNA, 627 bp, Proteus mirabilis
atggaactttctacattacttctttttatcccagcctgttttgctttaaaccttgcaccagggccaaacaacctgctttcaatcaataatgcagcctactatgggtttgctcgttcatgtgcaggaggtctcggtagattactcgcattcgtgattatgattgttctagcttcatttgggctagctgttgtattgcaaacatctgagttcattttcagtgtaactaaatttgctggggttgcttatcttttgtggctcgcatatcaattatggaaagccccaactgatgaattcaaatttgattcaaataagaagaataactctattgccaaattagcaaggcaagagttttttgttgcagcaggaaatccaaaggcaatacttatctttacggcctttcttccgcaattcgttagcccacaattaccggctagttcccagtttctaatacttggttctttattcttgttactcgagtttattgcaataatgctctacgcttggttaggcttacacatgaaaaagttgctaaaaaaaccacatgctaaaaaagtgttcaatcgtatgtgctcaagtttattagctagtgcagggattgggcttttagtttcacagaaaagccattaa

SEQ ID NO: 308432 - DNA, 810 bp, Proteus mirabilis
gtggatacagttaataatattttatcaaattccgcgctgggtacagtgattgggatcattggtattcttatagccatttttatttatgttttaactcgtaaagtttataaaatctctagctgccatgaattttcaaacctcataaataaaaaccactcgagcctaccacagcaaataagtgtaatgtatgatggctcattagtagaaagtgtatcttcttctgaatttgttatttggaattcgggtaactctgttataacaaaaagtgcattagctactaaagaacctctaagaattgagtttagcaaggaaattcaattattgcgttatcaagtcgtagcatcaaacaatcctattaataatatagagctaaagactgacagtgaatatcctaattgtattcttattgattttgattttattgaaaaaaatgaaggtgctagaatagaaattctccatactggagataaaaacgatgttagggagaaaggaaaactaataggtgtaaaatctatctttagtaaacagaaaaaactatcaagaaaaaagaaaaaatcccaaacaacttttagtaaaaaagcattagatgtaattcttttattgttgtcactattgtttccaataatgatctcattaatgattatttactcattcgcctctccagaggcttttatttctacaccccgccccgttagagatagtagttctccatgggtgatgcgtattatgggcttctccgtgatatgtgtatttatttttcaatatattatccatcgtcccccttacccatcaagtttaaaaaagccttaa

SEQ ID NO: 308433 - DNA, 141 bp, Proteus mirabilis; identical to SEQ ID NO: 300062

SEQ ID NO: 308434 - DNA, 318 bp, Proteus mirabilis
atgagtaaaaatagaaaaaaagcaataaagcaattagttaaaaattggcaccgttgtattaataaacagacgggttcaatttatataactgcgttactgacttataaatatatttctatacttgaaaccgcattcacagcgttacctgttaatcttaattgctattttttaaatcgtctttatggtgatagtgggtttatcacaccggctcttatgttcgatcatttacaaaaagcagcagatagtgcctctcattaccttttgagtgcgtttgatggagaaaatggtgtttggctggttgattgttggaaacaataa

SEQ ID NO: 308435 - DNA, 144 bp, Proteus mirabilis; identical to SEQ ID NO: 308200

SEQ ID NO: 308436 - DNA, 1164 bp, Proteus mirabilis; identical to SEQ ID NO: 289895

SEQ ID NO: 308437 - DNA, 348 bp, Proteus mirabilis
atggttcagggaatatctaactcaaataagatgacgctatctagtgaaaaaacggaaagtgatattccaactgagtcttatagcgtaaataggtatttgaataaatgtcagcttacacctgaaagtataaaaaaattagcagagaaattagatatacttaaaaaaatagcgagtttaaaagacaatattgccagtcataacgatgagcaagatcttcaggaagataaaacgccagaaaattatgaaggtttgctattaagtcatcgatatttactatcatctgctggttctaaaactaaaaaaatatctttagatataaatagaagaaaaaaaagcacagctcactaa

SEQ ID NO: 308438 - DNA, 1371 bp, Proteus mirabilis
atggcacaatatggcaccggcagtgatttccaaaaagccgctcaagcggtgacaggattactacaagggctggcaggtgataatttagcaggtgcattggcgaatgcttcatcgccgtacttagcaacattgataaaacagcaggttggtgaagataataaagccgcgaatgccatggcacatgctgtgttaggcgctgttgttgctgaactaaataaccaatccgctgctgcgggtggattaggtgctggtggcggcgagctgtccgcccatgttatcttaaacaccctcttcccgggcaagaaggtttcagacttaaccgagagtgagaaacagcaagtcagcgcattgagtcagctagcctctggtcttgccggtggactgactaccggtgatatagcgggtgcgattactggctcgcaagctggaaagaatgcggttgagaacaactttttacattctgaacaaattatgagttttgttgatgctcaagcgaaaactaagaccccagaagagagaaaacagttacaaaaagatattgatacactagacaagcaacttcaatcacaagcggaaagatggggaatatcaaccaatgatatgaagagcgctttagatagcttgaaaacattggaagatttgccagattgtaatgcacaatgccaagacatggtgaaagattcaatatctaaacttgagcaagcattagaaaatagaattgctaagcattcatcacaaacagagaacctcaaagagctaacaggtattttagcgacggtgattgtactgaatgaaagcggattgattgatggccgatccactacatcaggaggtggaaaagggatatctagcgttacaggttcttctaagattgataatgctgtacaaggcggcgggcaaaaagggaaagaaactaacccgataattaatcaaccgaatataacagtaatctcaccggaaatagaaaccaagatacttgcgggacaaagggttggaaactcaaacaaattaattgggggacactcgtcttcagtgagtaatgaaaatccaaattatgctgtagaaacaataaaattgaatccagacggtaccagagttgtgaagtttactactcagttcccagatggaaacttatcaaaaattaagacaagtacactttttccagagaattggtcagataaaagtattattgattctttcaataaaattggtaactcctcagctattggacaaagaagctcaacaggtgaaacgttacatcgtggtgtaattaatggtgtagaaattgatgtaattaaaaaaggaaatcaagttacagctgggtatcctgtaggtggaaaaccgactcctggctttaatccaatcgattga

SEQ ID NO: 308439 - DNA, 378 bp, Proteus mirabilis; identical to SEQ ID NO: 16790

SEQ ID NO: 308440 - DNA, 894 bp, Proteus mirabilis
atgaataaatacttaaaaattatcagaaataaattacgttataagtactgtgatgtttttccaaaattgataacaaaatcaatatataaagaaagaatgaataaaaaattagatttgagacatccgcaaactttcaatgaaaaattgcaatggctaaaactaaatttatatagagataacccgctggtaacacaatgtgcagataaatatgcggctagagaatatgttaaagaatgtggctgtcaagagatactcaatgaaatccatcaggtatgggaagaaccacatgaaattaatttttccgaattaccaaataaatttgtactaaaatgtaaccatggagcaggatacaatattatttgtagagataaaaatagtatatctcctgataaaataaaacaaaaattatcaacttggttaaatgaagattattggcgtttatctgtagaatttgtttataaagatgtacctaaaaaaataatttgtgaaaaattcattgaaacaaaaaataatgaattgccatacgattacaaattattttgtttccatggtaaaccactatttgtaatgatatgcacagaaagggaatctcaccatccaaaattctattttgttaataaagaatgggagctactaccctatggtattgattataaaaatagaaatgtttcaactgtactagagaaacctcaaaattatcaaaaactatttgaatatgcagaaaagctgtctaagccatttccttttgttagagtagatttatatttaaacaatggtattatccattttggagaattaacatttataccatcagcaggaatggataaagaactaaataatgaagaagttaaaaacgttgatatgatttttggcaactatcttaaattaaactaa

SEQ ID NO: 308441 - DNA, 804 bp, Proteus mirabilis
atgagagttcccgttttaggtcttggtacttttcgcttaaaagacgatgcggttataaattctgtaaaaactgcactagaactaggttatcgtgctattgatacagcacaaatttatgaaaatgaagctgctataggacaagctattgcagaaagtggtatatctcgcgacgcgctttacatcacaacaaaaatttgggtagaaaatttaagtaaagataaattaattcctagtttgaaacaaagcttaagtgatttacaaacagattatgttgacttaactctagtacactggccatcgccaaatgatgcagtttctgttaaagaatttatgcaggagttattagctgcgaaaaagatgggattaacgcgagaaattggtatttcaaattttaccattccattaatggaacaagctattgctgccgttggtgttgaaaatatcgcaacaaaccaaatcgaattatcaccttatttacaaaatcataaagtggtaaattgggctaaacagcatggcattcatattacatcttatatgactctagcttacggcaaagcattaaaagatgaaacaatacaaaccattgctaaaaaacacaatgcaacaccagcacaaatcattttagcttgggcgatgaatgaaggttattctgttattccatcttcaacaaaacgtgaaaatttagccagtaatttactcagcgtaaatatcaaattggatagtgaagataaacaagcgattacaaagttagattgtcatgatcgtttagttagcccagaaggtttagcgcctcattgggattaa

SEQ ID NO: 308442 - DNA, 228 bp, Proteus mirabilis
atgaaagtaattaattattttataatattattttgttgttactttgctctggctttcattgcattcgtattgcttggctttattgcagaacttatcaattatatgaaattaggtgttttttacattgatatattttttttgaaaaagccaataattttagggggagtatttggtttgagttttagtggagttcatttatttgtgagttattggggacataaacattaa

SEQ ID NO: 308443 - DNA, 978 bp, Proteus mirabilis
ttggcctcaggattagcgggtggtcttactaccggtgatgtggctggggcaattactggctcgcaagctgggaagaacgcagttgagaataattatctgcacgcaaaacaaattacaacttggttagataaatatgctgaagcatctagtgataaagagcgggctgagttggttgaaattgctaatagtgtcgataaggagcagcagcaaaaagcatttgatacgttgatatcaaaggaacatttggagaaacaaaaaagtgaattggtaacattgctcaattcaaatagttgtaatgatgattgtaaacggattgctcaatatagtatcgaacaactaaatccaattattgaaaattataacgaattgcagcgcgggaataatatacctcgggcagctgttgcaacaatcacccttgctctccctgtattgagtaagccgctggcaccttatgtttcaagatggatgggaagtacaactttgaccaacagagttaccggagcgggtattagtggtttagctaatttaggtatgcaggggtacaacatttatgaaaatccaaacacagaattcaattttaccagttttgggacgtccttagccacaggaactataacaccaggtatggggtattgggggacaactacaactaatactataggtgcagggttttctagtatgatagatggccaatctccatgggtttctatgggaggagcgtttgttggttcaacggtaggttatggaggtacgaaatggatcacaaatacccttgataataaatttaatccttggtcaagaggacttaaagagcgtccatttgttgtaatgccatcaataacagctccgccgagtgtatcgccaatgcctggagttataggtaacagccttggatctgcgggttcagaatatttaaataaagagactagcgaagtattgaagaaaattacaacagggaacgaaaatgaaagtaattaa

SEQ ID NO: 308444 - DNA, 543 bp, Proteus mirabilis
ttgtattataatcgctttcgctattatgatagggaaacagggcagtatctttccccagatccgatagggttattgggtgggctgaatccctatggatatgtgcattgcccgacggggtgggttgatccgtttgggttgagtgggacgtctaagattaaacaaacaggcggtaggcaagttctcgatcctgagagccttgcaggttgggaaaaagcagagcttttctataacaaaataagaacagaccccactgatattgctcaaatagcaaaaaatacgggctggaaagaatctcatgtcgcccgagtgaaagatcatgttttcttcaaaaaacatcagttggatgataggtttggcaagtttgacgcagacccttctatggtaaatgcatgggagcgactaaagaaaggtgattacattaaatcagatattgatttattgagacatgagtattttgagtctaggtttgaaggtattttttcaaccatttatagaacggcgcatgaggcggcagttaaatctggaagagattggaaaccttaa

SEQ ID NO: 308445 - DNA, 570 bp, Proteus mirabilis
atgtgtataagagacaggatttattataatggtcagtcagttatatcggactgtaataaagcagcagattattatgagaaatcaatcggcagatataatgaaaagatccctcgggataaatatatagagctctgtcaatccgatagaaaaatgcgtaatgaagttaaaaatgagttaccgagtattgttatgaagcatatttctacatttagcggtgataagggcgcgttaactcagtgtgaattatcgtttggtatttttagtaataaaattattcctgttgaaaatttgcgagtgaaaattcaaatgactgcggagaataactcgaatgatgagccttttatactagagcatatagttgcctttcctccttttggatttaatagtttaaataaagaggaaaatggtggaagaggttatgagaattctaaattagtaccaatctatgatgaaaaaggttgtaaaactcacaaggctaaaacaaaaattctgtctgcaacagcattaattaatggtgaatctgttgatttattagagaagaacttaatttcattcagcgataaaaaataa

SEQ ID NO: 308446 - DNA, 816 bp, Proteus mirabilis; identical to SEQ ID NO: 46213

SEQ ID NO: 308447 - DNA, 501 bp, Proteus mirabilis
ttgtattataatcgctttcgctattatgataaggagactgggcagtatctttccccagaccccatagggttattaggtgggtttaatccctatgggtatgtgcattgtccgacgggatatattgatccgtttgggttggcatgttgcttctttgcgaagaatcctaaacaggctcatgcgatcattcaagaaaagtgggggcatgccatgtctaaacgagacatgagagaattacagctcaccgttgatcgaataaaattaaatcagcctaaatattcaaatgatggaaaaatatttgagaataatcaccaggtaggtaattcaaatagtcagagattggatacaggcagcgggccatataaagaatggacggttaagacacctgatgtcgggactaatggagctagacgtattgttgttgatactaaatcaggtaaagcatattacacgcatgaccactatgattcattcatagaaatagatttaaaaggttggaaataa

SEQ ID NO: 308448 - DNA, 240 bp, Proteus mirabilis
ttggcaaaagttgcaacttctgatttagacccatcaacacctattgggtgcggtttaagccccataaactctaactttgctattaaattttttgcaagagttgtagcacaacctgacttagttaaaattaaaatatcatcaacatatcttttgtaccaaatattaggtattgagctaatttttttatcaatcacttgcaaagaaatttcggctaatatatttgaaattgataaaccttga

SEQ ID NO: 308449 - DNA, 579 bp, Proteus mirabilis
gtggatctaacagatttcgggaaaaatggtttttcttttgtagtaaaaagatatatctatctggaaagtgatataaaaggtatctctatctctttaaaaaataataacaatagtgcttatttaattaatagctctattttatttaatgatgatgataaaaatgtacctatagtgaataaagatcgtgaaagaacaccttttatgattttaccacctttgtatcgtttagaaccctctagtgaatatagctggaatattcgtcgtattagtgaaggttctaatgatatggcgttaccaaaagacagagaaagcttattttggattgcatttagagcagttcctcttaaggatagtaaaattgaggaaaagaaatctgtatcactaacgataacacctactttcttcttcaaattaatttatagacctgagtcaataatggcattggaaaataaagatgttattgatgatgttattgttgaaaaggtaaatgagaacatagttataaataataaatcaccactttatatgacttttgaatctgtctcttatacacatctgacgctgccgacgaaggcttag

SEQ ID NO: 308450 - DNA, 453 bp, Proteus mirabilis
atgcaattagaagaagcattcataccatttattatattgtgctttatcttatatacaattccaaacgtgatgcttttactcccaaacattgggaacataaaaaaaactgtttacctctcactttatttaatatttttatccttcaccactaatattcttaatcttctggcttataaaacctttgactccatacatttcattaataaaaacaaaatcgaaataacatcaaaaaaatggcatgatgctgacatacctattcctgcaacactgaataaaattcaaatgactgctttcaatgcatttcaaacaccaacccattctatcttttgtaactacgatgatataaaatcattaaccacaaaaattgaatttattttctttaaacataaaaaaactcctcctaaatgtatatttgtcaacaatgacgaagtgagtctagttgaaaaggattag

SEQ ID NO: 308451 - DNA, 1224 bp, Proteus mirabilis; identical to SEQ ID NO: 49889

SEQ ID NO: 308452 - DNA, 255 bp, Proteus mirabilis
atgaaattagcctacccacgcaccaaagaaaactacacccttaaagtattacgtttgtatgcccttactgaaatatttgtaaccccgccagttgtgaccggtgatatctataccgtagatctagcactgctgcatattatgacccctaacaatcactttaaagatgaaagtaaaatagcgagtctaaaacattcctatacacatggcgaaaaggtttcaccactattgggggtcgtctcagaaaacggaaaataa

SEQ ID NO: 308453 - DNA, 426 bp, Proteus mirabilis
atgatgaacaacacagcgttgttacagcacatagcctctgaatttatagcccattcaggagttcctgcgaaaccggcatttgataaaattagtgcaggtgatgaaacattcattaatgaactgtcaccatcggatctgcttgaattactcgaaaaccccctgcctattatcatcaatactttgaccggtgagcatcattccgcaatacatagccacagtgacgatatattgcccgactgtacaaactatgcatatgggatagggtatgagtctgctactgctttgtttgtattggtagaggggattgagagttactatctcgcgcttaaagcaaaagcatatctgaagaaccaaaattatttgccgttcctgataaaatttaacggtttagacaaacatcctgacagccaaaatctatactattaa

SEQ ID NO: 308454 - DNA, 294 bp, Proteus mirabilis
atgaagaaaaaaacacaacgggaattctcaaccgctcgtttttactcttgtgcttcagttgccatgttttcgttgatggggtgcgtctcattggaggaacgtgaaagagttgcgtttgaactcgtaacaaatgaaccaaaccaagagaatattcaatcttatctgaagctggctgaagaactacaaagaaagcaggttgatgaagccagacaagcggcagatgcggctacgtatgagcgagacaaagagctcaatgaatatttcaaacagtatgggaggacctataaaaaatga

SEQ ID NO: 308455 - DNA, 834 bp, Proteus mirabilis
atgcttgatagctatattggttcattgctgaagtacctccaccagcttgactctctttttcgagatacaaaggtaatttcagcccttacctgtgtcattccaccggtagaaaatggttgtgatgatatcggtaaatgcattgagccggttgtgaattggggttctcatgcctatacatcggttatctcatgttggcaggacttatacatttctccgttgtactcacaaaagtttgcgaggcgaacagccggatatgtacagttatcaactgcggctatggaacttgctgatcatctaatcaaaatcaataccgtaaaaaacaatatcagaagctcggttgtcgcactgccgaaatctgagcgtttcagaattttgcgtaaacatctgagtaacgtaatgacactgcatttgtaccggaacattcctgtatttaactctgacgatgtgatcactcatgcttcatatacgtggggcttaaaaggactcatgcagaaaacagaccctgttaagctttatcagctcatagctgacatagcaaaaggcaacgctgagttacaggacttaatggataaaatccaagagtgccctgctaataggctcagaataaagcgtagcgttacgccgcagccgatctgcaacctaacctttgccagtgggaaaaaacgctgcataaacgctcctgtgccgtttttgatagtgcaggatcaggattttaaagtaagtcccctgccattgtttactgctgaagcagacagacaggagcgttctgacaaacacaaaacgactctccttggcgtgtttagggggcaacagataattaagttggaaaaatga

SEQ ID NO: 308456 - DNA, 228 bp, Proteus mirabilis; identical to SEQ ID NO: 289171

SEQ ID NO: 308457 - DNA, 837 bp, Proteus mirabilis
atgaaaaagaagcaaatcagtaacttaacactttatactaatgttcgtcattctgatgatttcaatctttctctcgccagcttacctataccggcgaaaagagtgctgtttcttattctcgctcagatatctgatcctagagaatctgttgatgaagatgaaatatgctttgaggttaaagctaaggagtatgctgaaatttgtgacgtggacctttcaactgcgtataaatcccttccactcgccgtagatactctgttgagctctcacatatatgaagatctaagtgaggaaggttttaaacgagcttcaaaaaccaacattacaacgagtgctacatattactttgacgaaggctactgcaaaatattctttaaccgtagggtatttccctatttctttgaattatcaaaaaaattcacgacacaaaaccttttttatgtagctagattatcggatgctagtttggcaaatctatatcagctaattatgaaacggtactctaaacgtaatactattgccgaatataaaacgtctttcacaattggagttgacgaacttaaggacgaaatgtggctgttcaatatagataagaaaggcaataaggaatatctctatcaaagctataaatattttggtcagtttttaaagcggctggcggttagtttgggtgaacaaacgaatatcaaggatgtttcaattgcgattgagtcacgtaaaggacgcaaggcttctgtgttacgcatatcctatgttattcacaatgaaaaagtgggtggttctatgcctaccgataaggaactggacgagctcgaaaagcagataggtttattatag

SEQ ID NO: 308458 - DNA, 492 bp, Proteus mirabilis; identical to SEQ ID NO: 289173

SEQ ID NO: 308459 - DNA, 381 bp, Proteus mirabilis
atgaaacaagagcgtaaaaagataattttgtatcttcgtcccgaactcagcgaggctgataaattcgcaattaaaaagattgaagaatcgccggttcaaactgaagcagtacgtacagcgttactggcagggatcgcattaggggaaattgatgatagattgccttctttgctggcttcaattctatcagacaggacaaaggctgataccttcaaagtaatgttagattcctttctaactgttgatagtgacggcactcatgctcacaataaagtaaatttgagtcaggcaaaacgggcgttactgactgataaagtaaaaatagagaaggagcccccaagtcaggcagcacagaatttgaaaggttcattaccagattga

SEQ ID NO: 308460 - DNA, 960 bp, Proteus mirabilis
atgcgtatttatatagatgatggttctactaacataaaaatgctgtgggaacaggatcaggaaggtgaagtaattaaaattagtcctaacagcttcaaacgcggttggggtacggcttttggtactggcaaaccattcaactataccgttgataacgagaagtattcattcgatattattgatcctgacaatttgccaactaacaacgtagcttggcagtatagccctctaaacgcagttgcagtgcaacatgcacttcagattagcggtttacctccccaagaggttgaaatcgttgtcactctaccattggcagaattttacgatcaggatgcgcaatatcgaatggataacatccaacgcaaaaaagataacttaatgcgcgaagttcaagtaagccggaatgaacctttcaaaatcaaaaaagtaaccgttcgtcctgagtcaattcctgcgggtatatctttgtgtgatgaattaagacccaatcattctgtactgattattgatattggaggcaccacaactgatatctcaatggtttctggtcaaatgacgtctgtatcacgcatttttggtgatcctacgcttggcgtatcattggtgactaacgaagtcaaaagagctttggtgaacgcttcaacagaaacatccagctataacgcagatcaactcattattaaccggcacgatgaaaactatctgttagataacatcaacagcgttgatgatattcagatggtgaaagatgccatgaacagcagtattgaacgactaaatacccgtgtgctcgatgcggtcagcacctttaagggctatacacatgtcatggttattggtggtggagctgcgctttccgctgatgcaatcagaaagaaaatagcaatccaaccagaacgtttctacgtggctgaagaacctcagtttgctttggttcggggtctgaaattattaggataa

SEQ ID NO: 308461 - DNA, 813 bp, Proteus mirabilis
atgaaccttaataccaatactaatatcatcgaatcaattgagatagacagagtaattgcaatccgaaaacatgctattagcctatataaagaatcactctctaaagcagcagaggctatcgaaatattaaaaacaatccccaataccaacaatcattttcctcaccaatgcatagaggacgatttaattgatttgcaataccctagaaatactaatgatgatgataacagaacacggtttgaactttggttagacagaaagatatggaaaatgtttattgataaatctggtatcaaaacaatcatgagcaataaacaaatagaaaagttacattacgacctttacgatatgaaatcgcctatattcaactttgagaatgcattaagcacttttacaagtttaagcgctaacaaagctgattcatttaagaatggattgatggatgcgttgcaatctgtctcatgggattacaagagtaataatcctcgctatcttggcaaaaaaataataatggataatgctgtttcagttggtaagtattcaactagatttaataagactgacaccgttaacgatctagttagaatattttgcatcttacaaaaaaaaccaattcacgaatttcaaaatagtgtagggctatatatatctgataatgtgcgaactaataataaaaattttgaaactgaatttttcatcgttaagtggtacaaaaaaggcacaatgcatctattatttaaaagtgaaagtttgataaataatactaatgatttgatcgcaaaacttttcccctcagcattgccgcctttgtga

SEQ ID NO: 308462 - DNA, 420 bp, Proteus mirabilis
atgaatacctataatgtatcgtataaggttaatcttaataacaataactatgctctagcttcatttgatgtacaagcaaagtctgaaaaggaagcgcgtagaataataagcaagtcgaatataggtgttgaagaatatactgttactgagaaagactttttctcggtaacgtggtgtgctgaagatattcatgcaagtattgtttccggttgggatagtgaaacagaattagatgaatttaataaaactgatcttgatgttttctattttaatttaagtgataatgataaaaagaatttttgtttagatgtattggaggcacttaaaaacaaccatgattgtaattacggtattaattgggatgtaattaaaatatcagcagattcaagtatggatatatggaaaagattaattaattaa

SEQ ID NO: 308463 - DNA, 459 bp, Proteus mirabilis; identical to SEQ ID NO: 289211

SEQ ID NO: 308464 - DNA, 549 bp, Proteus mirabilis; identical to SEQ ID NO: 289212

SEQ ID NO: 308465 - DNA, 522 bp, Proteus mirabilis; identical to SEQ ID NO: 289213

SEQ ID NO: 308466 - DNA, 615 bp, Proteus mirabilis
  misc_feature (555)..(563): n is a, c, g, or t
atgaaattaactattgcaccagaagattatcaattagcaattgatatgataaaacttggatttagaaagaatgtaatattgtctgagattccagcaatatctccacgtatgtatggatgtttacgaaatgattcaggaattgataatgaggataatgattttacgttaggacgactaagaaaaattagcactatattagctaatcaacatgataaacgatctgcaactgattttttacatgtatatttaatgactgcacaagatccagaaaatagattgcaaatagaagaattggttggtgcttataaagcataccgccatttatttaatgttcattgtggtttctttgatgatccattaaagaaacacataattgatccgaacttggcatggcaaattgcaaccaattaccgaaatggaataattggtttaactggctgttttgagtgtcggcagaaatatatctatcttacacacgaatcagaggattcctgcaatatgaaatgtccttattgctctgaatctaaagaaaatgaattcattaataataagggnnnnnnnnncgctcgtcggcagcgtcagatgtgtataagagacagtaataagggtgaataa

SEQ ID NO: 308467 - DNA, 840 bp, Proteus mirabilis
atgaaaagttgtaaaatgattacaggaattctattttcattagtgttatccggctgtgctaataatgaaaatagtaattggatatataataatgaggcttcaaaaccagtggttgaaaatggaagtgaagctctcaaaattgctaaatcaatagggttgaataatctagatgatgatgcggataattacacaatctttgctgtgttagtaccaagtcagaaaggaaattcattaaaaaaaattaaggaacctattgttgtaagcgatacaaaagggatggatcagttaagagaaatcatctcacaaagtaagaatgcagtaaatgtagtggatcttacccttgctgcaacagtaaaccctgtttttgggctcttagcttttgatacaagcactccagaagaacgagcgcctatgatggaaggtcgtttactagtaaccgaatggggatctacaccgctgagtttcagtgaccaacttttgaaaacgaagcgtattaactctgtctttgataaatacttatcaaatgcaattaaagctgaagtggctggaaatgttttagcatgtaacgctgctaaatttgtatctgttactgaaaatagaaatatttccgatcagaatctatatgtaaatgtgcatcaagcaccattcactaatctgaagtattcatataattatacggatcatgagtgtgttcattatttacacgatactggtaggtatgaggaagaattcaagaaaattagtgttgagttaggtcctgaaaccgtactgtttttgccgagcaatttgaaaagtgagccaaaaataatacggaatggtcaggtatataaatttagataa

SEQ ID NO: 308468 - DNA, 2772 bp, Proteus mirabilis
atgattcaaaattttaggagaagaaatttttcttcggtggtgacacatttatcactaatagcctatctctcagtgatgataacacccgttaactcatttgctgaagtttcgacaaaacctccagaaaacacaggtaaatatcagacagataaaaataatctggagggagttactgctggtcatgacacagctaaagaggctttaaatttttataaaacattaccaagcctaaatgtagattcgaaaggtacttcacaatttggtaaaggtgaatctgtcaattttaacaatatttattataaagacagctttgctatgggggtagatgatgtatcaaacgtctatggcaatgatagcaaaacaaatgaaattgggtttcatgaatcaaaaaaactgaaaacagaacaaagccccaagggagaggcataccgaactttagtaggggcatcccgtcactcctcaattgacattaacaaagatgatgatgtttttaatgttcataacgattttctctcaaatgaaaaaaaatattccgatgctatttcaaaatgcgaaacaaaacaggtatttgaggattatgtagataaaaagcacatacctgattataaagaatgcacaaagacagtcgatgtgacaggtggttacatagttaatcatccatatttagcaggtttggtatctcataattcaggtcctgcaaatattaaaacctgcggggaaacctgtgttgatatttggcttggaaaagttggtgacaactattgggaagggcgttgtcgaatctttgaagattttatgtccgtgaatgttatcaatcctactgctgttgtaagtgccaaaattactcgagcaaaatgggatgattacatgcaaatttatgccggaacaaaggattccttagaacatgtgtggggcggtccacacggaaaagatgtttttccaccggaaactcctggtcggtgcgaactttcaacgagttgggatcagcagttaaatgttgatgtgactgaaaaatttagtaaagtccaaccgaatgatgaagtattttttaaaaacagagtatcagtaaccggtgcaggtgaaggctttgcacaattacgcattcaatttgataagaaaaaagcacttactaatgatgtctggagctcgccacagcaaagtgaatttaacaaggctgtaaaagccattaaagaaggattttgtcaggattacactgttgtttgtcatgacacaataatccccgataaagacggttgtgctgtcatagatggtgtcaaactctgtaaagaggacttcgtgccacctccgttagataaaatatcaccattctgtaagagagcagaagtgatcacgcattgcggtaaagagcatggggtaaacaacacatgcaagaaatacgagaagcaaggttgttcgtttataaaatctcaatgtttaacaggaaaagaaggtgatattgctggttgctggcaatctagtgaaacatgggattgtggaaaagatgttacctttaataatggcgcagtccatgaaaagctaatttgtgacggcgctgtacaatgtctaaatggatcatgtttacgtccttcatctcaagagaatggtgattttgcaacagcggctgctatgttgaatgcggcatcttttgcattggcagatacgaattgtgctgatgcagaagaagcaaacaacggtgaatcttctttgaataaagagcaatgtgtcattttcaaaggtgaagctctgacatgccgaacggcaatgggaggatgggtagattgttgtgatcaaccggtcggtgtgagctggatagaatacgtacagctttcaatgatgactatgagagcggcagatgccttagcgatagaagcagggttgtttgatggtggtgtaggcttatttgatatggcaagcacagcagctatggatgcggtggaagctattacaaaacctgctatttccgcttttaactcttttgttggaaatgccggtgctgaagtagctcaaggagtcgctgaaaaaggcgttgtctcgatgacaacagcagcgcttaacaacctaacaaccaaagttgccgaatggactgcaaacaccttcggtgaggctgttacaaacgctattttccaatccgcagctactgaaggcggaaaaactgcaactcaatcattagcagaaaacggaggggctagctcaggtgcttcagtagtgcaactttcatcaacgatcacaacagccatgtcagttgtcggatatgcatacttggcataccaaatggcaaacctattggtgaatattatatgggcttgtaccgatgaagaattcaaactggcaatcaaaaaagaaactaagttagcgacaaaggtagacagttggtgttctaagaaggtccttggcgcatgtatcgaaaagaaaagtagctactgtgcgtataactctcaggtagccagaataatcactgagcacgttagaggaacaataggatacggtgatacaaaaaatccgaattgtgaaggaattacattagcagatatggataaagtagacttcaccaaaatagacttttctgaatggaccgcaactcttaaagaagccgacatgcttcctgatttcaaagaatttgacctcgataaatatacgggttctggaagtacactcaatgctgatggaaagcgagtaaactctgtcgagcgatttaccagaggggttgaaggtacagatttagatgaagttagacaaagagcgaaaacaaggttaagtgttaaagatgaatag

SEQ ID NO: 308469 - DNA, 255 bp, Proteus mirabilis
atgtcttttaatcacggtttcatatacagacgaccgcgttattatcacttcacccgttcgtgtaagtgtcatgcggagagaatgcaaaaaacagaacaacaagccgcagaacagcgtcaacatgatattgatttatatggctctgcttatgttaggaagcgtgaaaacggttctggtttcggtagttttttagaagattatggattaggtattgctatcgtcgtttttttggtgttttttttaataccaatttga

SEQ ID NO: 308470 - DNA, 3234 bp, Proteus mirabilis
atggattttcacgtatacacatcatctggtggagcttcggcactttcaatggtgtttaacgggcttagtatgctcagtaacgatggtgtcttggcaggatcatttaaaatcgcttttttgttatctatcatcggatatgtaataaaatctgccgctgatggtggtagaaccatagcatttcaacaagctgccgtatcagtagttctatttttatgcttctttcaagttacaacaagagtcacgattgaagatgttacaaccggcgaagtacgggctgttgataatgtacctttcggtgttggttttacagcatcaatcatcagcaatactggttatcagtttacacgaaaaatggaacaggcattttcaatgccaagcatgactgaaaacggtcccgttgacccattgtatacccttgcatcaatgtttgatgcaatgcgagatccgttaatttggtccagtggcgatagcaaaagtgctcacttagaggaagctataaaggtttacacaaatcaatgccttgcatttgatattgcaagaggggctcaaagtttcatggggatcatgaataagccatttgatgatcaactagcaacaagcccgaacagaactattgccattgaagtaaacggtaaagttgatgatgtgtcctgccttgaggcaatgaaaagtatcaggcttatggttggcggacaagctgactcaataggtaaaggtgtgctcagtgtaagaaatgggtttagtgaaaaatgtaaaacatatggctccaagaaccagtgttcactgccttttgcaaacaaaaccatgactgaagcaatgacattttttggagcaactgggaaaaacctacgggattttcaagcacagctattaatgtacccattcgttgttaatatgccacaaaccgctaatgaaaacgcctatcactcatatgcggcagttgctaaatcacagtcacaaattcaacagtcattcaaatgggcatctgaaggttcttcatttctaatttggattcagtatcttcagtcgtttatacaagcggctgtatacggtctggtgccatttgtagccttcgctttagcatttggattaatgggcgtaggtttaagccttaaatatgttctggtgcttttgtggattcaaacatggcaaccgttgctggctatcatgaacgctattatgttaactaaaacacagtctgatatctcagtgctggtttctggtgcttctagtttctccgatttatatcatttgttatttgttacacagaaaaatatcgccattgcagggcacatgatggcatcagtaccgatgttgggcgcatttgtcgtgtttggttcctcttatgctttcacgggattaacaaaaggtctatcaacaacaggtgctcctgatacgtcaccaatgactccagatgctactgattctcctgctttacacaagcaatcagcagttactgaacaatcagcacataatgcagtatcaacgataacaggtgggaatagcactgctccaaaactggacttatcaaatacgagacaacaagctatacaatctgcttccaacaggaatatcacagctcaagaaactttaacttcagccatagataaaggtgttagctctttgagttctatggggataaatacatctcataactacggttctacaatcaatagtgataccggtttgagcaatacagttagcaattcatccaataatggctcaatgatcacaactggtaacacatcctctactattgatgagagtgccaaaattacagctttatccggtgacgcaagcgtatcaggtggtatgggcgtaggttcaccggaaactggtggagctggtggtaaaggcgtttctattggcggtagcgctgccgttagtgctcaatcctccgatattcaccgtaattccggatctcaaacaaccggcataatgacaaatgactctgttgcaacgaatgacgcaactagtgtatctaataacattcaatttgctgaacacattgctgaccaacttgataaacatggtggtactcaagaatcagcacaattagcaaaaagtatcagacaagccgcttcgcaagcagaaacagcccaagaatcatatagtgagactgtttctgcgaataattctgtatctgcaaaacagtcttatacagcaggtcaggtagcaaatttagcaaatgaaaatagtaatgttgtagacaaaatcaataatgaaaatctaagtaatgatgaattccagaacagaaaaaaagaataccaacaacagcttagttctattatgggggcatcagatgcagaaaacgctgcaacaatttatgcggcaaatgatactggtggtttagttaatcactttggagaattgtttggtcctgctacaaaccctactggtgcaatgaatggcgaagaaagtagaaacatgaatattgcacaaaatacagcatctgaagttcaaggcaatattgcaagcactcagggggctgttaataccaaatatggtaatacaactgctcaagcccaacagttcctaaatagccaacaggctaatatagaagatgattcagctaaaaatagtgcgggtctagggatgtctgagcattattcagaatctaggagagctagagagcaattacatggtagttctgtatcagaaagtagcgcacaaagtatttcaaatgaaggtacgagtattgcaactagcatgaatgctttgacaaattctgttagtaatgtgggcgcggatcaaaacaatatagaatcagatacaaaagctaatttgaattctatgaagtctgttagctctgcgactatggggtatgaacaatccaacaatattactgaaggactggcacaatacgcagctattgctaagaatgcgacatccattaatcaaattaacgaagctgctactaattatgccaatacttattatgaaaatggcggtaatgccagccgtgaccaactttacagcgcacttaataatgtgcaaatcgaagcaagaaccggctctggaaatacccaattaaacattaccaacaacacattagctggtggtaatggcaatcaaattccacaaagaagtcgtagggatataattacaggtacagatctctcaccaagttctataccagagaaacccgaaaaatcaggagattcaagtgaagataaaataattattacaaaaggtaatccaatgccaagggtagaacaaataaaaccacgataa

SEQ ID NO: 308471 - DNA, 1410 bp, Proteus mirabilis
atgaaaaagacattattaagtttggttgttacagctcttttcggatttactcctattagtcaatccgctgatgtaaacgagcaattaaataagatgtttggctctatgtcgaacacaaccagcggtggttcttataagagtgttactcgcgaggggtacgtaggagggggcttcgtggtccgtaatcaactacgaacccttacacccgttaacgtaacgttacctaaagcgtctggtgggtgtgccggtattgatttctttgcagggtcattcagtttcattaacacggaagaatttattcaattgctccgaaatatcgcggctaattctgtcggactggcatttcagttggctattaacgctatggatgccgtactgggaggggaattatcaaaactacaatccatcatacaaaagctgaatgaatacaccgccaactcatgtcaattatcaaaaggcttaatggtagatatggcaggggcaattagcgaagaaatgaaaacgtcagtgtctgcacagctttcgtctaaaggtattcaggattcattcaatagctataaatccgaggtgttaggtaaacaaccgccaatgatagcagcacaaaaagccggtttaacaaaaccgtgtactcactacggtaatgtaatgtggtgtttattaagtaaaggtggatttaatagtggatttttaaattctactgacgaacaaaaagaattagttatgagtttaaccggtatggttattgtaaaagaagccacacaatctaatgacaaatccactcccatattgcaccaaacaattgcccccatccctattgaggaagtctatgaactgttgatgaaaggctcaaaagaaaaagaaaatgttcaaatctatggctgtggtacatcaaaagacacctgcatagctccagcaccaaagaaaattaaggttgatgggcttcagactcaattcttagatatatttgaaaaatataactatcttcaaaaatatataagcaatgagaaacctgctgaaaacataaagcaaaaagtattgtttttcaatgttaatggagctgtcactaatggctacaaattaatagagggtcaagatactactagagcaatgcactattacagaaatatatcggaaataattagttatgaagcagccttcgtatatttaaacgatatgttaactgccgcagaaagcagtgcagatagaattatagaaaacaatgaggaacctatttttgctcatatcaaaaaacagcgtgaaatgatacgagatgcaaaagtaacccttcgacaaatacatgatggttacattgttaagcatggtggtttagtcagaataaacgaaatatttaatacattcatggtcggtacgaaaccaattcacgttccagatggtgtgaacgcccaataa

SEQ ID NO: 308472 - DNA, 1032 bp, Proteus mirabilis
atgagaaaatataaatatttatctatggctgtaattgtggctatttcattttcaggaacaagttattctttggcaaatcaggaacctaagaaagcatacgatgattctgaacaggtaattggtggaagtgtacaagacttggaaaaaaaagatgaagggtggtttttctataatgaaaagcaagtcacgaaaccaaagccaatcactccaactaaaccaaaaccagatacaccaaaacctaagccagtcgaaccaaaactaacaccagcgccagctcctgcaccagagccgaaatttacagttaaatggtatcgggaaaacattcagaagctacgagatgaggcaattgataatccgactaaagagaatgtaaggcgatactattacgtgcaacggatcatgctggacaaagccagtcgttatgcagatatggcgagactggtaactactactgatccgttcattgatgaaaacaatcgccgatccacatcctcatttgcggctatggagcaaacacgagtagctgacgaaaacagaggacgtgttttgaatagcatttcaagtaaagcaggtatctttttcttttttaaaggaaaggactgtcctttatgtgagaagcaagcctttgttttaaaaacatttagtcatgaaactagtataaatgtaattcctatttctgttgatggtctccctctacctcaaaatgaatttaacaatatgaaaattgataccggtcaagccaaaaaacttggaattactaatgtaccagcgattgcattagccataccccctaaagatatcagaatcatttcatttagcgctatcagtagtgattctctgaaggaacgcactgtgttgattgctaaagatgcaaaactaatttctgaacaagattacacaagcacacttccccttaatcacaatggatatattgacagcgacataatcaaagatatgccagacgatattttaaatgacccaattctatttgttgaatatatccaaaaacgatctcaagttacaaaaccttaa

SEQ ID NO: 308473 - DNA, 1941 bp, Proteus mirabilis
atgaaacaattaagaagtgcagcctcattagcaatcgttgctaatgtattggctggcaaatttgacatttcaattaagtttactactgatgaagcgtattgtggtatatctgaaagtggtaaatatgaaatagggattccttacacaactgatacatctttcggtaatattttgttaggttttttacttcatgaaattggacatgccaaattcactgatttttcatttgttgctcaaacaggcaacaaatatattagtgtattagaaaacatttgcgaagatatctggattgaatcaaagttagagcatgtttatggtggtgccaagtattacttggatgccgtaagacaacatgtttttaccgaaaagcctattaactccgttatttcaattgaggaaaaaattacgtttttcatcaactacgttttactgcatggtagaagtaaatataacggagtcgttgttaacaacattaacgatctaaaacttcaattcatttcaatctttaccaaaacaatttctgacaaggttgatagattattagaaatggtgcttttatccacaactactgtcgataataatctgatcgcaaaaaaattattcattgttctagcaacagcccttcaactcaaaccacaagatacgttacctccttctaatgggagctctgataattacggtaactctgagggcaataaccctgatggttccggtaactctgagggcaataaccctgacggttccggtaactctaaggacaataaccctgatggttccggtaactctgaggggaataaccctgacggttccggtaactctaagggcaataaccctgatggttccggtaactctgaggggaatgactctgacggttctggcaactctgactgctctggtatgggtaaaacttcaaatggacctaatgacgccaatttttcaaccgaaactgatattgacgatttagattcagatccagagagttttagcgatatttttaaggatgtttcattcgatactataaatgccaatgttattcaagatataacatctacaatctcgaataaggaacaacttaaaaaggatatgagttccaagggaatagttaatgatttttttaacgttgctattattaacacagagtggaagaagaattttgatcaagccactcaaacaataacttctcttgatattaaaagaagtttgacaacaggaagtagattacgccggtcatttgaaaaattagtccatgataatactacatccacttcacggttaagggagcaaggcgcaagaattaaatctagtaaattagcaggtgttaaaacgggaaacactaacatttttaagactaaaaatgttatccaaagcccaaattgtgcttgttctattttacttgatactagttcctcaatgcatgaataccactttgatacatctcgtattcgagctgcattatcttccgtcattgcagtattggaagggttaaatatctcaggtgtttcaaccgcttgctatgcatttccgttttacgttgaagaatccaattcactactagtacaaacgatgaagccaagatacacaccgcttcgcgcaagtatttctcaaggtgtttttacgcacaaaggatgtttaggctctactccattggctgaaagtttgattcccgtaataagcgaaatcgctctatcaagggaaaagaaaaagatgatttttattatcactgacggggaacctaatgatgataaaaagacaaaagaaatcatcaattcagcaacaatcgaagggatagaagtctgtacctttgtattgaacgaagatggtgcaaacgaagcctatttcaaggggatatttggtaaaaatacaatatttatcaataatttcaatgaaattgagcaatccatacttcaaatgtgtgcaaatttaatagtcacagcacgatag

SEQ ID NO: 308474 - DNA, 1188 bp, Proteus mirabilis
atgagcccaaacattcttgaaaacgtagtaattttttctctggaaggtatccgtttaactactggaagaaaaacacttaaaggtaaagatattaaggttattaacactggagatatagttctgcctcccgaaacaatagccagcctcggaaccaaaaaggttattgaccctgcaaaaatcaacaaaatgcgtacctttcgtactggtgctgatgcaatctgttcaaaatatggtgttccattcttgaacgggtatgcagtgccgacttcacttgcaagtcacgtaagacagcagttgaatgatttaaaggaccaattctatatattcaaaaatgagtttttatccgctatatcaactgattttctttcatggttagataaagaagatgaaactgtaaaaaaactgtttgagtccgaagtgattgacgtcaagcggttagatgaaaagctacaatttggtttttcttctttcaatatttcaccctttggtgaaggcgagtcagaagaaaaagtacaaagccttaaagaatctgtcctgcttgatgttgttgatagaatttctgagttacgggaacgtggctcatacaatgcatcaaacatatctcaaactacactcaatacgttacgagaagttgcaagtaagctgaaaggattagctgtattaaatccagatgctggcagtttaagtgattatttgagtaactttatttcaacgttgccaagcgttgggagattgtctaatgacgaatcaattgccgtaacaacactttttattacgttatcagacattaaaactttgaagcagttaataaactccaccaatgtgaacaatgtatcagatgtggaattaactgttttaccacaaactacaaacaacattgatgtatcaattgccataccaacttcagtacctgtaacgggtaatactgatagtgatttcattgaaattgtagtcgatgaagatgatcttgctgaaccaacagaaaacgatttaaacattgtgaatgtcgccgaaaactcacaaacggttacagtgccgaatgtgagtcaagatgttgtagaaaatacgacaccaactccgacaccaattgatgttcaatcagaacctgaagtagtttcttcggatttacctgtaagttcatcctttagtgttgaagatgaaaatcaggatgttccatttttctactaa

SEQ ID NO: 308475 - DNA, 1008 bp, Proteus mirabilis
atgaacgctgtaaataacagttttgatattaaacgtaacactccggtcgatatggaatctttaggtattattctgcctgagaatttaaagggcaaatatagtatcaaaggtttttctaatgaccatcaattttcagagtatatcccgaaatttaatgagaagtatgtgtttgaaccttcactcagaaagcatgtgttaatgtggtttgataacccattagatacatcactctggatttctggacctactggctgtggaaaatcgtcaatagttgagcaaattgctgctcgtatgaattggggattgatgaaagtaacagccagtcctgatcttgatatgagtagcttactcggtagttttcggctaaaagtcgataaattaacgggtgatcaagaaaccgtctttcatgaaggaccgctaaccatcgcgtataagcatgggttggtttttctgattgatgagtatgaccaattagaaccttccgtagctaattccctcaacgggatcttagagatgggttctcttgtcattcctgaaacaaatgaatgcattcatcaccatgaaaactttagatttgcagtaactgcaaacagtaatgggaccggtgatatgacaggaaattacagtggtgtaaaaccgcagaatatagccaacctcgataggtttatgtttgttgaggctgactatatgcccgaaaaagaagaacgtaagctacttgcttcatttttgtctgatcctgaatcacatcagttactgacggatggactaataaagctggctaacgatgtacgtaaaagtacatctgcgacagtcactaacttcagtagtaccgctatttcaactagaagccttgtgaatgttgttcgccgtttcgattttatgcttcgttctaaacaaccaccggtagatattctgttagatgcatggcaattacatatctctaacagagctcctgaagatgaaaaaatagcattgaacgatatgtttaatgtttattttaaatcttaa

SEQ ID NO: 308476 - DNA, 369 bp, Proteus mirabilis
atgaataatatcattaatatgacaacttatgctgcatccgaggatcaaaaaaattttggcgttattgatttaactcaagatgaaaatgaaaaacttcgtatgctattacgtgttacaaacaccgaaagaaaagatttattaaaccaagcaaatagcattgctttatttgctgaattcttgagtgttaagtacaaaacaaataaatgtttgattggtggaaaatcttttctcattccttttattactaaaagcatgagagatttagacattgaaacttacatgaccaacgtaaaacaagtaacaacatttgtgaatggcgaggttttaaaacgtcaacgtcattgcggtgttattaattgttcaatttaa

SEQ ID NO: 308477 - DNA, 1095 bp, Proteus mirabilis
atgaataatttcgatatatatgatctcattcaaggctctgataaatggttaagctggagaaaaacgggtgtaacagctacgtgtacccccacacttaatcccgaagttaaaaatgagttcagcaatactccttacagcttatatttagaatggatcggtgctattcctccaaaggatttgtcatgtatacggcaagttgaagtagggaagctatccgaacagttcgcccgacactggtttgagaatcagtatggggaaatcagtagtccatgttgcgtgcgtagtaggaaatatccgcacatgatagcctcacttgatggacttagtgataataatgatgttgtagagttcaaaaatatatccccaaaaaatcaccgtatgttattagaggaaaaagcaaaatcttcagttttcaactattacaaatggcaggtttatcatcaaatggtagttactggcagcacatacgggtacttggtattctggtctgctaaagaaacacctattgtctttaaattaaaaattaatgacaaaataataaataaggttgttaccatcaccaaaagattctggaattgcgttaataacaaaacgcctcctgaatttgatgtaaataaggatataatttatttaaatagtgatgatgtactaaaagaacgtaatattaatcctgatgatttaatatcacgaaccaaaaagttagttgaattacaatctgcatttcaattagcacaaaaacaattgaatgaagctaaagaaaaagtagcatcatttgatgaacagataagaaatgaaataaaggttttatcatctgtattaaagttacaacctaatgctcccttgaggcttgaaggctttggaattcgatatttagaatctcaaagcgctccacgattttcttggaagaaactaagagagaaattgggtatcaatgaagaagatcatcctgattgttatggtgagtcgtcaattagaacatcaataacaagttatgaatatcattctttcaattcaatatcatcctctgataattatcaagataacgataataatcagaaaggtgattcaataatagatatatataaatatttataa

SEQ ID NO: 308478 - DNA, 591 bp, Proteus mirabilis
atgcgaacaattgattatctgaatacagatgggggtgagggctttactcaaaatcgtcctgtttcgctcgaaacaactacttatgaagctgtacacgcatttaccgaccaagactcagcagtagtaacagactcgcctaaaaacgtgtctgaggctattgtagttgatgtcattcgtaatggagtgaaacggcggattgacaagctggttgaacggtgcagcaagaccaatgcatttgaaagcatgcttgatgaaatctcaaataactttgagtttaatcctgctgaaattgaatatgcaaaggaggaattaatagcagaaagaaagaatgtatttaataaaatactaactaatgcaatccagaataataattttgaagatgttgataatttcatttcaactgtttcaggttcagatcaagtggcatttataaaaacacttgagcaagttaaatctgatttagcttgttgccgacagttattctctgattgcaaaaaacaaagcgatatgacaccacttataaataagttgtctattatcgaatttaaaccgttatctgattatattttgcttactattgagcggaattaa

SEQ ID NO: 308479 - DNA, 1221 bp, Proteus mirabilis
atggtaaaaaagaaagttacattattgatttctctattaacactatccattacatccagtgcaaatagtaaattaaatatggttactccatatacagagtccattcctactgtcgaacgatctactgatgcggacatggcagatttggaaaaactaaaagcagtggcagcggcacaagctgaagttcacagagaggcaacgcgccagcttatcgcagataaaaacgttatggcaaatcaggctattaacaagctaacgactgatgaagggcagatactaaaggagatgatcaaaagccagaatgaaagtgaaagtttcaaccaacagcaaaaaggtaatgtattttacatattgatttcggcaagccttaaagatactgaagtaattgatattatgcggtcagtatcaggtcgtaatgatgtaatcctagttgttcagggagttagaaataaagattcactggtcgatgaaataaatcactggcataaattaattcgcgatacaaagtcagaagtgaatttcacaatagatccgaacatttttattaaatatggtgtgcgaaccattccgactatcattcatgaaaatgacggtgaatttgtatctctggtacatggaatttccaatgttaattatctcgataacaaaacagggaatatgggtgtgcaaggaccagttgttgaggtaattgaacgtaatatgctggatttaattgaagaaggtattaaaaatctagatttcgaaaaaatgaaaaaggatgcctataaccgatactggaagaataaagatatatacaaattccctgaagctctaaaagatagcacccactatgtagacccaagcgttgtgataccacaggatatattatctccagatggacgcataattgccaaaaaagggcgagtaaaccctatggacgttatcccatttaacttgaagttaattttcttcaatcctgcttcagaatggcaacgtatatttgcacaacagcaatatcaaaatgccaaagatgaaaatttaattcctacattgattgcaactgacgtatatggggatggttgggaaacattttcagatagcaatttgtatggtgataatgccactttatattttatacaggaaggtatgaaagaacgttttgggattcgtaatgttccaagcattgtaaccggtgatgataagcaatttattgttaatgaatatgcagaaaggaattactga

SEQ ID NO: 308480 - DNA, 447 bp, Proteus mirabilis
atgttggttattgtcgtcactgtcgcacctgccagccattacgtacttaatcgcttttcaattgggattgatccgcaaaattacccctgcctccctgaacaccgaatttatctaattgataaaatggacaaagatattcagaaagggaaaacatttgcttttcggtctgaatacatcagtagcattgcgatcaaatttatagacggtgtagctggtgacaaggttagggtcaatcctgaagaaaccacggtcaatgatctgatggtgggtgaaggacttctattagcaagagaatctggtcatacagagcaggaattacaacgtgaggggataattcctgtcggtcatatctggctaatgggtcgcactaaggtcagttttgattcacggtattggggcgtactccccatagaaaatgtgatcgggagagcatatccgatatggtaa

SEQ ID NO: 308481 - DNA, 696 bp, Proteus mirabilis
atgagatcacaatcgcattttgtagaaactgaagctataaagatagtccacaatcagatacccagtaaaaattgggtgttacgttccattggtgaaagagattacggctcagatttcatgattgagctttttgataataaagaatcaactggtgattgtttttttgtacaatccaaaggcactgaaaaaacatttacagaagatgtaaaaatcagctttcctgttaacactataaaatatgcaatgctatttaacgtaccattttttttgttttatacgtctatcacttcaaagcaaacaaaatttatttggttacaaaaatatactaacttagtgcttaatgaaaaaaattgggaagataaaaagtcaataacaatctattttccagaagaaaatgacctctctaaaaatagagaaaaaataatcaaattacttgcaaatagccgtgcagttaatgattttatatcatttaagcatacaatcgaaaatttgaaattttggggtgaaatggtcatatataacaatgattattatcatggcagtaaatgcatagaattatgtcacaaaatcaatgacatgaaaaatgtaattttatatgcatctgaactatatgttgatgatagttgcccttttgaaatgagaactcagtatcagaaacttagaattaataaaatgatttccacatttaaatattag

SEQ ID NO: 308482 - DNA, 402 bp, Proteus mirabilis
atgtactcatctagccagatgtttatcttatccatttcatccttagatgtttccttcttgtcaataaaatcatttctactaaatatatatgtttttaaggtttctccgttaacaacatctcttatagttagcacattgtttgccgtagagaaaaatatctgtggttcagacagatcagcaccataccaacgagcattgggtaagttttcgtcaaagaaacttagtctgtttgttgactcttttctacacagatatgaaaagagtttaccatcttggcttcttatgtatctaattctactgatattatttgaaatttccgtcgattgcattatatctatatcacgatcatatatggtagataatcctgctttacaaatttctgatagtgaaaatgacatttga

SEQ ID NO: 308483 - DNA, 780 bp, Proteus mirabilis
atgaagtatacgccggggtactcactgacagatcctctggtaatgtcacaggatgaggccattacgatatcaggggggggagcctatcagatccgaatacctcgtgcgctggaacgagcaatagcgaatgatgtaccggaagttgtcgagtgctcagtagaaggcaagcgtaagttagagactttcagtgagaaaatccgttatctgataatgcttggtctttccacgcgtggaacggtaatccgtgttgagttggagacgattcgagatggtgtgtatcacgacaaggaaattgacgggaagtttaacgatttgaaattggttagttcggaagagttgagccaaatgtttttgttggcgaaactgtttaaagagcaaatggttaatacaaatggtcatgtactggtttatgggatgccgggaacgggaaagagtttctgtacaggatatttgaaggcaataactccaggggaatgtcattttataaagctaatgcctcatgggcatttaaaaggttctgggcgtagagttatcttgttttggtctaatgaatatccacacaaaaaaaagaagacacttattttggatgatgggcattgcttggataatgaatacctactcatatttctaaaaaaatcaataaagaagaatgtccgtgtaattataacagcacaagacgaacatcaattcgatgaaaacgttttgcagtctatcgatatgaaaatggattttaactggaacgctgcgggtgaaagcaagtggctttcgagtgtgttgtag

SEQ ID NO: 308484 - DNA, 330 bp, Proteus mirabilis
atgccagcctacttaatcccctctcttatcgcctcgcttttcataatggtttttgcagttagagttcttcggttgttgaggggggctctgcttggttggttttgcctgaagtggtttggtgaaaactatgcaggggtgttcattgtttcagggctggaacgacgtgatcttgatatactgcatgggcgagtcttagcggcagctggtggggctatcggtgattcggtattcgtgctgaatccagacttttttactgttgtgggtgtaaagatgttactcgtagaaaatcgtgtttatttactatcaggtcgtaccgggggggtactatga

SEQ ID NO: 308485 - DNA, 453 bp, Proteus mirabilis
atgaatgatggaatgtttgggttgccaatcaaggcaccgggggcgctgtactggttcaatatctcgtttctgtttttggtcgtgacctcgttcatggcgcttgagtctgggagctttgcaattacgtttgtccttatcgcgctggtggttatgaccgttctgggtatgcggtatccattggtgagtgctcagggcgtcatcaggacaccaaagggatttctcgtatactccctattcattctgatcatgtgtgatactcaaacgtatgtctttgaaaagccaatttcgttctctggggtaatgagtgtcgttcttactggcatcgtgtcttttagtcttggccgttcgattgtgatcggtcgattgggtatcgaagagccaccagcagataaggcagaagaggactctatgtataaccccgaagatgttggcagctcgcctcatctgaaataa

SEQ ID NO: 308486 - DNA, 174 bp, Proteus mirabilis
atggaaccatttggtcaatcctattctgttaatggctgtacctgtcataagtgccgtcgtcgcggataccgaaaaggcaatgcctacggtgatgtcatgcgtgcagacaagcatcgtgctcgccagctggctaaaaaagaaatccagaggcttatccgtgaaacagctgagtaa

SEQ ID NO: 308487 - DNA, 183 bp, Proteus mirabilis
atgctttacgtgggattgatgatccacatttcacgagggagcattttagagaatatttatttttcagtgagttatagatttttgaaactgaaattaattgaaaaaagaaatatgagtattggcagtctctgtaactggttaaataaatatattacagatttttatgctgtaatctttttatag

SEQ ID NO: 308488 - DNA, 270 bp, Proteus mirabilis
atgagtaccaagaaaaacacaattaccttaatcgtaatgggcaaagagctggtttttgagccgaatatgaccgcgtataacggctggttaaatgatcttacagctaatgataaagttgcgcccactgtcacctatttacgccgaattattacccccgaaagcaaagaggcactaaacgatgtgttaaatatccctggtgcatctatgcagttggttgaaaaaatcaattcagagtatgcgccaaaattggatgttgaactaaaaaactaa

SEQ ID NO: 308489 - DNA, 333 bp, Proteus mirabilis
atgacattaggtgaaaaacaacgcaagtttacgcgcatgattgcagacttgattatatttgcttatgacaagggttatgaattgtcatttaacgaagcctatcgaacaccagaacaagcacagttaaatgcaaagaacggcaaaggtattaaaaaaagcctgcacactgaaaagctagctgtcgatttcaacctgtttaaaaatggcgtttatctcacaaataccagtgaccatcaattattaggtgaatattgggaatccattggcggtacgtggggcggtcgtttcaatgacggtaatcactactcgttagagcataacggcgtgaaataa

SEQ ID NO: 308490 - DNA, 294 bp, Proteus mirabilis
atggaagaacataacaaaacactgatttctttgattatcttgggcgctttaattgcgattggcaaaatgatgtcaggcagtgaacccattacattacgcctctttattggtcgtgtcattttgggttcggcagtgtcattaatggcagggggattgttgatttggatcccggggctttctcctttagcaattacggggttaggttctgcattaggcattgcaggctttcagttagtggaattatggctgaaaaaacgaggcagtgacttactgacagggaagttgaaaaaatga

SEQ ID NO: 308491 - DNA, 492 bp, Proteus mirabilis
atgacccgactacaaaaattgactgcgttcttacgtgcaaatttgcctgaatccttatttgcgacagaatttagtagcgaaatggatgatattgaatttaaacctgctcatagtgatttaggtgaagatgatttgggtaatgaacaatatcaactgttaacgcaagaatatgacgctgtgattgcttggggacgttggccatatcgtgaaattgatgcacgttatatccctgcattgattgaagcctggcatcaagaattagaaacagattttactgagcctgattttgagtgtgaacaaccatccatgagtgtggatgtgattgacgataatattgcgatggtcattgtcacccttaaattaagtgatgccattgtgttaaaagaagatgaaaacggcatggtgccttttaatggtaaacgttactcactcgccaatcctgaagtgttatttgctgaaaatattgatgtgatcccccgtggtgtgaaatga

SEQ ID NO: 308492 - DNA, 1032 bp, Proteus mirabilis
atgtcacaacttaatgaacgtgctgaggtgttacttgcgagctacgaacaaaatttagcgaaagcatttaatgtcattaatccctctcgttattttaaattaacagacccgcaggaaaccaaactgcgtgatgctctgttagaaaatgccgactttttaaatttaatcactacggctgatgttgaccaaatgaaaggccaagtcgtttcagtgggtaatcctggtctatttacaggtcgagtagaagaggggcgttttttgcgtcaaacgggtgttgacggaaatgaatatgaacttgttgaaaccgattcaggtgcgggattgcgttgggatttgttgtcaatttgggcgaatgccggtggtgaaaatgagttttatcaacgcatgcaagattttatgttgcgctcaattgcgttagacatgatccgcgtgggttggcatggtaaatcagtcgccaaaacgacagaccctaaaacgaaccctaatggtgaagatgtcaatattggttggcatcaaattgctaaaaaatggaacgggggtaaacaggttcttacagatgcaattacattggatgataaaggtgattaccgttcattagatgcaatggcgtcagaccttatcaacacctgtattccggttgaatttagaaatgacccgcgattagtcgtgatggtcggtgctgatttagtttctgcagagcaataccgtctatatcaatcagccgataaaccgactgaaaaaattgctgcacaaatgttaggttctacgattgctggccgtccggcaatgattccaccatttatgccaggcaaacgcatggttgtgactattccaagtaacctgcacatttacacacaacggggtactcgtcagcgtaaagtggaatttgttgaagaccgtaagcaatacgaaaataaatacctacgtaacgaaggctatgcactggaatatccagaattatatgcctctatcgacgaatctgccgtgactatcggtaaagtcaccgagccgactgaaaaagtagaaggttaa

SEQ ID NO: 308493 - DNA, 309 bp, Proteus mirabilis
atgagacaaaaaaaggtaaaatcacgtaagttcgattattctggaattcttaacatgaaagtaatgaaaatcctttgtcccgattgtggtgaaaaggccattataagaaaaaccaatagaaaacatcgccaaatttcagatatttactgtcaatgcacaaacttagaatgcggaatgacatttgttctaaatcttacgtttagtcatgctatcgttcctggtaaaaaatctgttgaaaacatgattgaagctttcattcctgagaataaacaaatggcgcttgatttactcaaagcgccaattgcttaa

SEQ ID NO: 308494 - DNA, 588 bp, Proteus mirabilis
atgggaaaatttcacctagaaatggttggggatagcgctccaatattggatcgcataatagaagcttatgggttcagctctaaaataatgctagctcaacacctagaaatggcatctagcagtttagctggaagatataagagggatatttttcctgctgatttagctgtcagatgtgttgctgaaacaggcgtcagccttgaatggttagcgacaggtaatggaaaacctttcgattatgaaaaactagacaacttaaaaattcctaactttcaactaaaaaacggacaactcacaccctcagaccatatcatgtttgataaagtgattttccccaatcaatcccctttgccatcagagccaatatctatccaagatggaaacagttacttcattattgataaaaaatataacgatgttttcgatggaaaatggcttatcgaaattgatggaaaaaatagtattagagaactgactagaatgcctatgcaacgcgttagagtttcaggtattggaatggcttttgattgtgaaatttctgatataaaaattcacggccgagtaattactattattgaaaatcagtaa

SEQ ID NO: 308495 - DNA, 489 bp, Proteus mirabilis
atgaatgatgccttatattttatatatgtaaatgctcgcaatgaagttaaacctcgcatgattgccaacgtttctgaaaatgaagattactttcaaggttatagtttattgcctgatgatgaaggtgaattaaaaacatttagaaaagatagagttgtaaaatatacagaatcattagaagaagctgttgaatatattgaggaaggtctggaaacaggtgatttttatgttaaacaaccgaaaatagaaacctttgacgtgcatttcaccggttttaaaaaaaataataagtctactcttgaagagcttgcctcagaggcaggtatggttgtaagaaagtctgttactgtacacttaaaacttctttgttatggatataatgcaagtcaaatgaaaatggataaagccagagaaatgggaattatcattttaaatgaacagcagtttagagacttccttgaaactggtgatttcacagaccaacactag

SEQ ID NO: 308496 - DNA, 5658 bp, Proteus mirabilis
atgacgacgttaaataatgtaccttccccacgccccagttctattacgagaaaagtcgcttggcttaatatttttatacaattagcatttcctattgtgacaaccatgcctacgcagacttttgccaatgagaataattttaaaaaacataatattagcgatataaatcaaaaaaatacttatcaagtcaaagcgggtgacaccccagaatctattgcaaaaaaatttaatataaaattatttaaattgattgaagctaatccacaacatgtatcgttaacgggtgagctaaaaataaatgatggaactattcttaatattcctaatgaatatttattaaaaaaaaagtggctcaataatcaagatgaagcaatcccctctacagagggcgaagagctcgctaaggttattgttgataattcatttttactcaataaagatatcgatgtaacacaatatgcaattagccaaatctccagtaaatccaatcagaaaatagaacaatggcttaatcaatttgggcatgcgcgagtttcactttcagcagataaaaatctcaccttaaaaaatagctcagcagaattgttaattccattatatgaacaaaaagagaagctgatctttgctcaaactaactatcatcgcaaagatcttcgtagccaatttaattatggtattggttatcgctattttactgaaaaatttatggtcggcattaatggcttttatgatcatgatttaacgcatcatcataatcgtttgggaattggcgccgaaatttggcgagactatttcaaattaagttctaaccattatcaccgtctatcaagttggcgagcctctaataatatcttagattatagtgaacgtcctgcgaatggttgggacattcgaacagaaggctattttccagcttatccacaattaggcactaaattaatctttgaacaatactacggtaaagaagttggtctatttggcaaagataaacgggacaaaaatccacatacctacacattagggattaattatactccgataccattagtcacattaaatgccgagcgtcgtattggcttacatgatcgtgctgataataacttgaatatcaacttgtcctaccgcataggagaatcactcgcttcacaacttaatcctgataatgtcaaagcaatacgtacattagcaggaagtcgttatgactttgttaatcgtaataacgatatgattttagaatataaaaaggaaactttagttttcctttctatggttgattcaataaatggttatgctaaagaggagcgcgatttacaagttcaagtaaaaacaaaatatccgttagccaatattgaatggtccgcaagtaagttaaatgcccaaggcgggcaaataaaacatcatggtggaactcactacaccgtgattttgcctcaatatcaaattggtgcaattgagaaaaatagctatatcattagtgctgttgccattgatacccatggcaatcgttcagcgcctgttcaaacaacggttattgtagataaatcgttaatcaatacgcgtaatagcctattttcacctaaacagagccaactattcgctaacggtgaagcaacccaaaagttaatattatccatcgttgataatgataatttacccgttgatattgatagtaaagaaattactttacagcaacagtctgatacagaaaaaggcaatagccgtatttctactttctctcgtttagctgctgggaaatatcaattaacggttacagcaggaagcataccggaaaaattaaccctaacccccgtattccgtgataataccttcaactcagcaaccgtgacacttattgccgataatcaaactgcccatattgcaaaaggcaacctaacggttacaaaagataacgcgccagccgacggtaaaagtcaaaataaaatcaaagtacgagtcactgatagcaaccacaatccattggctcattatccagtcaactttactgccagtaatggtgctaatgtcattagctcaagaaaaacggatgaacaaggtgagattattgcttcagtgactaatactcaagtagggagttcgcagattggtgtacaagtaaaagggataacctattcgactgaagtccattttagtgtggataatgatagcgcctatattccacaacaaaacttcacgctcacaccaccactttctctagccgatggtaaaacagaaaaaaccatttccttacaagtcgttgataagcaaaataatcctatacccgctactcatgtgacattatcggcagataaccaagcacaattaaaacaaaccatattaaccacagacgagcaaggtaaggcgaccaccaccatgataagtaaagtcgccggtacggtcaccgtgagggccaaaataaacgacaagatgactcacgcgacaacccaatttatcgccaaccaagctaagggggttattgtctccataaccccatcctctacaactcatgtcgcagatggtcaaaccccggtcatccttactgcattagtacaagatcagtttggtaagccgctccctcatgcacaaattagctgggaaactgagcacgataaaagtattgttaacattgaacataccacaatgactaatgagcaagggatcaccaccaacaagttaaccagtacacaagcactcagtgtgcgggtaactgcgcgtataaataacaatgcctttactgctgagccaattacttttattgctaatgggcaacaagctttgattagtgaattattggttaataaaaatcagattgttgcagataagcaagatcccgcagaacttactgcaatagtaacagataaactgggtaatcaacttcctgatactattgttaattggcaagggagtgctggtactcaatttgctcagcaacaaactaagaccgatgctcaaggtatcgccaaaaatacgctaacaacatcacaatcaggtatcacaaccatcaccgcgcgattaaataatggtcaacatgcacaaactaacttagttgccgttgcagatctcaaaagtgccactctcacattaacgacattaaataataagcaatctgccatagcagataaccaagatagcattaccgtagtagcaaacttaactgatgcttatcataacccattgaaaaatatccctgtctattggcaatcaagtattaatcatattgatgaaactactactcaaacagatgaaaaaggcagaacgcaagttgtcatttcaggaaccaaagcacagccaacaacaattaccgcctatttatcaaataaagagaaaaaaagcattcaagtaacctttgttgcgggggcgccagtgcaacaaaatagttatttgacgattgaaccacaatctatcattgccgatggcaatgcctttgctgtgggtaaaatagacctgcgtgataaatttgataatccggtaataggtcgtagtaacgatattgcgttaattggggataacagcaccatccaattcagtaaaatcacagaaacggctaacggcaattatcaagcacatattagaggtacaaaagcgggactcagtcaaattaccgccactattgatagtattacggtaacgcaatctttaggatttttaacagataataaaacagtcaagatccactccgttaaggttatggcaccttataccgtaacagcgaatggtaaagacaaagtcattattcaagcacaaatcaccgataaacataacaatccagtatcaaaaggcgttactgtcggttggataagtgatctcggtaagcttgcagcaccattaagcatgaccaataagcaaggaatagctgaaattaccctctcaagtactcaggcaggaaaagcgaaagtaacggcagtgctcaataaccaacaatctgtcaatgctgatcacattgtcacctttacggaaggtgatatttcggcctctctttctactgttgccatattccctgacactattgtcgcaggggcaaataaagcgaccgtaacaataaccttaaaggataaagaaggtaatttattgcccaacttagccaataaaatcaccttaacgccacaggctaatttacaaacaacgattacgccctttaaagagaaacaaaaaggcatttatcaagcccaagtgagcgcattaaaaaccggaaaaacctcgttatcggctcacgttgctccattagcaataaaacaatccgtttctttaacggtgctccctaataacacaacagcaaaggtgaaaaactttactattagcaatatgcaaccacatgctggggagtccattacttataaagcctatttggttgataaccatgataatcctgtcggtataggtgtacctgtcgcttggtcaacgaatgaaggtagtcaactcgaaacaccattaacttttacagatgataatggtgtagcaatagttggattatctcgacgctctgtcggtgttgccaaagtcagcgcaatattagaaacaggtacttatatagcagatgatgttcactttttaacgggtcacattgatgaaacgatgtcagaactgtcgttgaacccgagtcaaatcattgctaatggcaaagataaggcattattgacatttgttattaaagataaaaatggaaatatcatccccaaccaacaagtaagcggattttctaaaaatccaaccatcaaatttagtcaagcacaacaaatatcaccgggacgctatgagattgaaataacaggaactaaatcgggcacagcacagattggtgttatggtaaatggcacccatttcaaaaaacaaaaaatattacaacttaatgccgatgtgacgacatggaaaatacgcgctgttgaggttgatagaacaaccataaccgcaggagataaaggtgttaactaccaagcaactgtcgttgatgccaataataatgtattacctaatgttattgtgtcatggaaattactcggatcagcagatgattatcattacagcacttatactaatgataaggggatagcaacgaatcgagtgactagtcatgtcgcgggacgcttgaagatgagcgcttatcttgattctaataattataaatcaacacaagatattactgtaataccggctgaaatagatattcataaatcaacctttaatagtcatcgtcgttctataaatgctgataataaagatagtacgttattaagcgtaaaattaatggataaatacggtaataccattgatggtaagaatgttgagattaaaactatcagtggtaagcctaattttagtgacaatccattaaagtcagtgggcaatggtgaatatcaaacaaatgttacagcaaatacgatgtccgatattatcttaaccgctcaagctgaaacaataactatcgcagagccattgacgattaaagtggctatccctaaatctgaaattacctttgagaaacctatccaacaggaaatctacaaatcaactgtgattgatgcgttaagttataaaggtgtaccacaaaatatgcaggtaatatggtcaagctctgatcctactgttgcttccattgatacaacaagtgggcaaatctccatgaaaaaggctggtactacaaaattattaccttacaaaccttag

SEQ ID NO: 308497 - DNA, 855 bp, Proteus mirabilis
atgtccacacagaatattgttaacattaacgaatcgaacctgcagcagacccttgaacagtcgatgaccacgccggtcctgttctatttttggtctgagcgcagccagcactgcctgcaattgacgccggtactggagagccttgccgcccagtacaacggccagtttattctcgccaagctcgactgcgacgccgagcagatgatcgcttctcagtttggcctgcgcgccatccctacggtttatctgttccagaacggtcagccagtggacggattccagggcccgcagccggaagaggttatccgcgcgctgctggaaaaagtgttgccgagcgaagaagagctgaaagcgcgtcaggctatcgagttcatcgaagccggtaatcacgcggatgcactgccgctgctgaaagaagcctggcagatctccaaccagagcagcgaaattggcctgctgctggcggaaacgcaaatcgccctcaatcgttctgacgatgccgaagcggtgctgaaaaccattccgttgcaggatcaggacacccgctatcagggactggtggcgcagatagaactgctgaagcaggcggcggatacgccggaaatccaacagctgcagcagcaagtcgccagcaatccgcaggatgcggcgctggcaactcaactagccatccagttacatcaggtcggacgtaacgaggaatcactggaactgctgttcagccacctgaagaaagatctcactgctgccgacggtcaggcacgtaagaccttccaggagatccttgccgcactcggaaccggcgatgcgctggcctcaaaataccgccgccaactgtacgcactgttgtactaa

SEQ ID NO: 308498 - DNA, 780 bp, Proteus mirabilis
atgaacgagcataatattaccaatgagtccctggcattagcgatgatgctggtggtggtggcgatcctgattagccacaaagaaaaactggcgctggagaaagatattctctggagcgtttgccgggcagtggttcagctgattatcgtcggctatgtgctgaaatatatttttggcgttaaccacagtattctgaccttactgatggtgctgtttatctgctttaacgcggcttataacgcacaaaagcgcagtaaatatattgataaagctttcctctcgtcgtttatcgctatcacggtgggggcgggattaacgctttcggtgctggttttgtctggctctatcgagttcacgccgatgcaggtcatcccgatctccggcatgattgcaggcaatgcgatggtggcagtgggactgtgttacaacaatctggggcagcggtttaacagcgaacaacagcaaattcaggaaaaactcagcctcggcgcgacgccgaaagtggcctccgcgccgctgattcgcgacagcattcgcgcctcgctgatcccaacgatcgactctgcaaaaacggtagggctggtgagtttaccggggatgatgtccgggttgatcttcgcgggtattgatccagtaaaagcgattaagtatcagattatggtgacgtttatgctgctttctaccgccagcctgtcgaccattattgcctgctacctgacttatcggaagttctataattcgcgccaccaattagtcgtaacgcatttgaagaagacgtga

SEQ ID NO: 308499 - DNA, 678 bp, Proteus mirabilis
atggaagaaagcagtattttgcttcagttaaaaaatgtcgcatggcaggcaggggagacgcaggttctcaataacatctgttttgatctccgcgccggagaatttaagctgattacaggccagtccggctgtgggaaaagtacgttactcaagattgtggcgtcattaatgagtccgactgccggtgaaattctctttgaaggcaaggagatcaataccctcaagccggaaacgtatcgccagcaggtctcctattgtgcgcaaacgcccgctttgtttggtgacaccgtttacgacaacctcattttcccctggcaaatccgtaacaaacgtccggagccggatgcgtttctgagcgatctggcccgttttgatcttcccgagacgatcctcagaaaaagcataaatgagctgtccggtggcgagaagcagcgcatctcgctaattcgtaatttgcagtttctgcccaaaattctgctgcttgatgaaatcaccagcgcgctggatgaggctaataaacgtaatgtgaacgaattaattcaccactatgttcgcgataagaatattgcggtgctgtgggtgacgcacgacaaagatgaaattacgcatgcggataatgtcataacccttcaaccgcacgccggagaaatgcaggaagcacgcaatgaacgagcataa

SEQ ID NO: 308500 - DNA, 918 bp, Proteus mirabilis
atgctcatttttattcctattcttatttttgtcgcgctggtgatcgtcggcgctggcgtcaaaatcgtcccgcagggatatcagtggacggtagagcgttttggccgttacaccaaaaccctgcaaccgggtttaagccttgttgtgccgttcatggatcgcattggtcgtaagatcaacatgatggaacaggtgcttgatatcccttctcaggaagtcatctccaaagataacgccaacgtcgcaattgatgccgtgtgctttattcaggtgatcgacgcgccgaaagcggcctatgaagtcagcaacctggaactggcgattatcaacctgaccatgaccaacattcgtaccgttctcggttcgatggaactcgatgaaatgctttcccaacgcgacaacatcaacacgcgcctgctgcatattgttgatgaagccacgaatccctggggcatcaaaatcacccgtatcgagatccgcgacgtgcgtcctccggcagaacttatcgacgcgatgaacgcgcagatgaaagccgaacgtaccaagcgtgcctacattcttgaggccgaagggatccgtcaggcagaaatcgtcaaggccgaaggtgagaaacagtcgaagatccttaaagcggaaggtgaacgccagtccgcgtttttacaggctgaagcgcgtgaacgttcagcagaagccgaagctcgcgcaacgcagatggtgtcagaggccattgccgctggggatattcaggcagtgaactacttcgtggcgcagaaatacactgaagcgctgcagcatatcggctcgtcgaataacagcaaagtggtgatgatgccgctggatgccagcagcctgatgggctctattgccgggatcgccgaactggttaaggacagcgccagcgagcggaaaaaatcatga

SEQ ID NO: 308501 - DNA, 459 bp, Proteus mirabilis
atgatagcgatgattctggtgcatccgcacatcttctggctcagcctcggcggtttgctactcgccgccgagatgctgggcggtaacggctatctgctgtggagcggcgtagcggcggtaattaccggtctggtcgtctggctcgttccgctagactgggcgtggcagggggcgatgttcgccgtcctcaccctgctggcggcgtggctgtggtggaaatggctggcaaggcgcgttcaggagcagaaacccgccgacagccatcttaaccagcgcggacagcagctggttggccgacgatttattctggaaaccgccctggtcaatggtcgcggacacatgcgcgtcggcgacagttcctggcccgttagcgccagcgacgatttgagcgccggtacgcaggttgaagtcattgccgttgaagggataaccctgattattaaagcggtatcacattaa

SEQ ID NO: 308502 - DNA, 2145 bp, Proteus mirabilis
atggtcaggaagacaccccttgcctttgccctttgcacattactgaccgccgccccgcaggcattcgcctctttcgatatggaagactgcaaatggagcgacgacagctgcctgctgaaaggcacgccgacctttaaccctgaaaacgacagccgcgacaacctgctgcggctgctgagccaggaaaaatcatttgctctgccggtgcaatcaatgccagcggatatcacccgctcccgggatttctattttgcctatcacccgcaatgggatgaggcagccccgcagccagccgctgcgccggcatccgccgcagacagcccactctcccgacagatggccgaactgaacattagcgcagacgaaataaacgtcaacgacgctgagcttgagaaccgtcatgtttcaaataacaccgagagcgtcagcgcattttttgccgcactgctggccgactcgacgttaacggcggaacagcgccaggccttagcccaggcgcgtacggggctgctatccggggcaacccgcgagcaaattgagtcttcacttgccaccctcccggctgattcaccggctcagtcctataaaaattatctggccgcagctgccagtttctatgccggtgattatgccagcgccgaacgggatttcactcagcttgccaaaagtgagcgcccgtggctggcagagaccgcgcaatacatgctgatgcgtgcggccttgaacaagagcagccagaacagcgtaggcgagtacggcgattttgatattgcaaaaattaaccgcgaggacgcgactcaggctcagacgcaggcacaagcctacctgcaacgcttcccgcaaggcctgtatgccgactccgcgcgcggtatgctgcgtcgcatcaactggtatttacaggcgtggccgcagctggccgggttgtatgagcagacgctccagcagtcggctgacgctcggcaactgcgagaaatagtcatcgaatacgataatgtctacggtatggcgttctacgaacagtccgtggtggaagcattccccgatgcgccgcttgtcagctatatcgaactgctgcgcgcgctgcgtctggataacaacagtaaacccacgctgacccaggcgcagctcgatgccagcaaaccggtgtttgagcagagccaaaaactgccgctatggcgcgatctgcaactgaatctgtggctggcgacggagaactacgcggcgattattcaggcagttacgccagcgcagaaacttgccgttcacgataccctcgccttcagcaaacaagtgctgtacggcgaagcgctgatgggccagaagaactggagcgcggcgcgtgatttctggcagcagttgctaaaactcagccaggacaacgaacagcagcagtatgtacaggctaagctcgccgcaacgctggtttatagcggcgacgtggcggcggtttttgccccagaaagcgcagtaaccaacctacgttttcgctcgcagatactgaaaacacaggcctcgcctgaactgctgcgccagcaggccgtccatggacctaacaatgaagagcgtaccatcgccctgcatacgctgctggtacgcgatcttaccgaaaaccgctttggcgactggttgaatgacagaaaactggccagcgccattactccgccggttattggcgacgcgtttgatgacgttaatctgagtattttcgactggaatggcgacgctgccgagcgcggttacacctgtcgcagcctcaatgaaacggtaacggtattgagcaaaaaagcggatgatgcccacgcgctgaactgcttaggcgaattcttccgcaccacgcaaacccacgtcgatttgtggaaaaacagtgctggcaacgacgttcttgaatcagcaatatcgcgcaaggagccgttcggtcagttcgacaggcaacgctactatcagcaggtgatcacttcgccgaaagcagaggttgaagacaagagcttcgcgctgtatcgcgccatcatgtgctatgcgccgtcaggctctaacgagtgcggcggtgaggaagtggataaactgcagcgtaaaggctggttcacccaactgaaaacgcagtatccgggaagtccgtgggcgcaaaaactcaaatactactggtaa

SEQ ID NO: 308503 - DNA, 717 bp, Proteus mirabilis
gtgggcgcaaaaactcaaatactactggtaaccgcgctgctgacaggccagccgcaggcggcggatatcgtcgccgcccgtgagcatccggccttctggctgtggtccggcgtgaaggccagtgacgaactgaaagacgcgcaaacggtctatctgcatcagggtgaggtgctggttcgttcgggtaacgtggttttccagcgtctcgggctgccggtcagccgcctgtcttttccctcgatctggctgaccgtgcgctttaccacgctcgacgtaccggaggcgatcccggctcgcatcataagattgatgcaacgctggcagaccgccgggaatcatgtgctcggcctgcaggttgattttgacgcggcgacccatcagcttgccgattacgcccgctttctgcagcaattacgccaacagttaccggccgagtttgcacttggcgtgactggactgctggattgggcaaaaacgggcgacgtcgccacgctgaatgcgctggcggtcgatgaactggtggtccagagctatcagggccgtcatacggtaacgaattatcaggcgtatctgcccgcactcagtcgtctgcgcattccgtttaagctggggctggtgcaaaacggtagccgggacccgcaggctgaagcgcagcttgagaaatccccgtggtaccgcgggacggtggtatttatgcttaatccccctcgccgttaa

SEQ ID NO: 308504 - DNA, 411 bp, Proteus mirabilis
gtgaatattagcgatgttgcgaaaagaaccggtttgaccagcaaagcgatacgcttttatgaagaaaaaggcttagtgacgccgccgctgcgtagcgaaaatggctatcgcacatacaaccaacagcatctgaatgaacttacgctgctgcgccaggcacgccaggtgggttttaatctcgaagagtgcggcgaactggtgaatctgtttaacgatccggcgcgtcatagcgcagatgtgaaaaagcgtaccttagaaaaggtcgcggacattgagcggcatatcagcgagctgcaggccatgcgcttgcatttgctggcactggcggagagttgccctggcgatgacagcgccgaatgcccgatcattgataacctctccggctgctgccaccataaagcgaaggcttaa

SEQ ID NO: 308505 - DNA, 2145 bp, Proteus mirabilis
atgttgccacgaaataaccaaaggccatttattctttcagccctgacattatgcatgtccggcgccgcttttgcagctacctctccaacacacgcttctacgtccgacgaagacacggttatcgtcacggctaaccgcacagaaagtagcctttgggatagccctgcaaccatccaggttatcgatcgccagacgctgcaaaactccaccagcgtttctattgctgatgatttacaagatattcccggcgtcgaagtcaccgataacgccctcgcagggcggaaacaaattcgtatccgtggcgaagcgtcttcgcgggtgctgattttgatcgacggccaggtcgtcagttaccaacgtgccggacaaaactacggagccggtttgctgattgacgaatccgcgctggaacggattgaagtggtcaaaggcccctattctgtcctctacggttcgcaggcgattggcggtgtcgtaaactttattaccaaaaaaggcggtgataagcctctcggcggcagcgttaaggctgtttataactccgcaacggcaggatgggaagagtcggcagcggcctggggcagcatcggaaactttgactaccgcatcaatggcagctattccgaccagggggaccgcgatacgcctgacggaagattgcccaacaccaacttccgtaataatggccagggcgtatggctgggttacaacttcgatcgccacaaaattgggctctccctcgatcgttacaaactgtctactcaaacctggtttgacgatccagagggccagttcgacgactttagcgtcaaaatacctaagctggaacgcgagaaaatcggtcttttctacgactacgcggccgatggggattacctgaagaacatccatgttgacgcatacagccagacaatagagcgcaaatttgaaaaccgggtcaaaacgacccaggttatccccagcccgatgattaaagcgctgacggtcagcaatcagaccaataccaacgacaaacaatatacccaaggggtaacgctacagagcaacttctccctgcctgctaacaacgagctggtgattggcactcaatatcagcatgacaaaataaaacaggacacggacggcagtacgcgccagaccgcagctaccggcttcttcgatacgcaaacacgtaccctgtcatacaacgaagcggagcaaagcaacacctcattgttcgcgcaaaacgactggcgctttgccgatgactggacgtggaccgtgggcgcacgccagtactggctgtcttcgaagctcaagcgcaacgatacgcaaaccctgcaaagcagcggcagcacctggcaatccaccggaggaaattccgttcacgatgatgaactggtgacctcaaccagcctacgctattccggttttaaagatcttgaactccgggctgcatatgcccagggctatgtcttccccacgctgactcagctgtttatgcagacgtccgcaggcggcagcgtaacctacggcaatccaaacctgaaggcggaacactcgaataactatgagctgggtgcacggtataaagggaatatgtggctgattgacggcgccatttattactccgaagccaaagactatatcgccagcctggcctgttcaggtcaacccgtatgcagcggtaataccacctcttcacggggcggctattactactacgacaacatcggtcgggccaaaacctggggcatggaactcaccgcagaatacaacggctgggcagtttcaccttacctgagcggtaatctcattcgccgtcagtacgaaggcaatacccttaaaacctgggataccggcgaacccactctgaccgggcgcgtcggcctgaaacatacctggttgatgaacgccgctaacctgacgtccgatgtctttatccgcgcggcgtccagcgccaaagataataccggcaccaaggaaatcaactacccaggctgggccacgcttaaccttgcattcaacaccgagttcggtccgcaggatcagtatcaggtcaacctcgcgctcaacaacctgaccgacaagcgttacagaaccgcgcatgaatctattccagacgctggtttcaatgccgccgttggctttgcgtggaatttctga

SEQ ID NO: 308506 - DNA, 825 bp, Proteus mirabilis
atgaaaaaactcttgattggcttactgagcctcgcctgcgttttcagtgcccagtccgccgaccgcctggtggtggcgggcggctctcttagcgaactgatatactccatgggcatcggcaaccgggtggtcggcgttgatgaaaccacctcgtatccacccgaaactgccgcactcccgcatatcggctactggaagcagttaagcagcgagggcattttatcgctgcatccggacagctttatcacctggcaggatgctggccctcaaatcgtgttggatcagttgcgggcgcaaaaagttaacgtcgtgacgttgccgcgcgtaccggccaccgtcgaacagatgtacgccaacattcgggaactggctcaaaccctgcgcattcccgaacaaggtgagacgttgatcgatcgcatacgtcaacgtctggatcgcgttcagcacaacgtggcagcgaaaaacgcgccggtcaaagccatgttcattctctccgctggcggcagcgcgccacaggtcgccggaaaaggcagcgttgccgatgccattatgaccctcgcaggcgcacaaaatgtcgccacccacgcgcagtataaaagctacagcgcggaatcgctgatcgccgccaacccagaggtgctcgtggtgacgtcgcaaatggtcgatggcggtctggctcgtctgagcgcgattgccgggattacccacactgcggcctggaaaaaccagcgcattgtggcgattgaccaggcgctgattctgggtatggggccgcgcgtcgccgatgcggttgaagccctgcaccagcaattctggcctcactaa

SEQ ID NO: 308507 - DNA, 1338 bp, Proteus mirabilis
atgaaaactgaacactcgctggatctcactgcgcattttgcgctcgagggaagtcagccatttaaggatcgccgcgccacgatgccctggcgtggggcgatcccggttgccaaagagctattgtcacaaacctggcaggaggtcatcagccagccaaccccaccgcggaaacggttggtgtacttgcatatccctttctgcgcaacacattgtactttctgcggtttttatcaaaaccgctttgaagaggatcactgcgcccgctacaccaacgcgctattacgcgaaatagagatggaagccgatagcgcattgcatcagtcggccccgattcacgccgtctattttggcggcggtacaccgtctgcgctgtcggcacgggatctggccagaatcatcaccgcactacgtgacaagctaccgctggcgccggactgcgaaatcaccattgaggggcgggtactcaattttgacgatgcgcgaatagatgcctgccttgacgctggcgccaatcgattttcgatcggcattcagtcatttaacagccggatccgcaagaaaatggcgcgcacttcggacggcccgaccgcgatggcctttatgcaagggttggtaaaacgggatcgagccgccgtggtctgcgatctgctgtttggtctgccaggacaagacgcaaaggtgtggggcgaggatctggcgattgcccgcgacatcggcctcgacggcgtagatctttatgctctgaatctgctccctaatacaccgcttggcaaagcggttgataccgggcgcacaacggttccctctcctgccgaacgtcgcgacctctatcttcagggctgcgattttatggacagcgcgggctggcgctgcatcagcaacagccactgggcgcgcaccacacgggaacgcaatctgtacaacctgctgattaaacagggcgcagactgtctggcattcggctctggcgcaggagggtcagtcaatggctattcctggatggtcgagcgcaatctgaccacatggcatgaatccatcgccgccggaaaaaaaccgctcatgatgatgatgcgcaccgccgagcgtggtttccagtggcgacacaccctccaggccggtattgaaacggcccgcgtcccgctggatgaactgacacctcatgcacaaaaactgaccccgctactgacccagtggcatcacgcaggactgacgcgagatgccagcacctgtgtacgcctgaccaatgaagggcgtttttgggcgagcaatattttgcagtctcttgatgaactgattcaggcacttaacgcgccgcgcattgcggtagagcaaccataa

SEQ ID NO: 308508 - DNA, 495 bp, Proteus mirabilis
atgagccatgtctctttacaggattttttgaaaactgagccggacggtacgctggaagctatcgcagcccagtacaacaccacgctgctggaggtggtgaaaaacctcccctccccgacgctggtttccggcgatcaatttgataccgtctgggaaaccgtcagcgaatggggcaaagtcaccaccctggtccatactgctgatgtcatactggaattcacgggtgaattaccttcaggattccaccgccacggttacttcaacctgcgcggcaaaaaaggcatgaccggtcatatcaaggcagaaaactgcacacatatcgccctgattgaacgcaaatttatgggcatggacaccgcgtccatactcttctttaaccaggcgggtagcgctatgttcaaaattttcctcggtcgggatgagcatcgtcagctactggccgaccaggtcagcgcctttcacgcgctgtcttcatccttaaaggaacatgcctga

SEQ ID NO: 308509 - DNA, 624 bp, Proteus mirabilis
atggctccatggctcatttttggtgcaggtggtagcggcgtcggcgcgaaaacactggcactcgcactggcggaacaacgtccggtgattgccgtcgttcgcaacgcgcaggtcgctgccgggttgcaggaaaaaggtgtgcaggtcttcattggcgacgcctgcgacagccaggtcaccgcctgtgcctgtcgcgcagcgggtcaacatgccacggtgatctcctccatgggcggtgcccaggattatctggcgcacagaaccgtcattgatgaagcagaaaaagcggagatcaaacgcatgattctggtgacttcgcttggctgtggcgacagttggccctttttgtccccacgcgccagggccgcatttggtcaggcggtacgcgaaaaatcgttggctgaaagctggctacaaaccagtcaactggactacgccattctccgccccggcggtttgctgaacggtgcagccacaggtcaggcgcaacggatacaggccgaggagtgccatggttttgtgatgcgtgcagatgttgcaaggcacattcacgaactggctacagccccgtcactcaataaccagatttacagtttggttgagccaggactgaaacccgcgtaa

SEQ ID NO: 308510 - DNA, 993 bp, Proteus mirabilis
gtgcttaaggactcgctttcttccgtcagcattctgacgggtctttctctgttgttggtcgctctgatgctcttcggagccagccagggggcgctgaacattagcttcagcgcgctgttcaacgacgaataccgtgacatctggttgaacatccgcttgccccgcgtgttgctggccgttctgataggcgcagcgctggcaacggcaggggtcattatgcaggggctttttcgcaatccgatggccgatcctggcctgcttggtgtcagtagcggctccgcgctgatggtcggtatcgcgatagttatccccttttcgtttcccgtggtgctggtgctgtatgagcagatgatttttgccgtcgcaggcagcatggtggtctgcacgattattttcctgataagccagcgtcatagccacggcggaatgatgcaactgctgttagccggtatcgctatcaatgctttgtgcggttcggctattggcgtactgagctatgtgggcgatgagcaacagctacgtcaacttacgctgtggatgatgggcaatctcggccaggcccagtggccaacgctgctggttgccagtacctttgttcttccagccattgctgtcaccgtctgtatggcgggcacgcttaatttgctgcaattgggtgatgaagaggcgcattacctcggcgtgaacgtcaaacgtaagcgccagcagttactgttgctcagctcgctactggttggtgctgccgtttcggtcagcggcgtaattggctttattggcctggtgattccacatctgatcagaatgactaccggcgccgatcatcgctggttgattccctgctctacgctggcgggcgcctgtctactcctgattgccgatacgctggcccgcactttggtgcagcctgccgaaatgcccgttggtctgttaaccagcctgatcggaggaccgtattttctgtggttaatactgcgtagccggagggtgtcatga

SEQ ID NO: 308511 - DNA, 771 bp, Proteus mirabilis
atgatcgttgctgaaaatctggtttaccacattcagggcagacgattgaccgacgatgtttccctgacgctacctgaaggagagattatcgcgattctgggtccgaatggcgccgggaaatcaacgctgctccgccagctcacgggttatctgcaacctcacagtgggcgctgtagcttattcggcaagccgctgaacgaatggtcaatcaccgagctggcaaaaacccgtgccgtgatgcgccagaacagtcatatggccttcccgtttagcgtgcaggaggttatccgcatgggcaggcatccgtatcgcacgcgcaatacgggcgatgaaacggaacacatcatgacgttgtgcgactgccaggcgctggccgcgcgcgattaccggcatctgtcgggaggagaacaacagcgagtacagctggcacgtctgctggttcagctttgggagcccgtgcctcggcccaaatggttatttctcgatgaacctacctccgccctggatattcaccaccagcagcacctttttcgtctgctgcgtcgcctggtgcgtgaacggcagtttagcgtctgctgcgtcctgcacgatctcaacctcgcagcgcgttatgccgaccgcgtggtattgatggaacgcggcaggattattgataacgggtatccgcaggatgtcctgaagcaacgggcgctgaacgcgctgtacggtgccgatctcacggtcataaatgagccggagcatcgaacgccgcttatcgtcctcaatcaataa

SEQ ID NO: 308512 - DNA, 657 bp, Proteus mirabilis; identical to SEQ ID NO: 297362

SEQ ID NO: 308513 - DNA, 645 bp, Proteus mirabilis
atgcgtatcattctactaggcgctccaggcgctggtaaaggcactcaggctcaattcattaaagaaaactatggtatcccacagatttcaaccggtgatatgttacgtgctgcggttagcgcaggtacggaattaggactgaaagcaaaagcattgatggataacggtcaattagtgactgatgaattagtaatagcattagtgaaagagcgtatcaaacaagacgattgccgtaatggtttcttgttggatgggttcccaagaacaattccacaagctgatgcaatgaaagaagcgggtatcaatgttgatttcgtactggaatttgctgtacctgatgaaattattgttgaacgtattgttggtcgtcgagtgcacgcgccatcaggtcgtgtttatcacattaaatttaatccacctaaagttgaaaaccgtgacgatgtgacaggtgaagagttaacaactcgtaaagatgaccaagaagaaacagtgcgtaaacgtttaatcgaatatcattctcaaacagcacctttagtttcttattaccaaaatgaagctaaagcgggtaacgcgcagtaccacaaaattgatggtacacagaaagtaagcgaaattaatgctgaactgaaaaatatcctcggttaa

SEQ ID NO: 308514 - DNA, 699 bp, Proteus mirabilis
  misc_feature (651)..(660): n is a, c, g, or t
atgcatttaaatccgttaaaaatatcaataagcccttcttcactcccctgcactcaacctttaacctgcattgaatatgaggacttaaaggatgggatgttagatatgattaatcgcaacagtaatatattacccactgttgtggatgaatttaatcaacaagatccgcttaatgcgcctattatggtgggtgaagtggtcgtgggtcatatcattggtctaatacccgttgttgggggggtactttcaaaaattacttccgcactttttggcctcatgaataaaaatatgaaagatagctctttagctgagcaaattattgcccatgtctctcgtattattgatgctaaaatcactgataacaatataaaaatcattaaactcaccacagaaggtattagcgacgtttatcaattattttcagattctctcgctcgttaccttgaccccaatgtgcattattcagaaacacaactacgagatttacgggaacaagttcttaaccgttttgatgatgtgatttcgacaattattgctcaacaaccattagtattaaatttagcacaatcagcaggattgcccttttattgccactgttgcgcactttttgtcgccgcccattgcgatatattaaccaataaagaaaaactnnnnnnnnnnaacttgctctggaagaggattatttcaaaaataatctaa

SEQ ID NO: 308515 - DNA, 966 bp, Proteus mirabilis; identical to SEQ ID NO: 307949

SEQ ID NO: 308516 - DNA, 669 bp, Proteus mirabilis
atgaagcttgaaactcgtatgcgtcagtcgattcaacaccgtagtggggttgtactgactcgttttgatctggctccattgggaagcaagacccaagttacacaggcgttaagtgtgttagtgaataatggcgaacttcttcgtctttctcgaggaatttatgctaaagcccaaaggatggggaatgatgtaaaagcgcaaggtagtcttgatgttatcattcgtgaagtagccaataaattaggcttccagcttcgccaaaaagacttgtgcttcgagaaagtaaatgcctcacaagatgaaattattgttgaagtggatgctccaagagttaagcgtaagcttaacatcaatgggaaaattatttgctttcgtagttatagccgtaagtctgctactaaaaatactgcatttaaattagccaagacacctcctactcaaggggttgctcgttatgtagcagagctagctcactattataaaatatcttattgctacaatatgatggatcagtgggctgatgctgtaactcgcctagccggtgatgaggtggtacatgatactgttgaggacctccttgtagctctaaaacgagcagggaaaatcaccaagcaagaagttgcgatgctgtcagtcaattacctgcgggagcaaaaacaaagtgtttga

SEQ ID NO: 308517 - DNA, 717 bp, Proteus mirabilis
gtgtttgacccgttcaatgattttgagcaagtcggttatttacgtaactattatggtgaaaaagatccgataattattcgtcaacttgaacacacaatgtttcgtgctggtttagatgaagcattagcttacttagtgggaaaagaaatcttacattatgaagattttttgggtgttcatcggatattattcgaagcattctacccatgggcaggtcaagatcgtgccattaccgcgcctaattgtgcggtatctaaagctggtacgatgttttgccatcctcatcatgctcgattagctattgaggaggggctacgcctcggacagaatgtaaagtatatgcgtcagcatcctggtgaggtaatggggttttttgcgtatgggcatccatttcttgatgggaatggacgtactatgttaattattcataatgagctttgccatcgagctggcttttcgattgattggcatagaacgaataaaatggattacttgagagccttaagcgctgaaattaaatccccatcaaaagggcttttggataactacttatttcagtttataggagatacccgagatcgaaatctttggggggagtctataaatggtattcgtggtttagatggtcaaagtatagaaaattccgtagatggtgagtacacggacatagcagttgctcaaaagtatcaatcattcaagatgaatagaggtctgtga

SEQ ID NO: 308518 - DNA, 1590 bp, Proteus mirabilis
atgtctaatcctatttttcagcaagaagttgctcgtcgtagaacttttgccattatttcccaccccgatgcgggtaaaacaaccatcactgaaaaagtgttgttattcggacaagctatccaacgtgcaggaacagtaaaagggcgtggttcaaatcagcatgctaaatcagactggatggaaatggaaaaacaacgtggtatctccattaccacttctgttatgcagtttccttacgctgattgtctagttaacttacttgataccccagggcatgaagacttctctgaagatacttatcgtactttaactgccgttgactgttgtttaatggtcattgactcttcaaaaggggtcgaagatcgtactcgtaaattaatggaagtgactcgattacgtgatacgccaattttgacctttatgaataaattggatcgtgatattcgtgatccgatggaattaatggacgaagttgaaactgagctaaaaattgcctgtagccctgttacttggccgattggctgtggaaaactgtttaaaggggtttaccatatcttaagagatgaaacctatctttatcaaacaggccaaggtcatactatccaaaactcaatagtaatcaaagggttggataatcctgagttagatgaagcgattggtgatgatttagccgttcaattacgtgatgagctagagttggtgttaggtgcatcacatgagtttgatcatgaagctttcttagcgggtgaattgactccggttttctttggtaccgcattaggtaactttggtgttaatcacatgcttgatggtttggtgaagtgggcgccagcgccaatgcctcgtcaaactgatatgcgagaagtgacagcggctgaagagacattcacgggttttgtctttaaaattcaagctaatatggatcccaaacaccgcgaccgtgttgcttttttacgggtggtgtcaggcatgtatgataaagggatgaaactgcaccaagtacgcacgaaaaaagatgtggtgatttcagatgcattgacctttatggcaggggatcgttctcatgttgagcatgcttatcctggtgatattattggcctgcataatcacggtaccattcaaattggtgatacttttactcaaggtgaaatgttaaaattcaccggtattcctaacttcgctccggaattattccgccgtattcgtctacgtgatccgctaaaacaaaaacaattgttaaaaggtctggtgcaattatctgaagaaggtgcggtacaggtgtttagacccctagctaataatgatttaattgttggcgcagttggggtgctacagtttgatgtcgtggttgcacgcttaaaaggtgagtataacgttgaagccatttatgaatcagtgaatgtatcgacggctcgttgggttgaatgtagtaacgaaaagaaactcgaagaatttaagcgtaaaaatgagcaacatctggcattagatggtggtgataacttaacttatattgcaccaacgatggttaacttaaatttaacccgtgaacgctatcctgatattgagttccatcaaacgcgtgaacactaa

SEQ ID NO: 308519 - DNA, 156 bp, Proteus mirabilis
atgtatcgcggtttcaccattattaaactgccaagaaaagcagtaacaccgataactcgttatcacgtttggttagatgatcagtcattcggtaagtttgatgcaatggcagaagcaacgcattatatcgacttattaaaaggtgatattcaatga

SEQ ID NO: 308520 - DNA, 150 bp, Proteus mirabilis
atgaaccaattaattaagcaaagaaacaaatataaattaagcagtgaatcttttactaataaaagtaaaaagtattcaaaagcggatagagtaacactggctttatgtgccattgttattgtttcgtttcttgtgaaagtttctatctag

SEQ ID NO: 308521 - DNA, 396 bp, Proteus mirabilis
atgaatgctgcggagcttattcaagcaagagagcaactacaaggcaatgatgatttttatcagtctaaagtggtaaagcattatcgcaatgatggtctttcatttgatgagcgcgtcagtggtatgaataaaacagctgaagttagggctgatttattaagtaagttaaataaaaatagtgatgatattttgattggtgagtttcttgattatttaagaaatgaaaataatcgtatatatcagatgatttattaccttgctgagatagaaaaagaaaagaacggaatagattatttattattaaagaggaaagataaaataaaaatcattaatgcacttcatcaaataaaagtattgagcgcattaatcccgaataaattagcaatgcctatttaa

SEQ ID NO: 308522 - DNA, 207 bp, Proteus mirabilis; identical to SEQ ID NO: 302962

SEQ ID NO: 308523 - DNA, 222 bp, Proteus mirabilis
atgtctaaagaaatggatttagcctgcgaacaatcacagttattgcaagatattcaaataaaagcagtaacagggcgttacataggtgtatcagcgtttgaatgtgaagattgcggtcgtgaaatacccgaaaagcgccgtattgcggtaatgggatgcactcgctgtgcagattgccaaacggtgtatgagctgaaatctaagcattatcggagtgtgtga

SEQ ID NO: 308524 - DNA, 828 bp, Proteus mirabilis
atggcgaataaaaccattctgaaatgggcggggtcaaaagtccgtatcatggataaattaattccacatttgccaaaagcaaagcgcttagttgaaccgtttgcgggttcttgtgctgttatgatgaatacagaatataacgaatatttaattgcagatgccaatcaggatttaattagtttatatcgtaatgtcgtagaacatactgaaataatggcgcgtaaagagttctatgcgtgggaagaaaacaatcataaaaatgattacattgctattagaaagttatttaattcaattaagatattagataaaaacgagtgtgatcaatatatacaatctgctcggtttttatatttaaatcgtcattgctttaatggattatgtcgatataacaattcgggtgaatttaatgtgccattcggaacatatgcccgtgtttattttccagaggaggaaatcagacaatttgctgagaaagccactaatgccattatcgcttgtttagaatggcaagatactttgtcactcgttgatttcggtgatggtgtttattgtgatcctccatatatgggagatgaaggtagttttactaaatatcatcacacggattttactcacgctcatcaaattgagttagctcaagcattaaaggcattaaatcaatcacaaggtaacccgattactgtctctaattccattcacgccaaagagctgtatgccgatctcggttttattattcacgagattgatgcgcctcgttctatttctgcaaatggaaaccgccaatcagcaaaagagattatcgccgttttgccggaggtgtgctga

SEQ ID NO: 308525 - DNA, 324 bp, Proteus mirabilis
atggaacagggctatgtcgatattcaagatccaaaaaatggggtgcatattaccggcactcgttttgctatcgtttattggaaaaaacaatttggattaattgaagtcactgtgattgatggtcgtgtgcgccgtgaagtgattgcgtggtatgactctgcggtaaatgtgacggctggcgttgttggtgcacatgtgagtcgtgttattagtgctgaaattaaatctatctctgaattgatagacgtaatgactcacgttgctaaactgtgcgaaacagccattgaaattattgatccgaagcatttaggcggtgtgcggtaa

SEQ ID NO: 308526 - DNA, 612 bp, Proteus mirabilis
atgaatagcttgttaccgtcaggcagtagcccattagaaaaggccgccgctattgcttgccagtccttgcaaaccttgccggtgcctttacgccaattatggaacgccagcacatgccccgttgagttattgccatatctcgcatgggcttggtcggttgatagatgggatgaaaactggtcagaatccgttaagcgccaagtagtacgggattcgatgtttattcaccggcacaagggcaccattggcgcacttaagcgcgtggtcgagccgttaggttacatcatcaaagtcactgagtggtggcaaaccgacgatccgccgggcacatttcgccttgatgtgggcgtgcaagaaaacggcattactcaagaaatttatgacgaattagagcgtttgatcgctgatgcacgccctgttagtcggcatctcttagggttatctatcaaccttgattcgcaaggtgaattttatctttctgccgcgacatttagcggtgatgagttaacggtttatccgtattttgcagaagaaattaccgtgtctggtgcgccattaacggcggtcggagtacacattattgataaagttgaggtcgcacatgagcgctaa

SEQ ID NO: 308527 - DNA, 969 bp, Proteus mirabilis
ttggcattattgttagcattgtttgcggcagtcttggcctcattcacttgtgccggtgttgcagcacccacatcacccgccgttaacgtaatatctgcactcagtggtttattgttaattttacgggtgctaggtacacgaccattagcgttagtattggcattatttgcggcagtttgtgctgcgttagctttgtttactgcatcgttagcggttttctgtgcggcatccgctttactcaccccattgtttgccgtgttctgtgcattggatgcggcagtcttggcttcattcacttgtgccggtgttgcagcacctacatcgcccgccgttaacgtaatatctgtgcttaatggtttgttgttgattttacgggtgctaggtacacgaccattagcgttagtattggcattatttgcggcagtttgtgctgcgttagctttgtttactgcatcgttagcggttttctgtgcggcatccgctttactcaccccattgtttgccgtgttctgtgcattggatgcggcagtcttggcttcattcacttgtgccggtgttgcagcacctacatcgcccgccgttaacgtaatatctgtgcttaatggtttgttgttgattttacgggtgctaggtacacgaccattagcgttagtattggcattatttgcggcagcttgcgcggcgttagctttacttacagcatcatttgcggttttctgtgcggcatccgctttgctcacaccactgtttgctgtggtctgtgcattagatgcggcggtcttggcttcatttacttgcgccggcgttgctgcgcccacatcacccgccgttaaggtgatatcggtactcaatggtttattattcactttacgggtactaggtacgcgactattggcgttcgtgttagcggcatccgctgatttttgtaccttacttaatcccgtgcttaattcggctttggtggcataa

SEQ ID NO: 308528 - DNA, 1281 bp, Proteus mirabilis; identical to SEQ ID NO: 304111

SEQ ID NO: 308529 - DNA, 2019 bp, Proteus mirabilis
atgcctaatataacactacaaagacaacccgttattgcctatttagagagtattgaaaatgtagtaggcagtgaaataggtaatgatattatttatggtgaccaaaaaaataactatttaaatggcatgggaggagtagattcattatatggattagctggagatgatacgctggtattacgggaaggttatgcacaaggaggggcaggaaatgatagttatactattctaagagcatcaaatacggataataatgttaaacaacttgaaactattattgatgaagagacgcatacagaagctagtcttatccagttaaattatacttttgatgaaattaccgctatttctcgtcgtgaaacagatattgtttttacgcttaaagttagtaatgataaagttcctgatcaatttatcgagcatttaattgcattaagtcatgtataccaagataaaaatagtcaattattagcccatcgatataccattgtgactatggatggttttatacttactattaatgaaaataataatcaaccaagagaggtatcatataactttagttatttagaaaagtataatcagcaagagaagcttcaacagctttctattaatgacgataaacacacattgtctattcaatctgaaaataaaactaaacttattcaattattacctgagctacaatacagtggtttctcttctggagaatatttaaagcttaatctacagggtaatagcgaaaataatcattatgctggaattgcggctcattcatcaattaaactgagtcgcggttatgacaattatcaaataagctcattgctagctaaaaatagaaatgaaaagatcactatttctctgagtgataatgataaacaattaacatctgattgtactagtcatttctttttatccgatgtgagtggatttgatttgatgtttagtgatggcgttttatctcatcgctataatcctgatgctcatattaaacttgttttcgatacggaaagtgttagtgctatttttaactcaggaatgacacttcaatttattgataaagataatcgagtttttcatttgcctaagccagacagcggtcagcgtttactgatccccactatcactttggatgttaggttgagtcatcaaagtgatgttctgatgatcccaccctccctacgtttaaataaagaggcattatcattgtatcctaagtattttcgtagagaagaactatcatcacgttcaacgcaattacagcgtattatatccactcaaacactagagcctcattcattaaaggtaacagaattactgagagatgatattgccgttaatgataatcaacctgttaattctattttgtctctcaataaactattttcaaacagatcacaagatatattctctcaagccatagatttattaccaatgatagaattaatggatggtgatgatattgttgttaatcataatcaaagtagctcagtgattgatgggggtaaaggtgatgatcatattgttgtcaatgaagggcaccatattttaattgctggagaaggtaatgataatcttaatggcggaagtggacatgatctgtttatttcaacctcaggaaatgattatctaagtggaggaagtggtaataatgtttatatagtacaaaaacgtcatggtgaagtgacggtgtatgatgaaggtgaaatgagccatgtttttgtatcagggttatctgagcatgaaaagttaatatcttcccaagtaggtgaagattggcagtaccgaactaccgataatcagtttattttaacggttaaaacaacaagggtagggaaagctgaaaataatacggtgaaggttgtggaaaagcagcaaatattgtcaccacgagcgcttgcgacaattattcaacaaatggctcaatttaatcagcaacaactatcgacgatgcaaggcagtgatgttattccctcatcaaactggtcgcctttagctgtggtcgttaagcatttataa

SEQ ID NO: 308530 - DNA, 501 bp, Proteus mirabilis
gtggcggggccggtcggtagttatgaatttcatgcccgtagtgccgatggtcgggtgtccgatgtgtccgcgatcagtccagcaccggcaaatgtcactatttccgtgttatctcgtgagggtgacggcactgcatcagaagaattactgcgcattgttgaacatgcgttaaacgatgaagatgtacgaccggttgctgaccgcatcaaagtgcaatccgcccaaattattccctatcaaattgatgcgacgttatttctttttccggggcctgagtcggagccgatacgcaaagaagcaaatcaacgtctgacgcaatacatcacagagcaacaccgtttagggcgtgatattcgcctgtcagcgatttatgccgcgttgcatgtggaaggtgtgcaacgtgtggagttaaaacaacccactaaagatgtggtgctggataaaacccaagcctcctattgcacccaaagtgcattaaccattggtggctcggatgaatag

SEQ ID NO: 308531 - DNA, 612 bp, Proteus mirabilis
atgaatagcttattaccgtcaggcagtagcccattagaaaaggctgcagccattgcctgtcaatccttgcaaaccttgcccgtgcctttacgccaattatggaacgccagcacatgccccgttgagttattgccatatctcgcatgggcctggtcggttgatagatgggatgaaaactggtcagaatccgttaagcgccaagtagtacgggattcgatgtttattcaccgacacaagggcaccattggcgcacttaagcgcgtggtcgagccgttaggttacatcatcaaagttactgagtggtggaaaaccgacgatccgccgggcacatttcgccttgatgtgggcgtgcaagaaaacggcattactcaagaaatttatgatgaattagagcgtttgattgccgatgcacgccctgttagtcggcatctattggggttatctatcaaccttgattcgcaaggtgaattttacctttctgccgccacctttagcagtgatgagttaacggtttacccctattttgcagaagaaattaccgtatctggtgcgccattaacggcggtcggagtacacattattgataaagttgaggtcgcacatgagcgctaa

SEQ ID NO: 308532 - DNA, 465 bp, Proteus mirabilis
gtggcttgtgcattagatgcggcggtcttagcttcattcacctgtgccggtgttgcagcacctatatcactggcagttaaactaatatcatcgcttaatggtttgttgttaattttacgggtgctaggtacacgaccattagcattaatattggcattatttgcggcagtttgcgcggcgttagctttgcttactgcatcgttagcggttttctgtgcggtatctgctttgctcacaccactgtttgctgtggcctgtgcattagatgcggctgtcttagcttcattcacctgtgccggtgttgcagcgcctacatcactcgccgttaaggtaatatcggtactcagtggtttattattaactttacgggtactaggtacgcgactattggcgttcgtgttagcggcatccgctgatttttgtaccttatttaaacccgtacttaattcggttttggtggcataa

SEQ ID NO: 308533 - DNA, 1020 bp, Proteus mirabilis
atgttacaagatattttattaagaaaaggaattattgtttcagatagattagataaagaggttttaattgaagaggtgtgtagattacctcacggatttattgatctacaagaaataaaaaatagaattcagacctatgacccaaaagaaagttcaactaaaatatctctatccacaacaactgatcaaaaagaaataaaagaagctatagagacgattaaaaaaagctatccaaaaacaaaatctgaagtatttcaaataacaacaaaaaaagatgggggactttctgttgaattacattatgatgacattgatttatctagaactgcactcagacaaattgataaaaaaagtgttaaattagatttttctataaataaggatgaagttgacataaggatgcctcaaaatgagaaagcaaaagaactcgcaaaattaatagaaactcaacttgctacaataaaaaatgaagaaatatcaagatttgaaatagaattacgttcagtaacaagtcctcatttacgcagtcaattttttcatgacctaatgcatggtattgaagggtatgatgttgaagatgttaataatatagaggttaatcggcttagcaatcacgattttgaaaatgatgatgaagctattgatacaggatatgttaaaaaagctgttttaaaaggagaatccgtcaactcatcatcaatattttctgatcttcataagaaaggttattatataagtaaagtttcatgggctagtattccatcatcaagtaatggagatagaataattctagaagctttttttaagaattcagaattatgtacagactttgcttataatataaaaggtataaataattttagtaaaggtaaattaaatgtaacaactagaagtgcaaaagaaatcgaaaagaaaagcataggtaaattaatcgaagattctgcagaaaaagcatataaaaagttaaaccccaaatctgaaggaggcgaaaatgaagaaaataaagtggatgtttcttaa

SEQ ID NO: 308534 - DNA, 1497 bp, Proteus mirabilis
atgtgtataagagacagaaatagtgttgaacatggtatatatcacggatttactcgggaagttgttattgctgatgcaattggtcggataggagaaaaaggtgatgataagttaaagaaactaaataatgcgatcacggctcagcaaggatcttttcatctgtatgggaatgtaactagttttgttaataagagagtatggaattatatttttaattctaaaaatactggatgtaatgttattaggatacgtcaagcatggaactacggagcagaagaaagcgtgatgaagtttcaaggttctacaagcgtatctttggggcagcagtattgtgagggaactaatggtcaaatatatgaattttttggttgcacaggagctacatgtgagatcctatcaattgataggcacgaatgtaattccatagctccggtttttcgatctagaaactcacaagttgaatttggtgcaattacaatcaatgcaatcacagtaaaagagggtgatattggaattttatttgatcactcgtctagcggtggtatttatggctgtttaactatcaacggcatcacggcaagacctaatgatagaaatatcgaaaatttaaccactctagttaagagccgtgataattgtgttattcgtggcatgccaattcctcctatcggcgccattggaaatattggaggatcacctaattctttgtggtcagcagagaaagatacaggcatagcaacgacagatcagaatagaacattgataagcagttatgaaagccaagcatcagggattagaactacagttgcaaactcatttagaagcattgctgataaagaaggttcgacagtattaagtagttctcttgttcgttctgggactggttatgaagtttgcggtggatttgggggatcgtctggtgaaaatatatcttctgctaatcgtaaatggtctctagattcgtctaacgggaacattaaggctgctggagtgataactcaaggagcttcattttctgattacgctgaatattttgaaaatgcagaatatggtgttattccactaggaactattgttgaattaatagcggataaaataagaccagcgaatggagatgaatttattggagttatttctggcacagcaggtattgcactaaacgcctcgtcattatgttggagtaaaaaatatttgacggggaagtatggcgagccaatttatgagattattaatggacataaagttcgtaaagaaaactctgattatgacccatatatcgatagatatggagatgaaatttacttatcaagggaggaaaggcctgaagaatggtcatgtgttggtatgatggggcaggtttatgtgaatgtatcaaatgatgtttcagtaggagattatatctgcgcaagaaatggtattggaataaaatctaaagtaaaaaccagactcaaagttatggaaattaatgaatttgttgctaaatgcttattaatataa

SEQ ID NO: 308535 - DNA, 393 bp, Proteus mirabilis
  misc_feature (330)..(339): n is a, c, g, or t
atggaattaaaggattattacgccattatgggggtaaaacccactgatgacatgaaaacaattaaaactgcttatcgccgtttagcgaaaaaatatcacccagatgtaagtaaagagccagatgctgaggagcgttttaaagaaatagcgcaagcttgggaaattcttggtgatgaacagcgcagagctgaatatgacgaactttgggctcaccgcaatgatccgaaatttaaacaatttacacagcacaacaattcacattcaaaccaacaaagttttagtcaggaagattttgacgatctttatgcttctttctttggtcaaggttcnnnnnnnnnncttttgaagggcgccattcacgtcaagcacctagacaacgtggacaagatctag

SEQ ID NO: 308536 - DNA, 729 bp, Proteus mirabilis
ttggataataaaaacagtgtagcatttgatacaatcgcgatccttgcagataaagcaaatgttcctccatcaacattaatccgttttgccaatgcatttcatttcaaaggatttaatgaaatgaaacttttatttcaacgtcatttaatgggtgaaatggataatgaaaaattaacctataagcagcaatacaaaaaggaaccaccaaacttaaatgagccagattatattctgcaagagtttgcacaagccaatagccacgctttgcaacagttagctcatcaaacccataaggatatgttaaataaaactatacaactacttgagtatgcagaaactatctatataggtggttttcaccattcttttagtgctgcgagctatttttttcacgcgctttctcatatcccttgtgaaaccgtctttgttaattgcctagggggaatgtataaagaacaacttaggaatattacacatagagatgtgctgtttggcatccatttccacccttattcagaagaaatgcaaaaaatgtgtgagattgctgcttataaagaggctaaacaaattattgtaacagatagccccataagcccattagcaagtctaagtgatgtttgtttaactgtaaaagaagcacaaataaaaatgtttcgttctcaaacctcaacattatgtttactacaagcactttcagttgcattcgcttttagaaaaaagagccattaa

SEQ ID NO: 308537 - DNA, 450 bp, Proteus mirabilis; identical to SEQ ID NO: 301724

SEQ ID NO: 308538 - DNA, 336 bp, Proteus mirabilis
gtggcaacgggtgcaagcagtcaatcttatgagtatcaatacaatctcaatattattattgatgattatccaggtgaccaagatgtgttaatggcggtgatcattggttggattgaacaacatcagcctgatattttccttaatcccgataaacgccaaagtcattttacctttgatgcctttattgatagcaaccagaccgccagtattagcattgatttaaagttgactgagcgtgtcctcgttaatgtgcaagcggataaattggttgttggtgccattgaagagccggctgatccgtttgaaagttgggagagtgtggttcatgaacgctga

SEQ ID NO: 308539 - DNA, 258 bp, Proteus mirabilis
gtggttgcacccagaattgagaattttaattatcagtatcatgataataaagtttctaatatcggtaatagttcatttcgtgttgtggcttcaggcccttgtctagcagaaaaacaacaatatggtgtggaggggatgtgtcgcgagcgttattaccttatgccacatttagccgttaaattacaacttgtcgatctcacaaataaaaaatctagcgtaggcatttggcacaaaggagagttcattgttgtcaaataa

SEQ ID NO: 308540 - DNA, 201 bp, Proteus mirabilis
atgtcggccaatgataaaggtgtcacgctttcttttgctccgcaagtggcgggtattgctgcggtgcatcattacggtttaaaagagcgtgtgcggggtaagtcattagaaattcaatatcctgaaagaaagctattaagattttcaccggcggatatcaaacatattgaaaatcagttactggaattcctttcccgttaa

SEQ ID NO: 308541 - DNA, 282 bp, Proteus mirabilis
atgccaatcgatgaagccgtgtttgctacatcacgattaagcggtgtctatgtcaccaataatcaagggcaagaaggttttactgagcttacattacgtactttagaaacacgcactccgctggtacgttgccatcgtcaatatttagtgaatatggattatgtcaatgaaattgtatttggtgataatggacaagcagaacttattttacataataataaacaaattccggtcagtcgacgttaccttaaacccttaaaagaagcgattggcttaatttaa

SEQ ID NO: 308542 - DNA, 420 bp, Proteus mirabilis
atggttaactttttattctatatggaaaaaggtgataatgataaaagcatgtctcaagtaataaacttttctcttttatttattttatctatagtacctgcactattagcgggttcaaccctgcatattgaacaaaagttctctatggtgattatcggttggctcctgatgttactctgtggcggtatctatcggtttactataggaaaagtgattacttttattgttgctgctttatggtctttaaacctctccatctcactgtttttttatcgtgaacatgatattcccttttcatcatcaatagcagaaactttcattaatactaatggaagtgaaactgttggtatgctctcttataataaatattatgtactcttttatattgttatatttaccctgtctcttatacacatctga

SEQ ID NO: 308543 - DNA, 342 bp, Proteus mirabilis; identical to SEQ ID NO: 297214

SEQ ID NO: 308544 - DNA, 198 bp, Proteus mirabilis
atggataaaaataggctgcctgtacgttcagaccggggtcgccaaacttaccggtccgaaaatagtcgggcagtcacagggagcttatctctgacgactgttcgtccgacaccaacaattcatattccaaaaaaaataatttatttacacggtgggaatagggcatttcggattaacggagggcttttcaatgcataa

SEQ ID NO: 308545 - DNA, 900 bp, Proteus mirabilis
atgaatgaatggtcattattgattttcacctttatgatgaatgccactattggcttaacactcataacaggcctttttgcacgccgtcttgcacattatctcagtgctgaaagctattatcgctttatgttactaaccttattggtgatttgtggattagccggtttaggctctattgcctccattactcacttaggcgtaccgttaaatgctccgaatgccattagaaatgtcttttcagcttggttaagtcgcgaagttgctgtcactgccatttttgtaggatgtttagggatcacctttttatggctatggcgtaccggtaaattttcgatgctgctatttagtgcaagccttctgattggtctgtttgacatttattgcatggcatccatttatcgccatacttccattttaacatggatggataacaacacttatgtgatgttttttggcgcgatgctcacattaggggcaacaatattctttttgctgctaaagatattgcagcgtataggcaataaattagggatagaaataccatcagcccctttccctatccgttggaaatggcaattgtgggggatcatggcatttagtttaattggccgattactctatcaacctttttatgaacactatttaactcgtacgctctatagccaaacatcggtaacctttccgttatcacctattgaagtctattactccattggcccattacgtatgaccagttggatcttagcaactttggctgtattggtgtgtggctatagtttagtaaaatatttgatgggccaaactcagcaaaaatcaacggagtccatttttgtctatggcggtatcatggcaattattgcagaatttgctttgcgttatgtgttttattcaattcactaa

SEQ ID NO: 308546 - DNA, 291 bp, Proteus mirabilis
atgatcctcaataaaaaaaacattcattccaaatcagtaatgctattttgtgccggcattgtttctttaatgccgttgcacgcaattgcttatttacaaggtgaagtgagaaccaatggtggccctaatattttctatgcagtattagatcacaccacctttcctaataacaaagcaggagaattagcaacagtaaacttttcgttgcctgatcgctatgatgggacagtatattgtcctaactcacgtatctatgatcgtgcattaacctattttttatcaattaaatga

SEQ ID NO: 308547 - DNA, 1785 bp, Proteus mirabilis
atgcgtactaattattgtgggcagttgaatagcgcccatgtgggccaaaaagtgactctttgtggttgggttaaccgccgccgtgacttaggtggacttatctttattgatatgcgagatcgtgaaggtatcgttcaggtcttttttgacccagagcagaaagaggcattttcacaggcttcagaactgcgtaatgaattttgtattcaagtcacaggaacagtacgtgctcgccctgatagccaagttaataaaaatatggcaacaggtgaaattgaactagcggcagaatcgctgtctatttttaaccgttctgaagcgctacctttagatagcaaccaaacgaatacagaagagcgtcgtttaacttatcgttatttagatttacgtcgccctgaaatgtcacaacgcctaaaaactcgtgcgaaaatcacaagttttgttcgtcgctttatggatggtgaagggttccttgatgtagaaacgccaatgctaactaaagcaacgccagaaggtgcgcgtgactatttagtaccaagtcgtgttcataaaggtaaattctacgcattacctcaatcaccacagcttttcaaacagctgttaatgatgtctggttttgatcgctattatcaaatcgtaaaatgtttccgtgatgaagatttacgtgctgatcgccaacctgaatttacccaaatcgatgttgaaacctctttcatgaccgcagaacaagtgcgtgaagtgatggagcgcatgatccacgcattgtggctagatatcctgaatgttgatttaggggcattccctgtcatgacctttgctgaggctatgcgtcgttacggctctgataaaccagacctacgtaacccaatggaactcatcgatattgctgatttagtgaaaaatgttgagtttagcgtctttgcacaagcggctaatgatgaaaaatgtcgtgttatcgcgttacgtgtaccgggtggtgcatcgttaactcgtaaaaatatcgacgaatatactcaatttgtcagtatttatggtgccaaaggcctagcgtggatgaaagtcaacgaaaaggcaaaaggtatcgaaggggtacaaagccctattgctaaattcctgactaatgatgtggttaacagcatcttagcggcaacaaatgcaacagatggcgacttaattttctttggtgcgggtcgtcaaggtaccatgagtgatgctatgggagcgttgcgcctgaaagtcggtcgtgatctggaattaactgatcttaacgcatggaaaccactgtgggttattgatttcccaatgtttgaagaagatgaagataccggcagcctaagtgcaatgcaccatccatttacttcaccaaaagatctcacaccggcagagctaaccgcacatcctgtaggcgctgtagctaatgcctatgatatggttattaacggttatgaagttggtggtggctcagtgcgtatccatcgtaatgaaatgcaacaagcggtatttagcattttaggtattactccggatgagcaacgtgagaaattcggtttcttattagatgctctgaaatttggtacaccaccgcatgccgggttagcatttggtttagaccgcttagtgatgttattaacaggaacagataatatccgtgatgttattgcgttcccgaaaaccacggcagcggcttgcttaatgaccaatgcaccaagttttgcaaatgaagacgcgttaaaagagctggctattcaagtgacagaaaaagaagttagcacagataacgagtaa

SEQ ID NO: 308548 - DNA, 1806 bp, Proteus mirabilis
atgaaagcaatagtatttgcctatcatgatattggctgtgttggtttaaaagcacttgaaaaagcgggtttcgatattcaagctgtatttacccatactgacgatcctaacgaaaatcatttcttctcatccgtagcgcgtgttagcgcagaaatgggattaaccgtgtttgctccagaaaacgttaatcatccattatggattgagcgtattcgtgagatgaagccagatgtcattttctctttctattatcgccatatgctaagcgatgagatcctgaatttagcacctaaaggtgcatttaatttacatggctctttattacctaaatatcgcggtcgtgcacctatcaattgggccattgttaatggtgaaactgaaacaggtgtcactttacataaaatgacggctaaagcagatgctggtgatatcgttgcacaagaaaaagtaacgattgaagatactgatacttcattaattttacatgaaaaagtcagagaagctgcgacgaaattaatggctcatacgttaccgcatatcgcctcaggtaactattcaacaacagcgcaagatgaaagccaagcaacttattatggtcgtcgttgtgctgatgacggtttaattgactggaatgcagatgctaaaacggttcataatttagttcgcgccgttactgaaccatacccaggtgctttcactttcttaggtgagcgcaaaatgattatctggcgcgcacgtccagtggcagataaccaaggtaaacgtccgggtactgttatttcaactgagcctttagttatcgcatgtgcgaaaggtgcaattgaagttatcacaggtcaaagtgaaaatggtctttatgttcaaggcagccgtttagccactgaaatggggatcgtgacagatgtacgcgttggaccaaaagcaacagcacaagtgaaacgtcgtcaacgtgtactgattttaggtgtcaatggctttattggtaaccacctaactgagcgtttattaaaagatggtaactatgatatctacggtatggatatcggttcatcagcaattgaacgctttattggtaaccctcgtttccactttattgaaggtgatgtcagcattcatacagaatggattgaatatcacatcaagaaatgtgatgtgatcttgccattagtagcgattgcaacaccgattgaatatacccgtaatccattacgtgtatttgaattagattttgaagagaacttaaaaattgttcgttattgtgttaaatacaataaacgtattattttcccatccacatcagaagtatacggtatgtgcgatgataaagagttcgatgaagataattcacgcttaatcgtcggtcctattaactttgaaggttctgtcgttaatgctgcttgtggtgttgatagtagttcaagtaaccaaactgttcgtttgggtcaattccgtgtcgctgaattcactaaaaaaggtgatgaaacaggacgtattccttttagcattaaattaaataactgcgatattactgtttcatcattagcagcaattacctttaacggtacagcttctgatggtgatgcaactgcattcgcattacaaggcagtggcgcagcaaccaatgtagcgttaaaaattaccgattcaagcagcaaaaatgttgttccaggacaaccttcttcaactcaaaaattaatcgaaggtgaaaaccaattaaattataacgcttctcttatttccactgatgatacagtgaaggcaggtagcgcaaacgttacaactaactttatggtgacttactcttaa

SEQ ID NO: 308549 - DNA, 738 bp, Proteus mirabilis; identical to SEQ ID NO: 306266

SEQ ID NO: 308550 - DNA, 318 bp, Proteus mirabilis
atgcgcggttctgtaacgcttgtcggtcaggttgttgagcgcgaggttgacctgatactgatcctgcggaccgaactcggtgttgaatgcaaggttaagcgtggcccagcctgggtagttgatttccttggtgccggtattatctttggcgctggacgccgcgcggataaagacatcggacgtcaggttagcggcgttcatcaaccaggtatgtttcaggccgacgcgcccggtcagagtgggttcgccggtatcccaggttttaagggtattgccttcgtactgacggcgaatgagattaccgctcaggtaaggtga

SEQ ID NO: 308551 - DNA, 2286 bp, Proteus mirabilis
atgagtaagaaaaaatcacctattcctggagtgaaaccctataatggacccgcaggaggatggggggcattaaaagcaacagctatcgcggtacgcactcaaatggatgcttttattgcacctaaaacattgcttaatactaatcagcctgatggttttgattgccccggctgtgcatggccagacaaagagcatcattctactttccaattttgtgaaaatggagctaaagcggtcacatgggaagcaacaaaaaaaagagtcacacctgaatttttagcacaacataccgtaacagaattactgacaaagtcagacttcgaattagaaggctacggtcgtttaacccatcctctcgcttatgatgcagatactgacactcttcgtcctgtgacttgggagcaagcatttactcgtattggtgaactattaagaaatatgccatcacctgatagtgttgaattctacacctcaggtagagcttccaacgaagctgcgtatctattccaactgtttgcgcgagaatatggcaccaataattttcctgattgctcaaatatgtgtcatgaaccgactagtgtaggcttacctcaatcgattggcataggtaaaggcacagtttctttagatgactttgataacactcaactcattattgccattggacataaccctggaactaatcacccaagaatgatgggaacactgcatgaagtagctcgtcgtggtgtacctattgttgtatttaatccattgaaagaacgtgctttagagcgatttaccgaccctcaaagtgttattgagatggcgacttatagctcaaccaatatcgcctcatcttattatcaagtcaaagccggtggtgatgctgcggcgttaaaaggcattatgaaaaccttaattgagtgggataatgagcgtggaaacattctcgaccacgattttattgctgagcatacactaggttttgaagccgtagttgaagatcttaaacaaacttcttggcaagatattgaaagtgaaagtggcctttcgcaagcagatattgagagtgtcgcactcctttatgccaattctccggccaccattattacctatggtatggggatcacccaacataacaaaggtacagcgaatgtgcgtctgattgctgatttgttattaatgaaagggaatattggtaagcctggtgctggcatatgcccattacgtgggcactctaatgtgcaaggtaaccgaactgttgggatcacagaaaaaccatctgtcgaatttttacaaaaaatagaacaaacttttggttttaaaccaccttataaacatggtcacgatgcagttaacgcaatgcaagcgatggttgatggcacagcaaaagcgttaatttgtttagggggtaattttgccgtggcattacccgaccctcaacaatcatttgctgcaatgagaaagcttgatttaagtgtacacatcggcacaaaattaaatcgctctcatttattaacggcaaaaaatacctttatattaccttgcttggggagaacagaattagatgtacaagcattaggtcgtcaatccatcacggtcgaagactcaatgtcaatggtgcatgcctcttctggtaaattaacacctgcttcaccattattaaaatcagagcctgtcattgttgcaaaaatggctgctgcaacactgacagatagcaaaaccccatggctaagatttacggaaagttatgatcttattcgcgatatgattgaaaaaaccattcccggatttgataattacaaccaacgaattcgtgtccccgggggtttccgtatgccactccctgccgttgagagagtttgggatacccccacaggtaaagccatgttctcggtatttaaaggtgtgaaagagaataaaatggtcatgggtgatgatgttcttcgtttagtcactattcgtagtcatgaccaatataatacgaccatttatgcacttgatgatcgctatcgtggcatctttggtagacgcgatatactgtttatgaataatgtcgatatgatagcaagaggcttaaacgaaggtgataaagtcaccattgaaacggtcagcgaaaatagaaaactacagcttgataatataactgttgtttcatttagcattgctcctggcacagtggccgcttattacccagaagccaatgtccttgtaccattagattatattgataaagagagtggaaccccctcttataaagcaatacctgtcagaatttatgataaaaaaacacaagtcgcttaa

SEQ ID NO: 308552 - DNA, 1215 bp, Proteus mirabilis
atgtcagagacaaatgaattattaaaaaacctatcggcaaaaattgaagaagccaatcagcattttaatgctaaagctgaagaagcgttaaaagaagcgcagaaagtgggtggattaaatgaagaaacgaaacatgccgtagacaaaatggcaaccgagctaaatgcgctacgcgaatctgaaaaaacactgaaagctgcattaggggatttagaacaacatgttgcgcaaatgccactcaataatgcggtgcaggttgtaaaaagtgttggtcaacaagtgatctcggctgaagtattaaaagagatcaattccagcattcaagagggcaagcgtgtttcaattcctgttcaggcagcattaacatctacgggggttgccgaaggcgtagttgaaccacaacgattgtcgggtatcgatgttgcaccgaaacaacgactttttattcgtgacttaattgcgtcaggtaaaacgcaatctcccgccattttctgggttcagcaaacggggtttaccaacaaggcggcggttgcgcctgaaaataccactaagccgtatagcgacattgcctttgcgaccaaaatcacgccagtgacgacaattgctcatatgtttaaagcgtctaaacaaatcttagatgatttttctcagttgcagtcgttgattgatgcagaaatgcgttatggattgaaatttgttgaagagcaagaaattttatttggtgatggctctggggctcatttgcacggcattatcccacaagccactcaatataaagcctcctttacggttgaaaaacaaaacggtatcgatgatttacggcttgccatgcttcaagctcaattggcgcgtttccctgcttctggtcacgttttacactttattgactgggcgaaaattgaactaaccaaagacgctttggggcgctatattttggctaatccttccgcattaacagggccgactttatggggattaccagttgtggcaacagaaacccccgcgtttaaagggaaattcttaacaggggcatttaatgcgggtgcacagctctttgatcgcgaagaaacgaatgtggtgatttcaacggaaaacgccgatgattttgagaaaaacatgatctctattcgttgtgaagagcgtcttgctttggcgatcaaacgtccagaagcctttgtttacggtgattttacggtagcaacgtcaagtgattaa

SEQ ID NO: 308553 - DNA, 852 bp, Proteus mirabilis
atgaaaaaaaatcagttgccagtcgcgctggaggatcgcccctgcgcatcgattcgctatgagctgaaactcaaagcactggataaatggaatagccgtattcgggcatctagtgcggataactcgatttcgatattggacgtcgttggagaagattattggggggaaggtgtcaccgctaaacggatttccgccgcgcttcgtgccattggtgagcaagatattgtcgttaacctcaatagtccagggggcgatatgtttgaagggttggccatttataacttgcttcgtgctcacagtggcaaggtaacggtcaatattttgggcattgccgcttccgctgcgtccattattgcgatggcaggggatgaaataaaaatggggcgcggtgcctttttaatgatccataactgttgggcaatgggggtaggaaatcgtcacgactttgcaaaacttgctcatgatctcgccccttttgatgcctcgatgaccgatatctatgtggcacgaagtgggcaatcgagtgacgtggtgagtcagatgatggacaacgaaacgtatatcagtgcgagtgaagcgatagaaaagggatttgcggacagcctactttctgccgatgtgattgacgaaggtgatgaaagtccccaagccgcgatccgaaaactggatgcgctacttgccaaaaccaacacacctcgtgctgaacgacgaaaactaattagtgcattaacccgaagtatgccgagagctacttcccaatctaatggtatgccaagcgctacctgcgatattaatcctgaaatcctgtcaaaattggaggaggcggtgaccgcctttgcctgcgttaagtaa

SEQ ID NO: 308554 - DNA, 1332 bp, Proteus mirabilis
atgcgtaacgtgaaaaaaaagagccgaataaaatcggcgatcctcaattggatggggatacccattagtttaactgatggcgccttttgggaagaatggattggaaagagtagcagtggcaaggtggtcaccgcagataatgcattacagctgtctgcggtatggtcttgcgttcggttactcagtgaatctatttcgacattgccattgaaaatctatcaaacgaaggcggatggctcgcgcgaactggcgaaacatcatcccgcttacaccgtcttatgtcgaaaacccaatgcagaaatgacgccttctcgttttatgttgatggttgttgccagcttatgtttaagaggaaatgcgtttattgaaaaatgttatatcgggaaaaagttggtttcacttcaaccgttattacctcaaaacatgacggtgaaacgattggaaaatgggcagttggaatatacctataccacgcctaaatcgaataaacgggttattcccgttaaaaatatgatgcatattcgagggtttggtatggacggtgtgtgtggaatgataccgatccagattggacgtgatgtgattggtactgcgttatcgacggatgaagcggccgggaaagtgtttgaaaatgggttacaaaccagtggattattgacgtcaaagaatgccttgaaacccgatcaacgagaacgcctaagaaagcatttaatgacgtttaccggctcaaaaaatgctggaaaggtgatgatcctcgaagcggatttgtcttatcaaaatgtcaccatgaaccctgaaactgcgcaattattacaaagtcgtggatttagcattgaggaaatttgccgttggtttcgcgttccgccttttatggtggggcatgccgataagcaaagtagttgggcatccagtgtggaagggatgaatatgcagtttttgactaatacactacgtcccttattggtcaatattgagcaagaaattaatcgttgtttactcgacagtgatgaagattattatgcggaattttctgttgagggcttattacgtgcagacagtgcaggacgttcagcttattacacaacagcgttacaaaatggctggatgagccgaaatgatgttcgacggttagagaatttaccgcctattgaagggggcgatatttatacggttcagcttaatttaacgccactggatcagctcggaaaagacatcacgaacaatgaagctgaaaagctcaaagcacagatcactaactggttatttcctgaaggtgaacctgtaaccccatctcaatccaatccacctcgtcctgaggagtcatcgttatga

SEQ ID NO: 308555 - DNA, 1743 bp, Proteus mirabilis
atggtggagaagaagaggaagatccgctcaaccaatatttcggttgatcccgcaacacaatacgcgcaagacgtgcatcaaggcaaaatcttagcggggcctgatattcgtcatgcatgtgcacgtcatctcaaagatttaaacgaagccgagcaacgaggattagtctgggatgtcgaggctgtcaaaagggtgatcgattttttcgcgaaagtcttaaagctcaatggcggggaacatgaaggcaaaccgtttattttattgccttggcaatgctttgtgattggctccatttttggctggaaaatgactgatggtacacggcgatttcgcattgtgtacgttgaatcaggtaaaggttcaggaaaatcaccgatggcgggtggcgttgggttgtattgtttagtcgccgacagtgaaccgcgtgctgaagtgtatgcggcagccacgaaaaaagaccaagccatggttttgtttcgtgatgcggtggcaatggttgatcaatctcccgcattaagtcagcggatcaccaaatcaggcggaacaggcaaagagtggaacttggcttatttgaaaacgagttcattctttcgcccgattagctcagatgatgggcaatcagggcctcgtccccattgtgcgttgattgatgaaattcatgagcacaaaaataataccgccgttgagatgatgcgagcaggcacaaaaggtcggcgacaagccttgatatttatgatcaccaatagtggccatgataaaaccagcgtgtgttatgactatcatgaatacggacgaaaagtcgccgaaggcactatcgaagacgacagtttcttttcctatatttgctcactggatgagggcgatgatccctttaaggatgagtcttgctgggggaaagccaatccatcactgggctacaccttttctgatcgctatttgcgcgagcaagtgacacaagctcgaggtatgcccgcgaaagaaagcattgtgcgtcggcttaatttttgtcagtgggtggatgccgataatccgtggattaacagtgaaacatggatgcagtgtgaaaacacgttcacattcgatgaccttcaaggtgaagagtgttatggcggactggacttatcgggaaccaaagatttaaccgcattagccttgtattttcctagtctcaaacgtctttatgtcgaattttggacacccaaagacactttattggatagagcgaaaaccgaccgagtgccttacgacttatgggtaaggcaaggttttatgcataccacgccagggaatgcggtgagatatgaatttgtggcagaacgcattgctgaaatggcgatgcacgtcagcatgagagccattgcctttgacccttatcgcattaaataccttgaacccaaactcgatgacgcgggtgtgacggttcctttaactccgcatggacaaggatattacaaagccaaagattcagggctgtggatgccacactctatcgaactgtttgaacagctcattgatgacaagaagattgagatccacaccaatccttgtttgagatggaatgccgcatccgctgtgcttgaggcggaccaaaaagataaccgcgtctttgccaagaaaaaaagcacgggtcgaattgatggagtggtggcctctgcaatggcgattggggcttctgaaggggaattcgaggatgaaggggatattgatggtttctttgataacccaattattgtggggatctaa

SEQ ID NO: 308556 - DNA, 468 bp, Proteus mirabilis
atggcaggaagacgcccgaaaccgacccacttgaaggtggtcaccggtaatccgggaaaacgaaaactcaacgataaagaaccccaacctaaacgtgaaataccaagcccacccgaacatttaacggattgggggaaaatggcgtgggcaaaattaaccttattacttgatgggatgggcgttttaactgtggctgacacgctggcattagaacggctgtgtgatatctacgccgatattcttcaattacgagacaccattgccattgaaggtcggacatacaccacaaaaacgcaattaggggattttttaattaaagcgaatcctgccgttgccatgttggctgatgcagatcgccgttttaaaagttatttagtcgagtttggtttaacccccgccgctcgttcgaaggtgaagatggatggtggagaagaagaggaagatccgctcaaccaatatttcggttga

SEQ ID NO: 308557 - DNA, 213 bp, Proteus mirabilis
atgtgtaatcaaaaacaagtgaagttatccaagctatttcgtggcggtcgcttcgttggtcatgcattaagtgttgatggtgagttgttaagtaatcaaaagttagttgttcttccacccgctgatggattatgtaaacaagttgatatctcagtcacactgacatgcactaatgacatgatcatgaatgcacccgatatccatttgaaataa

SEQ ID NO: 308558 - DNA, 339 bp, Proteus mirabilis
atgaaaaaacgtaatgtttatggtgggcgctgggctaaagtgcgattagcgtttcttaatgaacatccgctctgtgtcatgtgccaagagcaaggacgcattactgctgccacagtggttgaccacattattccgcatcgtcttaaagaagcgcttgaatcaggtgataaagaacgtatcgcaaaagctcaggccttattctgggacacaaagaactttcaaagcttatgcgaactgcatcataactcaaccaaacaacgtatcgaaaagagtggcaaagtcattggctgtaatgcggatggcattccactcgatccgaactctcattggaataaataa

SEQ ID NO: 308559 - DNA, 666 bp, Proteus mirabilis
atgcctgaagatgcccccacagctaaaatgcaagcaacaaaaggttatggtggcagagtcattctatataaccgttatacacaagatcgcgaagagataggacaaaagcttgctcaagaagaaggattaactttaataccaccttacgatcatcctcacgttattgccggtcaaggtactgcagctaaagagttattcgaggaagttggtgagttagatatgctgtttgttcccttagggggaggtggtttactttcaggttcattattatcaaccaaagccctttcgccacattgtagaatttttggtgttgagcctttagcgggaaatgacggacaacaatcattacgcaaaggtgagataatttatattgatacgccaaaaactattgcagatggcgcacaaactcagcatttaggcgattatacttttgagatcattcgcaacaacgtagacgatattttaacagcaacagatgaagaactaatttctgctatgcaattttatgctcagagaatgaaaatcattgtagagcctacaggctgtttaagtttagctgcagctcgtcaatttggtgataagttaaaaggcaaaaaaattggcattattatcagtggtggcaatgtcgatattatgcaatatggtcattttttatcacaaaaataa

SEQ ID NO: 308560 - DNA, 504 bp, Proteus mirabilis
atgaaaaggaacgtactgcttattattgtggcgggtgtgatgggcttgctactgatatttaagtttgatgctttgctcactgagaatagccagcttaagggtgacaatcttgcccttaagcaaaatgttatcagtcatcaagacgccattgaacgctatcaggaagagcttgcccgcttatcagaactagataaacaacacacaaaggcgctaaccgatgcaaaaaatgatattagccggcttaatgatgagttgcgcaataatactaaacgggtgtacatcaaagccgattgccccaaccccgataatcacaccaccgccaccgccggcatgggtaatgcaacccccgcacgacttaccgaaacagctcaacaagattatttacgtctcctcgaaatgatggcggagaataaggcacaaacggaatatttgattgattatacaaatcgattattgcaatacatcaatgagttaaaccatgaaaaagcctgcaaacctgcgtga

SEQ ID NO: 308561 - DNA, 528 bp, Proteus mirabilis
atggttaactttttattctatatggaaaaaggtgataatgataaaagcatgtctcaagtaataaacttttctcttttatttattttatctatagtacctgcactattagcgggttcaaccctgcatattgaacaaaagttctctatggtgattatcggttggctcctgatgttactctgtggcggtatctatcggtttactataggaaaagtgattacttttattgttgctgctttatggtctttaaacctctccatctcactgtttttttatcgtgaacatgatattcccttttcatcatcaatagcagaaactttcattaatactaatggaagtgaaactgttggtatgctctcttataataaatattatgtactcttttatattgttatatttaccagttttttctatttaatacatattagcgcccgttatttaaataacaaaactaataaaagatgtttaattgctatttttaacccctttttacaatgcagcagctttagtgcggactttccacgaaaatag

SEQ ID NO: 308562 - DNA, 1029 bp, Proteus mirabilis
atggcacacattgtaactcataatcacaccaccagagaagtctggttaacacaactcgcgcaggcaatcagtgatcctgttgaattactccaacttttagcgctggaacatcacgctgaactacaacggggtgctcaggcgagacgactttttcctttacgggttccccgtgaattcgttgcgcgcatgaaaaaaggcgatcctaacgatccattacttttacaagtattaactgcacatgctgaatttaccctaacgccgggattctctacggatccattagatgagcaacaaaatgcggtgccgggtttattacataaatatcagaatcgtgcattgcttttggtcaaaggtggttgcgctgtcaattgccgttactgtttccgacgccattttccttacgaagataacaagggaaacaaagctaactggcaaaaggcaatagagtatatcaaaaataacccaaaactcgatgaaatcatcttttcgggtggcgatccgctgatggccaaagatgacgagctagattggttaattactcagctagaagccatcccccacattaaacgtttacgtattcactctcgtttacctgtggtgatccctgcgcgtattactcataggttatgtcagcgcttacagcagtcacgtttacaaaatattatggtattgcatatcaatcatgcaaatgaaattgatgatgcgttaagagaagcttgcttaaaactaaaaaatgcccatgttacgctattaaaccaaggggtattactgcgaggggttaacgacaatgcccaaacccttgctgatttaagtcgtgcactatttgacgcaggcatcatgccttattaccttcatgtgctagataaagtacagggagcggctcattttatggtaccagacagtgaagcgcgcgaaataatgaaatcattaatgagtcttgtctctggctatatggttcctaaactcacgcgtgaaattggaggagagccaagcaaaaccttgcttgatttaggcttacgacaagtatag

SEQ ID NO: 308563 - DNA, 294 bp, Proteus mirabilis
  misc_feature (231)..(239): n is a, c, g, or t
atgagggaaacttcattaggaattcaaaaatatgagctggtacaacttacagagagactggagttgttacttaatagtgaaggaactcaatatacagagattattgaaccagaggtttatggcctatctgacgaaatgctgactctacttcaaagttcgttgacagcatcgtccgatacaccattttcagccattattcagcagttaggtaacgctgattgggttcatagnnnnnnnnntattcgtcggcagcgtcagatgtgtataagagacaggccattattcagcagttag

SEQ ID NO: 308564 - DNA, 1590 bp, Proteus mirabilis; identical to SEQ ID NO: 308518

SEQ ID NO: 308565 - DNA, 201 bp, Proteus mirabilis
atggagatactccattcaatgcttgacacattaagtcatgtttctcctatcgctttatttttttactattaccctactcactgcgggaaaatctactattggtatttcatcctttttacctcccgcatcgttaatgctgatcttaatatttggggtttgcttgcccttccattcgcctattttactttggttagcaactag

SEQ ID NO: 308566 - DNA, 981 bp, Proteus mirabilis; identical to SEQ ID NO: 306467

SEQ ID NO: 308567 - DNA, 1398 bp, Proteus mirabilis
atggcagccactcgcattgaaaaagactcaatgggacaaatcgaagtaccagctgaccagttatggggagctcaaacgcagcgttctctagaacacttccgtatttcagtagaaaaaatgcctgttgcactaatccacgcgcttgctttaaccaaaaaagccgccgccggtgtcaatatggatctcgggttattacctaaagaacgtgcagatgcaattattgctgctgctgatgaagtgctggcaggtaaacacccaactgaattcccattagcaatctggcagaccggttctggcactcaatcaaatatgaatatgaatgaagtgttagctaaccgtggtagtgagatactaggtggtatccgtggcatggaacgcaaaattcatccgaatgatgatgttaacaaaagtcaaagttcaaatgatgtgttcccaacggccatgcatgtcgctgctgttatcgcattacgtcaggatttactgccggaattaaaatcattactgaaagtatttaaagagaaagcagaagctttccatgatatcgtcaagattggtcgtactcacctgcaagatgcgacaccacttacattaggtcaagaaatctccggttgggcggcgatgcttgagcataatatcaaacatatcgaagattcagttcctcatgtgtgtgagcttgcgttgggaggaacggcggttggtacaggattaaatacacatcctgagtacgcagttcgcgttgctaaacgtatcgctgaattatcaggtcagccatttgtcacggctcctaacaaatttgaagcattagcaacctgtgatgcactggttcattctcatggtgcgttaaaaggtttagctgcctcattaatgaaaatagctaatgatgtacgttggttagcatctggccctcgttgcggtattggcgaaatttctattccagaaaatgagccaggtagctccattatgccaggtaaagtgaacccaactcagtgtgaagcgttgaccatgctgtgcgctcaagttatgggtaatgatgttgctatcaatatcggtggtgcttcaggtaactttgaactgaacgtatatcgcccaatgattattgataacttcctacaatcagtgcgtttattggctgatggtatgcgtagctttaacgagcattgtgctattggtattgaaccaaaccgtgagcgtattaataaattattgcatgagtctttaatgctggttacggcattaaatacccatatcggttatgacaaagctgcagagatcgcgaagaaagctcataaagagggcttaacgctgaaagaatctgcactgaaactgaactacctgacagcagaagaatttgatagctgggtacgtccagaagatatggttggtagtatgaaaaaataa

SEQ ID NO: 308568 - DNA, 930 bp, Proteus mirabilis
atgagcaaatatgatgcaatacagcgatttaatctctgttttcaacaacttgaaacagaaatcaatgctcttaccgattttcttcgtcagttaaagcaacttccttctgcggtttttgaattacctgaggtaagtaaagaagatgaacatgatgagataacaaatgttacagtgtcacctagttatgatcttgatgctttagaactctctttaaaattaatgaccaatctctttatctatgataatgccccacatgtcagtagcaagcgtgcgatacgtttaccgggggtactctgttttagtgtcagcaatcctgtatttaagaatgtaaaaacacaagtagagagcattaattcattaaaaaaacagctttcagatattgtgacgaaagagtctggtatttcgaaagaagaacgttttgattttgtccataatcagctaaaaggcttaattacacttaatgcttatcgcaccctcaccctactttctgatcctgatacagtacgttttggctgggccaataaaaacattataaaaaacttaactcgtaatgatgtgttagctcagctagaaaaaagtcgagaagccaatcgcgccgtacctccttatactagtgaacaatgggctgaacgtatcgataaagagataatgaccctttcacaactcccggaaaatgccaaattaaaaattaagcgtccagtgaaagtccaacctattgccagagtttggtattcggagcaacaaaaacaggtacaatatgcttgtcccctaccattattagctttctatattgataaagagtcagactttaagcccataataggtgaattagctgattatgatgtgaataatattcaaattcgccatcgccctaaagccaaaaagttacaattaattattccacgcttacatttatatcttgaaaaataa

SEQ ID NO: 308569 - DNA, 405 bp, Proteus mirabilis
gtgatcaataaagacgaaagccaacttttatatcaagctttagttgacttttctggtacagatcttgaatacggtgttgtggacggtatgtcctctatattaccttgtgaccaattagatgtagtggaggtcaaaaattcatctttctgtttaacaggtagttttatatcagggaaaagagctactatagctgaaagaattaacagtgctggtggctcaattgttgatagagtgacacataatactcattttcttgtaattggagctatgtcttctcgagattggaggttttcaagttacggcagaaaaatagaaaaagctatccttgatcgtgataatggaagatctaatgtaaaaataataacagaagagctgttaattaaatcactaccagcttctcgatga

SEQ ID NO: 308570 - DNA, 252 bp, Proteus mirabilis
atgggaatatcgtcgaatagtggagaaacgataagacaattgtgtctcgaaggtaatggtattgcttgcctttccgattttatggtggttaatgatatcgaaaatggtcgatttatcgaattattccccgataagctgcaacctatagctatgccttttaatgccgtttattatagtgaaaaagtggttagccaacgcatccgtgtatttattgattctctgagtgagtatattgctaaaaaagtaggttaa

SEQ ID NO: 308571 - DNA, 600 bp, Proteus mirabilis
  misc_feature (567)..(576): n is a, c, g, or t
atgaaagccacctcagaagaagtccaagtttttattgcagtggttgaaagtggtagttttacacgtgctgcagaaaaattagcattagccaattctgctgttagtcgtacagtaaaaaaacttgagtcaaagctaggcgttaatttattaaatcggactacgcgacaattgagtttaacggaagagggggagcattactttcatcgtatgcaagttatcttacaagatatgaaattagctgaagatgaattaattaatacacaaaaaacaccacagggtctattacgtattgatgccgcaacgccggttgttttgcatctactggtgccttttattaaacaatttcagcaaaaatatcctcaaataaccctctctttagtttcatctgaaacatttatcaatcttattgaacgtaaagtagatatcgcgattagagtcggtaatttaacggattccagtttacgggcaaaaccactattgaatagttatcggaaaatcgttgcgaccccggactatctcgcccgttatggacagcctaaaatcgcagaagatctgcttgaccatacnnnnnnnnnncttttactgaaccagtatcactaa

SEQ ID NO: 308572 - DNA, 660 bp, Proteus mirabilis
atggatgttcttcaggtaatccccatcggccgcgtagtcgtagaaaagaccgattttctcgcgttccagcttaggtattttgacgctaaagtcgtcgaactggccctctggatcgtcaaaccaggtttgagtagacagtttgtaacgatcgagggagagcccaattttgtggcgatcgaagttgtaacccagccatacgccctggccattattacggaagttggtgttgggcaatcttccgtcaggcgtatcgcggtccccctggtcggaatagctgccattgatgcggtagtcaaagtttccgatgctgccccaggccgctgccgactcttcccatcctgccgttgcggagttataaacagccttaacgctgccgccgagaggcttatcaccgccttttttggtaataaagtttacgacaccgccaatcgcctgcgaaccgtagaggacagaataggggcctttgaccacttcaatccgttccagcgcggattcgtcaatcagcaaaccggctccgtagttttgtccggcacgttggtaactgacgacctggccgtcgatcaaaatcagcacccgcgaagacgcttcgccacggatacgaatttgtttccgccctgcgagggcgttatcggtgacttcgacgccgggaatatcttgtaa

SEQ ID NO: 308573 - DNA, 1089 bp, Proteus mirabilis
atgtctgccaatcactgttatgaaaatatgcaatacagtgaagacaaacagcaaattgaagattgggcgccattaattatggaagggcgtgatccgaatcaacagcttgctgtcacccgagtagctactggtactgatgtcgattatggcgcattaacacatctattagttaagcaactttctcaacaagataattttgagttgcactataaacatgatgttattgatatcaaaagaaatgagactggtggttggaatatcgaagttaaagatctcaccacccatgataaatacctcattacagctaaatatgtatttgttggtgccggtggacgcgctatcgatttactccaaaaatcaggtattccagaaggtaaaggctacggtggtttccctgttagtggtatttggctacgttgtgatgaagataaaatcagctctcgccatcatgccaaagtttatggaaaagcagatgtaggctcaccaccgatgtctgtcccccatcttgatactcgtattattgcaggtaaacgctccctactctttggcccttatgctggattttcaagtaaatttttaaaacacggctcctatttagatttatttgagtcaattcgccccagcaatattgaacctatgctagatgtcgcgaaagataactggtcattaactgaatatttaattggtcaagtattacaaacgtcagcacatcaatttgaaatgcttaaacagttctatcctcaggctcaacatgaggattggcaagaagctgttgcaggtcaacgagtgcagattattaaacccgcagctaaacatcatggcgtattagagtttggtactgagctaattagtagcgcagataaatcattttcagtgttattgggggcatcacctggcgcttctacagcagcatttattgccatcaatatcattaaatcttgctttaaacagcaacttgaaaatgagggttgggaagatcgtcttaaaacaattattccaacttatggtattgatctcaaaatagatgccgatgcttgtcgtaatattcgtgcatcaacggctaagatattaaaattagaaacaccttag

SEQ ID NO: 308574 - DNA, 558 bp, Proteus mirabilis
ttggggattgatggtgcgatagtgttacatcaaagtggaataactttggcacctgatttaggtaatacttttgctattgtaaatactaatggcattgccggaattaaaactaatcgttcttcacaaaccactacagacaataacggtaatttaatattaccgcacatcatgccatatcgtaaaaatactattggactaaacataaattcgttacctgaatttagtaatactaaaactcaaagtaaaatcatcgtacccactttaggtgcggtagcaaaaatcaatttccctataaataggggctataatgttttatttacctcaaatacaccaattccttttgctgccaatgtaatggcatttgatgataataataatctcatttctagtgattctgtctatgaccacaatagaatattcctctccggaataaaagaaagcggaacggtacaagtaaaatggggagatacagaggagcaacaatgtttcttccattataacgtaaaaaatgaaagtaaaaataattcaattattaagaaacaaatttattgccaataa

SEQ ID NO: 308575 - DNA, 339 bp, Proteus mirabilis
atgaactatctcggcatgaatgcacaaaccggtgaacgtattaccgatattgagcacgttcgccagtctattaaagatatttttaatacccccattggtagccgattgatgcgccgtgaatatggtagtttgctggccgatttaattgatggcccagttaacgccaagatgcgattgcaattaatgtcagcgtgttacaccgcagtttatcgttgggagccacgtattgtgatgacggccattgatattcatagccaacaggaacaggtgattgtcgatatcaccggctattacgcccataaccaacaaccgattaatttctctctaccggtgacataa

SEQ ID NO: 308576 - DNA, 693 bp, Proteus mirabilis
ttgcgttttcgttcaacgggaagttgtgctaattcttcttggctgctagttcttgattataaaatatctggggttggctggaccaatttaacaggtcccggtggtggtactgattcaggcgttgtttatttacaaaaaaagccacctgtaggaaaaacggttattaatcctgtctatatgttgaaacgtaattattattctcgaattggtcaaatgggcaatacgttacaaaaggaaagcgttgctcttagtgcaccaacatcgatgacgttgataaataatgcttcttgtgcagtgtctgttaatgacgtcgcatttggtgaacaaaccgctagtgacgtaaaaatgaatactattgcaggaaaaaatataaatatttcttttacgtgtaatgctgtattacctgcatacacactcagtttttttggtaaagatggtgtgaataatgccacaacagggatcattaaggttaaagataatagttcagtggggtatcaactttcttgggcagatagcacggttaaacccattaatagtgctgtagttattaataatgtggcaatagctccgaatacaaagccaaaaaccaataattttactattccgataagggtaaaacctgttgcgttatccactcagccaatccctgggccggctaatactgcattaacgattaatataaagttaaattaa

SEQ ID NO: 308577 - DNA, 669 bp, Proteus mirabilis
atgaatagaatagtatttgtttttactttaatcatatcgtcattaacctgttttaaagcatattcagcgtttacgcttaatggtactcgctttatttatgatgaaggtcgcaagaatatcgcgatagaagttaagaataatagtgataaaacctatggtggccaagtttggattgataatcttaatgggaatgaagtgttctttattcctgcacctaatttattcaaaataactggaggagaaaaacaattaatccgcttgctatatgtaaatgatattttacctaaagatagggaatcattgttttggctcaatattcaggaaatcccgccaatttcttctgccgatgacagtaatgtgcttgctgttgcattaaacacacaagttaaactgatttatcgccctaagattttagctgaaaaacgcgaggatgcagaaaaaagtctgacatatagtggttcagttttaaagaatcctacaccttactattttgcattaactcaagtgtcagtcaataataatcctttggtcttgtcaaaagacattgagcaatctattagtttatttccacctttcagtgaggtaaatgtgcagcgcccattgttaggtaaagtaaccgttgaagctattgatgattatggtgctagacgtgttattgagcttaattaa

SEQ ID NO: 308578 - DNA, 252 bp, Proteus mirabilis
gtgttaaaaggtgagaaggcctttgcaataattaggttagctgataactcttatccaccatttggttcaataattagtaatgctaaaggacgagagctaggaataattagtgatgatggttttgcttggctaacaggtattaacccaaatgaagaaattagagtatcttggggagctgaacaacaatgtgtcgctaaacttccaaataaaatagaaccgagtaataagatattattattgtgtgaaaaataa

SEQ ID NO: 308579 - DNA, 237 bp, Proteus mirabilis
atgtttaagcgtttagccactgcccgttatttgcgtatgtcggccaatgataaaggtgtcacgctttcttttgctccgcaagtggcgggtattgctgcggtgcatcattacggtttaaaagagcgtgtgcggggtaagtcattagaaattcaatatcctgaaagaaagctattaagattttcaccggcggatatcaaacatattgaaaatcagttactggaattcctttcccgttaa

SEQ ID NO: 308580 - DNA, 273 bp, Proteus mirabilis
atgtgggcaattgataaaccgttaacgccatctttagcgcgggatatcgttgaaaccatcaatgcaaaattacgttcactggtcagtcagggttatttgttaggtggtgaatgttggtatgacccaacatcaaatagcaaagaagcactgaaagatggcaagctcacactggattatgactatacacccgtgccaccaatggaaaatctgatgttacgtcagcgtattaccgataaatacctgatggatttcggcaacaaaatcaaggggtaa

SEQ ID NO: 308581 - DNA, 156 bp, Proteus mirabilis
atggcttattcagaacaaacgctggtatttatccgtcatggtgaaaagcctgataatgatatagcgcatataacactccttttgagccgtttaatttttagccaaatactttggttagatgtgctttatattctacaatatctttctcaatattag

SEQ ID NO: 308582 - DNA, 534 bp, Proteus mirabilis
atgaaagggcggcgcggtattcagtctcccggactggatcccctgacgacattgggtattgaggcccggtcagacgaagagcgccgccggctggctgaaaagtgggtacagcaggaatttgccagggcagaaaaagagctggcgtttcagcgggaagtagatgctgcctggaagcggctctatggtcaggtattaccggtcagtctgggaacattcggcaggatggaacagggaacagcacagcgccggcaggcactgtttgtgcaggcggaaaattgtagcgcgtgtgatgcccgtctggctactctgctggccggcaaacagccgtttgatatttatgtgctggggacaaagggggatgataaccgcctgagggcttgggccagacaaaaaaatatcccggcagagcgcgtcagaaagcgggaaattacgttaaatcatgatggcggtctctcgcttcagtacggactgaccaccacaccggtggtgatgcaacagttaccggatgggcggtggcgtccgctcacaccttaa

SEQ ID NO: 308583 - DNA, 279 bp, Proteus mirabilis
ttgtatcagtggcgtattggtcaagctgcgaaaacattaaaagaggtgcccgctgaacagattaacggtgaaagtgaactgatgattttatatcagcgtgcggtgttctgttttgcaaaagccagtttaatcgaacgctatcgcgatattgatactaccgcacaaggtaataaaaaagccgacaccatgacgccggctattgatgaagtgtggcgtgatggcaagtgggcgttacaacgtatcaaaggggaaacccataacacggtggagcttatctaa

SEQ ID NO: 308584 - DNA, 237 bp, Proteus mirabilis
atgtttaagcgtttagccaccgcccgctatttgcgtatgtcggccaatgataaaggtgtcaccctctcttttgcccctcaagttgcaggcattgctgcggtgcatcattacggtttaaaagagcgtgtgcggggcaagtcattagaaatccaataccctgaaagaaagttactaggcttttcaccagcggatatcaaacatatcgaaaatcaattactggaattcatttcccgttaa

SEQ ID NO: 308585 - DNA, 123 bp, Proteus mirabilis
atgggtaaagcgattttcaatcaattactcacaattccctatagagtaatatttatcaaagataacaatatacttacgacttttttgacttatgcgcagatctttaatttgttgattgggtaa

SEQ ID NO: 308586 - DNA, 321 bp, Proteus mirabilis
atgattagcccattcattttgggggtggtaatggggaaattaacagtcttacttctgatcttacttggttttctacaatattcattgtggttaggtaaaaatggtattcatgattacaacaaagtaagtcaagaagttgaatctgcattagcgcaaaacgcacaattaaagtcgcgtaatgatcgcttatttgcggagattgatgacctcaatggcgggcaagaagcattagatgagcgtgctcgtagtgaacttggcatgataaagcctaatgaaagcttttatcgtattgttaatgataaatcccaaccacgtcgttaa

SEQ ID NO: 308587 - DNA, 732 bp, Proteus mirabilis
atgagccgattatcactttctcagttggtgttgctatcgattgaagagcagcgactggcgcttgatgaaatcaaccaacaattagagcaaaaaacggcgatagagcgggtgatttgggctttagaacatcttcctaaccagtttgttttaagctcaagctttggtattcaagcggcagtttgtttgcatttgcttaccagacaatatcccgatatacctgtaattttgacagacacaggttatctctttcccgaaacatatcaatttattgatgaattaacctcttcactacaacttaatttaaaagtatatcgcgctgaaatatcttcatcttggcaagaagcacgctatggcaagctttggttgcaagggattgaaggtatcgaacgttataaccaaataaataaagttgcgccaatggaaaaggcattaaaggagttacaggcgaagacatggtttgcagggctacgacgccagcaatccaaaagtcgagagcatttacctgttttatccatagcgaaaggtatttttaagttactaccgatagtcgattgggataataaacaaatttatcaatatcttaaacagcataatttaccttaccatccattatgggaacaaggttatctgtctgtgggggatacccatacgacacgcaaatggcaagagggaatgagtgaagaagagacgcgattctttggcttaaaacgtgagtgtggattacacgaataa

SEQ ID NO: 308588 - DNA, 159 bp, Proteus mirabilis; identical to SEQ ID NO: 297225

SEQ ID NO: 308589 - DNA, 255 bp, Proteus mirabilis
atgggggcactgctggatttatccggttatattaaattttttgtcggtctttttgctattgtaaacccgatagggatcttgcctgtatttattagtatgacgagttatcaaacggatgcaggacgtaataaaacaaacttaattgccaatggctccgttgcgattattttggttatttccctattaataggtgattcgatactgagtatttttggcatctctattgactcatttcgtatcgctgggggatgctga

SEQ ID NO: 308590 - DNA, 408 bp, Proteus mirabilis
atgggtatctcagcacaaatcatcgtccaagctagccaactggttaataccgaaactaatacaccaatattgattaaccattctccccaatctccgacgactgttttcaatattcccgctgttgatggtgtaggtattgtactcagtgctttctgcggtaatacgccaaagggtaatacggagataaaaatacaaataatcaatgagacaataaatcctattaatgttgctttaccaacatccttcttattgcgcgctcgacctgataaggccaccgcaccttccacaccgataaaacaccatagggcaatatctaaaggtgctaatatttgtgcaggtatgggacctagattatctgctgggattgtggcggaatttccccaaaagttattagtcaactcttcataa

SEQ ID NO: 308591 - DNA, 696 bp, Proteus mirabilis
atgaatatagatctttgcaaacctttagagttgcccaatgaatttgttaatcggttaaaggcgattgaaaactcatgtatagatgaacaattctcagaatcactaatcgagcaatgcagtgtttatgctttggttagagatattgatcaatactgtagaagcaatcgaattataggaatacattacacaagagctatgcctgaaagtattcgctcacaaggactattagttcgggatggagagacgatcagggatacatttctgaatgaacatggacatctctttacacagaaagaaattttggagatcaagaatcgatggaagaattattttaatcataatcagagctccattagaaataatcgtatttttttcaattttacagaatctgcacttgggggcgaaggaacaaagcacctacttgagttatatggtggtgagcaggtcagtatgtgctttgaattagatgacccaattggacttaaacttggaaaaattggagcaccaatagttgttcggtgctcccttaatcctaatcaagtagaaacttttactgagtatccttggggaaaaatattagtttcctcttttcataagttaatcaacccaaacgcatatggaattgaccaagatggatatcagataatacctgtatcatcaaaagatattatcgagatcagaatactgaaaaattaa

SEQ ID NO: 308592 - DNA, 1500 bp, Proteus mirabilis
atgataaaagattataagcgttggatagtcttacttttagtatcaagtatgctgtttctaattgttgttgatgttaccgtactttataccgcactaccgcgtttaactcatgatctcaatgcgagcgcctcagaaaaactatggatcatgaatgcctatccgctgattgtcgcagggctgttgccagcagcaggtatgcttaccgatagaataggccataagacgttatttattagcggattacccctttttgccatcgcctcattatgcgcggcttattcccctagtgccaccagcttaattatttctcgtggtttcttggctgtcggtgctgctatgagcatgcctgcaacgttgtctattgtgagacaagtatttactcatccacaagagcgtgctcgcgccatcggtatttggtctgctgttgcttctggtggcgcggcattagggcctttaattggtgggttgctattaaaccatttctggtggggctcagtctttttgatcaatgtccctattgtactacttgtgcttcctttctcgatttggctaattcctcacttttcgggacaacggcagcataaaattgattatttaagctcaatacttattttgattggcttagtcagcgctatttataccttaaaagagataggtaaggcttatacacaatggaatgaagtgatcatcgccacccttattgccattatttttctcacactatttgcgcggcgccaacgtcgtcaaacgcatccaatgattgattttagcctatttaaaaagcgctatttcagtgtcggtgtggcaatgtcgactctttctatggtgatcatcgtgggtattaaatttctgctaagccaacgcttacagttagtcgccggctttacaccactgaatgcagctttagtgattttacctatccctatcggctcagtattagcctctcctttggccgggttttggctagcgcgtttaggtgcagtgcgcttaattattatcggattcgccctaacattaatgggtaacttatggttaattgccatttcaaactcaccgataatgctaatgggtagcctctttttgattggctttggtttaggcattatttttaccaccgcatcgacctctattatgctaagtgtcgacgataaacaagcaggtatggccgcttctattgaagatatcgcctatgagttgggtagcgtgattggcgtgacctttatggggagtttaatgagcactctctataccttaaaactaactttaccggatacgcttaacgtcaatagtgtcgtttatgatagtttagatgaagcacttattgtcgctgaaaagcttcccgaagcagcggcgaccctcttaatctcacaggctaatagtgcgtttgaatatgccttttctatcgttctgatcgccacagccattgtgactacaataagcttaattgcactcccttattgcttgcgtaatgcggtaagagaaaacaagcccagccactaa

SEQ ID NO: 308593 - DNA, 354 bp, Proteus mirabilis
gtgtctacttttgcagttgcttgcgcttgttgggcttttttagcttttacgcgagcaatagcagcggccacagcagctttgcgcggatcggtttccacctcagctggagtttcagccggtgtgtctacttttgcagttgcctgtgcttgttgggcttttttagcttttacccgagcaatagcagcggccacagcagctttgcgcggatcggtttccagctcagcatcagccggagtttcagtaggtgtgtctacttttgcggttgcttgtgcttgttgggctttcttagcttttactcgagccaatgctgccgctacagcggctttgcgtggatcggtttctacctcagcctga

SEQ ID NO: 308594 - DNA, 135 bp, Proteus mirabilis
atggcaatacaaaatacatctcaaaacaaacaaggaatgtgtgtgagttgcggttatacaagtcaaaactttgctgaaaataataaaaaccttaaaatgaatatttatcaaggctctacaggcgagaacaaataa

SEQ ID NO: 308595 - DNA, 807 bp, Proteus mirabilis
atggctgagaaaaagtcctgtgctcaggctttaaacgaggcagggttatcagtcattaaggcttgtctgctcacgtcattgcctcgatccacgttttatcggaagactcaaaattggcgcgagaaggataaaatcgttattgatgctatccaaactgtattagctaaatcacctcaagccggtttctggaaatgctatttccggctacgctttcaaggctatctgtttaatcataaacgagtttatcgcgtttactgtcgactaggactgaacttgaagcgacgggttaaaaaagtgctttcaaagcgtgaaaaaagacccttaaaaattgaaaatgtcccgaatattcaatgggcattagatttcatgcacgatagtttatattgtggtaaacgtttcagaacactcaacattattgatgaagggacacgtgaatgtttggcaattgaggttgatacatcacttcctgcagagcgtgttataagggtgctagaacgattaagaatggaaagaggattaccaaaacagatccgagtcgataatgggcctgagctaatctcgattaatttattgaattactgcaaaactcaccacgttgagctttgccatattcaacccggcaagccacagcaaaatggctttattgaacgatttaatggctcatttcgtcgtgaatttttaaatgcctatttatttgaatcattaagtcaggtgcgagaaatggtgtggttttggcagcaagattataatcagaaccgcactcatgaaagtttaaatcacctcccgccggaggcatacagaaaatag

SEQ ID NO: 308596 - DNA, 717 bp, Proteus mirabilis
gtgtttgacccgtttaatgattttgagcaagtcggttatttacgtaactattatggtgaaaaagatccgataattattcgtcaacttgaacacacaatgtttcgtgctggtttagatgaagcattagcttacttagtaggaaaagaaatcttacattatgaagattttttgggtgttcatcggatattattcgaagcattctacccatgggcaggtcaagatcgtgccattaccgcgcctaattgtgcggtatctaaagctggtacgatgttttgccatcctcatcatgctcgattagctattgaggaggggctacgccttggacaggatgtaaagtatatgcgtcagcatcctggtgaggtaatggggttttttgcgtatgggcatccatttcttgatgggaatggacgtactatgttaattattcataatgagctttgccatcgagctggcttttcgattgattggcatagaacgaataaaatggattacttgagagccttaagcgctgaaattaaatccccatcaaaagggcttttggataactacttatttcaatttataggagatacccgagatcgaaatctttggggggagtctataaatggtattcgtggtttagatggtcaaagtatagaaaattccgtagatggtgagtacacggacatagcagttgctcaaaagtataaatcattcaagatgaatagaggtctgtga

SEQ ID NO: 308597 - DNA, 348 bp, Proteus mirabilis
atggtaagttttttgagaacaaagtccgctgtcttattatcaatagttatttttcctattttctttttattatcaggctgtttttcattcgggttaatgttatcaactgaaaatgataatggttatcatcgttctcattggaaaggcgattcaattaccgcactctctctagcaaaagatagtaacggtactagcggatgggtatttattggtgatcattttgattatttattaataagaggtggagataacgcagtaaatattttaagagatccgcttatccaccatgataaattaagcgtagaaaatccagttgaatttattattgataatgaaaagaaattataa

SEQ ID NO: 308598 - DNA, 471 bp, Proteus mirabilis
atgtctaatgatatatgtggttatattgagcctccattgaacaaaaaggccagtagtaatttgaaaaattacattgaaagtcaaattgtggggataaccaatatctccaaagatgagctatataactttcctgaagagtttttaccatcaaaggattcttatgtatttttaataagtgatcgaccaaattatccaaatgcaacctatttaattgattatcttgattatgctcccgaagcagaaataggtttcccttgcggggcgaaagaacgtcttaatattctccttaatgtgttgggtgatatttttgtgatgacgggtgcacaaaaaatggttgttgcgttgacagaatgtaatcaaatagaaaaagtaaagagaataaagttatctgaaatgagggatattattcatgctgattttgaagagtatcaagctcctcctgatactctttatgaaatcattgtggattaa

SEQ ID NO: 308599 - DNA, 321 bp, Proteus mirabilis
gtgccaatttctcaagctgttgctgacatgatttgtacaaagaaatcaggattgctttttactgaaacgtcttatcacatgtttcgtcgagcaattaaaaaagtgaaacccagtatggcattaggtcaggcaacccatgcattacgccatacattcgccacccatttcatgatgaacggcggaagtattattaagttacagcgcatcttaggacacactaatttgcaacaaacgttgacctatacacactttgcaccagacttcttacaagatgccattcaatataaccccttgaaaggtagtacagaattactggtttag

SEQ ID NO: 308600 - DNA, 318 bp, Proteus mirabilis
atgaccccagaagaatctattaacaatgtgactccaccttataactatcaactaacgtgtgattatgatgcatcagtatccgtttcattaataggaagtgcacctgtttctggaaaaacggaaaactatacaaaatgtggtaatggtggctcttgtgagttgaaatataacgataccgaatataaaggtaaatttaaacttaacgcaggtgttgcgaaaacattttctatcacatcaacctttcatcctaatgatataagaaaccctgttgaaggtagttttcaaggaagtgctattttgcgggtattggttgactga

SEQ ID NO: 308601 - DNA, 1128 bp, Proteus mirabilis
ttgaaaacgataactattaaaatcagtctttttgtattgtcactgtttttccctctcctaacaaaagcacttgttattccagataatggaacggggtatataggtgaattaacgcctcctcaatcatatatgtcacttcgtagtagtggtaattcctatggagcggctgtaggtgttaataatgttgtagattattgtagtaaaaacagtgcacaatggcagagttttttattcccattcccaggaagtcaagagggggagtacggattaaaattatataataaaaacgtaagtgaagaggaaaatagggaaaattatttagttgcagctatcaatggaatagtatctatcgatgcgttgtattatcagaatggattaccttccccgacaagaattaccctgcgtcgaggaaaagaaatttctagaacagaggaatattctaatcaatttgtctatcgtcacccaatgtgctggtatggtaatttatcacgtgtaagtaatactagcttgagaataagctcttattctatttatgcagtaggccatgttaaacccggtatttacgattttgtagctccaatatattttactacagctcaaacagcaacctcaggcggggctaatccagatctatcttcagttcctttttcatttggtaatggtcctattcacgtcttaaaaacatgtaatgtttctcctgctagctcaacaaatatacaatttgccgctcaactagcacaaaattttaagtcagccaagttacttgagcaaagtgtcgctagtatgcttgtctcttgccctcattcaggaaatatgtacgtgacattaaaaccctataatgagctagtcaatgcaagtaaaacggggatgacaatgtctcccaatatccctttgaaagataaagaagtcgcaccttatatcacggtatctgatgcagctaaaaaaataactaatgcagtatgtaataacaattctgccgaggccttagagttttatgcaggacaatctttgggaaaatataatgggggaactgtttataagtcattatcattcaacctttgtgccaatggaaatatacctacgaatacttataaaggaagtattgatgtatcgttcctgattgaatga

SEQ ID NO: 308602 - DNA, 765 bp, Proteus mirabilis
atgttagtaatgcataataaaaaataccctaaaggtcattattccgctggtcaaaatatctctagcgtgcttgaaaatgggaaaaataccttaggtataattatgtttaatggctctattttaacaggtgaagaaaaacttacccctgatatgtggtgtgaagtcgaacttaaaaaattatctgcaaacggcgataactccttaatatcgggacttagattaaacggaaataatgatgggaaaatggtggtctctgataaatatcaaaataacagtgagcatatctattttggcggccccagtagagatagtgagtataatgttttagaagcaaaaaaccaatttaatatacaaagcctcccccaatggcaatgggaaaaagcaactcccgttactgaggacgatcttcctaaaattcgtgctttttatggcgaactacgacaagcatttatcgataaaaatctagataaattaaaaactatggggaaaatatcctgggaagaaatggcccatgccgataatggctctcctgatatcttttggaaatcgcttaattttcaagaacgattagaacaaggatataaacccaatactattaattgggatgaatatacttttgttacttataacgacaatcgagtctttcgctatgaggttggttttagccgattatcccctattgaattaatcaactctgaaggaagaaattatttttataatccttacctttctattattgatgggaaagtgactattgtccgataa

SEQ ID NO: 308603 - DNA, 141 bp, Proteus mirabilis
atgcctaccattattcttataggtgactcggatacaggccatgatcatcatggccctaccaacgtcatcacaggttcatcaacggtaaacttgttgctcgagcaaaagctcccattagttgataatgtaggtatgaaatga

SEQ ID NO: 308604 - DNA, 735 bp, Proteus mirabilis
gtggtcacagaccaccaaggaaccccgcgagagatattcagtgaaggcgggcaagccagttgggcaggacggctgaatacatggggccaaatgcagttttggcgttaccgagagggtaaggcggagaatgaccctaattataccgaatgtccttttcgctttgcggggcaatatgaagatgaagaaagtggcttgtattataatcgctttcgctattatgatagggaaacagggcagtatctttccccagatccgatagggttattgggtgggctgaatccctatggatatgtgcattgcccgacggggtgggttgatccgtttgggttgagtgggacgtctaagattaaacaaacaggcggtaggcaagttctcgatcctgagagccttgcaggttgggaaaaagcagagcttttctataacaaaataagaacagaccccactgatattgctcaaatagcaaaaaatacgggctggaaagaatctcatgtcgcccgagtgaaagatcatgttttcttcaaaaaacatcagttggatgataggtttggcaagtttgacgcagacccttctatggtaaatgcatgggagcgactaaagaaaggtgattacattaaatcagatattgatttattgagacatgagtattttgagtctaggtttgaaggtattttttcaaccatttatagaacggcgcatgaggcggcagttaaatctggaagagattggaaaccttaa

SEQ ID NO: 308605 - DNA, 927 bp, Proteus mirabilis
atgaccagtttacgcactgtatcaaaacacccagagcaattagaaaccacaccattaattgcggaaagtcatcactatgatgatcctttagcacctcaaaagctagtgtttttagaggcagttaatcaacagcgttgtgtaattaactcaccacagcgcaatagccaactcactaatacaatacctttttttatcgtacttttagttatggcctgttatacattatttggttttatttccgaacatataaattataaaagacattttcagagtatggtcgaaaaagttgaggctaaatatagtaatgaacttaatttagatgcgcctacattaaaatatgtaaacacgtacagaccatattttgggaaaaaaaatataaattattgggattatataaaggcttataattcaggtgaattttttactgatggccaatatgaaaagtacctcgtcattggctggctaatttttttccccggttttttatggctatttggctatctctctttctttacacctcctgtataccttattgctgataggcaaagaggaatactgtatagctatggcatggggaaagtgcgtttaacccgctataaagaggcacaatttggttatgcgggcaatatgttggcgattaaactatatggcattaatgaaaaaacaggccaattaaaaacgatcctctatcgccccaatgtgtcccactactccagtttcctaaccagtactgacagtgaaaaccaccgttttatcactttccttaatgcctatatgcaacaaggccgagatgctgtttcgcctgttgattaccaagcccgtaagccctttttatcttttggcaaaaaccctcttcctgctgattttgagcaacaggtcggacagattctggcaaagcttgatcaggagaaagaacaccatgcgtag

SEQ ID NO: 308606 - DNA, 1149 bp, Proteus mirabilis
atgaaaatacttcatttaattaatttacaagggtttggtggtgctgaacgtttgtttattgaatatttaaaaaatagctcatttcaaaatgaggttttgtgtaccagtaactctttaaataaaaacctgatccctgagcttaagcatttcgatataaaatacgctaataaaatcgcttctactaaaataaagtaccctgcttttttaagaaaacatgtcttaacaaaaaaaatagaagcaagtaaagccgatgtcactctagtttgggatttcgtccctagattatctagaaaacccaagaatactagcttagtctactatgatcatggctgttcttggcgctatcctcttaacaaaaaaacattaagcttttttagtatgctcaataatgctatcgcgatatctacagcatctaaacgtgttatggagttaagattcaatacgacatatacgcctaaaaaagtcattaatcgtctaccactaaagtctagtaacatagctaaaaaactgcacaataatcaaattacgctaggaacagcctctcgcttagtaggactgaaggggatcggaattagtattctctgtttatcagaattaataaaattaaatataaaggcaaagttaattattgctggtgatggtgaacaaaggacagaattagaacaattagcaagacaaaataatgtacaaaaccatatcagctttattggctatcaatcagatatggataaattttattcagatatcgatatttatttaagtacaccagtaacagagccttttggtttatcttgcattgaagctttagctcaaggtatccctgttatctatcctaatattgacggacaacccgaagcaataaaagataagtattgcggtctaggtattgctcccaaattatctattgatgaatatcataaattaacaaatttagatatcaacttcccctataaagtttatgatcctatctcagatacattaattttgcccaaattaatatctccacaaaactgtgctacggctataatagaaataatgaataattatactaactttagccaaaatgcgattgaatggtcaaaagaaacgacagattacaatctatttattaaagaatttgaaagtacaataagagatagtcaaatatag

SEQ ID NO: 308607 - DNA, 213 bp, Proteus mirabilis
atggggacacctaatacttattcaagaaccaacggcggccatgtcattgtttttggtccagatggtcgaagaatggcagatatcagtaaagagcgaattaaaattacagagtggaacaaagctccgaatggacaatattaccctgacgttggtagtgatactaaatttgcaaataggcaaatccctgacgaaattaaaaaattattggaataa

SEQ ID NO: 308608 - DNA, 927 bp, Proteus mirabilis
atgacccgtttacgcacagtatcaaaacaccctgaacaattagaaaccacaccattaattgcggaaagtcatcactatgatgaccctttggagcctcaaaaactggtatttttagaggcagttaatcaacagcgttgtgtgattaactcaccacagcgcaatagccaactcaccaatacaatacctttttttatcgtacttttagttatggcctgttatacattgttcggatttgttgataatcatataggtaaaaaaatgtctattgagcaaatggctaaacatatagaagaaaaatatggcaatcgaagtaatttagaccctgaaacatttaagatgattgaatcatataagccattttttaataaagaaagaataagttggtgggagtatataaaagcgtataactccggtgagttttttattgatagccaatatgataaatacctcgtcattggctggttaatttttttccccggttttttatggctatttggctatctctctttctttacgcctcctgtgtaccttattgctgataggcaaagaggaatactgtatagctatggcatggggaaagtgcgtttaacccgctataaagaggcgcaatttggttatgcgggcaatatgttgtcaattaaactatatggcattaatgaaaaaacaggccaattaaaaacgatcctctatcgccccaatgtgtcccactactccagtttcctaaccagtaccgacagtgaaaaccaccgttttatcactttccttaatgcctatatgcaacaaggccgagatgctgtttcatcggttgattaccaagcccgtaagccctttttatcttttggcaaaaatccacttcctgctgattttgagcaacaggtcgaacaaattttagcaaagcttgatcaggagaaaaaacaccatgcgtag

SEQ ID NO: 308609 - DNA, 381 bp, Proteus mirabilis
atggggaaagtgcgtttaacccgctataaagaggcgcaatttggttatgcgggcaacatgttggcaattaaactatatggcattaatgaaaaaacaggccaattaaaaacgatcctctatcgccccaatgtatcccactactccagtttcctaaccagtactgacagtgaaaaccaccgttttatcactttccttaatgcctatatgcaacaaggccgagatgctgtttcatcggttgattaccaagcccgtaagccctttttatcttttggcaaaaacccacttcctgccgattttgagcaacaggtcgaacagattctggcaaagcttgatcaggagaaaaaaaccatgcgtaaaattgataaggaaggtacggaatga

SEQ ID NO: 308610 - DNA, 741 bp, Proteus mirabilis
atgtcacagttaaatacatcatcaacaccattgcttgcatcactaaaaaagcgtggcttttttaccatattattgtgggatataccttggcagattattggcattttattggcttcacttttgtttagtttggtattggaatatatcggtattttcttcttttgggagaaagagggagcgcaacatagttaccaaattatgctgattgaacgaacttattttgctgagagttttacacaaagtatatttgtattctcaccagtgataacaacaatttattggatcactgatttttcacaagggatacaggataatttgctgaagatgccattattcgctataaaaacgggtaatggtgttactgatgggattaatgtaggagcaataaaagcgttccaaataggagaacaatatttgctggcaacattctttgttttacaaatagtgataatgcgagtcactattctcgtgctatcaattccattatttatcttagtgataatagtcgccgttgttgatggtttggtcagacgtgatttacgtcgatatggtgcagcttatgaatctagttttgtttatcatcatgctaagcgaataatcaagcccgcaatttatatcctctgtgtattgtatttatcattgccatttgcagtttatccgaatttcttgttgttgccttctatctttttgatagggatagctatttctgtgacaatagggtgttttaaaaagtatttgtag

SEQ ID NO: 308611 - DNA, 312 bp, Proteus mirabilis
atggcccaatttaatcacttcgcacttagactcttaaatccaagttttgactctcctttagttgatgctttaacagagttagagttactccgacatttacgattagaaacagatgtccatccacttttatttgctcaattgaaagatatttttcacatgttggagagtcttggctctgcaagaatagagggaaaccatactacacttgctgattatgttgaaagtaaagtagaaggaacacaaaattctactgatcagcttaaagaaattaataatattgaaacagcaatggaatttattggtgatccctaa

SEQ ID NO: 308612 - DNA, 240 bp, Proteus mirabilis
atgtgggatgctatcggaagcgagtttggtgggcgccatgagttatatgagattaattatgcgggtagtaaggatagtgttcgcctgcagtgtcttcgtcatgcatatagttctggtaatatgatgaaaatggataacttggtagagcaatgtctctctgattataatatgagtggttggactaagcctcatcttcataataacaaagatattaattttctcgatcatttattgaagtaa

SEQ ID NO: 308613 - DNA, 564 bp, Proteus mirabilis
atgaaattcaataaattaggcgtaatggttgctggtgcacttcttatgggttctttatcaactcaagttatggccgctaaaaacgcagatgttacattttctgcacgtttagttgcagcaacttgtgatatcagcgcaagccaagatcgtgttgatttaggtacttatgcaactgctgatattgataagcttgaccaagctgtatctgaaaaagatttcaacttagtgttaaacaactgtactaagattggtaaaccagctgaaggtgaagatcctgctgtaactgtatctaatattcaattattagcaagcggtaatggcctagttggtaatgagcaattatttgctagcgctggtgcaactcaagctggtatcaagttaactgcaatgaactctgtagtactgaaaccaaatgagtcaacagaactggaaaacttaaaagcagaaggtgaaggtaacctgattattcctatgaaagcaggcttatttgctacagaaactggtgactcactgaaagcacaagatattaatgttccagtaacctttagtgttgcttataactaa

SEQ ID NO: 308614 - DNA, 588 bp, Proteus mirabilis
atgggatcttataaatcaaaaaatattactttatataattatccagaattaaaaattaatgtattacgttggtgggaaagtctatttttatcaccaaatgaattaagtaaaaaaggtattttaccagcaccgaatcgttataaatctgaattgaaacgttgtgattctattactgctattatgttaaccgaagggtttcgtgctttatggttgagttttcctgtggaccttattaataatgctacagcggaagatattgagcgttgggcaacaatagtagctatattagtttatattacgcaggatagtgaaaaacactttgctactattgcaggtgaaaaagatgagagtaaaaagtcttgtatcagtgaatcccgttttttacaactacaatcttcgcgtacttatgatgagtttattcggcgtttaaggagaattttaattcagattaaagggaaatcatctgtcttatcaatgtgtaaagatattgaaaagtgggttttagaaaaacagcgctttagttctatacaaacaaataaacaaattattattgagtgggcaatgaaatattatcaggctgccatttaa

SEQ ID NO: 308615 - DNA, 576 bp, Proteus mirabilis
gtgtctacaataaaaaactttaaaagaatagtattgttagcgatgatggtgtatgcagtaaactgtcaatccgcaaataatggtactctcaacttttctgctaatgtaacacgtggcacttgtgaatttagcgatagtaatgagctgagtaaacatgtctcatttgaacagttttttactattggtgatgcagaagacacaccaataaaggcgcctattaaaggtagtctcggcactaagcaatttacttatcttatcgattgtaaagagtacgaacctgatagtgagaaaaaaatcacgattaatgtaaaaacaggcgcgaatactgaatattcagatcaggttttttatggaaaaggcgatacgactcaaacaggttttttagtaaaaggttgtcttgaaggtgaaaatgcgagttgccaaattctagaaaacaataaaaagttatctttttcttctcactctaattcagcgataagtattaactacatcgtcgattttgttagacgcaacaataataaaatgacacctggtgattcaacggcgactattttatttgaatatattcaggattaa

SEQ ID NO: 308616 - DNA, 327 bp, Proteus mirabilis
atgatatgcacagaaagggaatctcaccatccaaaattctattttgttaataaagaatgggagctactaccctatggtattgattataaaaatagaaatgtttcaactgtactagagaaacctcaaaattatcaaaaactatttgaatatgcagaaaagctgtctaagccatttccttttgttagagtagatttatatttaaacaatggtattatccattttggagaattaacatttataccatcagcaggaatggataaagaactaaataatgaagaagttaaaaacgttgatatgatttttggcaactatcttaaattaaactaa

SEQ ID NO: 308617 - DNA, 960 bp, Proteus mirabilis
atgagtcttaattttctggattttgaacagccaattgccgagttagaagcgaaaatcgattcgctaaccgcagttagccaacatgatgaaaaaattgatattaatattgatgaagaagttgcacgcttaagagaaaaaagtttagaacttactcgaaaaattttctctgatcttggtgcatggcaagtggcacaacttgctcgtcatccattaagaccttatacccttgattatattaatcgtgtttttactgattttcaggagttagcgggtgatcgcgcttatgctgatgataaagcgattgtcggtggtattgctcgtttagacggtcgtccggtgatgatcattggtcatcaaaaaggacgtgaaacgaaagaaaaaattcgtcgtaattttggtatgccggctcctgaaggttatcgcaaagcgctacgtttaatggaaatggcacaacgttttaaattacctattatcacttttattgatactccgggagcttatccgggggtgggcgctgaagagcgtggacaatcagaagcgattgctcgtaatttaagagaaatgtctcgctttggtgtgccaattatttgtaccgttattggcgaaggtggctctggtggtgctttggcgattggtgtgggtgataaagtgaatatgttgcagtacagcacctattccgttatttcgccagaaggttgtgcttctattctatggaagagtgctgataaagcaccattagccgctgaagctatggggatcacggcaaatcgtttaaaagaattaaaattgattgatacggtgatccctgaacctttaggtggtgctcatcgtcattatgatgaaatggcagcatcactaaaagcgcagctaaaagctgatttagcgcagttagatgagtttgatacagaagagctcactaaccgccgttatcaacgcttaatggaatatggctattgctga

SEQ ID NO: 308618 - DNA, 525 bp, Proteus mirabilis
atgtctcgtaaaattaaaaatatacttatctccatttttttagtatttatggccttggggctttatctcaataaaaatcaaatccaaccagagttaaagccaaatggttatagttattatcaaaaaggtgactataaagaggcgtttaattatttttcacaacatgcgcaaagtgatccgcaagcgacatttagtttagcaatgatgtattgggatggcataggggttgataaaaatgccttagcttcacaaaaatggttaataaaatcagcaaacttacaaaataaaaatgcactttataatttaggatatttacgtaacaaaggattaatccaaagtcctactgatgatgctcaaggattaacgtcattaactaaagctgctgatttaggctcttcaatagcgaaagattttttacatgatcttaattttcctgtgatttattacgatcaaaaagagtatacgttactccctatttatggtgagcaatcttggtctgaaaaaaaagaacacttgaagaattag

SEQ ID NO: 308619 - DNA, 615 bp, Proteus mirabilis
  misc_feature (601)..(610): n is a, c, g, or t
atgataaaaaataatgacttacctgcttttatgacgcaagtggttattactgaacccggtggcgttgataaactgcaattagaaaatagcccattaccgtcattgccccctcattatatgttggtaaaagttaatgcagcgggtgttaatcgccctgatatttttcaacgtcaaggtagttatccaccgccagccgatgcatctcctatattaggattagagattgctggggaagtggtgaaattaggtgaacattgtacaaaatgggcaataggtgatcgtgtttgtgctttagttgctggtggcggttatgctgaatattgtttagtccatgaagatatcgctttaccgtcgcaaggattaagcgatattgaagcggcagcattatctgaaaatttatttactgtttgggcaaatctatttcaactcggtcagttaaaagcaggggaatcggttttgatccatgggggcacttctgggattggctctatggcgattatgttagcacacaatcttggttgtgaaatttacacaacggtaggttcaaaagaaaaagccgaagttgcccaaaaattaggggctaatcatgttattaattacnnnnnnnnnnattaa

SEQ ID NO: 308620 - DNA, 324 bp, Proteus mirabilis
atgaaagagattttagcagcatcagaagagcaaactcgtggcattgctcagattagccttgcagttaatgaaatggataaagcgacacaacaaaatgccgcgatggtggaacaatctacagctgcttcagcaacactaagtgaacaagcctcaatgttagatatgattgtaaataccttcaaggtagaacaagtcgctgttacatcaccacgatcaccaacattctcggctaagccagctgaaccggaaataacaaaaacagcaacgacatccacaataaaatcccatcatcatgaagccgatgacaattgggaaagtttttaa

SEQ ID NO: 308621 - DNA, 2109 bp, Proteus mirabilis; identical to SEQ ID NO: 296150

SEQ ID NO: 308622 - DNA, 282 bp, Proteus mirabilis
atgttttgccagcgtcaacgtatcgcagatattattaaaaatatgcaggagtgtacaaatccagaggggattaatgtcattgtttgtcctgttgaaacagcaaatagtggatctgctgaagttcctttcaaaaccttcttgcgccaaggtgagttagcggattattaccaaggctgggatattattaaatataatgaaaatccagggcatctacataaaactgatgctaatggtaatcgtattcaacttaattttgcgacattaattgcgcgtaaaaaataa

SEQ ID NO: 308623 - DNA, 2319 bp, Proteus mirabilis
atgtcaaaaattaaaaataatgtttctatcactgaaatgagccggcgtggcttcattcagtctgcagctgttctttctggcgctgctgctgtagctggaacggtatcattacctttctctgctaatgctcaaacaccccagggtattcgtcctgatgagacgtctgaaaccatcaaatacagtgcatgcttagtgaactgtggtagtcgttgcccattaaaagttcatgttaaagatggcgtgatccgccgtatttccaatgaaaccatgtttgatgactcaacctttggtcttcatcagatccgtccttgcttacgtggacgttccgttcgttggaaaacttataatccagaccgtttaaaataccccatgaaacgtgtcggtaaacgtggtgaaggtaaattcgagcgtatctcttgggatgaagcgacttcgattatcgctgataagctaaaatatactatcgatacctatggtaatgaggctatttattaccaatatggtactggatctaccggagcgaatttacatggtagaacagcctgtaaacgtctattaagtacagtcggtggcttcttaagtgactacggtacttactcttattcacaattaaccggcatcgtcccttatgtgtatggtgatatgctggaatctctgttaacagaaatcgaaaactcagatttggttgtgatgtttggtcataatcttgctgaaactcgtatgtctggcggtggtcagttctatgaaacactgaatgcgttagataagagtaaaagtaaagtaattattatcgacccgcgtcgtactgatagtgtcacaacattaggtgcagagtggatccctatctatccgggtactgatgctgcattagtggctgcgttaggttatgtgatgatccaagagggtatcactgatgaggcatttttacgtgaatattgcatcggttgggataaacaaactctgccagcctcagcacctgaaaatggctcttacaaagactatattctcggtaatggtcctgatggaattgctaaaacccctgagtgggcaagtcaattaaccggaatttccgttgcgcgtattattcaattggcacgtgaaattggtaatgccagagcggcgtggatctcccaaggctggggtattcagcgtaccagtaatggtgaacaagcttgccgtgccattatgatgttgccattaatgtctggtcatattggtcgtcctggtactaataccggatgttggggcggtagcattgaataccctgtcgcaagttttgccataccaaatccagtaaaaacccagatcccaacatttatgtggtctgaagcggttgctcgtggtgaagagttaaccagtaaaaatgccggtgtcagaaataaagataagctggatacgggcattaaatttatgtggtgttactccagtaatgtgattggtaaccagcatgctgatctcaataaaacacatgaattactgcaagatgaatcaaaatgtgaatttattttagtgtgggataaccacatgacaccatcagcaaaatatgccgatattttactgcctgatgtcactactgtggaaactaacgatcttatcaataactcttatgctagtggtgcgtatcattatatggtgcgtttacaaaatgccattgagccgttatgggaaaatcgtcctaactatgatgtattggcagatatcgctgaaaaattaggtgttaaagagaaatttactgaaggtagaacctaccaagagtggattgagtattgctataaccaagtaaaagcaaataacccagcgcttccttcttttgctgaaactaacgatatggggattgtggatagaaaacttcctcctcgtagcgcttatgtggcattagaagcatttcgccaagatcctatcgccaacccactaaaaacagcatcaggtaaaattgaaatctattctgagaaattaatgcaagacactgaaggttggatcttaccagaaggtgatcgtattcctgcaattccagaatattgtaaaaatgaagaaggtgttgaaaacgttaccttaaaagagaagttcccactgcaaatgacgggcttccacgataaaggtcacgtccactctacctattttaacgtcgcaatgttacgtgaagctattcctcatcaattttggttaaaccccgttgatgcggcacagcgtggattaaaatctggcgatattgctgagatttataacgaacgtggtcgcttgcatattcgtgtcaaagtgacagatcgtgtattacctggtgtgattgcagtaccacaaggtgcatggcgtatcacttga

SEQ ID NO: 308624 - DNA, 885 bp, Proteus mirabilis
atgatctttagtcgctacagtctctttttacttgttactttggggttgctttcaggttgtgttcagcaacctcagcttattgataggggggattattttgcacaagttgttcccaataatcctgggcaagataatcgcgtaaaatttttagttatgcactacaccgccgttgacgataaagaatcgttaaaaacgttaacttcgggaaatgtaagcagtcattatttaattcctaccaaaccaaattatgttgatggtaagccggttgtgtttgctttagtgagtgaagataaaagagcatggcatgcagggctaagtcagtggggaaatagtgcaggtttgaatgatggttcaattggtattgagatagtgaattatggttataaagatcagggtacattaagagagtggttaccttataccgcagaacaactctcaaccattactatgatgatgaaagatattattcaacgctatggtattgaacctcaaaatgtagtcgggcatagtgatattgcaccacaacgtaaagtggatccgggaccacttttcccatgggctgaattagcgaaacaaggaataggcgcttggccagatgatgaaacagtcactttctatttagcgggaagagctgcatcggagcctgttgatattgctaattttcaaaccttgttagcgaagtatggttatcaaacaccaacaacagggatattagatcctgaaacgcaaaaagtggttagcgcatttcaaatgcattttagaccaagtgatattaaaggtattcctgatgcgcagtcagaagctattttaatggcgttaattgataaatatcgaactaagtggatacagccgtcaactgagccaataaaacattcagataattga

SEQ ID NO: 308625 - DNA, 486 bp, Proteus mirabilis
atgagtggttatgtgtatgcagggtttccaagctctgtaggagtcattattggtggttttttcctcgtgatactttttaagtggttacgatttgcattgcaagacaataaattacccactgctacaatgccagcaacaacagagcctgagcccgttttatcgtctccagcaacagaaagcccagtaaatcagttattacccaaagaatggggattatatgtcgcagccccttatgcggtaatgaatgagtgggcatataacgaatataatcaaggtaaagatgatggtgggctatcagcggcttggggagttaatgatcggtgggatttaatctaccaattattttggttgctgactcaaggtcataccaatgacttttaccagttacgtgaccagattttgaatggcaaagaagaagatattcaatcattaaaaaacgatattttattatctgatttaactgaaaatgataaaaatgaacgttga

SEQ ID NO: 308626 - DNA, 2010 bp, Proteus mirabilis
atgagcaaagtttttaaactgcattcagaatttaaacccggtggtgatcaacctactgctatcgcttcattatgtgaagggttagaagatggacttgctcaccaaaccttattaggggtaaccggatcaggtaaaaccttcactattgccaatgtgatagctaacctaaatcgtcctactatggtattagcgccaaacaaaacgctagctgcacagctttatagtgaaatgaaagagtttttccctgaaaatgcggtggaatactttgtctcttattatgactactatcaacctgaagcctatgtgccaagctccgatacctttattgaaaaagacgcctctgttaacgaacatatcgaacaaatgcgtctatcggctacaaaggcactcttagagcgtaaagacgttattgtggtctcttcagtttcagctatttatggtttgggtgatcctgatagctatttaaaaatgatgctacatttaagcaatggcatgattattgaccaacgtgcgattttacgccgacttgctgatttgcaatatacccgcaatgatcaggcttttcagcgcggtactttccgagtccgtggtgaagtgatcgatatctttcctgctgaatctgatgactacgctttacgtgttgaattatttgatgaagaggttgagcgtttatcgctatttgatcctctcacagggcaaattcattacaatgtgccacgtttcaccgtctatcctaaaacccactatgttacgccgcgcgaacgtattctggatgcgatggaaaaaatcaaacaggagctagctgaaagacgtaaggtgctattagccaatgataaattggttgaagagcagcgagttacccagcgcactcaatttgatttagaaatgatgaatgaattggggtattgctcaggtattgaaaactactcccgctatctttctggccgtgggcctggtgagccaccaccaacgctatttgactatttgcctgctgatgggttattagtgattgacgaatcacacgttactattccgcaaattggcggcatgtataaaggcgaccgctcacgtaaagagacgttagtggaatatggcttccggttaccttctgcgttggataaccgcccattgcgttttgaagagtttgaagcattagcaccacaaaccatttatgtttcagcaacaccgggcaaatatgagctagaaaaatcaggtaatgacattgtagaacaggtggttagacctacaggcttacttgatccggtggttgaagttcgccctgttgccacacaggttgatgatttattatcagaaatacgtatacgagcagctaaaaatgaacgtgtattagtgacaacattaacaaaacgtatggcggaggatttgaccgaatatcttgaagagcatggtgaacgggtacgttatttgcactcagatattgataccgtcgagcgggttgaaattatccgagatttacgtctaggtgaatttgatgtgctggtggggataaacttacttcgtgaagggttagatatgccagaagtctctcttgtggcgattttagatgcagataaagagggattcttacgttcagaacgttcgcttattcagacgattggtcgtgctgctcgtaaccttgaaggtaaagctattttatatggcgataaaataacagattctatggcaaaagccattggtgagacagaacgtcgtcgggaaaaacagcaacaatttaaccttgaacatggcattgtgccaaaaggcttaaataagaaaattggtgatattcttaagattggtcaaccgactcaaggccgtaataagaaaggacataaagcggttgatactcatgaagattatccattactttctacggctgaattagaaaaagaaattcagcgcttagaaacggaaatgtatcaacatgctaaagatcttgaatttgaaaaagcggctcaaacacgggataaattacaaactttgcgtgcgcaatttattgctaattcttaa

SEQ ID NO: 308627 - DNA, 492 bp, Proteus mirabilis; identical to SEQ ID NO: 305263

SEQ ID NO: 308628 - DNA, 849 bp, Proteus mirabilis
atgcaacaccaaaatactcaaaagaaaatactacgtactatttgtccagatgcgaaaggacttatcgcaaaaattactaatatttgttataaacatcagctcaatattgttcaaaataatgagtttgttgatcatcgcactggccgcttttttatgcgtactgagctagaaggcatttttaatgatgaaacctttttagccgatttagatgatgcacttccacaaggctcacagcgagagcttaatactgccggtcgccgccgtatcgtcattatggtcactaaagaagctcattgtattggtgacctcttaatgaaaagcgcttttggtgatctggatgttgaaattgcagcagttattggtaatcacgacacgctaaaacaccttgttgagcaatttgggatccctttccatctcattagtcatgaagggttaacccgtgatcagcatgatgaaaaactgatagcacaaattgaccaatacaaacctgattatgtggtattagctaaatatatgcgtgtattaacccccgcatttgtacaacattacccaaatcaaattattaatattcatcattctttcttaccggcatttattggcgcccgcccatatcatcaagcctatgaacgtggtgtaaaaattattggcgccacagctcactatgtaaatgataatttagatgaaggccctattattactcaaaatgtaataaacgtagaccacactttttcagcagaagatatgatgcgcgcaggacgggatgtagagaaaaacgtactaagccacgccctctattgggtgctctcgcaacgtgtttttgtctatggcaacagaacaattattttgtag

SEQ ID NO: 308629 - DNA, 930 bp, Proteus mirabilis
atgacaacaacacaatctactgattacaatattattgtcatgtcagatccacaaccttggcgtctagatctggataataatgaccccaataatgatcaatcccgttgggaaaccaccgtaaaaagcgttagagacagtattcaagcattacaccgtgaaaaatcttttgcttttggcattataaatggtgacttaacagaatttggccgtcgctcccaacgtgagagttttcgtgcactgtttgccccttcacctttaggatttaatacctatgttggacttggtaatcacgactatcaaaacaatgtgggtgactgtgcagagccgagtaatgccgattacagtatgaatgcctgtgcaagaggcatggtttttgatatgcactaccgtattgaagagtatcgtaattatgcgacttcaggtaattttagatacgatagtagcgaatattcaggtagtaaggcttactcttgggaatatggtgatatccattttgtgcaattacaaaattatcccacttatcatgtggtgctcgatcactggtcagcttcaactattaatgtcacagattctattgattggttagaaaaagatttaattcaggcgcgaaatagcaataaaaccatcatattaaacttccatgatggaaaccaacacttcccagaaaaatcatctcaagaagagctgaccttctttaaatatatgctagaacattacggggtaaaggcggtatttgttgggcatacccattatgttggtcaagataaccgttatggtggcagtgagatcttcggcgatgtcccagtttataatagtggtgcgctatttaaaggagattatttagccgtagaaatccgtggtacagaattatctatcactgtttataacggcttatcaggtacacctcaattaatagaaaaatggaattaa

SEQ ID NO: 308630 - DNA, 1104 bp, Proteus mirabilis
atggggatatatggctgtaatggaggagatattgatcctcgatacacaccgaactactttctttctgagcttatttcatgggttaacactaatcgatttgaaaacaccctaccaacaaaagattatactcgattgaggaaaaaaatttattgtaggaatgcctataaatgccccactacaggtgattatttctttgtcttatggaagtccgaggaagatggcaatggcaacatactgggagttgacgttaatagcccagttgatagtgattcagataccgtagccttactaacttctgacggcaaagaaggcaaaaagtatatctggggtaagccttgttattattggtacattacgagtttaaataaatttgttgccatcaaatttcctcattcaagtacagacacatacctgtttgcatcgtatattaaagattttgttaattatagaatgagcttctctggtaagaaaatatcaaaaaacaaaagagagagcgttggtgggaaagactttatctttgatcgggttactttttcttctgatgacggcaagtttcgaacacagtttttatttgattataagatgttcatgaaaaaagcaaatagggaaacattgcagcggattaggggcaatattactcatattgtgtatcgcaatacgataagtacatctgagcgtgatgaaagatcgttttttactaagttatttgatggtttttcaatgacaaaggaagacaagccagccacaacaaaagaaaaaagaattgaacttttaattgaagaaaccccaactcaagctgagctgaatagtattttagagttttatgatgatggattcccaataaagtcatcatgggataatattggatttagggagggaggtaagcaaagtgaaacaaagtggtttaatgaatatgtgctaagagattcatttactatatcctattcagctgctagtaaaaaacatatatctgctgtctcgctagctaatgaaataagtaagcatagggatagatttatcgctggattaattgaagaccaagattcatcagatgctgctaacgatgatagtgggcgtgcaagaacaagcgcgggagtgggttaa

SEQ ID NO: 308631 - DNA, 918 bp, Proteus mirabilis
atgattaatgcaaatcgtccgataatgaatctcgacctcgatctgcttagaacgtttgttgctgtagcagatttgaatacttttgcagccgctgcggccgctgtatgtcgaactcaatctgcagtcagtcagcagatgcaacgtttagagcaattagtcggcagagaactctttgcccgtcatggtcgtaataaactgttaacagagcatggcttacaattattaggctatgcacgtcaaattctccgtgctaatgatgatgcaactgcttcattaacatatagcgatgctgaaggtgagttacgtattggtgcatctgatgattccgtcgatacactactaccatttttgttaaatcgtattgcatcagtatatccacgtttagcggttgatgtgcgtattaagcgttctcaatttattgagactatgcttgataaccacgaaatcgacttagcattaaccactgcacgtattggacatcatccacgcacagcgttacgtacagcgcctgttttgtggcattgtgcccctgatttccaattacaaatgaatgagcctattcctttagtggtcatggacgaaactaacccattccgtcagttggcaacaaatacactagatgacgcaggtattcaatggcgtattgcgtatgaagcggcttctttatctgcggttcgtgctgctgtaaatgccgaagtggggatcacagctcgtccattagaaatgcaaaatgctgatttacgtatattaggcgaaagtgaagggttacctcgtttgcctgagactcagtactggttatatcgtaattttgatgagcaaaacgaagctgtattaacggtattcaatgccatcgaaaataagaaaacgccttatactgtcacttcagttgaagaagcgcattctttagatttagagtaa

SEQ ID NO: 308632 - DNA, 1092 bp, Proteus mirabilis; identical to SEQ ID NO: 301499

SEQ ID NO: 308633 - DNA, 588 bp, Proteus mirabilis
gtggcaaccataatgtttgatatacacatcccttacgaaaagataggaaacgcctattcatcaataagatacgatagctatgctaaggagggtttctatatccagccaattggtaataattttatattcaagaattatgatataacaaagggcattacaccagtcaagttcaaagagttaaaaataaataatgaatatttagaatatacgtttgaagtgcacaataactcaagttcaaaaattactgtaagtgctgaatttgatattagaaataaatggagttacatcgctgaaataaataaagcatatgatttagcggatgatgacgagaaaaattcaaagttacaatacatctataataaatacaatgtaagttctatcggtagccgatatacagataagctaactatagagccaaataacacaagatatttaacactatcaagaaaaatgaatagcaatataacggcagaagatttaaatgtaaccttttttattaaaggagctattgatggaaagattacagaatcagaagttgaatttaaatttagtgagtcggaaaaagcaaaagaatctttttataactga

SEQ ID NO: 308634 - DNA, 912 bp, Proteus mirabilis
gtggtgtttccaagtttctatcaaacttgggttaaacgtagttttgaaattgaatttacaaccccctttgctcgttggaatagcttagagctttatggaaatgactatagccatgatccaaaaatcagttattacaagacttacgttgagatgggaaaagatatattacatagaacatccatgctacaaagtattgaatcctactctcatattgatgcagtgatccgtttaaaacagaactacttaacacctgaaaaagaggtagatagttttcaatatgaaggctgtaatggcgtggcaggagatagccatgatgttataaaaagcgacacattttttaccccagacagtcagaaagcctatctgtcaccaacgcaaattttaccctccgttcgctatatttctgacacaccttggggagggttaaaatatatggtacttgatgatgttaacaataatagttttactatcggtcaaggtaatcgagataataaatcgtatcttaatattcctggctactgctttaatagcgtaaatctttatttaagtcgtcacaatggaaaaagctgtcaagctgactcaggagcttggttaaccgaatctgcacctatatttcgtttttatgatggttatgcatccttaccccttgacactaaaaatcatttacccacagcaaaaaagagctatgaactcgatttaaatcatgggtttatgactcaactaagtaaagctcaatatggctatagtgatatgttagtggggaaaaattgtattttgttaaatcacgatgcttatttttgtttaccatcagaagagccgattggcaaagtaggtttatcacaaaaaatcaccttgttattacagtgtgcctgtctcttatacacatctccgagcccacgagaccgaggctga

SEQ ID NO: 308635 - DNA, 315 bp, Proteus mirabilis
ttgtctggtgggcaagctcaacgagtttgcttatgtcgtgcgttagcatcttacccacgactaattattttagatgaggcaataagctctctcgatatacctacacaagttgaaatattggatttattaaaattattaaaagaggaactccaattatcctatctttttattagtcatgatattcaaacagtgacttatttttgcgataaagtcatgttcattttacaaggtcaacaaattgaattatgcgagataaataaattaagtactgttactcatccttatgctaaaaaactaattcaatctgttatttaa

SEQ ID NO: 308636 - DNA, 315 bp, Proteus mirabilis; identical to SEQ ID NO: 297837

SEQ ID NO: 308637 - DNA, 579 bp, Proteus mirabilis; identical to SEQ ID NO: 301489

SEQ ID NO: 308638 - DNA, 408 bp, Proteus mirabilis
atggaagcacgtgttaaatgggttgaagatttatcttttgttggcgaatcatcttccggccatcaagttatgatggatggtaattcaggtgataaagcgcctagtccgatggaaatggtattaattgctgcgggtggttgtagtgctattgatgtggtgagtatcttacgtaaaggtcgccaccaagtcactgattgtgaagtgaaattaacatcaaaacgtcgtgaagaggcacctcgtttatttaccgatattaatttacatttcattgtttccggcaaagcgttgacagataaaattgttgagcgagctgtacaattatcagcagaaaaatattgctctgtttctttaatgttaggaaaagcggccaatattacgcactcttttgaaattaaagatcctgaataa

SEQ ID NO: 308639 - DNA, 363 bp, Proteus mirabilis; identical to SEQ ID NO: 301667

SEQ ID NO: 308640 - DNA, 312 bp, Proteus mirabilis
gtgcttgctgttgcattaaacacacaagttaaactgatttatcgccctaagattttagctgaaaaacgcgaggatgcagaaaaaagtctgacatatagtggttcagttttaaagaatcctacaccttactattttgcattaactcaagtgtcagtcaataataatcctttggtcttgtcaaaagacattgagcaatctattagtttatttccacctttcagtgaggtaaatgtgcagcgcccattgttaggtaaagtaaccgttgaagctattgatgattatggtgctagacgtgttattgagcttaattaa

SEQ ID NO: 308641 - DNA, 207 bp, Proteus mirabilis
atgggtcatgctaaacctgaattagttgaccaagtcgttgaagtgatccagcgtcatgcacccggtgattatacaccttcagtaaaaccaagtagcaaaggtaactatcactcagtctctgtgactatcaacgcaacgcatattgaacaagtagaaaccctctataaagagttaggtgaattagagcttgttcgcatggtgttataa

SEQ ID NO: 308642 - DNA, 159 bp, Proteus mirabilis
atgaaaggtaaaaccttagatgaagcagaagcgattaaaaataccgcaattgctgaagagttagaattaccaccagtgaaaattcactgttcaattctggctgaagatgcaataaaagccgcgattgcagactataaaagcaaacgccaaggcaaataa

SEQ ID NO: 308643 - DNA, 252 bp, Proteus mirabilis
  misc_feature (189)..(198): n is a, c, g, or t
atggcttatagcgataaagtaattgatcattatgaaaatcctcgtaatgtgggttcatttgataacaacgaccctacagtggggagcggtatggtaggcgcaccagcttgtggtgacgtcatgaagctacaaatcaaagttgatgataacggtgtaattgaagatgcacgttttaaaacttatggttgnnnnnnnnnnttgtggctcagcgattgcatcaagctctttggttaccgaatggatgaaaggtaa

SEQ ID NO: 308644 - DNA, 240 bp, Proteus mirabilis
atgcgaattattgtttatggaagtttacggcgaaatcagggtaaccatcactggatgacctacgcacagctattaggtgagtataaattagcggggtataaactctatgatttagggttttatcctgctgtggttgaaggtgatggtgaaatagaatgtgaagtttatcggatcacgccttccattttgacggagcttgatgaactgaaaaaaatgatcaagattacaagcgccagttga

SEQ ID NO: 308645 - DNA, 711 bp, Proteus mirabilis
atggccaaaagtcgattagcagcgtcaagaaatcaaaatgcatcccccattccgccaatggctcagaataatgttacttcattagatttgaacgttgatatacggcctgaaggggaactaaacagcacaaaacacaattttctttattggtgtcatgaacagtgtgatccaaaaaaaacattagctaaaccctctcgattagaaaaaatgcaaaagctaaaaagatgggttgatcaagagaagaaaaatgaaaccaatgcatggtctctagtggttaaattaagcgtcttaaaggcttatatagcattttgcgacattaagaagttcgacccttttagccaggctggatacctttcttacgctggtaactcaggagagttacgccgcttagttgatattgctaatgagcctaaaaaataccagtttcaatatcataatggcgaagagtttggtttgttggaatcttcagctcttcaaaaaaagatgaatctcgactcgctgcttccagtacttggttttgatgtatcagacatgcaagccacgctcaagagctttaatggtgaggttgcagattttactacacaaccttacacatcaagcgaatggtatgcactagtcagacgtactcagcttttctttttctctttagtagctcaacttattgcatataaagaagaaaaccctgactctccccccccctcaacaccttga

SEQ ID NO: 308646 - DNA, 207 bp, Proteus mirabilis
atgttatggttgattttagccacgccaatagctgtaaacaatttaatggttgaaagtcatttagaagagggcaatcaatcattagaaagtggtgaacctttggtatacggtaaaagtgtcacagatgcttgtattgggtgggatgatacagaaacgttattacgccaattagccgatgcagtcgctactcgtcgtaataaatcataa

SEQ ID NO: 308647 - DNA, 1485 bp, Proteus mirabilis
atggctctaaattcgccaatgctaattacctttacgatctatatattggggatgctttttatcggctatctagcgtatcgatcaacaaaaaattttgatgattatattttagggggccgaaggcttggtagtgtagtaacggcactttctgcgggcgcttctgatatgagtggctggctattaatggggttaccaggtgtggttttttttgcggggatctccgaaagttggatagccattggtttatgtttaggtgcatggcttaactggcgtttagttgcagggcgcttacgtttacaaacagaaaaaaacaataatgcactgactttaccagactatttaacttctcgctttgatgacaaaagcaaaatgctacgcattatttctgcgttagttattcttattttcttcactatttattgtgcatcaggtgtcgtcgcaggaggtatgctttttgagtctacctttggcattccttatcatgaagcgatgatttatggtgcactagcaaccattgcatatactttcctaggtggttttttggcggtaagttggacggatacggtacaagccacattaatgattttcgcacttattctgacaccaattattgttattttctcaattggtggaattgacacctctatagagatcattaaagcgaaagatccggcttatcttgatatgtttaaagggcttgattttattgctattgtttcattattagcttggggattaggttattttggacagcctcatattctcgcgcgttttatggctgcagattcaaatcaaactattcgtaaagcgcgtcgtattggtatgacttggatgatcctctgtttaggcggaacggtggcggtgggcttctttggtattgcttattttgaagttaatccggccgttgcaggtccggttatggctaaaaatgagcgtatctttatggaattagcttcgttactttttaacccgtggatagctggtattttgttatctgcgattttagctgcggtaatgagtacgttaagctgccaattattagtctgcgccagtgcattaactgaagatttatataagccttttattcgtaaaaatgccagtcaaaaagagctagtttgggttggtcgtggcatggtgttattagttgcggttatcgctatttatttagcccgtgatccagaaaacaaagtacttgatttggtgagtaatgcttgggcaggatttggtgctgcatttggtccggtgatccttatctctgtcacttggaaacgtatgactcgtaatggtgcttttgcgggaatgttaattggtgcattaacggtactggtatggatgcaatataaatggttcggtctttatgaaattattccgggctttattttcgcgtccatagccattgttattgtcagtttactgggtaagtcaccaacggcagaaaatcaacaacgttttgatgaagcagaagcggaatatcgtaacacttaa

SEQ ID NO: 308648 - DNA, 705 bp, Proteus mirabilis
atgttaaacgaacaaaatcgtgctgagtttctgcaaactattgctcaaaaattaggacgtgaggtgacgcatacgccaaaaccacaagatccccctattaataatttagctaaaacacgcttaacaaatttaacccaagatgaattatgcaaagaatttactgattttgcacaaacccagcaagtaagatgcgttatcactaaaccagaacaagtgataaatagcttaatagcgctttgtgaaagctatgattgtcaaggctcagtgataataagtggtgatgagcgcttaaatgcacttggtgtaacacaagctattagtgaaaaatttgaaacttatatttgggatcctaaactcggtcatgaaaatattattcatgctgagcgctctcaaatagggattgtctttgcggaagcgggattaacagaatctggcgggattgtgctgttttcttctccggaaaaagggcgttctgtcagcctgttacctgaaacctcgattgttattttacgcaaaagtgacattttaccgcgagtggctcaacttgcagagcgtttacacaaaatggcacaagatgggatcagaatgccttcatgtatcaatttaattggtggtgcaagctcaacggctgatattgaattaatcaaagtatggggagttcatggcccagttcatgccgcttatcttattattgaagattgttag

SEQ ID NO: 308649 - DNA, 333 bp, Proteus mirabilis; identical to SEQ ID NO: 294321

SEQ ID NO: 308650 - DNA, 141 bp, Proteus mirabilis
atgaaattaaattcactacagcttcaacaacacaaatataaattatccagtgattcatttaaaaatgaaaataacaattctatttatattgttagtcttattttatttataggttatttattaatttcagctttaagttag

SEQ ID NO: 308651 - DNA, 444 bp, Proteus mirabilis; identical to SEQ ID NO: 300258

SEQ ID NO: 308652 - DNA, 408 bp, Proteus mirabilis
gtggatccttggggttgggctgaatttgatgttgatagttatgaaaatttgagagcagcagtaaagggtggaaatactggtttagatgcccatcacgttggtcaaaaagcaataatggcagatcttgtttcaggatatgaccctaaaacagctccagctattctagtttctaaatcagggcatacagtatcaaaagagggagtaggtattgtttcacgcagtaaaataaattcctcgacaggtttgccgtttaaaaatgcccgagaattattggcaagggatattagggagttacgacgtgtatactcagatattcctaatagcgctcttaaagaactgatcgcaaaaaataaagaaatgtaccctgagatgagaaaaacaaataatacgacgataaagggatgttag

SEQ ID NO: 308653 - DNA, 786 bp, Proteus mirabilis
atgagtagacaaaaagcagcaacacgtttacgtagagaaaataaacgtacattacgtaaagagcaacgtaatgccgcccatcgagataatgttatggttttaccaggatttggggatctagaaacaattggtatggcgagagagaaacgtgatcaacgaacactctctcctcgtaatgaagttcaacgccaatatatgaacgctattaaacatcaaaatttagtttttgcgacaggggaagcggggtgtggtaaaacgtttttaagtgcagcaatggctgctgatgcccttattaataaagagatagagcgaattattgttactcggcctgtattacaagctgatgaagatttaggttttcttcctggcgatatagcagaaaaattcgcgccttattttcgtcctgtctatgatgtattagttaaacgtttaggcgcctcttttttacaatattgtttacggcctgaaatcggcaaagttgaaatagccccatttgcctatatgcgaggacgtacttttgaaaatgcatttgtcatattggatgaagcgcaaaatgtcaccattaatcaaatgaaattatttttaacgcgaatgggagaaaatgtgacagtgattgttaacggtgatattacgcaatgcgatttacctgccaatgtaaactcaggattagctgatgcactaagtcgttttcaagctaatgatcgtgttggtgtcattaaatttaatgaagaagattgtgtgcgttccagtctatgtcagcatgtattagcagcatatagtgattaa

SEQ ID NO: 308654 - DNA, 564 bp, Proteus mirabilis; identical to SEQ ID NO: 296366

SEQ ID NO: 308655 - DNA, 501 bp, Proteus mirabilis
ttgtctttttttggggcatcacctgattatattgctgaaaactcaccccgaagccactatagaaaattgagtctaaatatacattatcaatatttatttccttactctgtctcctatattacgtctttttatggtcaatatacatctgataatctttatagtgtggaaaaaataaccatagatggattaaatgcggttcgtggtactaaacaaaataagcttagtgccaatagaggactttattggcgtaatgaaattaatacaccatggataaattcatttttaggtcaatggcgttttattacggctgttgattatggcgttatctattctgatcaatatgaaacaaagcagcagtctttattagctggcgctatggggctttcattttatcgttcccctttttcttcacaactattgataaacaaaccattcatttatccaaagtggttaaatgctaaccaatggtctttatcttggtcaatttctttcgctctttaa

SEQ ID NO: 308656 - DNA, 564 bp, Proteus mirabilis
atgatcaataaaatatatgattttcagtcggatgtgactattttttgttcatttatacaggagtattctgaaggggaagaaagcattattgggagagcaatgaggcaaagatgggatgcattcgataatagctacaaagaggtatcattggagctaagatctaatgaacagggtaaaaaaaattatcaatttgattttagtagtgctttgtcgccatttatggtttttagtgaagatgcattattgtctttatctgatattttgagttcaagaggacaagtattacccgttaagacagagagcagacggaagaaatttgttggttattatccaactaattcactttcaggatgttttgacagaacaaattctatttatcgggaatatcccaatggattaatgattgagaagccagttctcataaaaaataacattactgatgagtatctatttactattgatgaggatattagccgaatctttgttacggataaatttaaacaaagagtagaagatgcaggtttaatggctttcgatttttcagtggaaatagaattatcgtaa

SEQ ID NO: 308657 - DNA, 414 bp, Proteus mirabilis
atgccagaagatgaagcaggatttattgcattacatatcgccagtattagaacaaacgataatattcagcaaacctacaaagtgacccactttatccaaagcattactaatatagtcaaatattatttaaatatagagtacgacataggatcgttaaattatcgtcgttttgtgacacaccttcgctatttctccatccgattattttcacaacctgaaaatgatcacgaacctttagaaaatgagttactcgatataataaaagacaagtaccatcaaccttatatgtgctgtttgaaaataagtaaatttattaaagataaatataattgcaccttagatgacaatgaaattttatatctaataatccatattgcaaaaattgcagaggataataaaaagatgaataaataa

SEQ ID NO: 308658 - DNA, 366 bp, Proteus mirabilis
atgaacatgaaaattaaaaaaatattaaataacagtgttgtgatctctctggatgaagcagaaaaagaaattatcgtcatgggaaaagggattgcctacgccaaaaaagtaggtgatgagataacatctgaacaaataaccaaaaaatttatcttaagtcctaaaaattgtccgcagagagtgctcgatcttttatcgaatattacgttagattacgtagaaattgcggacaatattattcagtatgcaaaagaaaaaatgaccttagatacacaagatagtatctatattgcattgattgaccatattcaagccagcattgaacggtatatagtgaagagtttgatattggtctttatggcttaa

SEQ ID NO: 308659 - DNA, 258 bp, Proteus mirabilis; identical to SEQ ID NO: 308539

SEQ ID NO: 308660 - DNA, 210 bp, Proteus mirabilis
atgagtagattagcgcatttagtacctaaaaagcaattccgatgtttacctgtctcaggtcgtcagtcattccgctatgtagaaatcatagtctctgacgaacaaccagacaactacaagaaatctgcatgtttggtagatagacagtctcttaaaaaggtatgggctgatttttatttttcaagtggagagcgggacaatgagcaatga

SEQ ID NO: 308661 - DNA, 210 bp, Proteus mirabilis; identical to SEQ ID NO: 301952

SEQ ID NO: 308662 - DNA, 267 bp, Proteus mirabilis
  misc_feature (215)..(224): n is a, c, g, or t
atgctcaatatcgtcttatttgaacccgaaattccaccgaatacgggtaatattatccgcctgtgtgccaacacaggctttcatcttcatttgatccaaccattgggttttacttgggatgataaacggctacgccgtgcagggcttgattatcgtgagtttgctgatatcaaacagcatcacgattattatgcttttttagaaagtgaaggatnnnnnnnnnngataatgcacaatccccgacaggtgcacggttgtttgcattaa

SEQ ID NO: 308663 - DNA, 213 bp, Proteus mirabilis
atgaatgaacaattgtctattcatacctattgcaaaaaaagacaaaatcattatttgcctgatgatattgatttacattacctcgttaatggaaatgtactttccaaagaagatgaagataagattattgaaaaagtatttaagtatcgaggtggggtttatgtttggaaaagcaatgcaaaaataaataaaatgggagtggataatgattaa

SEQ ID NO: 308664 - DNA, 2220 bp, Proteus mirabilis
gtgataaaaaaaatattagatattctccctatttttgggaaaaaagacgtcgatattactgaacaatatcttcaaggctctcttgtcctactggctatatttgatgaaagtttacctaagcgtgcattagattatgtacttacaggtacaaaccctgaaattctatttgaattaaataaactagatgcagcgaaagccgccgtttattttcatcgtgcgggaacattagagtggtggtatgccagtaatgttgatacaggaaagtacggtaaggttatcacccaaggccttaatgcccgccataaactctactcaaaggttggtgaaagtttttccttagagcaagtggcccgttttgccaaagtcatcgctgccgcatgtcaagatatcaatattaaagtaacaacaacgcaagtccccacttgggttatctacctgttagttgatgcgttttataccacttacgataatgcacgtaaccttaatttagaacatcgtaaacattggagtatggagtttatcgccaatatggtcgaagcagaggccaatattggcggtgaaaacgcgttatttgcaatttttgatagaaaagatgtctctgaatattatgccgctaatcttaagcgtatttatgaactgtgtgatttaaaagactatctactttcacatcaagaatttgttagaaaagaattagttgaaaaactttcagcgaatggcttagtcgagctaataaattatctaaataaaaatacgatattacgcgatacttttgcagatattattgttttacttgccactagcagtttaagaaccgtcaaaaaaacggctgaacctattttaaataccttacctgctgaaatcgtaaaagaaaatttaacccatgttttaatgaatggtactcccaaacaacgtacacaagccgctgatttattcgcgcgccaaggtgaaaaccgtgatgtgctggcagaagcattaaaacatgaaacctcaaaagcagttatcaagagcattgaaagtgcgctacaacgtttttgtgttgctgataatgcaaataccgttgaagccattaaagcgcctgattttactcccttagaagacacaccattacccgatagtgcccgcgatattctggtgaataacttcaatgaaatgttagtaaaagcaaaagaaaatgctgaacgtgaaattgaagaaaataaaacgtctaaacactcttataattgggcacaacgccattataaagatctctctaaaattgatgaaaaacagtgtcgcgcattagtggataaactcaatagcggacaaggcactattcaagtcaatgagatccaaataattaaacacaaaaaccgtattcctaatttacctgaatacacctttttccatgccgtgcgcgtgatcaccaataaccgccaacatgcggatcacttttcctctcactattttaatagtgatattcctgaacgtttattgagtgatattgaattacgacacgttgaaaatgtattagaacgatgtcatttcaaacgtgcaacgcgtatcacagcggcgctgtgcttagaatcttatcaagatggcttacgtcgtttccgtaaaccagaacaagtttggcctttcttctctcaacatactgattatattgcagaagcgctaaacttaatgccaaatcaaagtgaacaccgctatcgccaatttgaaacttcacaaggtattgaagtattaagccgttttccaaccattcctgcacaattcgttccgcgtatcatggaattggctctaggtgaaaataaaacacaccgagtttcagctcagaaattattagaaaccttaccgaatattcacttaagtgcacaagaaggcttaacttcaagtaaacaagaaattcgagtcaccgcgattgaatggttagcacgtttaaataaccctgactcattacctgcccttaatgccttactgaaaaaagagaaacgcgaagtagtacgagccgctctgctcactgcgttagaacaattaggtgaggatatttcaagctatttatcgccaaagacattattagcagaagctgaaaaaggtctcaaagccaaaccacccgcaagccttgcttggtttaacttcgaggcgatccctgcattaacatgggaaaacaaaaaagcggttgatcccgcgattattcgttggtggattattctcgccgtcaaattaaaaatgccaggggggtaa

SEQ ID NO: 308665 - DNA, 153 bp, Proteus mirabilis
atgttttattataatgttaatgaatataataatttgttaataataccaataagacataataccattagaaacattatggttacttataaaaaaaagtatgtcttagatggaggtattgataagaaagggcataaatattttattaacatttaa

SEQ ID NO: 308666 - DNA, 264 bp, Proteus mirabilis; identical to SEQ ID NO: 307943

SEQ ID NO: 308667 - DNA, 642 bp, Proteus mirabilis
atgaccattgaaactataatttctgttttaaaagagtacctagcaaaactaaatgatgaacaaaaaattgaagctctcaataaaataaaaatatcgcttcatcaaataagcccatttaaaaatgaacctactgactgtgttctttggataaagcaacaacaagttatcgctaatgactataatcccaatgtcatgtctccgacagaaaagagattactagaaacgtctctggtaaaagacggttatactcagcctgttgttgtcttacctattcaacaatccaaaaataaaccatcacaatggcaagtcgttgatggttaccatcgttatttattgagtaaaaaaaatagcttaaacaagcgaattaacggctatttacctattactatacttgatgttgaaagtcatactatggctgaccaaatggcagcgactattcgccataatcgggctagagggcaacatcaagtggcagcaatgtcggatatagttagagatttatcaagattaggttggaatgaccaaaagattggtgatgaattaggtatgtcacaagatgaggtattacgtttaaaacagattagtggcttagctgaattattttcagagcacgacttttcagaagcttggacggttaagtag

SEQ ID NO: 308668 - DNA, 183 bp, Proteus mirabilis; identical to SEQ ID NO: 286971

SEQ ID NO: 308669 - DNA, 258 bp, Proteus mirabilis
atgaaaaaatacacagttttatttgcagaaataagcaaaaaaaatccggatgatgaacctgatgtttatcgctttgagtccataaaagaatttctatcttttgttaaaaaagtaaaattccaagaaaaaatgaattttaattatcattatattttatctgattccatggaaaaaacaaataagtttcaatataaaattacagaagaagcaaagcactataagcaatttaaaaaattattaatagaatatatgagttag

SEQ ID NO: 308670 - DNA, 345 bp, Proteus mirabilis; identical to SEQ ID NO: 300314

SEQ ID NO: 308671 - DNA, 135 bp, Proteus mirabilis
atgtccgaaaaaatgatagcagttgcaagagcatttggaaagggaaaaggcggaacattccctatcatgaccgcaaaagatcttgagaaatttttagaagtgatgagaacggaacgactgaaacaaactcattga

SEQ ID NO: 308672 - DNA, 297 bp, Proteus mirabilis; identical to SEQ ID NO: 286967

SEQ ID NO: 308673 - DNA, 285 bp, Proteus mirabilis
atgaaaacaaaaccagaattattcgatgtagtcgattacctagaggatgaagaagatattcaggcatatctcaatgccgctctggatgaagatgatgaaagctactttttagcagcactgggaaatattgccagagcaagaaatatcagccaactttcaaaagaaacaggaatgagccgtgagggaatttataaagctctttccggaacaggaaacccatcttttaaaacgatttcaaaaatatctaaagcattaggtttgaaaatacacttcgcaggggcttaa

SEQ ID NO: 308674 - DNA, 570 bp, Proteus mirabilis
atgaagcaaattaatttcagaataactgacgaagaatatgttttttttgagaaaaaaataaaggaaaactttgatatttctttgcctatgttttttaaaaaagtaggtttaagtgttctgaataaggattcggaaatcaaaaaaataaaaaccagcctgtatgatgaattagggcttgaatcctattacatgaataataaaataacattatatatcaatgatgaattatatcatggtctaaaagaaaatgcagaaaaacatgggtggtcactatccaaagaaatcaggtttagactaaaacatacaatgaataatgaccttgatttttttgatcaggagttaaagattatgcgagattataataaccaattaaaacgtgttggacgcaatattaatatgatactacggcgggatgatgggaagattttagagaaagaagaatttaggcaagatatagttaatttgcaaaaaaatatcaatgaaatgcaaagagagctagagggttacatcaaaaagtgtaaaggaagatcactttctcagcatgtcagcgtggtagattatgggtgttaa

SEQ ID NO: 308675 - DNA, 1170 bp, Proteus mirabilis; identical to SEQ ID NO: 300194

SEQ ID NO: 308676 - DNA, 357 bp, Proteus mirabilis
atgatgctaataaaaaaactttttacacttttttccgtaggactcctaagcttgccagcttcagcggttacactgtctgatctctattttttagcgattaaacatgatcccacatttaatgcagctgtaaaagagcaagtagcaggtaaagagtatgaaaatatcgggttatcacaattgctacccaatatttctgtcaattacaaaaataatcctcgcaactggcaacgtaaggcttatccaataaatatatttcaggataaaataacaacagttgagtatcaaaactatcaaagctattctgtcaacgcgattattagtcaaccactatttgactacaccgcatttagtgaataa

SEQ ID NO: 308677 - DNA, 2400 bp, Proteus mirabilis
atggttacagttgccaataactttgcttggtcaattgaatattcaggcttagaaacaggaaaagatgaatattgccaagagtctctcttaactacggccaatggttatattgggttaagaggaactttgcccgaaatgactataagtgatgagcactaccctgctacctatattgctggcctatataatcaagcaagttcacaaatagaaaaccatcaggtgattaatgaagattttgttaatgcacctaatggacaatttatttctcttaaaattggtaagggagaatatcttcatccaaagcaactgataacacaccatttaacacgtcatttagatttgaaaacgggtgtattcactagccaatggcgtgtagaaacccctgaaggacagcaacttgatattcattgtacaaaatttgccaatatggctgatatgtcacattacgccattttatatacctttaaaccattaaatttctcaggtgagataacggttataactcgcctagaaggaaatacttataattacggtgtacaacgctaccgtagccttaatccccatcattatcatgtgttacaaactggagcgaataagcaacacgcatttatattagctcaaacagatcagtcaaaaatagggatcggattatcgtcaacaatcaggggggatttctttgcaaatgaagatattgtttgtcatgtttcagatacgcttgttgaacaaaccatcaccttcaacgctcaacaaaataccacctatcaacttgaaaaatgtgttgctgtaacaacctctacggcttacccagactcatggcaagatgtggttaattgggaacaacaacctttacacagccaattgataaatagccaaaaagcgtggcaaacgttatgggatagtgccgatatctcgatttctggcgatctgatgacccaaaaattactacgcttacataccttccatttactgtcatccgcatcaccatttagcaatcagcaacatcaattagatgtttcagtcaccgcccgagggttacacggggaagcctatcgaggccatattttctgggatgagatctttattctgccattttatattatgcacttccctgaaaccgcacgccaactattactatatcgttaccacaggctacctgctgcgcgtcttgcggcacgagcagaaggatttcaaggtgctatgttcccttggcaatcagggcatgatggtagtgagcaaacccagacactgcatttaaaccccttatcagggcaatgggatgccgaccatagttgtcgtcaacgtcatgtctcattagcgattgcctataatgtgtggctatattggctaaatactcatgatcaccaatttatggaacagtatggacttgaactactcaatgacattaccttgttctggttagaccaatgtcagtgggatgaaggcgatcaacgttttcatattaatggagttatggggccggatgaatttcatgagaaatacgcagactcacttgaaggtggcttaaaagataacgcatacactaatttaatggtggtttggttgtttaatcaaatagagatgttcataaacaatgatcgtttttctaaaaaattacaacagctaaacagccaatctagcgttttcaataaaatacaagaagttaaaaatcgtattgctatcaatattgatgctcatgaaattattgaacagttctcaggttattttcaattaaaagatctggattgggaaagctatcgaaaaaaatacggcaatatctatcgtatggatagaattttgcgtaaagaaaataaatctgccgatgattacaaagtagctaaacaagcagataccctgatgttatttaataacttagataagcaaaccgtacattccctaattacctctcttggttattcagtttctaagcactttgctgaaaaaaatctacattactatttagaaagaacctctcatggttccacactgtcacgcattgtccatgcttatctcgcagaacaaatacagttacatgatttgtcatggcaactttatcaagatgctctttattcagattataatgatattcaaggtggaacaactgccgaaggtattcatactggtgtcatggcggcaacattaaataccaccatcatggcttatgccggtgttgatattcgtcaggatatgttgaccatcaccccttcactccctcaacaatggcaaaaactaagctttaaattattgcatcgctctactttatatcaaattaatctcagtcataaagaaattagtattttaagtgataagcccagtactattttaattaaccatcaaacgcataagctaaccgccaatacgttattagtattaaagttaaatggagacacgcaaaatgactaa

SEQ ID NO: 308678 - DNA, 180 bp, Proteus mirabilis
atggaaaaacgccagcgcagtgttaaggaagctcaggataaaagggaacgagaagaagcattggataaatcacgctcagaatttgatgaacgtcgtcaaaatatccgtgagcaatataaagaagctcacaatgagcgagtaaataaattcaataattatttttcttggaataaaaactga

SEQ ID NO: 308679 - DNA, 3384 bp, Proteus mirabilis
atgcctatttacgaacaacaacctgatgatgttttatctgcggatattaatgctgttcagcaacctgaacctacttatggtgataatgtttcaccgtcttggtatgatcctattaatccgcttgatgatagacggcaaactaaagaattacgtgatgcggcgtttcgtatcgataactcagtgggtagtttgattgctactgcaccttttaatcaatttgaagatgtagacgactataacccatttgaagatgaattaacgctttcaggttatgaagactatgccgatgcctttattcattcaaactctcctcaagaaacagctgcaataaaacaacgtattgatcgtgagcgtaacgataagcaaatgttagcagatgctggcggtgctggtgttgtgagtagtattgctatgggggttattgatccaattaatgttgctgcaatgatgataccagggggagccattgtaaaaggtggcagtgtggccacaaccgcaggtaagtttgcattggcaaatactgctgggggcgtagcttctgaaatggcattacatagtacccaagaaacacgaacattaactgaaagtgcaattaacattacacttgatgccatgatcggtggaaccttagggtcagccgcacagttagtaaaaaaccggggtgaattggtaacaaaagtaagaaatgatttaattggagaacaacaatcagggcaacaaaatattccaaataatattcctgataattctagtgttggtgcaatggaagtacctaacaccacattagaacaagaaaccttaaaagggccatcatttattaatcgtacgatgaatgttagccctgttggccgtgttgctcaatccccctctaaaacagcgcgtcaaattaaccaacaactcacagaaaataactttacctttgctaaaaatgaagaaggtattgcgacatttaccgctgttgaaacaaaagtgagaggttatgaaactctcgtttataaacaagtagaatcaacgaaagaccactttaaacaatatcgtcaatctggtggccgtgatatgaattattaccaatttagtgaagctgttggtgatgctatgcgcaatggtgatactcatgcaataccacaagtggcagaggcagcacgttctattagacctattgtcgaagcaaccaaagatagaatggttgaattagggatcttacgtgaaggtgtaaaggtgacaacagcacaaagctacttccctcgtatttataaattcgacaaaattttaaatgatcgtactgaatttaagaaaatcattgctgattggttagaagagattaatcaaacctcgataaataaagccaaaggtagtcttgatcgtgctgaaattggtattgataaagcacgtaatgctttaccacaagctgaacgtttagggcttgagattaaagaggctgagagttggtcgggtaaaaagtctttgctgatggatgatattaataaatatcaaaaaatcattaatgaaaagagtacggtagaagttgagctaaattcactttctaaccttactaagttaaataaaacacaaacaagaagacaagcaacattacaaagaaaattacagcgtattaatgatgctgagaataaattacctgcgttacagcgtagcgtagatattcttgataatccccgcaagtttaggaatgaacatcgtcgtttaacacgaactgcgaattcattaactcgccatgacagaattaggcaatcagcattaaatcgcatgacacctttagagcgtgaagagttagatgccgcagcagatgatatcgttaataaaattatcggggcaccgtcaggcattgtacccagtgaactgatccctgatgggttagttaaacgtgctggttttacaaaagatagaacgcttaacattcctgatgaacgcattaaagactatctcgaatcagatgttaactatgtgatggaaaactatattcgccaagttgcgcctgaaattgaactcacggctaaatttggtcgtgttgatatggataatcaaatcaaagcgattacagaggaatacaaccagcttattgctgatgcaaccacacctaaagaacgtagtcgattagaagcacgaagagaggcggatttacgtgatattcgtgctatgcgtgaccgtctattaggaacttatggcgcacctaaagatccctctagtttctttgttcgtgctggtcgtgtggctcgtcacgttaactttttacgtttattggggggtatgacaatatcatcgttacctgatatggctcgtccgattatgcaacacggtttacgtagtgcgttaaaaccattgggtaagatgctaactgatatcagtgctatgcgcattgctaaggccgatttgcgtgaaatgggtattggccttgaatatgcattatccagtcgttctaaagtgattgctgaccttagcgatccctatagcagacgtagctatttagagcgtggtttacagtggtcgtcacagaaatttggtaacttcacattaatgaaccaatatacagacacgatgaaaatgtggtctgggcttattactcaatctaaggtactgaaagcagcaaacactttagatgctggtggttcgttaagtaaacgagaaataaagaaactggctcatataggtattgatgaatcaatgctaaagcgtatagcagatcagtttaaacgacacggggaagacttagacggcatgttaacagggcatagccatttatgggatgatcgtgttgtgcgtgaaactttccaagcggcagtattaaaagatgtcagaactacagttataacacccggtattggtgatacaccattaatgatgagtagtgaattaggtaagatagttatgcagtttaaaaccttcttctttgctactcataacagagcgttagtatctggcatacaatcaggtgatacatcattttactatggagcattgcttcaggttgcacttggatccctagtctatattctcaaggctaaaatggcagggcgtgatattaataccgaaccggctaacttagtaaaagaggggttagattggtcaggaatgatgggctggctaggtgaacctaacaatgtattggaaaaccttagcggtggtacttatggtatgagtgctatgtttggtgggccaccagcatcacgttatcaaagtcgtaatgggattggtgcattattgggtcctacatttgaccttggcggtgatattaaaaacatcacatcaggtgtattaaatggtgagtttgatgatagagaagtgcgatctgtacgcaaactattacctttccaaaacttgttttatttgtcaccattattgaatcaggttgaagaacagatgaagtag

SEQ ID NO: 308680 - DNA, 1692 bp, Proteus mirabilis
ttgggtgaaattaacagtaaagctaaccaaatcgatattactgaattacatgagttgatgaggataaatcatgacaagattttatctgagttgatgaggcatggagcaacgattgaagaaagtgaaaaaaaatgggaggaggcaggaaaattactggctgagcggataaatcaagtttcaacggcaacagaagcacaggcagccgcaattaaacaagagcaacaagcacgtattgagactgataaaaccgaagcacaacaacgccaattcttagccactcaacttcgtggtgattataccggtaatgatttatcgaaagtcaccgcaggactcatttccgcagagaaacaagcacgtgttacaggcgaccaagcagaagcgaaagcccgacaatcactggaaacacggatgaatgggaatgtttcagcgattaataaatcattagaaaccctcacctcgaaacagcaagcacaaacgcaagagatttcaacgctcaattcaaatcttaaggggaaagcggatagcagtgtggtgaatgcgttaaatacgcgagtatctaatattgatggcaaagtgacgtctgcaacctctcaggtacaaacgttatccagcaaattagatacagtgaaagccgatttaacggagtctgtggtggtggatttagatttatctaaactcaatgaaaacacctattatccgattattttgccattagtaacttctcgacgttatgcctttaaggtttttaggacattagggcaatatagagacaataaaccgagctatgcgactcacaataccaaaggttttgccatgattgtggaatggcaagtgagtggttctggatggggaacccagtctgaaaaccgcatcattgataattttgattggcgatggacaaatcaatcccctgtgatggggccagctcaattaacgaatggttctgtggaatatatctatttgcgaggaggggctaaatatcagctcactaagcataaaagtgttaaccatcaaattatcacccgcacttataccaataacaaacaatcggtggcaccaaaaggatttgtggcgaatgaagtacctaagtccagcgaacagaaagccaatgcaacggcgaatgcggtaaaccaacttgaaactaaggtgactgaggtctcaggtaaagtgacctctaccgcccagcaagtcactcgccttgaaagccaagtgggtacaagttcagccaaaatcgaacaaacgtcgaaagtggtcaccgacataaatggcaaaatttccgcatcatggacaatgaaagttcagcaagatagcaaagggaataaagtcattacgggcattggcttagggtttaatgcacaaggaaatagccaatttctggtcaatgcccaaaactttgcagtgatatcgtcattaaatggcaaagtggtgacaccgtttatcgtgaagaatggacaggtggttgttaatgaagcttttattggtgatgcaactattaccagtgcaaaaatagctaatgtattgcaatcaaccaatttcagccatgcaaacaaggtgggctatcaacttaatatgcgcactggtgaagaaattaaatatgggaataacgctcaggggtactggattgaaacaaacatattaaaacgtttgtttgataaaaaaggcacaatgcgtatcagaatggggatatggtaa

SEQ ID NO: 308681 - DNA, 363 bp, Proteus mirabilis; identical to SEQ ID NO: 301378

SEQ ID NO: 308682 - DNA, 615 bp, Proteus mirabilis; identical to SEQ ID NO: 302399

SEQ ID NO: 308683 - DNA, 156 bp, Proteus mirabilis
atgtatcgcggtttcaccattattaaactgccaagaaaagcagtaacaccgataactcgttatcacgtttggttagatgatcagtcatttggtaagtttgatgcaatggcagaagcaacgcattatatcgacttattaaaaggtgatattcaatga

SEQ ID NO: 308684 - DNA, 150 bp, Proteus mirabilis
atgaaccaattaattaagcaaagaaataaatacaaactaaacagtgaatcttttacttataaaagtaaaaaatattcaaaagcggataaagcaacactggttttatgtgccattgttattgtttcgtttcttgtgaaagtttctatctag

SEQ ID NO: 308685 - DNA, 396 bp, Proteus mirabilis
atgaatactgcggagcttattcaagcaagagagcaactacaaggcaatgatgatttttatcagtctaaagtggtaaagcattatcgcaatgatggtctttcatttgatgagcgcgtcagtggtatgaataaaacagctgaagttagggctgatttattaagtaagttaaataaaaatagtgatgatattttgattggtgagtttcttgattatttaagaaatgaaaataatcgtatatatcagatgatttattaccttgctgagatagaaaaagaaaagaacggaatagattatttattattaaagaggaaagataaaataaaaatcattaatgcacttcatcaaataaaagtattgagcgcattaatcccgaataaattagcaatgcctatttaa

SEQ ID NO: 308686 - DNA, 207 bp, Proteus mirabilis; identical to SEQ ID NO: 302962

SEQ ID NO: 308687 - DNA, 828 bp, Proteus mirabilis
atggcgaataaaaccattctgaaatgggcggggtcaaaagtccgtatcatggataaattaattccacatttgccaaaagcaaagcgcttagttgaaccgtttgcgggttcttgtgctgttatgatgaatacagaatataacgaatatttaattgcagatgccaatcaggatttaattagtttatatcgtaatgtcgtagaacatactgaaataatggcgcgtaaagagttctatgcgtgggaagaaaacaatcataaaaatgattacattgctattagaaagttatttaattcaattaagatattagataaaaacgagtgtgatcaatatatacaatctgctcggtttttatatttaaatcgtcattgctttaatggattatgtcgatataacaattcaggtgaatttaatgtgccattcggaacatatgcccgtgtttattttccagaggaggaaatcagacaatttgctgagaaagccactaatgccattatcgcttgtttagaatggcaagatactttgtcactcgttgatttcggtgatggtgtttattgtgatcctccatatatgggagatgaaggtagttttactaaatatcatcacacggattttactcacgctcatcaaattgagttagctcaagcattaaaggcattaaatcaatcacaaggtaacccgattactgtctctaattccattcacgccaaagagctgtatgccgatctcggttttattattcacgagattgatgcgcctcgttctatttctgcaaatggaaaccgccaatcagcaaaagagattatcgccgttttgccggaggtgtgctga

SEQ ID NO: 308688 - DNA, 324 bp, Proteus mirabilis
atggaacagggctatgtcgatattcaagatccaaaaaatggggtgcatattaccggcactcgttttgctatcgtttattggaaaaaacaatttggattaattgaagtcactgtgattgatggtcgtgtgcgccgtgaagtgattgcgtggtatgactctgcggtaaatgtgacggctggcgttgttggtgcacatgtgagtcgtgttattagtgctgaaattaaatctatctctgaattgatagaggtaatgactcacgttgctaaactgtgcgaaacagccattgaaattattgatccgaagcatttaggcggtgtgcggtaa

SEQ ID NO: 308689 - DNA, 150 bp, Proteus mirabilis
atggcacaagtggtgcatcttcttgcgatgataaatcgtgatccgaaaacgtctccaccggaattgatggattttatgccgatgtggcaaaagaaagccgcagaagaaacgtgggatgcggtcacagatcaagtcttagcatatcgatag

SEQ ID NO: 308690 - DNA, 1827 bp, Proteus mirabilis
  misc_feature (1782)..(1791): n is a, c, g, or t
gtggccaactatgatttaggcgtctttcaaagtcgtgttaaaaacgcccaagattcatccagtagctactttaatttagacacattattagctaaagctgaacaccattttaatattaatgcatctgcctacagtataggtaaatccaattccaatattgaactctatagagcaatgtatgaacgtgattttaatggattgcgttttgctatcgggttaatgagcacttggaatttacagtccttagccagcttaacagtattgagcagcagtaaaatttatgcagcatcaatcgggaataattcatcaagtagggtggtgaataaacagcaatcattaactccgatttatgcttttttaaatagtccaggtgaagttcgtatttatcggcaaggtaaattattaaatattcaaaatttcccgatgggtaattttgaagttgataccagcatgttgccttatggtatttatgaagtaacgattgaaaccgttattgatggcaaggtagtgacaacacaacatcaaaccattaataagtcttttggtaccgctaacggtaattttgaccaattaaattgggaaatttatggtggctatattgattttgataaacgtcattatatcaaagaggggggcgcttataaccaaactcccgaaaaaagttatttaatcggtagctcttttgcttataactttcctgtgttatccggtattcgttttcaaatgtctaactatggatttgataaatttattgtacaggagacgaatatcagtgtagcggtaaataactacctttctattgcttggcaaggaatgttagagaatcatggtagtcaccgtaatattagtacgctttctattaatatcccagaaggctatggttcattatgggcatctaaagagaaaactatcgtaagaggtgatttaccgctatatgaggctgacagttactcttatggaggaactgtcaatttcgataagataatggatagaacgggttcatttactatcagcaataccaaagataagcgagttggtagtgattctattaattatgaatatgcaaatacattattttcgggacgttatggtacggtaggattaagagctggggttcagcgttatcattatgataatcaaaatagcactaatgaaaaatttattaatcttgatttctctttacctctttcaacgtggttaagtactgggatctcttcaaccaatggcaatgtaaaagccaatatttatgtgaataagaattttgaaaactccgtgatcactaatgcgggcgtttctgtttctaagttagtacatgataaagataatggtgaatctgacttctcaacactaggttacgcttcttatgatacgaagtataactctggtacggtgaccattaatcgccctgataataaacgactcaatggtaatttaacttctcgtggctctatagcttatagtgaagggatgatcacacccagtggtcaacaaggtaaatctggcattattatcaattcagacattaaaggtagtggcagtatgctcgctaaagttaacgggcaaaattacccgattagtggcaaaaatacctttattccattatctccttattcagattatgacatccaattaatgaatgatggcaaatcgaaagacagctttgacattatttctggccgaaataaatccgtcacattgtatccaggaaatattgccttttatcaaccggaagtgaggcaattagtcacggttttcggacgtctgaaatcccctaatggtgannnnnnnnnnatatgcttcaattcgaaaccatattggtcgaactaa

SEQ ID NO: 308691 - DNA, 153 bp, Proteus mirabilis
atggatgtagatgtccgttatccggtgatctcgttactacaagaagatcagcaaacaatctgtgaagcagacttagatcttaaaggggcacaaggagcaatgtgggttggagaggtaacttgtcaacctcagtctagtttcgtaaaaagataa

SEQ ID NO: 308692 - DNA, 840 bp, Proteus mirabilis; identical to SEQ ID NO: 6027

SEQ ID NO: 308693 - DNA, 552 bp, Proteus mirabilis
  misc_feature (532)..(541): n is a, c, g, or t
gtgaggtttgatggtgggcataaatgttgtcatcttgctgctgatgaattatctgagttctttgaatatcaatctacttgcccagaaatggctattggtttaccgacacccagaccagcattacgattagttcagtctaagactggtgaagttaggttaaaatttagtaatggaagtgaaggtgacttaacccaaatgatgaatgattactctatagaatatttgaggagatttaatcaatttagcggttatatcgtgtgtgcgaaatcacccagttgtggattagaacgtgtccgggtttatgatccaataggcaacggcaataaaaaatcgggtacaggcatttttactgaaaatctgaaaagaataatgccgtggttacctatagaagaagatgggcggttaaacgatccctatattagagaaaattttattacacgggtgtttgcgcttaatgagctaaatcaattgaaaataaataactttactcgccaggcattaattgattttcatacaagatacaaactattgnnnnnnnnnnattgttattag

SEQ ID NO: 308694 - DNA, 567 bp, Proteus mirabilis
atgctgacagcatctggtgctattgcttatagtgatggattatttgctacttctcctgtggagttaggagatactttcggtattttacgtgttccaggacaatctggtattttagttaactctatgggtggtggtacgacaataactaatcactttggtaccgccgttattcctaacttacctgtaaataaaaaaacaactgttctattaaatactaaaaatttaccactcaatgttatgttaggcacaacatcctttgatattgcattggcaaaaggtactgttttttctcgtgagatccccgtcaatacaatgaagcaagttttattagaaataaaaaaaccagatggtaaacctgttaatacagcaaatagtgtgattgatgataagggaaatctaataggtgttattatgggggacggtaatgttataataagtaatgagcaaatcggtaagccactaaaagtaaaatcagataatggtgacatctgttctgttgattattcagttccagaagaatttaatccagactttttatatgaaaaagttgatgcaatttgtaagtaa

SEQ ID NO: 308695 - DNA, 306 bp, Proteus mirabilis
atgcctttgttagggactattgaagcaccacccgctgaatttttatctttatctgatttatttactaaaacttatgagcacgagaagtttattacagctgaaattaataaacttgctcacctagcagtgacaacacaagattactcaacatttaacttcttacaatggtatgttgctgaacaacatgaagaagagaagttatttaaatctattctggataaacttgctatggtcggtgatggtggtaaggcattgttcttgttagataaagacttaagtgctctttctacatccgcgcatatttaa

SEQ ID NO: 308696 - DNA, 483 bp, Proteus mirabilis
atggaaggtgttcaacttaggcttgcggagcctcatgaagcaaaacgattatggtatttaagaaataaagcgttacgttttggctgtcaacatgtctatccgcccgatatattagccgcttggactcctgatgaaatgcctgacggctatagacaatctattattaataatcctttctatgttattgatgataaaaaattatctattcccgtagcttctggatttttagatcttaaaacaggctttgctgaagctatttttacattaccggaatgcatgggaaaaggatatgcaggacttattcttaaacagctacaatatgaagctaaacaaagaaattttgttaaattatttttagatgcaacgcctaatgcgatgctattttatttaaaacaagggttcactgttttagaagagcgagagtactattctagcttggctcaggcaagtttacactgttatcgaatgtatattgatttataa

SEQ ID NO: 308697 - DNA, 195 bp, Proteus mirabilis; identical to SEQ ID NO: 298769

SEQ ID NO: 308698 - DNA, 1542 bp, Proteus mirabilis; identical to SEQ ID NO: 30088

SEQ ID NO: 308699 - DNA, 408 bp, Proteus mirabilis
atggctgtacctgtcataagtgccgtcgtcgcggataccgaaaaggcaatgcctacggtgatgtcatgcgtgcagacaagcatcgtgctcgccagctggctaaaaaagaaatccagaggcttatccgtgaaacagctgagtaacgcgcaaatttacacgctgcgtcgtctatccagtggggcgtcgtacaagctaaggggggacggtaaaaaggctttggagtgtaggccatgtatcagaacccggttcgtaacaaatgacatcgccgcaccgtctatccctgtgcttttgcgtctcgggctggtggcatacgcctgcgagggtgagaaaagccgaaccactttctacccggttaaactaactgatgccgggaaatcagcagcaaagacaatgcagataagggattga

SEQ ID NO: 308700 - DNA, 963 bp, Proteus mirabilis
atgaaaaaaccagcatttattatcacattagataccgaaggcgataatctttgggaaaatgagcataacattactacgcaaaatacgcattttttaccccgttttcagcaactttgcgaacgttttcaatttaaacccgtttggctaaccaactatgaaatggcaatagatgaagcctatattgagtttgcacaagatgtgattgcccgtaacactggggaaattggtatgcaccttcatgcatggaatagtcccccaattgttgcgttaacggacaatgatcttcattatcagccttatttaattgaatatcccaaatcgcagatgcgcgacaaaattgcctttatgactgacttactggaaaataaattacaaacaaaaatgttaagtcaccgtgctgggcgttgggcatttaatgaaacttatgcgcagctattgattgaatttggttatcaagtcgattgctctgtcacacccaaagtcgattggcgttttactaaaggtgatccggcacaatcaggcggtacagattacagtaatttcccaagccatgcgtactttatggatgttaatgatatcagcaaagcaggggattcaacgttacttgaagtgccaatgagtattcaatataaacattccccttttatgaataaaattaagcaagggtacgataagctaagaggtaaacaacgctcaccttcagtgaattggttacgccctaaagggggaaatgcacaacagatggttgaagtggcacaaaaatctttagcccaaggtcactctcatattgaatttatgttgcactcttcagagtttatgcctggtggaagccctacttttagaacagaacaagatattgatggcttatataatgatttagaaacactatttaatttcttacaagataaagtacagggaatgacattggctgagtattatcaaaataaagtgcaggcaaaataa

SEQ ID NO: 308701 - DNA, 1353 bp, Proteus mirabilis
atgctacctgatctcgtctcagccatagtgactccctttatcgctattatattacttttttatgtaaattggcctcttgccttattatctctaaccccattacctattgcttttatggctcaacttctcatgttgcgtcgagccaataaacaaaccaatgagtggatgaatattcagaaaaaaattgctaatgaaataggagaatatattaaaggaatacgagaaataaaagcgtttaacttaacctcccatacttttggtaaattatctcaatctatcaattcctctgttaaatggataaaaaataatgtcaaagctagtacaggctcttggatggtatttagtgggatattaacagcgaatctcgttattatagcaccagtaggtgggtggatgtatttaaatcaagatattgatttatctacttatattttatttttaatgacatcccccctcgtacttgcgccgttattacgactaacatttgtgctaggagaacaagctcaacgaaaacaaaccttaaaacatatcagtatgatccttgaactttcagagcataaacaacatgataaacattttactctccctaaaaatagtgatattacttttaaagatgtctgtttggatcatggtgataaaccgatattagagaaaattagttttaatgcccaagcgggtacaacaactgcaattgtaggccacagtggtgcaggaaaatcctcattattaaaactaattccccgtttttatgattgtacttctggccaaataaaaataggtcaatatgatatcaactactggccagaaattgatttactttctcaaataagtgttgtttttcaagatgtatatctatttcatggaactattttagaaaatttactcatagcaaatcctaatgccttatttgaggatattatcaaagcaactaaagcagccaatattcatcatgttattgaaaaactcccagcagggtataatacattaattggtgaacaaggaaataaactttcaggtggagagaaacagcgattatcaattgcaagagcactattaaaaaactctccaatcctacttctcgatgaaattactgccaatgttgatgctgaaaatgaaattttgatctatcgcgcattaaagagtctatgccagaatcggactgttattatgatcactcataacctacatactattattaacgcagataaaattattgtgcttgataatggaaagattattgatacaggtacacacacccatttattaaaccaatgcccaacctatcaaaaattatggaatgattatagtcacactattcattggcaattaatccaggagaataataatgattaa

SEQ ID NO: 308702 - DNA, 372 bp, Proteus mirabilis
atgttagcgatgttgcacactctctcttctcaccaagcacaagtcaattggttacatgcagcggagcatggtggcgtgcatgcttttaaggaagaaatcgcacaagcaggaaagcaaattgaacaatatcaacaagccgtatggtatcgtctccctcgtactgaagatataatcaataaagactatcaatttgaagggttgatggatttaaccaagatacatgaatggctatcaatacctaatatgcagttctatttctgtggtccattaccttttatgcaatctgtcgctaaacaacttattactctcggtattgaaagcgataaacttcattatgagtgctttggccctcatactgttattagccaataa

SEQ ID NO: 308703 - DNA, 1539 bp, Proteus mirabilis
  misc_feature (1420)..(1429): n is a, c, g, or t
atgaatgtaaaagagatcattcgtcatgaaccatttggaacattactcggttatgcacctggtggtgttgcgatttactcttcagattacagcagtatagataaagaagattatgccgccaatgattcattccgtagttatattggtaatgagtatatggggcataagtggcaatgtgttgaatttgcacgccgttttctctatttacattacggggttgtttttactgatgtgggaatggcctatgagatcttctcgttacgtttcttacggagaacgattgatgacgatattttacccttgcaagcttttgcaaatggcagcaaacagccaccgacggtaggagcgttgcttatttggcaagaagggggagagtttaaagtcaccggtcatgtggcggttattaccgaagtattagaagataaaatccgtattgcagaacaaaatgtgatccacactaggttaccgcgaggtcaacaatggacacgagagttaccgcttaaagtgagtgataatggctattttatcgaagatacctttgataataccaccttgctaggttggatgatccaaacagaacctaatgcctacagtttacctcaacctaaagttgcccctgaattgttagctattcatgaggccaaattagccaacaaggggcaatttgctggaaaatggctagatgaaagcgatccgttagaaaaagcctatgtgctagcacagcacggtcatacgattaatcaagacagctatgaatatttcaccatttcagaaagtgctgagcatgaacttatacgtgctagtaatgaaatgcatttgatgtatttgcatgcaacggaaaaagtgctgaaagacgataatttactgcgtttatttgcgatccctgaagtgttatggccccgtatccgcctatcatggcaaaatagacgtcatcaaatgatcactggacggttagatttttgtatggatgagcgtggtatcaaggtgtatgaatataacgctgattctgcatcttgtcatactgaagccggattaattattgaaaaatgggctaaacagggtggcattaaagcaggttataacccgggtgaacgtctattagatgcgttatcagatgcatggaaacacagtgatgcgaagccatttgtacatattcttcaagatgatgataatgaagaagattatcatgctcgctttatgcaacaagcactgactaaagccggttatagcagcaaaattctgcgtggactaaaagagctgcattggaatagtcgtggtcagttaattgatggtgataaacgtattgttgaatgtgtgtggaaaacatgggcttgggaaaccgcgttagatcaactaagagaagagagagaacaacagtcacttattcctattcgtattggtgatcctgcgggagaagttnnnnnnnnnnggtttttgaacccctttggacacttattccaagtaataaagcgatattacctattttgtggcaacttttcccagataatccttatctacttgatactgagttcactttaa

SEQ ID NO: 308704 - DNA, 228 bp, Proteus mirabilis; identical to SEQ ID NO: 287916

SEQ ID NO: 308705 - DNA, 987 bp, Proteus mirabilis
  misc_feature (908)..(917): n is a, c, g, or t
gtgagtgaagtgatacaggcacaggtattagatccctatacacttcctttgtatcaaagacgcctcattgaggcgtctgcgggaacagggaaaacatacactatagggttattgtatttacgattactgcttggattagggggtgagtcagcatttcatcgccccttaagtgttgaagagatcttagtcgttacttttaccgaagcggcaacggatgaattacgcgcccgtattcgtcaaaatattcatcagttaaggctagcctgtatccgtcatcaagtagaaaatgacaataacgcttaccaaatattattagatcaaatcccgaataaaatggtggcggcgcaatggctactagaagctgagcgtcaaatggatgaagccgccatttatactattcatggtttttgtcagcgcatgttagccactaacgcctttgaatctggtgtattgtttgaacaggtgttgatccaagatgaatatgagttaaaaaaacgtgtctgcgctgatttttggcgcaggcactgttatcccctttcttatgatgttgcctatgcggtaagcgaaatttggtctggccctgagcaactgctgtatgaaattcaaccctatttacaaggtgaatgccccgaaattcaaggtattgatttcgacgctaaaaaagagactgttgaacagcgtcatcaagcagtcattgaggccattgataaagttaaagcactatggcgtcatcattgcaatgaaattgcagattggataacttcatctggtgttgataaacgcagttacagtagtcgtttcttacctaaatggatcgatgaaatcaccgcatgggccactccactcgaaaccaaaagttatcagttacctgactgtttaagtcgtttttcgcaagcaaccctacatgnnnnnnnnnnactacaaagggggctgcgcctgagcacgctttatttgcggaaatcgaactactttgccaacaaagcttaa

SEQ ID NO: 308706 - DNA, 1416 bp, Proteus mirabilis
atggacaaatatctaggcggtgaagaactgtcagaagcagaaattaaatctgcgctgcgtaaacgcgttctagataacgaaattatcctggttacctgtggttctgcatttaagaacaaaggtgttcaggcaatgctggatgcagttattgaatatctgccagcaccaacagatgtacctgcaattaaaggtattttaccagatggtaaagatactccagcagaacgtcattcaagcgatgaagagcctttctcttctctggcatttaaaatcgcaactgacccatttgttggtaacttaacgttcttccgtgtttattccggtgttgtaaactctggtgacacggttctgaacccagttaaagacaaaaaagaacgttttggccgtatcgttcagatgcatgctaacaaacgtgaagaaattaaagaagttcgtgcaggtgacatcgctgctgctatcggtctgaaagacgttactacaggtgatacactgtgtgcaattgatgcaccaatcatcttagaacgtatggaattcccagagccagtaatctctgttgctatcgaacctaagactaaagctgaccaagaaaaaatgggtatcgctctgaaccgtctggctcaagaagatccatctttccgtgtatctagtgatgaagagtctggacagactatcatcgcaggtatgggtgagctacacttagacgtgttagttgaccgtatgcgtcgtgagtttaaagttgaagcgaacgtaggtaaaccacaagttgcttaccgtgaaacaattcgcgaagaaattactgacgttgaaggtaaacacgctaaacaatctggtggtcgtggtcagtatggtcatgttgttattgaccttagcccattaccatcaggtggtgaagagaactatgtgtttgtcaacgatatcgttggtggtgtaattcctaaagaattcatcccagctgttgacaaaggtatccaagaacagctgaaatcaggtcctttagccggttaccctgttgttgatatcaaagctcgtctgcacttcggttcttaccatgatgttgactcctcagagatcgcgtttaaaattgctgcatctatggcctttaaagaaggtttcatgaaagcaaaaccgattctgttagagccaatcatgaaagttgagattgaaacgccagaagattacatgggcgacgttatcggtgacttaaaccgtcgtcgtggtatggttgaaggtatggacgatctacctactggtaagatcattcgtgcacaagtaccactggctgaaatgttcggttatgcaactgacctgcgttcacaaactcagggtcgtgcttcatactcaatggagttcttgaagtacaacgaagcgcctagcaacgtcgctcaggctattatcgaagctcgtaaagcgaaataa

SEQ ID NO: 308707 - DNA, 477 bp, Proteus mirabilis
gtgcgctctcgtgtcactaatttagtggaattaaaacccgatataactcatgaaaagttatgccaagcgattactgacagtttttttgactattatggtgagcgtgttgaagctgaaattatttcaccacaaaaattacctgatttaccgggttttgcagaaacatttgcaaaacaaagtagttgggagtggaattttggtcaagcgcctgcgttttcacatctattagataatcgctttaaatggggtggtgttgagctgcactttgatattgaacgcggtacgattattagaagccaaatttataccgacagtttagatcccgcaccattagaaaagctatcgcagatgttagttggacagcgttatgcttctagttcgatgaaaagactattagcgcaattaatagagcagtacccaaataaccaatcagagcttgaagagctgcaacagtggcttgttcatgcgctttcttaa

SEQ ID NO: 308708 - DNA, 1284 bp, Proteus mirabilis
  misc_feature (1225)..(1234): n is a, c, g, or t
atgcaacattctcatttcgatgcaattgtaatcggttcaggtcctggtggtgaaggcgcggccatggggctggttaaacaaggaaaacgcgtcgccgtcattgaacgttatgatcaagtcggtggtggttgttctcactggggaactatcccttcaaaagctctacgccacgcggtcagtcgtattatcgagtttaatcaaaacccgctctatagcgaccaatctcgcctgatcaactcctctttttctcaaatactacgccaagccagcacggtaatcagtcaacagactaaaatgcgtcaaggcttctacgagcgtaatcattgtacgatgtattcaggcgaagctgcttttattgatgatcatagaattagcgtacgttatcctgatggtacttgtgatattctcagtgcagataattttattattgccacaggctctcgcccttattgcccaccggatgttgatttctcacactctcgtatttataacagcgataccatactcgaccttgagcatgaacctcgccatgtcattatttatggtgctggggtcattggttgtgaatacgcttctatttttagaggtctaagagtaaaagttgatttaattaatactcgtgatcatctactgtcattccttgatcaagaaatgtcagatgcactctcttaccatttttggaataacggtattgttattcgacacaatgaagagtacgacaccatcgaaggcgttgatgatggcgttattgttcatctaaaatccggtaagaaagtcaaagccgattgtctgctttatgctaatggtagaacgggtaataccgatacgcttggtttagaaaatgttgggatcaaaaccgatagccgtggacaagtggcagttaatgcgcattatcaaaccagttgtgaacatatctatgcagtaggtgatgtgattggctatccaagcttagcctctgcggcttatgatcaagggcgcattgcggcacttgcgcttaccacaggcacctcggaaacgcatttaattgaagatattccaacgggtatctataccattccagaaatcagctctgtgggtaaaacggaacagcaactcaccgcaatgaagatcccctatgaggtcggtcgttcacaatttaagcatcttgctagggcccaaattgcgggtatgaatgtcggtagcttaaaaattctttttcaccgtgaaaccaagcaaattttaggcnnnnnnnnnngaaaccaagcaaattttaggtattcactgctttggcgagcgcgctgctga

SEQ ID NO: 308709 - DNA, 786 bp, Proteus mirabilis
  misc_feature (725)..(734): n is a, c, g, or t
atgagaacgcaaagtcattctcatatcattgaattgactcatgtatcccaacattatggtgataccaaagcacttgatgatgtgacattgactattcctgccggaaaaatggtcggcttaataggcccggatggtgtcggaaaatcgagtttaatttctcttatttcaggagccagagaaattcagcaagggcaagtgatagtacttaatggtgatatgaatgatgttaatcaccggcgagctgtttgccccaaaattgcctatatgccgcaagggttaggtaaaaatctttatcacacactttctgtttttgaaaacgtcgatttctttggtcgcttatttggtcaatcaaaacaagagcgagaagagcgcatcaatgatttacttgaaagtacggggctagcaccttttaaggataggcctgcaggtaaactatctggtggtatgaagcaaaaactggggctttgctgtgcattaattcatgatccacaattgctgatcctcgatgaacccaccacaggggttgacccattatcacgggcgcaattttgggagttaattaatcgtattcgtaaacgtcaaaccaatatgagcgtattggttgcgacggcttatatggaagaggctgaacgctttgattggctggttgcaatggatgcaggtaaggttttagccactggtcatgcggaagaattaaaggcgcaaacggcgacagatgaattagnnnnnnnnnngcttttattgagcttttaccggaagaaaaacgtaaaaaccatcaaaaagtga

SEQ ID NO: 308710 - DNA, 369 bp, Proteus mirabilis
  misc_feature (324)..(333): n is a, c, g, or t
atgagtaaaattatggagttaatcggcactatttttcgatttagttggcaggcgattaactttatcaggaaactaatcttaaacgttattttcttctttctactttttatgggtgtgggactctatttcatcgtccaagaaacgcaaaaacctaccgattatcaaggtgcattactggttgatttaaaaggcgttattgttgaccaaacagctaaccaaaatcctttagggcaaatgagccgagagcttttgggtgtttcgggtagccagttacaagaaaattcgttattcgaagtcgttgataccttacgcaaagcagcgacnnnnnnnnnncagcgactgaccccaaaattaaaggaatggtactaa

SEQ ID NO: 308711 - DNA, 447 bp, Proteus mirabilis
atgcgccctattttacttattagtactatgctactggcttcaataagtatgacttgtatggcagagatagctaccaaagctacagagctatctgtcgcgcaagagcctacaaacattcatcaaaatggctttgtctattgtgttgatggcagtgtaaatacctttaatcctcaactttcgagtagtggattaattattgatcccctagccgcgcaactttacgatcgtcttttagatgttgacccttatacctatcgtttgatccctgaaattgccgcacgttgggagtctctcgataatggcgcaacttatcgcttttatttgcgtaaaaatgtgtcattccagacaacaccttggtttacgcctacacgtaaactcaccgcagacgatgttatctttagttttgagcgcatgtttgtggtaaatacccctattttgatagtttaa

SEQ ID NO: 308712 - DNA, 243 bp, Proteus mirabilis
atggtggttgatactttaaacgccttaaatatcgagtatgcaccttctcacgccaactttatttttcataaagtcaaaggtgatgtgaaaacttatcaagagagaatgaaagcggcaaatattatggtaggacgtgagtttcctcccgcattaggttggagccgtttgaccttaggaacccctgaggagatgagttattttgtcgcgacattaaaagaatttagaactaaaggatggatataa

SEQ ID NO: 308713 - DNA, 1449 bp, Proteus mirabilis
atgttagggtggagccatggtagctacttactgctacacagcccattattaaagcaaaatgcggatctgacttggtatagcaatatgctcagtgattatcagcctagtgcagagggcacaacatggaagctgacgttaaaaccagatttgaaattttctgatggttcccctttaaccgcaaaagatgttgcctttacctataacaatgccgcggcaagtggcggtaaagtggatatgggaaactttctttctgcaacggcagatgatgatttacatgtcactattgctttaaaagcgcctcaaagtacttttgttaatgtattaggctcgctaggcattgtttcagctgataaatatgatgaaaaaacctatgcacaaaagccgattggtgccggtccttatcgtatggtcagttttcaaccgggtcagcaactcatcgttgaggcaaacccttattatgcgggtaagaaaaatgatttcgaaaagcttatctttgtttttcttgatgaagatgctgcttttgctgccgctcaaagtggacaactaggggttgttcgtattcctcctgccaccgcagccattgctaaaaatttgcctaatgtaaaattgtgggaaagagccagtgttgaaaatcgtggtatcgtctttcctatggtgaaatcaggtgagaaaaatgcacaagggtatgatatcggtaatgatatcactgcagatatcgccatccgtaaagcgattaactatgcccttaaccgccaattactggcagagcaagtattagatggatatgcagttcctgcttataccggcgtaaaaggattaccttgggatcaaaccgaggccgcatttaaagatggtgatattgaaaaagccaaacaaattcttgatgatgcgggttggaaactcaataaaaatggcattcgagaaaaagacggtttagaagcgaaattgacactctggtacaccagtggtgatgcaactcgtcgtgatttagcagaatcaattcgtgcgttagtgcaacctcttggcattcaaatggatcttaagtcaggaagctgggataccgtagagcgttatatgcactcaaacccgactttgtttggttggggaagtcttgatccgatggagctctatcatcactatagtatgaatgccgcaggtgtgggttactataatcctgggtattataaaaatcctgccgttgaaaaacatttacaagcagcattagatgcaccgacatggcaacaagcggtcccacattggcaagcggtagagtgggatggtaaaaatggcgtcggtatcaaaggtgatgctgcttgggcttggttaatgaatattcagcatacttacttaaccgatccttgtgttgatttaggcactggcgctccggaaattcacggttcatggtcattattaaatagcgtagatacttggaagtggacttgtcagtaa

SEQ ID NO: 308714 - DNA, 651 bp, Proteus mirabilis
  misc_feature (7)..(16): n is a, c, g, or t
atgcatnnnnnnnnnnataatgcattgtctcatgtgaataattcgtatcttcttaagttagacttagagaatttttttaatagtattacaccggatcttttttggagtgtatggtcaagaacttggtctttaccatcaaaagaagaccaattttttttagagaaattgattttttggcgttttcagggctctttaatattaagtgttggagctccaagttctccttctatatcaaatttttgtatgtattattttgacagcgaagttgaagctatatgcacgaaaatgaaaataacttacactagatatgctgatgatcttacattttcatcgaacgtaaggaatatattgtttgaaattcctatgttaattgaaaatatcttgaatgaacaattcaaaggtttgcttagacttaattcgagtaaaactatcttttcatccaaagcacataatagacatgttactggcattacacttaacaatgatggcaaaatttctttaggtagagatagaaaacgatatatcaagcataaggttcatttgtataccttgggtatgttagatgctacagaactcaatcacctaaagggtatgatcacatttgctagattcatagagcctgcgttctttaaatcgcatgaacaggaatga

SEQ ID NO: 308715 - DNA, 354 bp, Proteus mirabilis
  misc_feature (289)..(298): n is a, c, g, or t
atgacagaatcttttgctcaactctttgaagaatccctaaaaacaatcgaaactcgtccaggtgcaatcgttcgtggcgttgttgttgctatcgataaagacgttgttctggttgatgcaggtctgaaatcagaatctgcgattcctgtagaacaattcaaaaacgcgcaaggcgaattagaaatccaagtgggtgacgaaattgacgttgctctggacgcggttgaagatggcttcggtgaaaccgttctgtctcgtgagaaagctaaacgtcacgaagcgtggctgnnnnnnnnnnatgctggaaaaagcttacgaagaaaacgaaactgttgttggtatcatcaacggtaa

SEQ ID NO: 308716 - DNA, 396 bp, Proteus mirabilis
  misc_feature (314)..(323): n is a, c, g, or t
atgagtcaggtatataactttagtgcaggtccggccatgttaccggcagaagttcttcgtcgtgcagaattagaattatgcaactggcacggattagggcgttctgttatggagatcagccaccgcagtaaagaatttttggaggttgcccatcaggcagagcaagatctacgggatctactcaatgtaccagaaaattataaaattctgttctgtcatggtggcgctcgtggtcattttgcggcattaccgcttaatttattaggtgagaaaaccaccgctgattatatcgatggagtattttatgtcggggnnnnnnnnnngatggaggatattgggctaaaagtgctgccgatgaagcggaaaaatattgttcacctaatatcattaaaataa

SEQ ID NO: 308717 - DNA, 540 bp, Proteus mirabilis
  misc_feature (447)..(456): n is a, c, g, or t
atgcagggtgcaatgacacgaattttattgggaagcgttatgttcagcgctgctatttgtcaggttcaagctgaagcactgcagcctgatcctgcttggcaagaagggcgactcgcaaatggtttccaatggcaaattttacaaacaccacaacgtccaaatgataggatccaaattcgcttattagtgaatacgggctctttatcagaaaagcgcagtgaaacagggttttcatctctggtgtcaaaactgaatgtgttagaaaacaccggattaacaccagaaaaacgcgataatctttggaaaaatgcattcgatcctgattatccattgccaccgatgatcgtctcttatgactttacggtttataacttaagcttgcctaataaccagcctgaattattaaaagatgcctttgcattattggcggggatagcaaaaacggcnnnnnnnnnntatagcaaaaccggcacaatatacagaagatgcggttcgaaatgcgattcaatcaccgcttccggtggtgacttttcccgctaa

SEQ ID NO: 308718 - DNA, 204 bp, Proteus mirabilis
atgatggaaactgtgttacaggtgagtgcgaaacggacccatcattttgatatcagcaatgtaacagcaaaaacgtttagctatgcttgtcgctgccaagaaatacatcagttaactcttcgccgacacaataaagtacaacgaggagaaacccagtatcgttgtcgtcattgtcaggcgattttacaattaattaaagagtaa

SEQ ID NO: 308719 - DNA, 618 bp, Proteus mirabilis
  misc_feature (604)..(613): n is a, c, g, or t
atgaaagtgaaaaccaaattattatcattacttgtgatgggtgctctcagtgcccctgtattggcagtaacacccgccaatacattgattgtagtacaaggccttgatgatattgttagccttgatcctgccgaaagtaacgaattatcaagtattcagaccgtaccaagtttatatcaacgtattgttcagcctaaccgtgacaatccagaaattaacgagccaattttagtcgagagttggcaggctcaccctgaacaaaaatctatcgtctttaaaattaaacaggatgcaaaatttgcctccggtaatagcgtacgcccagaagatattatcttctcttaccagcgtgcagtgacgatgaataaatcccctgcttttattttaaatgtgctaggttggaaagcagataatattaataccctattgaaaaaagtcagtgataaagagattgaagtacgttggacagcagatgttagccctgatgtggtacttaacatcctttctacaccaatcgcttctattgttgatgagaaattgattgccgcacatattaaaaataatgactttggtaataattggctaaaaatgaattcggctggtnnnnnnnnnngttag

SEQ ID NO: 308720 - DNA, 1128 bp, Proteus mirabilis
atgatattacgatttatattttctattgtattgttgtattcatcaatggcttactcacagcaagttgtaacacctgttactgacctacttggcagaaccgtgaatgtcaaattaccggtacagcgcgtcattttgggggaaggacgacagctttatttagtggctatgtttgataaagaaaatccagcacaaaggatagtcgcttggcgaaaagatttaatacagtccgatccggccacatggcaacagtaccgacaacaatttccacagttggcaaaaatccctacctttggtggcagcgaacaaggaacgtttgatatagagcaggcgattaatctgcaacctgatgttatcatcatgaatatggacgcacgcaatactattgttgatgctggacacgaagctgcactagcccgagcgggtattcccattgtttatgtcgactttcgctatgatcctattgcacacattcctccaacagtgacgttatttggtaaattatttggccaaccagatcgcgcagaagcttatttaacattccgtgataaagagttacaacgagtgacatctcgagttgaacaattacagggggcattgccaaaagtatttttagagcgtcttgggggttattcagaagagtgctgtatgacctttggtaaagggagttttggccgttttgttaaaatagcggggggggataatattgccgacaatcttgctccgggaaccttttttacgctaaatccagaaaaagtggttgttgcaaatcccgatattgtgattattaccagcggcaattttcaggcatttgtgccgggtggaaagtggatcccacttgggccggggattaatattcaacaatcaaaacaccgactcgcatggtttacgactcgccctgcttatgttgatagtaacgctcgccgtcgtggcgcattttttgctatttggcatcagttttataatagtccctatgatgttattgctatccagcagctagctaagtggatacatccccaattatttgctgatcttgatcctgatgacacattccgtcgtttacatcaagaatttctacccatctcatatcagccgggatatatgattgatttggaaaaagaggggaggtaa

SEQ ID NO: 308721 - DNA, 348 bp, Proteus mirabilis
ttgattacccctaagaacactacattaattattcctttcttattgttagttggctttacacaaggcatgattatgactcctatgctgaatttagtgttagaaaaagtgaagcctgaacttgtagggattgcttccggattaacggcaacattacaacaaattggggctgctataggggtaacatctgtttccatcattttgcaatttagcctcacacaggttatatcaaggaatataattgaacattataagatagcgtttagttttagtatgttgtttaattttataatggctatatgtgcggcttttttcttgaaaaaaataacaaaccataagaatacgttataa

SEQ ID NO: 308722 - DNA, 327 bp, Proteus mirabilis
gtggggctagataaaataaaaaatcagctttcactggaaacagattggacaacacgcttatccggtggtgaacaacaacgtcttatctttgcccgtttattactcaataaacccgatcttattttattagatgaaaccacatccgctcttgatgaacaaaatgccctacatatgttgttattacttaaacagcatctaccaacctcgggcattgtcttagtcagtcatcagcgtttcactcacgctattgccgagcaagtaatttcattacaagcgccgactgcgtcctcctctcaatcagctggagttactgaatatgtatcgtaa

SEQ ID NO: 308723 - DNA, 1014 bp, Proteus mirabilis
atgacgagtaagtcgggaaatcaacctcacacagatgaggcgcctgcaacgcttttggcagatacccatgatcaattaagccagcaatctattgatgaacaagctgcgctttggttcacccgtcaacatagtcagcaaatgagttcacagcaacgacaagcctttaaacagtgggtagcagataaagataatcaacaagcttatcaagctatcgcggaaatttggcatagttgtgaagccttaccacgccctactattgtgcctatagaaaaaaggaaatcttcactctggcgcccctttattcacactacagctacactctgtttagttgctgtgttatatcttccttatagtcatttacctgccctgttaatggataatatgaccttagccaccagcaattttcctaaagagatgaccctcgcagatggctctaaagtttttttaaatagaaatacacaggtacgcgtctcgtatgtccaaacccaaagacgcctttggttagataaaggtgaggcttattttaaagtaaaacccaatccttatcggccattttatgtccatgctgatgagcgattaattaaagttgtcggtactgaatttgaagtgagtcgttatcaaaataatcaaattagtgtcgccgtacatgaaggcattgttgaagttaaagccacagaaaaatcccctgcgacttacctatatgctggctctcaagcaattagccaatcaaccgataatcaatttgtcatttcctcagtcaatgctgattctgtaggaagctggcgttttgggcaactccatttctttgaacaaccacttggtgacgtgatcactaaattaaaaccttatctggatatcaacgttcatatctcatcagccgatgtagccaaaataaaggtatcaggtgtggcaaatattaatgatgcgaaaagctttattactgcacttccgctacttttaccagttaatgttatttttactgataaaaataatgtgttaattatcaataagtaa

SEQ ID NO: 308724 - DNA, 516 bp, Proteus mirabilis
atgagttacttttttgcccaccagcatagtttacaagtggcttttgttgcccatgcattagcggtgattaaaaatcgtaaatttgatggcaatgtcaacgccgagcgtattgcactacaagcaatgtatcatgatgccagtgaggttatcaccggtgatatgccaactcctattaaataccacaatccacaaattgctcatgaatataaaaaaatagaaaaatatgctcagcaaaaattgattgaaatgttacccgaagagttacaagaagattttcgccctcttatcgatgagcaattacatagtgaggaagaaacttttattgtcaaacaagctgatagtttatgtgcctatttaaaatgccttgaagagttagctgcgggtaatagcgaatttaatttggccaaaaatcgtttagaaaaaacgttagcagaaagacatagccctgagatggactattttatgaaagtatttgtaccaggctttagtttatccctagatgagatcagtgagtaa

SEQ ID NO: 308725 - DNA, 579 bp, Proteus mirabilis
gtgacagataaacatcttgagactggcgtttataacattccatatacagttatcaccaatacatggtctgaatatggtggaggccataaaggcaataatacctctatcgtagcaattaaccccgtcactattactattaaagctcgaggctgtaccgtaaataccaaaaatctcacctatgaattaggtgatatctcaatgcgagatatggcagccattggttcaacatcaaaaagtcaggctaaacccatctctgttacatgcgatagtaatgtgcatttatatgccagcatgaccgatcagtctacctattctaataatacagatatcctcacactgacatcagactctgatgcttctggtattggtattcaatttttctttaatgataatccaactcccgtggtgtatggccctgatatcagtgcgataggacaacctaaccaacgtttactccatataacaacttctaacaacgaaaactacatattaaacctgtcaactcgctatatcacgactgggacactaaaaccgggtaaagcaaacggattagccagtctcactttttcttatcaataa

SEQ ID NO: 308726 - DNA, 516 bp, Proteus mirabilis
  misc_feature (501)..(510): n is a, c, g, or t
atgacacgctctttttatttcttcacattgctggtttctcttctttgtatcccgagccaaatggcatgggctattgcagatccattagtggtaacccctccacctatgaattttgatggtgccgccgatggtactcccgcaggaacgcccatcacgtcaacttggataggtgaaacctctgtccataatggtttcaaatgtgagaagaaatttttgcaaaaatgttgggttgaaaccctctatgctaatgctactggttcaaaaattagcgggatctactattacgaaggtagtaatcgttatcctgtttattcactccccggagttaaaggtatcggctatgcttttggtttaaaagataacaatgatagtgttgcttacgtacctattgatgttgataacggttcgggtgcaacggtgatttatcctgcagtaggctctaccgttaaccataatgtggatcgcgtttcactgaaaggcaaagtcgtctttgtggtgacnnnnnnnnnntggtga

SEQ ID NO: 308727 - DNA, 258 bp, Proteus mirabilis
  misc_feature (230)..(239): n is a, c, g, or t
atgcgcactccttctaagcaagaagacttggttaaagcatttaaagccctgctgaaagaagaaaaattcagttcacaaggcgagattgtaaccgcattacaagaagctggttttgataatattaaccagtctaaaatctctcgtatgctaacaaaatttggcgcagtaagaacgcgtaatgccaaaatggagatggtttactgcctgccaacagaacttggtgtaccaannnnnnnnnngtgtaccaacagcaagtag

SEQ ID NO: 308728 - DNA, 1488 bp, Proteus mirabilis
  misc_feature (1461)..(1470): n is a, c, g, or t
atgttccatatttaccattcaaatcaattatcactacttaaatcactgatggtacattttatgcaaaatcggccactatcgcagtggttacaaatccaattagcagaaagtttgggtattgctgctaatatccgttatccattacccgctacttttatttgggaaatgtttactcgggtattatcaggtatacctaaagaaagtgcgttttctaaagatgccatgacatggaaactaatggcattattgcctaattaccttgatgatccggcatttaaacccttgcgacattatcttaaagatgatgaagacaaacgtaaattacatcaactagcggggcgtgtggcggatctctttgaccaatatctggtttatcgtcccgattggttgtcggcatgggaaaatgatcaactaattgatggcttgagtgacaatcaatattggcaaaaaacactgtggttggcactgcaacgctatacagaagatcttgcgcaacctaaatggcatcgtgctaatctttatcaacaatttatttctactttgaatgatgcgccagtaggggcgcttgcgcactgttttccatcgcgtatttttatttgtggtatttcagcattgccacaagtctatttgcaagcactgcaagcaatcggcagacataccgaaatctatttattgtttactaatccttgccgctattactggggagatattcaagatccaaaattcctcgctcgtctaaatagtagaaagcctcgacattatcagcaacttcatgaactaccttggtttaaagatgaacaaaatgcatcgacactatttaatgaagaaggggagcaaaatgtcggcaatccactattagcgtcttggggaaagttaggtaaagataatctctattttctttctgagcttgaatatagcgatgtgttagatgcttttgttgatataccaagagataatttattacatcaacttcaggccgatatactcgatttagaggatttttcacaaataggtcagacgcttgaggattaccaaagtagtgaaaaaaaacggatcatcgccaatgatgatcgttctttgacctttcatgctagccatagcccacaacgggaagttgaggtattacaagaccaattattgcatctcctcgagcaagatgctgatttattaccgcgagatattattgttatggtggcggatattgatagctatacgccctatattcaagccgtatttggtaatgcgcccgcagagcgttatattccttttgccatttcagaccgaaaagctcgccaagtacatcctgtcttacaagcttttatcactttattagaattacctcaaagccgttttaccgcagagcaagtgcttgcattacttgaagtacccgccttagctgcacattttgccatttttgaaaatgagttgaagctactacggcgctgggttgaagagtcaggnnnnnnnnnngagacagttggggattag

SEQ ID NO: 308729 - DNA, 147 bp, Proteus mirabilis
atgaacccattaaaagccggtgataaggcacctcaattcagtctgcctgatcaagatggagaaatcattaatctgtctgattttgctggccaacgtgtgctcgtttatttttatccaaaagcgatgacaccaggctgtacaacgtaa

SEQ ID NO: 308730 - DNA, 156 bp, Proteus mirabilis
atgtcgattgcagaaagactgttatctgccagattaaaagcgggtttaagtcaagcggaattagcggataaagtaggagttagtcagcattgcacatgcagtcggtgtctctgctcactggttacagtttggagcgccagacgaaaacggttctaa

SEQ ID NO: 308731 - DNA, 216 bp, Proteus mirabilis
ttgacgaaaaaagagcgccaaaaacctgaaatcatcaaaggttctcgtaaacgtcgtattgcgatgggatcgggaacacaagtgcaagacgtcaaccgcttattaaagcagtttgatgatatgcaacgtatgatgaaaaagatgaagaagggcggcttggctaagatgatgcgtggcatgaaaggtatgatgccaccaggctttccaggtcgctaa

SEQ ID NO: 308732 - DNA, 279 bp, Proteus mirabilis
atgtctccttctttagcagaagaagtgatcccacaaaaggatggttcactattagtggatggcacaaccaatatccgagatatcaataaagcctttgcttgccatttaccagaaaatgaagctcgaacaattaatggggttattattgaagagttgggtgatttacccgtagtaggtgccaaaataacgattgatggttatgaatttgaagtgttggaagtgcaagacaatgtgattaagaaagccttgatccgccatcttacgccctctcgtcactag

SEQ ID NO: 308733 - DNA, 537 bp, Proteus mirabilis
atgaaatggattatgaaagttggttatatgaaacctctagtagcttggatgagtgaaatgcttgagggggatgagctacatgaacccatgacgctctctcaagtggtcaaccgttttactctgcgcgatatgatggagcgtggtgaaaccgatgaagagttagatcaagtgcaattaatgacacttcacgcctcaaaaggactggaatttccacatgtttttctggttggcatggaagaggggatcttgcctcatcaaagtagtatcgatgaagataacgttgaagaagagcggcgtttagcttatgtcggtattactcgagcacaaaagacattaactttcacattatgtaaagagcgacgtcaatacggtgaattaattcgtccagagcccagtcgttttctatatgaattgcctcaagacgatctccattgggataccaataaaaagaaagtgttaagtgctcaagaaaagcaagaaaaagggcaaaaaggggtcgctggacttaaagcgatgttggcgagacataaaccttag

SEQ ID NO: 308734 - DNA, 1536 bp, Proteus mirabilis
atgcaatctactcactcaaaatcaagccgaaccttttttggccatccataccctttaagctctctgttcttcacagaaatgtgggagagattttctttctacggtattcgcccattattaatcctatttatggctgcaaccgtttatgaaggtggtatggatattcctcgagagcaggcatctgctattgtgggaatttttgctggtggtgtttatttaacatcattgccaggaggttggctggctgataattggttgggacaacgtcttgcggtttggtatggctctatctttattgcattagggcacctttctatcgcactttcagcgttttggtctcagaacctattttttatcggcttattgcttatcgtattaggtacaggcctatttaaaacctgtgtcactgttatggtgggaaccctgtataaaaaagatgatacacgccgcgatggtggtttctccttgttttacatggggatcaatatgggctcatttatcgcaccactgatcaccggcttcttagtccgtgattatggctggcattggggctttggtattggtggtattggtatgctagttgcactactgatcttccgcttttatgccgtaccgacaatgcgtcgctttgataaagaagttggcttagattcaagttgggatcgccctactgttgtgcgtcgtaatgtcggacaatgggtattagcacttgctgtgatattaattgccattgttggtttaattatttcaggcactattccatttaatccggttattgttgccaattttatggtttatgtgatctccggcagtgttatcgcctattttatctatttattcctatttgcaggattaagtagtagtgaccgttctcgcctgtttgtttgcttcctattattagtttcagcggcactgttttggtctgcattcgaacaaaaaccaacctcatttaacttatttgctaacgactatactgatctaaattttatgggctttgagatcccagcggtttggttccagtcagtcaatgcgctatttattattattcttgcccctgtatttagctggttatggccaatgctagcacgcaacaatatgaatttaagtagcatgagcaaatttgtgattggcattttattcgctgcaggtggctttaccgtcatgatgtacgcctctgaaagcgtgcttgcaacaggcagtggtgtttcaccattatggttaatttccagtattttattgctgaccctaggtgaattatgtttaagccctataggacttgcgacgatgaccattttagcgccagcaagaatgcgtggacaggttatgggtttatggttctgtgcgagtgcattaggtaacttagccgcaggtttaatgggtggaaatattcgtcctgataaacttgatgttatgcctgatttcttctctcacgtctctatagcattggttatttgtgccgttgttcttgcagcattaattattcctgtgcgtaaactgttacaaagtgcagatgataaagagaatgcgcaagcataa

SEQ ID NO: 308735 - DNA, 450 bp, Proteus mirabilis
  misc_feature (417)..(426): n is a, c, g, or t
atgaagttactattaacgccgtatattcaaaaagaattgggggttgtgttgttgaaacctggtgctgagttgcttgagcaatttagaaaccatcagcgtgtgatcatcagtgatgtaccacagagtttagatgtgttgccctcaggcgcattaaccggtgatgaacagccgattttaaataatcagcacattgttcaatttctcaatagcaaaaaggtgatccacaccatagataaagtggcaccaatggatacgtgggtcgctcatcatattcattgttgtcagattaataacgatgcagataactatcatcatcatgaattggtgaccacatttcatgaagcgggtgtgatccgcacttgttggtatcacgataatcatattcctgtctcttatacacatctccgagcccacgannnnnnnnnnaaaatcgtattgattggatgttag

SEQ ID NO: 308736 - DNA, 447 bp, Proteus mirabilis
atgctgtttgttcccttagggggaggtggtttactttcaggttcattattatcaaccaaagccctttcgccacattgtagaatttttggtgttgagcctttagcgggaaatgacggacaacaatcattacgcaaaggtgagataatttatattgatacgccaaaaactattgcagatggcgcacaaactcagcatttaggcgattatacttttgagatcattcgcaacaacgtagacgatattttaacagcaacagatgaagaactaatttctgctatgcaattttatgctcagagaatgaaaatcattgtagagcctacaggctgtttaagtttagctgcagctcgtcaatttggtgataagttaaaaggcaaaaaaattggcattattatcagtggtggcaatgtcgatattatgcaatatggtcattttttatcacaaaaataa

SEQ ID NO: 308737 - DNA, 444 bp, Proteus mirabilis
atgacagcaggagggctggttaatgagccaatttctcgacatcccaccaaacgtacccatatggcagtgcacccaatgggaaaacctgcggtgacgcattatcgtgttatggaacatttccgtgcccatacccgcttacgtttgcgtctagaaaccggtcgaactcaccaaattcgtgtccatatggctcatatccatcatccattaattggtgatcaactgtatggtggtagaccgcgtcctttgaaaggggctagtgaagaatttcgtgagacgttacgtcgctttgaccgacaagcactacatgccacaatgttacgcctttatcatcctattaccggaattgaaatggaatggcatgcaccgttgcctgatgatatggtagaacttattcgcgtactaaaagtggacgcagaacagtttaaagatgaaatggactggtaa

SEQ ID NO: 308738 - DNA, 183 bp, Proteus mirabilis
atgaatatgattaaaagaaaacccgcagctaaaacgcgtaaaaaaacacgtgaagagctaaatgcagaaggacgtgaacgtaagcgccagaaaaagcatcgtggcaatcctgctggtaaccgtcagcaggaagcgatgaaaaaagagcaagcgcaaaccaatgaacagaaagatccacgatga

SEQ ID NO: 308739 - DNA, 927 bp, Proteus mirabilis; identical to SEQ ID NO: 307340

SEQ ID NO: 308740 - DNA, 381 bp, Proteus mirabilis
  misc_feature (346)..(355): n is a, c, g, or t
atgggtgatctgctgatccacgaaggtgccccatgtgccgcacaacaacatgcagcaaaagtctttaatgccgataaaacttatttcgttcttaatggtacatcttcctccaataaagtcgttcttaatgccttattggcaccagatgacctagtattatttgatcgtaataatcataaatcaaaccatcacggagcattaattcaagcaggagcaacgcctgtttatcttgaagctgcacgtaacccatttgggtttatcggtgggattgatgctcattgttttgaagaaaaatatcttcgtgaactcatcaaagaagtcgcccctacacgtgcaaatgaaaagnnnnnnnnnngccgttatccaattaggtacctatga

SEQ ID NO: 308741 - DNA, 1332 bp, Proteus mirabilis
atgaatggtactcccaaacaacgtacacaagccgctgatttattcgcgcgccaaggtgaaaaccgtgatgtgctggcagaagcattaaaacatgaaacctcaaaagcagttatcaagagcattgaaagtgcgctacaacgtttttgtgttgctgataatgcaaataccgttgaagccattaaagcgcctgattttactcccttagaagacacaccattacccgatagtgcccgcgatattctggtgaataacttcaatgaaatgttagtaaaagcaaaagaaaatgctgaacgtgaaattgaagaaaataaaacgtctaaacactcttataattgggcacaacgccattataaagatctctctaaaattgatgaaaaacagtgtcgcgcattagtggataaactcaatagcggacaaggcactattcaagtcaatgagatccaaataattaaacacaaaaaccgtattcctaatttacctgaatacacctttttccatgccgtgcgcgtgatcaccaataaccgccaacatgcggatcacttttcctctcactattttaatagtgatattcctgaacgtttattgagtgatattgaattacgacacgttgaaaatgtattagaacgatgtcatttcaaacgtgcaacgcgtatcacagcggcgctgtgcttagaatcttatcaagatggcttacgtcgtttccgtaaaccagaacaagtttggcctttcttctctcaacatactgattatattgcagaagcgctaaacttaatgccaaatcaaagtgaacaccgctatcgccaatttgaaacttcacaaggtattgaagtattaagccgttttccaaccattcctgcacaattcgttccgcgtatcatggaattggctctaggtgaaaataaaacacaccgagtttcagctcagaaattattagaaaccttaccgaatattcacttaagtgcacaagaaggcttaacttcaagtaaacaagaaattcgagtcaccgcgattgaatggttagcacgtttaaataaccctgactcattacctgcccttaatgccttactgaaaaaagagaaacgcgaagtagtacgagccgctctgctcactgcgttagaacaattaggtgaggatatttcaagctatttatcgccaaagacattattagcagaagctgaaaaaggtctcaaagccaaaccacccgcaagccttgcttggtttaacttcgaggcgatccctgcattaacatgggaaaacaaaaaagcggttgatcccgcgattattcgttggtggattattctcgccgtcaaattaaaaatgccaggggggtaa

SEQ ID NO: 308742 - DNA, 972 bp, Proteus mirabilis
atggggaaagtgttacttattgtattaacgatgcttggttggttggataaaaatgaccaaacctattatatccttaactttatctttaatacggccttctattttatgccggtatttattggtttctcggcggcgaaaatatttaattgtaaccaatatttagctgctatggtctgtttagcgatggttagccctgaatggacaagcttagttaaagccggtgagcctgtcgaatttatgcatattcctgtcgctttggttaaatattcatctcaactgatccctgctttaattactgtttggatgatgtcttatatagaacgctttattgttcgtattgtgccagaaatggttaaagtatttatggtgcctttattggtgattttagtttcgacacctattgcgttgattgcggtcggtcctgtcacttcatggttcgctcaagtaattgctgatggggtgatcttaatccaagagcacaccggttttattgctattccattattagtggctatttatccatggttagtatctattggtatgcataaagcacttagtcctgtcagtattatgttagtggagcaaaaaggttttgacccgattattcgtgttatggcgctatgctccaacatgtctcaggctgctgcttctttagctgtttctgtgcgtactaaaaacaaaaccttaaaacaattagctttttctgccagtattaccgccttttttggtggtataactgaacccgctatgtatggggttaacctcaaactgaaaaaaccaatgtacgcttgtatgattggtggtgctattgcaggattatttgctggtattgttaagttaaaagcgttcgtctatgtcactccggggttattaagtttaccaatgtggatatctgatacagataaccaagtggtaaatgcaataatcaccttattgattgccagtgtagttaatttcacctctacaaggtaa

SEQ ID NO: 308743 - DNA, 1047 bp, Proteus mirabilis
ttggcttatcaaaaagtccatcaacccgataatagctatcagcaatatatttctcagcgccaaacggtggatatgttgatccaagatgcattagaggcatttaaatcgccagcgcgtgtttctgacgctggatttacgggaaaactaccttctaatatggaagtcgtagcacaaaagctacaacaagcttataaattagagccttatcgcttagatttactatttagtgccgccagtgcttatgtctataacaatcaaattgagcgtgcggtaacgatttataaacaaattttagaagctgcaccggatgatattgatgcattaatttatgtgacttcttggacgcgttttgaaggtaaagataaagaaagtgaagcctattttaacaagttaaaatcccttaatccggcaaaagctgaagagctaagccgcttttttgctcaaattgatcgtgtaagcaaaatgccattaagtgataagttaacgccagcagatttggcaacgctaaataaaaccaaaggaaataatgccattgtgacattgggttatgcacttaatccagatggtacgatgaatcagatcttgattgatcgtttaaataaaacccttgaagtcgcaaaacagttacctgatgcaatgattgttgtgacaggtggtgtgccgaaagcacatcaaaccgaaggtaaattaatggcggattggctagttaaacaaggtattcccgcagagcgaattttccaagacaattatgcacgctcaacggtggagaatgcgttatttagccgttatgcattaactaaacaccgaattaaaacagcggtgattattagctctggtagtcatgttcgtcgtgctgatgttatttttacggttgcgagttggcaaagtggccccagtgatatcacctatttaacggtagtagcccccgataagccattagccgaattacaaaaaacatcaaaatctgatttacaaggtatttatcgcgatggcttaaaagcattaggattatggagcttccgtagttatccattagaagagcgttga

SEQ ID NO: 308744 - DNA, 1500 bp, Proteus mirabilis
atgttgcgtgaagggcaatttgagtatgagtttagtgcggggcaatatgatggtggtatcacgacagattccaaaaaaagtaaatttgctttaggaacgtttagttatggtatcaataactcaattactgcatacggtggtttattaattgccaatggttatacctctggtgttatcggttctggtgtttctcttgggttattaggtgccttatctgcggacgtcactctcgccagagctaatttggataaaacttatcacggtcaatcatatcgggttcgttattctaagagtttattatctacagggacttcgtttgatttaaccgcattacgttattcaactaaagattactatgactttagtgattacaataactcaggttatgaattgcgagaaggtattgcaccttggttaagccaacgtcagaaatctagttttcaaacctcaatttcacaatcattaggaaaatacggttccatgtatcttcgtggtgaaaccagccgttattgggggaatagccgtgttaataatagtgtcacattaggctataacactgttctgaaaggtattgcatttaatatagattattctatttctcgcctaaaaagtgatgacaatacatggccagaaaatagacaaattaattttaatatgaatatgccactgagtgtgttctcaaatgcaagtggcttgcaaaatatgaatgcaagctatcttctgacacatagcaatgatggaagaacttcgcaacaagccggtttaaatggctctgcatttgataatcaactctcttatggtatctaccaaaatacagataacaaggcagatagttatagtggcaatatgaatatgagttattcaggaagtaaaggaacgctttctgggggttatagctatgggaaaaatagaaatagctttaatggtagccttattggtggtgttgttcttcactcaaaaggagtgacattatcaaggatgttaggtgacagtattgccatagtgagcgcagataaagcaaagggcgcagaaatcaatggaaatgtgaaaatagatacatttggtaatgccattgtccctcaattaagtccttatgatacaaacagtattagcgtaaatgtcagcacattacctgatgatgtgacacttaatgaaacgtcaatgaaagtctatccaaccgaaggggctattttagcaagacaatttcaaactaaagtgggttatcaggttatttttgatataaaaacagcgcaaaatatagcgataccttttggtgcaatggcttctttgacagatgaaaaagataaacaggtaaataccggtattatcgatgcctatcaatctctttatatgagtgggttacccaatgatgggaatgtcgtggtgacttggaataacaatacgggcaaacattcatgtcaatttagttattcagagcttgaaaagattgaagtatcacaacaaaacccaataagaatggtgaccgttaattgtcaataa

SEQ ID NO: 308745 - DNA, 219 bp, Proteus mirabilis
atggcaatcataggaatattcttcggcagtgataccggcaacactgaaaatattgccaaaatgcttcaagaaagattaggcgcggataatgccgaagttcatgatatcgcaaaatccagtcaagaagacatcgaagcatttgatattctattactaggtattcctacctggtattatggtgaagcacaatgcgattgggatgacttttcccaacattag

SEQ ID NO: 308746 - DNA, 738 bp, Proteus mirabilis
ttgttagcattacaaaatcttgcttatcaagcggttccagcctatccgttggatatcttggtcgctgaaagccaggggatgattggttatatgatgatgcagaaaatcaatcaaaataatcctacgcaagcaattactacagtaatgactcgtgtttctgttgatattaatgatgaggcttttagagaaccgagtaaatttattggtcctatttatgaggaagcagaaaaagaagaattaataaataaatatcaatggacatttaaaaaagatgggcaatattatcgccgtgtcgtaccttcaccagcacctcaaaaaataattgatatagaggcagtaaagcttttattagataaaggtcatattgttatttgtggcggtggaggaggtattccagttaataatataaataatgaatttattggtagtgaagccgttatagataaagatttaacagcagctttaatttctcgtgagttaaatgcagagcactttgttattttaacagaggctgatgccatttataaaaattggggaacaccagaacaagctgctattcgtgaagcaacaccagaagaacttgcaccaatggcagtcgctgatggcgcaatgggaccaaaaatcatggctgtcagtgattttgtaaatgccacaggacaacaagctcatattggcgcattacaaaacattcaacaggttattgaaggtcagtctggcactttaatttataagtcttaa

SEQ ID NO: 308747 - DNA, 1125 bp, Proteus mirabilis; identical to SEQ ID NO: 307513

SEQ ID NO: 308748 - DNA, 615 bp, Proteus mirabilis
atgagaaataaaccgtttatgagaatgcttaagctcataccggcgtttattgtcgtagctacgttatcagcctgtagttcacaaaacgcgtcttcacgcttagctaattcaacaactgccccacttaataaatcttcaagcacatctatttcccaagcatctcaagatgaatttgaatcattggtgaagaatctcgatataaaatctaagatacttgaccaatatgcagactggaaaggtgttgcataccgcttaggtggcaatacaaaaagtggtattgattgttccgcttttgtccaaagaacttttcgtgatcaatttggtgtcgaattacctcgttcaacctccgatcagcaatttgccggtaccaaagttaatcgttcaaccttaaaagcgggtgacttagtactgtttaagactggtcgcactatgcgtcatattggtatttatatcggtaatgataagtttgttcacgcgtcaaccagtagtggtgttatcgtttctgaaatgtccaatgtctattggaaaaaccgtttctatacagcacgtcggatcattgataataatacaacaacaagtcttgctgataactattctcaagcgtcattaagataa

SEQ ID NO: 308749 - DNA, 381 bp, Proteus mirabilis
atgaataattacaaaacaaaaacggaatatgagcatactttggagtcagcaatagccacggttggagccgctattgcggatatttccagagtaaaaatactctgtgctttgatggatggaagggcgtggacagccaccgagttgagcattgttgcggatatctccgcatctaccacaagcagccatttatcaaaattactcagtagcggccttatttctgtgatctctcgtggtaaatatcgctattttcgattagctagtgatgatatagcaaaagttattgaaaatttgatgagcttctcaacagttcatgtatcacaagcaaaaattaccaccccagaacatttaagtaatgcactgccaatttgtccacctagatga

SEQ ID NO: 308750 - DNA, 399 bp, Proteus mirabilis
atgaaacaacaaaactggacactccagttaccagaaacgataagggcggcgatgagtcgccctttttcatggggtgaatttgattgttgtatttttgcctctgaatgtatttacgcacaatgtggtttctcgccaataaagccttatctcaatcactataaaaccaaagccgaagccttcaacctgctcaaatctaaatttggctccttagagaaagccgtatcacgctatttcaaatccattgagattgagcgcgttcagcgtggcgaccttgtactgttcaaaggtgaggacggtgacagtttagcggtggtctgggcgaggcattattggggcgtaaccccacaaggcgtgaagccggtgcagattaacccaatcaaagcgtggagagtggaataa

SEQ ID NO: 308751 - DNA, 573 bp, Proteus mirabilis
atggcaaaagctaatgaaattaagcgcggtatggctatcagttataacaataaattattattggtaaaagatatcgacatccaagcgccaagtgctcgcggtgcaagtactttgtataaaatgcgctttactgatattcgtacaggccaaaaagtagaagaacgttttaaaggggatgatatcctcgatactatcaacttaacacgccgtgcagtcagtttctcgtatatcgatggtgatgaatatgtctttatggacaatgaagattatacaccttacaccttcaaaaaagatcagattgaagaagagctgctgtttattccagaagaaggcttagctggaatgcaggtcttaactatggatggacaagttttagctttagagttaccgcaaactgttgatatggaaattatcgaaacagtaccgggcattaaaggcgcgtcagcgagcgctcgtactaagcctgcgactctacctactggattagtcattcaagtccctgaatatctttctacaggggataaaatccgtattcatattgctgaacgtcgctatatggggcgtgctgattaa

SEQ ID NO: 308752 - DNA, 180 bp, Proteus mirabilis
atgagtatgccccaacgacttgtaacatgtttgagtatctctctggatgggcactgtttagaaaataaatttccttcacgtaattgctgcgagagtgtggatattgtcattttatacttacctttttgtatgtacttacttttagtaagtttaggtgctatgttatcaaaacacaagtga

SEQ ID NO: 308753 - DNA, 1062 bp, Proteus mirabilis
atgaagcagctctacgctcgcttaccggggcaagatagaacattacccgccgtaggaacaggctctcaccttgataccgttccccaagggggcgcttatgatggcgccttaggagttattgctggtttttatgctttgatgcaatacaaaccacaacaactgaaacgtgatctagagttaattgtattccgagcagaagaatcgagccgatttgggttttcatgtatcggaagtaaagtgctaacaggaaaaattgaccgtactcgatgggaacaaaatagagatgatgaaggtaataatttctttgatgttttaaaatcccttggttatcagcatgaaaacttagatcaatgtttacttaaatcagaccgttatagtgcatttgttgaattacatattgaacaaggtaaacgtctagaaaacgatcaaaaaacaattggaattgtcaatggtatcgctgcgccaacacgcttttcagtcaccgtaaatggccatgcagaccactctggtgcaacgccaatgtatcaacgtcaagatgcgttagtggcgagtgcgggtattattactgatatcaatcatgctgcctgtacggaagcggtatacggcaccgtaggtaccattggtaaacttaatgtcataccaaactcgatgaacgttattccagggcaagtaaaattctccgtggatattcgtggtattgatacggacagtattcaacgtgttgtacagcgtttaacaaacagtgttgagaaagcagaaaaagattttggtgtaaaaataatagtgcaacctatttcggctgaatcaccagtaaaactggatgactcaatttgccaagttattgaaaatatttgtcaaaaacacgatatcaattatatgactatgttaagtggtgccggtcatgactcaatgaatatggcatctttatacccgacagcgatgatttttaccccctctgttgcggggattagtcatcacccagatgaatttacggagtttagtgatattgcaatagctgcagatatcttagcggaaacattaggtgttctagctaatcaataa

SEQ ID NO: 308754 - DNA, 165 bp, Proteus mirabilis
atgactcaaccaattacagcaacagacttttcaattaatgatatgaaaacattaattgaaacaatgcaaatttataaaaaagataaccatgacaaagggataacacgtattgcctatagcgaagaagatgaagcagctctacgctcgcttaccggggcaagatag

SEQ ID NO: 308755 - DNA, 708 bp, Proteus mirabilis
atgaatcaaataaaaaaatcaagtaaactcgaccatgtttgttatgacattcgaggaccggttttgcaagaagcaaaacgtctggaagaagaaggtaataaagtattaaaactcaatattggtaacccagcacctttcggttttgaagcgccagatgaaatcttagtagatgttattcgtaacctacctagctctcaaggctatagcgactctaaagggcttttttcagcacgtaaagccatcatgcaacattaccaagcccgtgatatgcgtgatgtaactgttgaagatatctatattggtaacggtgtttcagagcttatcgtacaagctatgcaagcattattaaatgatggcgatgaaatgctagttcctgcgcctgattacccattatggaccgctgcggtttctctttctgggggtaatgctgttcattacatgtgtgatgagcaacaaggttggtttcctgatttagatgatatccgtcgtaaaatctcccccagaacgcgcggtattgtgattataaaccctaacaatccaaccggcgcggtatatagcaaagagattttgctggaaattgttgaaattgcccgtcaacacaatttgattatttttgctgacgaaatttatgacaaaattctttatgatgatgcccaacatcactcctgtctcttatacacatctccgagcccacgagaccgaggctga

SEQ ID NO: 308756 - DNA, 261 bp, Proteus mirabilis
  misc_feature (232)..(241): n is a, c, g, or t
atgggattagatattgtcatgtttaaagatcaatttacaccacaacaaaaaatggatatttgcacttttgaagaaggtgatccgacggaaaacccttgggttaaagggaaacctgcccaaatacacattgaaattgtcccccataatcctaattggcttatacaatttaatgaacaaaaatcgttaattcagaatgcattgtcagatatagcattatcaattgagcacatannnnnnnnnngatatagcattataaattga

SEQ ID NO: 308757 - DNA, 336 bp, Proteus mirabilis
gtgggtttaaagcctaaaattgtttttactgcaacggatgcggatgtaataaaaacttatgtcaggctacacttaggtattggtgtgattgcgagtatggcatttgatccgatgcttgatagcgatttagtcgctattgatatgcgtgataaatttagttatagcaccacaaaaattgcatttcgacgtagtggttttttacgcggttatatgtatgactttatgtggcgttttgccccacatctaacacgtaatttggtggaacaagcgacagctttacgcaccaatgaagaaattgaagagttatttaaagatatcgagttacctttagtttaa

SEQ ID NO: 308758 - DNA, 582 bp, Proteus mirabilis
atgaaattacaacagttgcgttatatcgttgaagtggtgaataacgatttaaacgtctcaacgacagcagagcgtttatatacctctcagccggggatcagtaaacaaattcgtatgctagaagatgagttgggtatacaaatattctctcgcagtggtaagcacttaacacatgtgacgccagcgggggaagaaattgtcagattatctcgtgagatattatccaaaacagaagctatccgttcggctgcaggggaacacacttatcctgatcgcggttcgctttctattgccaccactcatacacaagcgcgttatgttttacccccagtgattaaaggttttatagaacgttatcccgaagtgtcattacatatgaatcagggttcaccgacacaaattgcagaagatgtttgccgtggtaaaagtgattttgctatagcgacagaatcactacatctgtataacgatttagtgatgttaccttgttatcgttggaatcgtattgtggtggtaactaaagatcacccattggcgcaaaagcgtgaagttaccttacaatgtaatgacacttcgggataa

SEQ ID NO: 308759 - DNA, 315 bp, Proteus mirabilis
  misc_feature (291)..(300): n is a, c, g, or t
atggaaaaactcgatttattagcaatcagagataaaatcactgcgctagattctgaactactttcactattagctcaaagacgccaattatcgactgaagttgcccaatttaaattaaatacccaccgccctattcgagataaaaaccgtgagcgtgaactgcttgagctattaatcgaaaaagggaaaaacgttggattagatggcttttatatcagccgaattttccaaatgatcatcgaagattcggtgctcacgcagcaagccattttacagcaacaccttaatgcnnnnnnnnnngaattgcttatttag

SEQ ID NO: 308760 - DNA, 333 bp, Proteus mirabilis
atgatagatcgtttttttggtaatattcgtaggttaatgggtaaagaaattgtaaaacatactgatttagaaatcatacctaacgtatcaaataatcctaaaatattatttctaactaggttgtgggagcctaacccacttaaagacaatgcgtcaaaaattgagttagaatactacaatgaaacaatacaacttaataaagtcagaatggatgcattgaatatgatccatacccaattcaatgaaagatctactattggtattaatgatattccatattcaagaagaatggcgccagattttatattaccgaaagaaaaaacacatcgatga

SEQ ID NO: 308761 - DNA, 573 bp, Proteus mirabilis
atgcaattttattttgattatgagctaacaatgagttctataaaatcacctataattatctctatcacctcaattgcaggtggcggcaaaacagcactttctcattatataagagaaaagcttccatcaagcaaatgccttcattttgatgatttcgactgccctacagcacctgaagatctcgatgagtggatagaacaaggtggtaattatagcgaatgggatataaagccatttgttgaacaagttaatcagacgatagaagaatctcaatatactcatatcattttggattatccttttgccagatctcacccagcgctacaacagatgatcgactatgctttttttattgatacaccactagatatcgcattagcaagaagaatattgcgtgattataaagagaaaagtggaaatgatattattcattatttagaagagtacttaatctactcacgaccctcatatacagcaatgacggaaagagaaaagctaagtgctgacattattattgatggtaacgcatctgtgtctttaattgcacagaatatcctaaagtatattgtttaa

SEQ ID NO: 308762 - DNA, 186 bp, Proteus mirabilis
gtgcgtaagtttggtattgaagtcgttgaagaaaaaaatgtcgccttcaatcctgaagtacaccaagcgatgacattaattgatagccctgagcatgaagcaaaccatgtcgttgatgtgatgcaaaaaggctataccttaaatggtcgtctattacgtccagcaatggtagtggtatcgaaataa

SEQ ID NO: 308763 - DNA, 507 bp, Proteus mirabilis
gtgattttaggtcaagatccttaccacggccccaatcaagcccatgggctttccttttctgtacgtcccggcgttccggctcccccttcattagttaatatgtataaagagcttgaacaagaataccctgacttcaaacgacctaatcatggttatcttgagagttgggctcaacaaggggtattactacttaatactgttcttacggtagagaaaggccaagctcactctcatgctaactatggttgggaagtttttactgacgcggttatcgaacaaattaatcaacgtcgtgaaggcgttattttcctactttggggcgctcatgctcagaaaaaaggtcgttttattgatactaataaacactttatcttaaaagcccctcacccttcaccactctctgcacatcgtggttttttaggctgtggtcattttaaacaaaccaataatctattagcgcaacaaggacgcacgcccattaattggcagcttgatcctattaaataa

SEQ ID NO: 308764 - DNA, 651 bp, Proteus mirabilis
gtggcagatggtcgtcaatttgcacctatgctgacaccggagaaaaaagtatcagtagaagacgccaaagcgatgttacgcaaccattttgacggtacagaacatgatccttataccaatggattgaatggcaatgaaccatggcgaccaataagtgtgtttcgtacttatgaatctcatgtgatgcaagtaagacctgaattaccgcaagagattggtgaagtgacttatgttggtttgggaatggctgatctaaccgcttttgttccttattacagtggattaaaagcatatccgcaacactatgctattggaacagataaagcagataatgactctatctattggaaatatcgtaagttacaaacattagtaatgacagattatcctcaatttgctcctattgttaaaaaagcataccaagaatgggaagctaaaacagcattagaacaaaaagaaatggaggctaattatttgtcaatgagtaaaaagaataaagcagcagcggataacatgctgaatgaatttaacttacgtgtaatggctgatgcagagcaactaactgaaaacttaactaatcaactctttactcttaaaactaaaaatatacaagatgagatcttttttgctaatcaatctaaaaaagattaa

SEQ ID NO: 308765 - DNA, 792 bp, Proteus mirabilis
gtggtgaaattaggtgaacattgtacaaaatgggcaataggtgatcgtgtttgtgctttagttgctggtggcggttatgctgaatattgtttagtccatgaagatatcgctttaccgtcgcaaggattaaccgatattgaagcggcagcattacctgaaaatttatttactgtttgggcaaatctatttcaactcggtcagttaaaagccggggaatcggttttgatccatgggggcacttctgggattggctctatggcgattatgttagcacacaatcttggttgtgaaatttacacaacggtaggttcaaaagaaaaagccgaagttgcccaaaaattaggggctaatcatgttattaattaccgtgagaaagattttgctacagaaattcctgtattaactcaaggtaaaggcgttgatgtcatacttgatattatcggcggcgattatgtggaaaaaaattatcaagttgcggcgaaatttggcagagtgatccaagttggcatgatgaaaggggcccctaaaaacttaaatatgatgccactgatgcttaagcgattaattcatacaggttctaccatgcgttctagaacgccagaagaaaaaacgcatatagcacaagaattaaaacaacaagtatggccgttgattatcaaaggtcaaattaagcctattattaatgcggtcttttctttacaagaagttgccaaagcacatcaattaatggagtctggtgacttaattggtaaagtagtgcttgagattgatatgaataaatcactggtgtag

SEQ ID NO: 308766 - DNA, 750 bp, Proteus mirabilis
ttgaacgttgaaatagataatgagcgttgtttccaatgcggtaattgtctatttacttgtcctgttgatgctatagaaaatatctccccccatgaacgtagctttcaagataatctattagtcattaatcatgatgaaccactggccagtattgaagagcttttggtttggcatcgacaatatcaaatacgcggtatgaaaatagcggaacccttggttgataagtggctgccggtactcgcacaacttaatttgcaattaaaaaccttacaagagcctatttggcaattagttttagtggagcctgaaccggtcgatagtggtcgtcgctttatgctatttcgacaaaaattagatgaaaagccacttaataaaggtcacgtaaaaacaggattaaatgcaagaaaacagctttatccgcaagatagctggttccatattcaattagataaagaaagttgtattctttgttctgcatgtgccaaggtgtgtgatgaaggtgcaatcacaatcgaagataatcgctttatcattgatgaaaaacgttgtaccggttgtatgaactgccaagttgtctgttttccaaaatcaataaaagtcgtagaacaaattgctaaaaatagcacaccgacacactaccattattatgatgcacaatgtgataaatgccgccttgctttttttgcttgggagcctaatgccaccttatgtccgatttgtactcagcatcaaaaacagggatggctataa

SEQ ID NO: 308767 - DNA, 435 bp, Proteus mirabilis
atgggctttgatatgggatggatgagcaaagggcatgcttacggtggttatacggggcatggcgggaaatttgagcctaaagggattgtgcatggtggtgagtttgtttttaccaaagaagcgacggctagattaggtgtaggtaatctctatcgcttaatgcatgcggcgcaaggttatgcttcaggtggctttgtgggggcggtcgcagggcgaataccggttacaccgcaaccgacgttagcccgtgcgagtggtgtacaaatgacggtcgttaatcatattacggtgacgggaaatggtgacgctgtacttgcgcaggcaatgaaggaagccgcacaacaagggacagaagccggcgcacagaaagctcacgcgatgatgttacaagactttcaaagtaatggtgcagcacgcagaacattaggagtttaa

SEQ ID NO: 308768 - DNA, 429 bp, Proteus mirabilis
atgatagccattgtggcggtctatggtattgcttggatggcagaaaccatgttctctgcacatatgaaagaaatagaagctgcattaggacaattagttcgtgagtatccttgggcttatgccgttgtcttattacttgtttctaagtttgttaattcacaagccgccgcattagccgcaatagttcccttggctttaggtattggtattgatcctgcctatattgttgcttcagcaccggcgtgttatggctattatattcttcctacttaccccagtgatttagccgctatccaatttgaccgttcaggaacaacacgtataggtcgttttgttattaatcatagctttattttaccgggattaattggtgttactgtttcttgtatttttggctgggtatttgctgctatgtatggttttttataa

SEQ ID NO: 308769 - DNA, 486 bp, Proteus mirabilis
atgaaatttaaaataagtgctttaacagcctgtattttaatgacttcttattcactacatgcacaagaagataaagtagaacgattagttgtatcagcctcagggtttgcacagcaacaaacagatgcacccgctagcattacggtaattaacaaagaacaattagagaaaaaaccgatacacgatcttgctgatgccgtaaaaggggttgaaggcgtcagtgtgaatggtaatgcaaataaacaagaaattactattcgtggcttacccggagaatacacactgatttcagctaatgggagtggtggatatgaaggtggatttattcctcctgcggatgccattgaacggatcgaggtaatacgtgggccaatgtcatcactctatggctcagatgcgatgggcggtgtgattaatattattactaagcctgttactaaagagtggcatggtgcagtttccatgggggggaacattgcaacataa

SEQ ID NO: 308770 - DNA, 252 bp, Proteus mirabilis
gtgttaattgatacatcaaaagggttaacctcaggtttagataatttagctgctgatggtatttacaatggctctgagcgcgctacagatcgtggtgaattcacttttgtaattgccagtgcacaagcagcaggagcaacagccgattttaaatcactggctgatggtgtctgggatggtgatgtaaaagtgcaatttaccgccacttgggatggtgacttttctaccgttaaacctaatccagaaccttaa

SEQ ID NO: 308771 - DNA, 390 bp, Proteus mirabilis
atgtctaaatcggcaaaaggtacgacagaacggcctggacggaacgtaaaagctaaatctggtttaaaccgctcaatactggagcagggctggtatgaaatgcgccgacagcttgagtacaagcagctctggcgaggtggtcaggtactggcgataccccctgcctacaccagtcagaagtgcgcttgctgtggtcatacagcaaaggaaaaccgccagtcacaaagtcaattcgagtgccttgaatgtggatatacagcgaatgctgatatcaacggggcacgtaacattttagcggcaggacatgccgtgctagcctgtggagggagggtgcagtcagaccgcccgtcgaagcaggaacccgccgaggtgattcagacatcagtctga

SEQ ID NO: 308772 - DNA, 2502 bp, Proteus mirabilis
atgaagttatataaaaaacaatacaatacatcactttcttttgctgacttactgaattttggcgtgatgattactcccaacttaatgttgggtaaagatggttcactgactgccggattagtttatacctgttgggattatgaaaattctgataattctgaattaaatgacttggttaatgcacttaatgcagcctatctccggttgggtacaggtatcacattgcattttacggtaataaggagtgaaacctcagaatatccgcagccggaaaaaagtcattttacgtcattactgaataaattaattgatgaagaacgccggatcaaatgggaaagcgcaggggcgcatttttcgagtgtgctttcattttcaattacttatttacctgaaagcatgtcaaaaagtcggttaagtgatttctttgttaccgacgaatccggcactaaaaaatcaaaatcattaacagataaacacattgaatactttgaaaacgttatttcagaactcagcggacaattaagcggaacgtttactctgcaccggcttggggtacgccatgataacgctacaggtgttgtttataatgatttagtccaatatttcaatcattgtatcagtggtgataattatccggtcattcatccggataatcagtttcttgatgctgttttgtctacggatgatttttatactgagcctcgtcttaaaattggtaataaatatatcagtgtgctttgcattgatgcttatccggcaagctcagtgatggggatgctacaatcgttatcaaatttaccttgtgagtatcgctggacgacccgcgctatatttcttgatccgatagatgcggataagcaaattgaaaaataccgtaaaagttgggggcagaaagttcgcggatttgtcgatcaacttatgggtaaacacagcgataatattaattatgatgcagccacgatgaaagaggatgcacagattgctaaaggtgaaaataactcaaatacggttcgctatctgtatcttacgcccacaatagtgattatggatgaagatattgaccgtttggatgaaacgacaaatcttatccgtaccacgattaaaaatgtcgtcaatttcaatgcaagaattgagacagttaatgcaatggatgcctaccttggcagtctgccgtctcatacctatgagaatgtgagacgaccccttttacataccggaaatatgacgcatatagtgccctgttccacgttgtggacgggcgaagaaacatcaccctgcccgttctttccgccggacagcccgccgctgatgaaggtcagtacaacgggtaactccgagtttaatcttaatttgcatgaggacgatgtagggcacggtattatcggcggtaaaacaggtgcagggaaatcatcattagtcacattaatttcttctcaatatgatcggtatcctgattctcaggtatttacctttgataagggacgttctgtaaaagtgttctgcaaactatcgggaggaaagtattacgatattatgacgggcgagcattctcttaactttgcaccgctggcgcgtatagatgaaccgagtgagtttatatgggcgtttgagtggttacaggatattgccgaaattaacggcgtaaagctggattctgaaaaagttaaaaaactgaatgaagccctgaaaattgtctcaagaatggataataaggacggccagtaccgcaacattgattcactgattacaaaattgcaagaccgagaattgaaagatttgttcagtcagtacggctccggcggggcatacggtgaagtgcttaatcagccacaagaacaaattacactcagtaactttaccgtttttgagtatggagaattactggacaggggcaataaaatcaaactgccggtacttttttatctctgccacctgattgagcgacaactcgacggaagaccgacactggttaatattgacgaggcatggaagtttttagatgaacctgttgcgggtaaacgccttttacaatggctgcgtgaatggcgtaaaagcaatgctgccgtggttatttccacccagaacctgcacattatcgaaaaagcctttccgctggtattttcagaaatcgctatggcttgcccgacaaaactgtttcttagtaaccccgccgccgaggaagaagtttcgatcaatgcttataaaattcttggctgcaaagccgctgaaatccgcagaatccgtcatttaacgccgaagcgtgagtattttgtgaaaaaaggtgattttcgccggacattcagcctcgatatggttgagggtgacatcggacttgctaccgttgccgcaagctctaaaaaggatttaaaagagatagataaattagattttgaacattccagtgaagaagaattactgcgccagtggcttgattttaaaggtgttgatagtggctatgtgcagtatctgacagacagactgaaatcaaggggtgaaatatga

SEQ ID NO: 308773 - DNA, 273 bp, Proteus mirabilis
gtgactaatatttacactaaagtgattgcaactattttcgtttgtttttctttatccgcatgtgcgcctgttatttcaggatcaatgaatgcatttactactgaaaaagatgttatccaaaagactgtaaaatattttggaactacaggggataaaataaaaattatgaacatagataaaggtacattatctacagattacaaggtgacttataataaaaatatttacagatgtaccatatactatggagaggttgattgcactaaaatttga

SEQ ID NO: 308774 - DNA, 1182 bp, Proteus mirabilis
atgactcaaactaaaaaaaatatagcttttgtttttttgattactatagtatttttaattctttctttttttgttttattttcagatctcattcaatatgaaaacaataaaagtgatttttacaaaagatttgtagagcgtagctccattaattcatttgatggtaatttgttgacccatgaattaataaaaatagattatgattatggaattacaacaaaggaaaataaagataaagcattatataatgttaatatgtttttaaatgccgttagtcttgattgtaaacaaagtgaaacgtatgactatattaagtgtgctaatgaaaagttaagagataacttttattacaaacctagtatagaggtttcaaataattatgcgaatcatatctctgactgtgacactaattcatatctgatgattgatgctctgtctttggtgggtattaagggatttattgtttatgccccgtcccatgcttttattggttggattgacgattttgggaatccaaaatattgggaaacaactacaaataataacacaggaaaagaagctgatttgagtgaaagtttttacacaaaaacatttgacagaacatattataaattaatgccaacagaaacagccatagatgtatatacggttttaatatcagccattgaaaatgcgaaagttgatgttgaatcatttttcatgaagaacaaagataattcaattatttctgacttttattattatgatttatccgagaggaataaaatatcaaatttaaaatcaatggaaatagagtcattaatagcgactgatataacctcaaatgacaaatactatgctttagctaactaccatttaatgaataataacattgaaaaaggaaagtggtattttacgaaaatagataagggacgttgtggttctagttgttataagcttggattagaattaaatatcccgcaatatgaatattttgcttatttttacaaaaaatatagtgaatttcataaagaaaaaggaatggacgttaatgtcaaaattttcttccgtggttttttcattttttgtttttctttattgtttttattaatatctttaattagtgttttttttatgaaaaaggtaagttgtaaatcatcaaaatctcaaagtgttaatactaaggatatgaaaagtgattaa

SEQ ID NO: 308775 - DNA, 243 bp, Proteus mirabilis
gtgattaaagaagataaaataaaaagcaagcaaaaagaaatagagaaagggattattgggatattgctttctatatttacccttggtttcttactttttatgtttggaaatagcaatattactgattgtataatatcagcttcaaccgcagggcttttttttacatcgttatttactctatatattgttttcattgaaagagttgagcgtgttagtgataaaaaacagaaagacagtgaataa

SEQ ID NO: 308776 - DNA, 240 bp, Proteus mirabilis
atggggacattaacagtcaggccacagccggaacatgaagatgcactggagaccgtaggcgtgttgttgcaggaaaaacgcgcctcacagacgttactcaaatcactgatggcctacgagcaacactgtaatgagatcgcccgattgaaagcagccttgtacaaggccgagaaagagcgtgatgagtacaaaggtaaaatagagcgctttaaagctgcccagctcgcgttatttgaataa

SEQ ID NO: 308777 - DNA, 369 bp, Proteus mirabilis
  misc_feature (334)..(343): n is a, c, g, or t
atgttaaagttcattcttattttcttgactctgtttgtatccacagtggctcaagccagtgtggttattatggggacccgcgttgtttatcccgcaacgcaaaaaagcattaatgttcaattaaataataacgatgaatcccccgcattaattcagtcttggttagataccggaaacgcagctgcagcaccagattcaattcacgttccttttatcattactcctcccatatttcgtatggagccgaaatcagggcaaaccatccggattgtctataccggtgaatcattaccacaagatagagagtctcttttctatctaaatgtcttagacnnnnnnnnnngtcttagacattccagcaaaacctaa

SEQ ID NO: 308778 - DNA, 1053 bp, Proteus mirabilis; identical to SEQ ID NO: 296003

SEQ ID NO: 308779 - DNA, 207 bp, Proteus mirabilis; identical to SEQ ID NO: 294320

SEQ ID NO: 308780 - DNA, 1266 bp, Proteus mirabilis
atggacactcatgaaataagcagtaaaaacatggccctaaaagaagatgtttctatcaacaccacttctaaaccaaacagtccgaaacactatatccagcgtgatgacgcgctttatataaaagtgacagtgtcattttttatggttggtttagccacttttgcattactctactttgtgcaacctatcttacctatcctatcaaaagaattttcagtcaccccagcaaccagtagtcttgctttatcgctttctacaggtcttatggcttgtggtctattgattacagggcctctttctgatgcgtttggtcgaaaaaatgtgatggttattgcgctattttgtgcggcttttttcacactattaagtgccatgatgaatagctggacgggaattttaattacacgagcactcgtagggctatcacttagtggtgttgcagccgttgcgatgacctaccttagcgaagagatccatcctgcttatctagccttatcgatggggctttatattagcggtaactctattggtggtatgagtggccgtgttattactggtgttttgagtgattattactcttggcgtgtgtctgtgattattttaggtatttttgcccttgttgctgctatcattttttggcgaatattgccaacatcacaacattttaggccagcgaccttaaaaccacgtaatcttcttatcacaactaaattgcattttagagataaaggactccctcttctttttattgaaggtggcttgttaatgggagggtttgtaactttatttaattatattggttatcgcctattagatgcaccttattcattaactcaaacaaccgttggtttaatttcaattgtttatttgagtggaacttatagtgcatcgaaagcaggcttattaaccaataaatatggattaggtaaagtgtttattgccggtgtttctatgatgctagcgggtatattaattacactatttgactctctagcaattatttttataggtatgcttattctaactacaggtttttttgctgcccatgcggtagcaagtagttgggttggacgtcgagctaaacgaggacgtgcgcaggcctcttctctttatctatttacctattatgcaggctcgagtattgcgggaacactaggtgggatcttctgggtcaattttggttggcttggtgttggtttgtttattgcttttttaatgttaacagcactattaatcgcactgcgccttaatcaaatagcacaataa

SEQ ID NO: 308781 - DNA, 429 bp, Proteus mirabilis
atggtggggattgttgctggtggttgtgcgctgattaatgcacaagcgaaaagaattaacacactgacagaaaacaacaaagaactgactaccgcactcgaagagcagaaggatatcaatattgactatcaagcacgcatagagcgactaaatcaacttgatacaaggcacacacaggagcttgttaatgcaaagaatgaaattagtcgcttgcgtgatattagtgagcgtaatcctgaacgggtgtacatccgagccagttgtccgaaagacgaaaccaattcaacctccggcatggatgatgcaaccaccgccagacctactgactccgctgtcagaaattattggctactcagagagcgaattgcagagtcagaacagatgattaaagggttgcaggattacattagagtggagtgtgtgaactaa

SEQ ID NO: 308782 - DNA, 354 bp, Proteus mirabilis; identical to SEQ ID NO: 296310

SEQ ID NO: 308783 - DNA, 2127 bp, Proteus mirabilis
atgacccactctatagaacaactcgattatcacgccttaaatgccatgctcaatctctatgatgagcaaggcaatatccagtttgataaagacaaattagccacccaccatttttttcgtcaacacgttaatcaaaatacggtgttttttcatgatctaaaagaaaagctcgattttctggtgcaacaacactactacgaagcacaagtattagagcaatatgatttcccgtttatcaaacagctttttaagcatgcctatagcaaaaaatttcgctttcaatcgttcctaggtgcatttaaatactacaccagttacaccttaaaaacctttgatggtgagcgttatctcgaacgctatgaagatcgtgtttgtatggttgccttaaccctagcacaagggaataccaaactcgccactcaccttgtcgatgagataattagtggccgtttccagcctgcaacccctactttcttaaattgtggaaaaaaacagcgtggcgaattggtctcttgttttttattacgtatcgaagacaacatggagtccattggccgagcagtcaattctgcgttgcaattgtcgaaacgtggcggaggtgttgctttcttactgactaatttacgagaagcaggagcccccataaaacgcattgaaaaccaatcgtctggcgtagtaccggtaatgaaaatgcttgaagatgccttctcatatgccaatcaattaggcgcaagacaaggtgctggagcggtttatctccatgctcatcatcctgatatctatcattttctagatacaaaacgagaaaatgctgatgaaaaaatacgtattaagacgctttcattaggtgtcgttattcccgacattacctttgaattagctaaacgcaacgaagatatgtatctattttcaccttatgatgtagaacgagtatatggcgttcctatgtcagaaatcagtattagcgaaaaatatactgaaatggtcaacaatgcagagatacgtaagaaaaaaattaaagcacgggcattttttcaaactttagctgaaattcaatttgaatcaggttatccctatattatgtttgaagataccgtcaatcgcgcaaatccgattgcgggccgaattaatatgagcaatttatgctcagaaatcttacaagtaaatagtgccagtgaatacaatcctgatttaagttatcgacaaattggtcatgatattagctgtaatctcggatcaatgaatatcgccatggcgatggactcaccagattttgcgcataccgtaaatgttgccatcagagcactgacgagtgtggcacaaatgactaaaatagaatcagtaccttctattgaaaaaggcaaccaagcatctcatgccattggcttagggcaaatgaacttacatggttatttagcccgtgaagggatttattatggttcagaagaagggcttgattttaccaatatctatttctataccgtaacatactatgcccttttagcctctaaccaattagcgatagagactaaacagcgctttaaagggtttgaacagtcaaaatatgccactggggagtattttgataaatatttatcaaaacagtggttacctaaaacccaaaaagtccgccagctatttagccaatccaatattcatattccaacccaagaagattggcaaaaacttaagctcttgattatgactcacggtatttataatcaaaacttacaagcaataccgccaacaggatcaatctcttatatcaatcactctacatcgagtattcaccccattgtggcaccgattgaaataagaaaagaaggtaaaatcggtcgggtttattaccccgccccttttatgaccaatgaaaaccgtcatttttatcaagatgcttatgaaattggcgcagaaaaaattatcgatacctatgcacaagcatcacaacatatcgaccaaggattgtcgctaacattattcttttctgatgaagcaaccacaagggatgttaataaagcacaaatttatgcatggcgtaaaggtataaagaccttgtattacattcgtattagacaaacagcattagccggcacagaaataaaaggctgtgtttcatgcgccctttaa

SEQ ID NO: 308784 - DNA, 1194 bp, Proteus mirabilis
atgaaacatacattgttaaaaacgactgcaattgctatggcattaagtgtgggagttgtgcaagcgactgaatataaagcgagtaccgcagaacatccaatcaaaatagttaatttagatgctcttgaaaatcaagtaaaagaaaatatggataaaggcgctttcggttatattcgtggtggtgctgaagacgaaaataacttgcgttctaatacaaatgcatttaataaaaaatatattatgcctcgtgcattacaagggattgaattttccgatctgaatttaaaaacagaatttttagggattaaattagatacgcctattattcaggcaccgatggcagcccaagggcttgctcatcaacaaggcgaagttgccacagcaaaaggtatggcgaaagcgggctctattttctcattaagtacttatggtaataaaaccattaaagaagtcgcgcaagcacaaccgggttatccgttcttttttcagctatatatgagtaaaaacgacgcgtttaatcagtatattttatcgcaagcaaaacagtatggcgcgaaaggtattattttaacggttgattctcctgtggggggatatcgtgaagatgatattaaaaatagttttcaattcccattaggttttgccaatttggaagcattcgccaaaatcagtgatgataaatcaaaaacaggtaaaggttcgggtattagtgagatctatgctcaagctaaacaagcatttactcctgcggatattcaatatgtgaaaaagatgtcaggtttaccagtcattgtgaaaggtattgaatcacctgaagatgccgatactgcaattaaagcgggtgctgatgcgatttgggtgtctaatcatggtggtcgtcagttagatagtgcacctgcaaccattgatgtattgccagccattgccaaagtcgtgaacaaacgtgttcctatcgttttcgatagtggtgttcgtcgtggctcacatgtctttaaagcgctagcgagtggtgcagatgttgttgctgtagggcgtccaattctttatggattaaatttaggcggtgctgaaggtgtgaattcagttattgagcaattaaataaagagttaagaattaatatgatgttaggtggtgcaagaaacgtcaaagaaattcaagcaacacacctgtatacagatgctgactttaaataa

SEQ ID NO: 308785 - DNA, 1899 bp, Proteus mirabilis
gtgttcttaaatggaaatattgtcatttactctccatctggttttgcatatgtattagatacaccacttgtaacgcaaacaattgatttgcggcaaataggtgctaaagaatcagaacatattgaccatattttttctgttgcgacttcatactgtaaaagtagcaaaaatgtaaaaagaattgttattgttggtaattatacccatgaaaaccctttagttattcctgaacgagtagaggttgactacctaaattatttatcatcatctacaacaaaagtaaccaataatacatctgggctacctattttaactggtggatacggcggggatttggttatggatgtagacgcgtgtatcattttagatcatggatacggcgctaaaataaataatttcaacttaaaatgtaatgcaccaaatagtgttgaacatggtatatatcacggatttactcgggaagttgttattgctgatgcaattggtcggataggagaaaaaggtgatgataagttaaagaaactaaataatgcgatcacggctcagcaaggatcttttcatctgtatgggaatgtaactagttttgttaataagagagtatggaattatatttttaattctaaaaatactggatgtaatgttattaggatacgtcaagcatggaactacggagcagaagaaagcgtgatgaagtttcaaggttctacaagcgtatctttggggcagcagtattgtgagggaactaatggtcaaatatatgaattttttggttgcacaggagctacatgtgagatcctatcaattgataggcacgaatgtaattccatagctccggtttttcgatctagaaactcacaagttgaatttggtgcaattacaatcaatgcaatcacagtaaaagagggtgatattggaattttatttgatcactcgtctagcggtggtatttatggctgtttaactatcaacggcatcacggcaagacctaatgatagaaatatcgaaaatttaaccactctagttaagagccgtgataattgtgttattcgtggcatgccaattcctcctatcggcgccattggaaatattggaggatcacctaattctttgtggtcagcagagaaagatacaggcatagcaacgacagatcagaatagaacattgataagcagttatgaaagccaagcatcagggattagaactacagttgcaaactcatttagaagcattgctgataaagaaggttcgacagtattaagtagttctcttgttcgttctgggactggttatgaagtttgcggtggatttgggggatcgtctggtgaaaatatatcttctgctaatcgtaaatggtctctagattcgtctaacgggaacattaaggctgctggagtgataactcaaggagcttcattttctgattacgctgaatattttgaaaatgcagaatatggtgttattccactaggaactattgttgaattaatagcggataaaataagaccagcgaatggagatgaatttattggagttatttctggcacagcaggtattgcactaaacgcctcgtcattatgttggagtaaaaaatatttgacggggaagtatggcgagccaatttatgagattattaatggacataaagttcgtaaagaaaactctgattatgacccatatatcgatagatatggagatgaaatttacttatcaagggaggaaaggcctgaagaatggtcatgtgttggtatgatggggcaggtttatgtgaatgtatcaaatgatgtttcagtaggagattatatctgcgcaagaaatggtattggaataaaatctaaagtaaaaaccagactcaaagttatggaaattaatgaatttgttgctaaatgcttattaatataa

SEQ ID NO: 308786 - DNA, 657 bp, Proteus mirabilis
  misc_feature (639)..(648): n is a, c, g, or t
atggaacactttactaaaaaatcgttatttacctgcgataaaactaatgaaaatctccctaataaaccgggtgtaataacacactgccaagatctagcatctgacttagggttaagcgaagcttttgcgcaatacacaatatcttatacttcttgtgacagtgttcatggagaaattatccgtgaagatactggggctgtttttattccgaaaagtcaggcacctaaagatggttggcctgtcattgtatggaatcatggtacggtagggatagcgccaacttgtgctccctcattaacgcctaaaaatagtcgcgtatcgcaatatttaaatacttggctatcccttgggtttgcgattgttgcaccagattatccaggtttaggctcatcagggttgcatcattatatggatgaaagagcaacagcatggagcgctttggatagtgcaaaagctgtcttgaaaggtgggttttcgctaagtaatcgctttatctttatggggcaatctcaaggggctcatgctgcatttgcctctgtcggctatcagcctgaatatgcaccagaattaaatatcttaggtgcgatagtgacagggacgccttattttagtgataatctacttgaaaactttattagnnnnnnnnnnctttattag

SEQ ID NO: 308787 - DNA, 399 bp, Proteus mirabilis; identical to SEQ ID NO: 306762

SEQ ID NO: 308788 - DNA, 270 bp, Proteus mirabilis
gtgggcgtgcaagaaaacggcattactcaagaaatttatgatgaattagagcgtttgattgccgatgcacgccctgttagtcggcatctattggggttatctatcaaccttgattcgcaaggtgaattttacctttctgccgccacctttagcagtgatgagttaacggtttacccctattttgcagaagaaattaccgtatctggtgcgccattaacggcggtcggagtacacattattgataaagttgaggtcgcacatgagcgctaa

SEQ ID NO: 308789 - DNA, 1878 bp, Proteus mirabilis
atgagcgctaaatttttcgccttattaacggtgattggtgccaataaattggcaaaagccacggcactaggcaccaccttaaaaattacccaaatggccgtgggtgacggtggcggaatgttgccaacacccgatacacaacaaactaaactcgtcggcgaaaaacgtcgcgcgggattaaataccttatttgttgatccaaaaaacgacagtcagataattgctgaacaagtgatccctgaaaatgagggcggttactggatacgtgagattggtttatttgatgatgaaggcagtttaattgctgtaggtaattgccctgaaacctataagccacaattacaagagggaagcggacgaacgcagactattcgcatgatattaaccgttagtcataccgagtcagtcgagttaaaggttgacccctcggtgatattggcgacccgtgaatttgtcaatgatgccattgaaagtgcctcaaaacagacattggaggaagtcgctaagctttatgccaccaaagccgaattaagcacgggattaagtaaggtacaaaaatcagcggatgccgctaacacgaacgccaatagtcgcgtacctagtacccgtaaagtgaataataaaccattgagtaccgatatcaccttaacggcgggtgatgtgggcgcagcaacgccggcgcaagtaaatgaagccaagaccgccgcatctaatgcacagaccacagcaaacagtggtgtgagcaaagcggatgccgcacagaaaaccgcaaatgatgctgtaagtaaagctaacgccgcgcaagctgccgcaaataatgccaatactaacgctaatggtcgtgtacctagcacccgtaaaatcaacaacaaaccattaagcacagatattacgttaacggcgggcgatgtaggtgctgcaacaccggcacaagtgaatgaagccaagactgccgcatccaatgcacagaacacggcaaacaatggggtgagtaaagcggatgccgcacagaaaaccgctaacgatgcagtaaacaaagctaacgcagcacaaactgccgcaaataatgccaatactaacgctaatggtcgtgtacctagcacccgtaaaattaacaataaaccattaagcacagatattacgttaacggcgggcgatgtaggtgctgcaacaccggcacaagtgaatgaagccaagactgccgcatccaatgcacagaacacggcaaacaatggggtgagtaaagcggatgccgcacagaaaaccgctaacgatgcagtaaacaaagctaacgcagcacaaactgccgcaaataatgccaatactaacgctaatggtcgtgtacctagcacccgtaaaattaacaataaaccactgagtgcagatattacgttaacggcgggtgatgtgggtgctgcaacaccggcacaagtgaatgaggccaagactgccgcaaacaatgctaacaataatgccaatgggcgggtgcctaacacgcgtaaagtaaatggtaagccactaagtgctgatattcgtttaacggcgggtgatgtgggtgctttaactcaagggcaagctgatgctagataccaaactaaaggaacaaattctaaattaaaattaatatggaataaattcgtcggcagtggaggtgttgttgacttacctgaagatattcgtggaaagtttgcgcttattgcaacaaatattaatgttgaaatttatgcattaacgtatttccccactatggataatatagaggttgaagtccatcgtggttctacggctttttgtcgattaaaaatcactaatggaggtaagcgaatcacagtagcatccatggattgtgggttatataaaatcatactattagattag

SEQ ID NO: 308790 - DNA, 123 bp, Proteus mirabilis
atgatgagccctattacattatctgtacctttaaaacttattttatttatcgccatggatggttggggactgttatctaaaggactcattaatcaatatcttgatttgatggcggtgaactag

SEQ ID NO: 308791 - DNA, 474 bp, Proteus mirabilis
atgttttatatcgcaaataataaagaagttattgttgtttggcgaggaacggcaggaaaaactgatatatttacagatataaaatttaaaccagttaaactgcggcaggatatggggatagaaggctatgtgcactctggtttttataactcatttaggaccatggatggtgaatataaattaaggccgaaagtaaatgtaaatgatgataaaaaaggtaaaaaaaatccattagatttaatcaaaggtttagcttcagagcgaaaattatttatcgcagggcatagcctaggaggggcattagctttattacatgccataaaattaagagaatataatccagtgctttatactataggaatgcctcgggtattaacactttctattacagaacagttgggagatattattcaccatcgccatgttaatgaggacgatccagtaccagcccttccttttgaaaaagatatgtag

SEQ ID NO: 308792 - DNA, 549 bp, Proteus mirabilis
atggcgagcaaaactattgataaattgaaagcagatttcaatataaaaaatgatacatttattcaccatggtgatgctgtgcatttttataaacaaacattagaaaaatccgtgtataaagaagtattggcaagtcgcgcatatgtgccaagtgtttctttgcatataaatatagatgaaaagctctatctcgtctctgaattactacccgatcatcggcttaaacaagaattttttgaactatataagttacccaaaacagcatcacctggtgtaactggtggtggagaccactcaagtcgtaaatatacaaactttattatttctaaaataattagtttagttaaatataacggattaacagaatctgcatatgatattagagcagaattggtcaatcaaaaaagactatcacaagccaaatacgatgaaagcagttatttactagacttagatcttatggtcgcagatacattattacccacattacttatgccagaaggtataacggcgctgaaaaggttcaaatatgctaatgacaatgattaa

SEQ ID NO: 308793 - DNA, 567 bp, Proteus mirabilis
  misc_feature (555)..(564): n is a, c, g, or t
atgaaatatcaagatgtaacaaaaaccccctgtgagaacgcttattttctagtctttaatcttattaactcatcggaaacccgccctactcttatcgacttttgtaataatctatcaggtcttcttcgtagtatgagaacccgtttccctgaattagacgtaagttgtgtgatgggatttggtgctgatgcatggtctaaactattccctaatcaagctaaaccgcgagaattaaatacctttaagcaaatcaacggcgatgtgtataccgcagtatcgacacctggcgatctgttttttcacatacgggcactaaaggtatccgcttgttatgaattagccgcaattattagccaaaaattaaactctattgccacctcagaagatgaagtacatggtttccgctattttgatggtcgctcaattattggctttgtggatggaacagaaaatcctgagtttgaagatgagcgtgtcgcttatgcggttattggtgatgaagatccactgtttaccggtggaagttatgcatttgtacaaaaatacattcatgannnnnnnnnntga

SEQ ID NO: 308794 - DNA, 1389 bp, Proteus mirabilis
ttgtctattcaatctgaaaataaaactaaacttattcaattattacctgagctacaatacagtggtttctcttctggagaatatttaaagcttaatctacagggtaatagcgaaaataatcattatgctggaattgcggctcattcatcaattaaactgagtcgcggttatgacaattatcaaataagctcattgctagctaaaaatagaaatgaaaagatcactatttctctgagtgataatgataaacaattaacatctgattgtactagtcatttctttttatccgatgtgagtggatttgatttgatgtttagtgatggcgttttatctcatcgctataatcctgatgctcatattaaacttgttttcgatacggaaagtgttagtgctatttttaactcaggaatgacacttcaatttattgataaagataatcgagtttttcatttgcctaagccagacagcggtcagcgtttactgatccccactatcactttggatgttaggttgagtcatcaaagtgatgttctgatgatcccaccctccctacgtttaaataaagaggcattatcattgtatcctaagtattttcgtagagaagaactatcatcacgttcaacgcaattacagcgtattatatccactcaaacactagagcctcattcattaaaggtaacagaattactgagagatgatattgccgttaatgataatcaacctgttaattctattttgtctctcaataaactattttcaaacagatcacaagatatattctctcaagccatagatttattaccaatgatagaattaatggatggtgatgatattgttgttaatcataatcaaagtagctcagtgattgatgggggtaaaggtgatgatcatattgttgtcaatgaagggcaccatattttaattgctggagaaggtaatgataatcttaatggcggaagtggacatgatctgtttatttcaacctcaggaaatgattatctaagtggaggaagtggtaataatgtttatatagtacaaaaacgtcatggtgaagtgacggtgtatgatgaaggtgaaatgagccatgtttttgtatcagggttatctgagcatgaaaagttaatatcttcccaagtaggtgaagattggcagtaccgaactaccgataatcagtttattttaacggttaaaacaacaagggtagggaaagctgaaaataatacggtgaaggttgtggaaaagcagcaaatattgtcaccacgagcgcttgcgacaattattcaacaaatggctcaatttaatcagcaacaactatcgacgatgcaaggcagtgatgttattccctcatcaaactggtcgcctttagctgtggtcgttaagcatttataa

SEQ ID NO: 308795 - DNA, 1266 bp, Proteus mirabilis
gtgaataataaaccattgagtaccgatatcaccttaacggcgggtgatgtgggcgcagcaacgccggcgcaagtaaatgaagccaagaccgccgcatctaatgcacagaccacagcaaacagtggtgtgagcaaagcggatgccgcacagaaaaccgcaaatgatgctgtaagtaaagctaacgccgcgcaagctgccgcaaataatgccaatactaacgctaatggtcgtgtacctagcacccgtaaaatcaacaacaaaccattaagcacagatattacgttaacggcgggcgatgtaggtgctgcaacaccggcacaagtgaatgaagccaagactgccgcatccaatgcacagaacacggcaaacaatggggtgagtaaagcggatgccgcacagaaaaccgctaacgatgcagtaaacaaagctaacgcagcacaaactgccgcaaataatgccaatactaacgctaatggtcgtgtacctagcacccgtaaaatcaacaacaaaccattaagcacagatattacgttaacggcgggcgatgtaggtgctgcaacaccggcacaagtgaatgaagccaagactgccgcatccaatgcacagaacacggcaaacaatggggtgagtaaagcggatgccgcacagaaaaccgctaacgatgcagtaaacaaagctaacgcagcacaaactgccgcaaataatgccaatactaacgctaatggtcgtgtacctagcacccgtaaaattaacaataaaccactgagtgcagatattacgttaacggcgggtgatgtgggtgctgcaacaccggcacaagtgaatgaggccaagactgccgcaaacaatgctaacaataatgccaatgggcgggtgcctaacacgcgtaaagtaaatggtaagccactaagtgctgatattcgtttaacggcgggtgatgtgggtgctttaactcaagggcaagctgatgctagataccaaactaaaggaacaaattctaaattaaaattaatatggaataaattcgtcggcagtggaggtgttgttgacttacctgaagatattcgtggaaagtttgcgcttattgcaacaaatattaatgttgaaatttatgcattaacgtatttccccactatggataatatagaggttgaagtccatcgtggttctacggctttttgtcgattaaaaatcactaatggaggtaagcgaatcacagtagcatccatggattgtgggttatataaaatcatactattagattag

SEQ ID NO: 308796 - DNA, 1026 bp, Proteus mirabilis
atgataaaaaataatgacttacctgcttttatgacgcaagtggttattactgaacccggtggcgttgataaactgcaattagaaaatagcccattaccgtcattgccccctcattatatgttggtaaaagttaatgcagcgggtgttaatcgccctgatatttttcaacgtcaaggtagttatccaccgccagccgatgcatctcctatattaggattagagattgctggcgaagtggtgaaattaggtgaacattgtacaaaatgggcaataggtgatcgtgtttgtgctttagttgctggtggcggttatgctgaatattgtttagtccatgaagatatcgctttaccgtcgcaaggattaaccgatattgaagcggcagcattacctgaaaatttatttactgtttgggcaaatctatttcaactcggtcagttaaaagccggggaatcggttttgatccatgggggcacttctgggattggctctatggcgattatgttagcacacaatcttggttgtgaaatttacacaacggtaggttcaaaagaaaaagccgaagttgcccaaaaattaggggctaatcatgttattaattaccgtgagaaagattttgctacagaaattcctgtattaactcaaggtaaaggcgttgatgtcatacttgatattatcggcggcgattatgtggaaaaaaattatcaagttgcggcgaaatttggcagagtgatccaagttggcatgatgaaaggggcccctaaaaacttaaatatgatgccactgatgcttaagcgattaattcatacaggttctaccatgcgttctagaacgccagaagaaaaaacgcatatagcacaagaattaaaacaacaagtatggccgttgattatcaaaggtcaaattaagcctattattaatgcggtcttttctttacaagaagttgccaaagcacatcaattaatggagtctggtgacttaattggtaaagtagtgcttgagattgatatgaataaatcactggtgtag

SEQ ID NO: 308797 - DNA, 945 bp, Proteus mirabilis
atggaattaaaggattattacgccattatgggggtaaaacccactgatgacatgaaaacaattaaaactgcttatcgccgtttagcgaaaaaatatcacccagatgtaagtaaagagccagatgctgaggagcgttttaaagaaatagcgcaagcttgggaaattcttggtgatgaacagcgcagagctgaatatgacgaactttgggctcaccgcaatgatccgaaatttaaacaatttacacagcacaacaattcacattcaaaccaacaaagttttagtcaggaagattttgacgatctttatgcttctttctttggtcaaggttcaccttttgaagggcgccattcacgtcaagcacctagacaacgtggacaagatctagaaattgaattaccggtttttcttgaagaagcacaagaagagcataagcgtaccattagctatcatttaccggtttataatgtctttggcatgatagagaaagaaattcctaagaccttgaatgtcaaaattcctgccggtgttgttgatggacaacgtattcgtttaaaaggccaaggtactgctggggagaatggcggagaaaatggtgatttatggctaactatccgtattgcacctcatccattatttgatgtaaaagggcatgatcttgaaattgtggttcctattgcaccttgggaagccgcattaggtactaaaattgctattcctacacttaaagataaaattttacttactattcctcccgctagtcaggcaggtcaacgcctgagaattaaaggaaaaggcttagtaagcaagcaaaaaagtggcgatctctatgccattttgaaagtcgtcatgccacctaaagtggatgaaaaaacacattcattatggcaacaactcgccgaagcccaagccgattataatccacgtaaaaactgggagaataaataa

SEQ ID NO: 308798 - DNA, 396 bp, Proteus mirabilis
atgtttattcaccggcacaagggcaccattggcgcacttaagcgcgtggtcgagccgttaggttacatcatcaaagtcactgagtggtggcaaaccgacgatccgccgggcacatttcgccttgatgtgggcgtgcaagaaaacggcattactcaagaaatttatgacgaattagagcgtttgatcgctgatgcacgccctgttagtcggcatctcttagggttatctatcaaccttgattcgcaaggtgaattttatctttctgccgcgacatttagcggtgatgagttaacggtttatccgtattttgcagaagaaattaccgtgtctggtgcgccattaacggcggtcggagtacacattattgataaagttgaggtcgcacatgagcgctaa

SEQ ID NO: 308799 - DNA, 147 bp, Proteus mirabilis
atgatttattctatggcggtgctggcaatgatttattctatggtggctctggaaacgatgttatatacggagaattgggaaatgatgtgctctatggtgatgatggagatgatatgcttatcgattattatggtgctaatatgttag

SEQ ID NO: 308800 - DNA, 270 bp, Proteus mirabilis; identical to SEQ ID NO: 308788

SEQ ID NO: 308801 - DNA, 501 bp, Proteus mirabilis; identical to SEQ ID NO: 308530

SEQ ID NO: 308802 - DNA, 540 bp, Proteus mirabilis; identical to SEQ ID NO: 308397

SEQ ID NO: 308803 - DNA, 246 bp, Proteus mirabilis; identical to SEQ ID NO: 305161

SEQ ID NO: 308804 - DNA, 246 bp, Proteus mirabilis; identical to SEQ ID NO: 305160

SEQ ID NO: 308805 - DNA, 1539 bp, Proteus mirabilis
  misc_feature (1527)..(1536): n is a, c, g, or t
atgttgtgggcaatgggcgcattattaaccatgttttatctcatcaacatctttaatgatactaaatcagatatccgacaagaatatagtaataactataccgatttattgggcttctttcgccaaacctcgagtactatccgcgatttgcaatatttagcagagcggcatcaagagcaactcaatttaaaccctaagatgaataattcttttttttatgaagggcctttttcacttcataaattaagtgaaagtgccgattgtgaattattcaaagggcaaacaaacaattattttcgatcatttaatagtattctgtattactggaaagataatacccctgctttacaaggtatcaaccaagtatttatggttggctctcatagtatgtgtatgattaatttcccattgcgtgcatcacctattgatactgaactgttgaaaaaaatggtttatgaaaatacacgtaattacattaatcaacgagctcaagggaaagagagtaatcaatactggatagtacctgatgccaagggggatagcggtatcctctatgtcatgtcgccagtttatgcgtcagggaaatttattgcactcattggtatcgaaagggcgatccgattggagtatttttcacctacgaaagatcgcgttatctctattcatcttttaaacaataaaaataatccagtcttaagttatcctgaagagaataattatcgcagtgtaagggatgtaccggatgttagtgctccttactttggctttgatgatgattttagtgatttagttgcaaaacgtaagctacttccttcttcttttagtgtggtctattcactaccattaaaacaaattttaaatgaatttaagtttactatttttaatgccattattttaaatatcatttcggcgattgttatctttattttcgtttggatttttgagcgaaaaatattttcacctgcagaaaataatgcttcacgcttagaggagcatgagcagtttaatcataaaatagtcgcgtcagccccagtaggaataagtatcttaagaatacgcgatggcatgattattttaagtaatgagctcgcccataattattttcgcttattaagccatagtgataaacaaaatattctctctattattgctgaaaaaagtagcaatatagtggatgtggtcactaataatcataatcatttgcaaattagttttgtgaattcacgttatcagaatgaagatgtggcgatttgcgtattagtagatatcagcgctcgtgttaaaatggaacgctctctacaaaatatggcaacggccgcagaacaagcaaaccaagctaaatcaatgttcttagcgacagtcagccatgaattgcgtacaccactgtatggcattattggtaacttagaattattacaatcattgacgcaaaatgaagagactgccagattattaaaaacaatggataactcttcatcgctgctactcaaaattatcagcgatatcctcgatttctcgaagatagannnnnnnnnntga

SEQ ID NO: 308806 - DNA, 831 bp, Proteus mirabilis
  misc_feature (35)..(44): n is a, c, g, or t
atgaattacaatcctttgttagccgctttagtgcnnnnnnnnnnctttagtgctaatgcatcaaagtctcgtcaagccacttcgcgtgcaaaacaaattgaaaaaattcaattaaccgaagttaaagcttccagccgacaaaatccctttattcgttttgagcaagagaagaaattatttcgtaatgcgttagaagtagagaatattgctaaaggttatgaagcaaatacgcctttatttaaagacgtaaatatgatgctggaagtgggcgaaaaagtggcgattttaggcaccaatggtgtgggtaaatcaaccatgatcaaaacattagtgggtgaattaacgcctgataatggacgcgttaaatggtctgaaaatgccactataggttattatgcacaagatcatgccactgattttgaagttgatatgaccgttttcgattggatgagtttatggatgaagccagaagatgatgaacagtcggtgcgtagtgtattaggtcgccttcttttctcacaagatgatattaaaaaatcagtcaaagtattatctggtggtgaaaaaggcagaatgctgtttggtaaattaatgatgcaaaaaccaaacgttctgattatggatgaacctaccaaccacttagatatggaatctattgagtcactgaatatggcgttagaactctatcaagggacgttaatttttgtttctcacgatcgtgaatttgtcagctcattggctaaccgcattattgaaattacgcctgaaaaagtgactaatttccaaggcacttatgatgagttcttggctaagaaagggattgatggttag

SEQ ID NO: 308807 - DNA, 603 bp, Proteus mirabilis
atgccaacaattcatctggttgatgacgatctcgccgtcaccgatgcttgccaatttctattagaaagcttaggttatgcggcgcaggtttggaatgacagcgaatattttctccataatattgacctttatcagcaaggggttgtgctgttagacatgagaatgcctaaagcagatggtagacaagtacatcaatatttaattgaaaaacacagtacgctagcagtgattttcttaacgggtcatggtgatattccgatggcggttgaagaaataaaaaaaggtgccattgattttttacaaaaacccgttgatagcaatgcattactctctgcactgaaatccgcctttactgaaactgcaacacgctttacggctgatgatatccgtcgccgttatgcctcactgacaccaagagaaaaagatattgcatattatgttattcaaggcctaatgaatcgagaaattgctgaaactgcctgtgtttctatcagaacagttgaggtacatcgagcaaaagtgatggataaaatggccgttaaaaatatcgcagaattagttaccgcattacaaggaattgatattgtagcgccaaatttatga

SEQ ID NO: 308808 - DNA, 780 bp, Proteus mirabilis
atgaacacgcttcccatttattatgttaacgcttttacttcaacacctttttccggaaatccggctgcggttattttgttagataaatggctacccgatgacacactacttaaattagccaatgaaattggtttaccagaaacggcttttttagttgccaatcatattcgctggtttacgcctaaagtagaagttcccctatgtggacatgcgactttagccacggcttttgtattaaaaacgattaacaaagcacctgcgacaagctttaaattccattctttgtctggagagctcacggtatcttgtcactcttcaagttttactctcgattttcctcaagtacctgcatcattaaatccaactataaaaccatcattagaaacggcactaaacatagatattgaagaagtttggcaatctcacgacagatatacctgctttgtggctgatcctaacaaggttattgattatcaacctgactttaatgctataacacaactaccacttcccggtgtaatattgaccgcgaaaggtcatgcgccttttgattttatttcacgcttttttgcaccacgtaaaggggttaatgaagatccggtaactggcacttcacattgtgtattagctccaatttgggcaaaaaaattaaacaaagataaattaaatgccagacaagtttccgcgaggggaggcaatatacagtgtgaactcaaacaagagcgcttattgcttactggtgatgctgtactatttttaaccggtgaaataaccttttaa

SEQ ID NO: 308809 - DNA, 990 bp, Proteus mirabilis
atgagccaaagtacgctaagagtagacgagttatatactgatgatattgatgagaacatggaagagttcgatgaagcagccgcaacaaaagaggctgaaaatgaatctgacgctcaagatgaaattgaactcattgaaggagtcaatcagcgtgcgttagatgcaactcagctctatttaggagaaattggctattctccattgttgagtgctgaagaagaagtattctttgctcgtagagcgttacgaggtgatatcccgtcaagacaacggatgatagagagtaatctacgtttagttgttaaaatatctcgccgttatacgaaccgagggttagctcttcttgacttaattgaagaaggtaatttaggccttattcgtgctgttgaaaagtttgatcctgaaaaaggatttcgtttttcaacctatgccacatggtggatacgtcaaactattgaacgtgccattatgaaccaaacccgcactattcgcctccccattcatatcgttaaagaactcaatgtctatttaagaaccgcaagagaattagcacataagctcgatcatgagccaagtgttgaagaaattgcgcaaacgctggataaacctgtcgatgatgtcagcaaaatgctacgtttaaatgaacgtatttcttctgttgatacaccgattggtggggattcagataaagccttactagatattatttcagacgaaaatgaagaagggccagaagcaaccattcaaaataataacctcaaggaaaatatcgtaaaatggttatttgaattaaatccaaaacagcgcgaagtattagcgcgtcgctttggattactgggttacgaggctgaaacattagaagatgttggtcgagaaattggtttgacaagagagcgggttcgtcagatccaagttgagggattgcgtcgtttaaaagatattctgcaagggcaaggattatgcatagaggcactttttaagatgaactag

SEQ ID NO: 308810 - DNA, 537 bp, Proteus mirabilis
atgttaaaaaaaacaacactagctttatttgttgcaacgttctttctttctactaatgcattggcgttatctgataatactattacttttcagggggaagtttctgatgaaacttgttctgcctcaattaatggtaatcaggcaaaacctgtggttattttaccgactgttagtgccaaggagctaaaagatagtggagataccgcaggacaggtaacatttgatattggtctttctggttgtacaggtaatacagataaacccactaaaatatcgacggtttttgtcggcaatcaagttaccagcaatggcaaccttggcaatacgggaaacgctaccaatgtggaaattcaacttctggatactgctcagaaagttatcaatttaactggtggttttaaaggtgagggagatctgcaattaaagccaggagaaacgcaagccagcgcaacttacactgcacaatactatgctacaggtgccgcatcagcgggtactgttgaagcaactctacaatatgcggtttcttatctgtaa

SEQ ID NO: 308811 - DNA, 564 bp, Proteus mirabilis
atgataaaacataaattaattttaccgaagattgcgcaacacattgttatattgacgcataatatatttttctttcaagagattctactttcagtttataaacgactggctcccgaacgtacaacaccaaaggggtgtgcactttatcgcatcattaaaggagaatatagtgattgtatcccattatcgatgcacgacatgctgaatgagtatcaggctttatggcaaaccatacgggatgtccgcgatggaagaagtttaccggtagtattacctaatacaatgcgaaatattcttgagtactatttcagtttttcttgcaaacaggaaaaactggataaagcgctaaataagctagcagttgaatattcagcaggggaatatgactcattttatcgagcaattaaccgtcattcccattctgatggcagaaatatcatggctacaggagtgattaatgtagaaatgtatttccgtttatttcagaaaatttttgaagaaacgaaggattctgatcattacaacacgatgatggggattactgttgagcaaacagaaggttga

SEQ ID NO: 308812 - DNA, 1146 bp, Proteus mirabilis
  misc_feature (1125)..(1134): n is a, c, g, or t
atgagggaaacttcattaggaattcaaaaatatgagctggtacaacttacagagagactggagttgttacttaatagtgaaggaactcaatatacagagattattgaaccagaggtttatggcctatctgacgaaatgctgactctacttcaaagttcgttgacagcatcgtccgatacaccattttcagccattattcagcagttaggtaacgctgattgggttcatagtggaacaggttatattaaagataatatttgtccattttgccaacaaaaatttgattctcagcatcttcttcatgaattgacactcatgtttgataaatcttatgaagatgctctggcaacgcttacccacagtcagacagtcatttcccatgaattagacttattggagtcattccatgagcatttacgacaacaccctgtagttagtgatgatcaccaagtttttagtattattaaatctctgcaacaaactttacgtaataatctacaatcactcagacaaaagctactacagccttcgcaatccatacaacctgacgttattacagatatacgtcagcatttgaaccagatactggtaactttaaatagtaacattagagacaataatcagctggcagccaattttagtcaggagcgagctcgcttggcggcagattcctttgcatatcttagagaagtgagtgatccttatttgcgtcaatgtgatcaggaattagcagaaatacaacaacaattgcaagctgagataaatcaagttgatttattgagagatgaagagcgagcactttcggtcgaaactactcatcttatagggcaattatcagttatacagcctacaattgataacattaattataatctgacacaattagggatcaatgatttcaatattatttgtcatgatgagagcttgaaactatatcgcttacatagacaaaaccagccagatgattctgaggtctttaaatctttgagtgaaggcgaaaaaacaatcatatctcttctctatttcctagaatcatgcattggtcacgtacctgatagccagacaatacaacctaaactgattgttattgacgatcctatttccagcctgtcacataactatatnnnnnnnnnnctatatttatga

SEQ ID NO: 308813 - DNA, 570 bp, Proteus mirabilis
atgagaaaaaacaatacatttgtaagagcaaatcctactaaatttaatgcaacaacgggaagaaatggtagttttcaagataatgataatcctcgttcaaatattttttatgccataggttttgaaaccgcagctttagaaataataaatattgctttaaatagttcaaataataatgatattgattgtttagtatatcctatatgttttaacatgcgacatgcaatagagttaagattaaaaaaattatggctcgatttagaaattctttctagatttagatgggaggcattacaagagcaccgaaaaaccaaattagcgcaaaatagtaatttaaaaaaaacagaaatagctcccttccccaaaataaaagcattacaatatcacgacataggagttctttggaaaaatatatcagaatatgctccagtaatagattctcgttttaaagatataatagacatactctcagaatttattcaagatattgctgatatagatcctacaggacaaacttttcgctatccatctgataatgaaagtaaaacacacttattagaaattttctaa

SEQ ID NO: 308814 - DNA, 732 bp, Proteus mirabilis
atgccactaatcgtattaaaagggctcagaggtggagtaggaaccacctcaataaccgttgcactggctcgccaatttcatcaccataaatacaatgtcattgttatcgataactgtgtgaataatatcttacatttctattttccagaaaaatcacaagtcaccacattaggacaagcactactcgcgcataccccaatagaacaagcgatttgtgattatcaaaacggttatcaaattttaccttttggagtcgttaattcagaagataaattgcatttgcaagcatctgccactgccaaccaacatctgcagcatttttttaccgcttttactcaacaatacccagacactttaatttttctcgatttacaaccagagcacgataccctttttaaatcatgggttgcgaaagccaatatcgtattaaccgttaccacacctgaaagtaactgtcatattcggcttaaccaacatacctttgctgccaatgagtatattctggtgaatcaattttgtgccactagccaaatccatcaagatttttatcaattttggcaaaccagtcagtttcctttctgcccaataaaacttcatcgcgatgaagcattattagaagcctgtgcttcacgcttacctttatatgattaccgcgctaattgcatgttagttgaagaaattaatcaacttctacaatggtgtttgcctttattgttaagcaaaaaaggatag

SEQ ID NO: 308815 - DNA, 267 bp, Proteus mirabilis
  misc_feature (242)..(251): n is a, c, g, or t
atgttaaccattcactcgttaactaccggtattttaaccgaggtttcattacacctagagcaagggtgttgtttagggatcagtggctcatcaggtagcggcaaaacaacgttactcaatgctattgcgggttataccggctatacaggggatattgttttagctaaccaaaatatgaataaattacctgtttggcagcgcccctgtcgttatttaaatcagcgtctttatttattcccttnnnnnnnnnnccttttctcactgtaa

SEQ ID NO: 308816 - DNA, 282 bp, Proteus mirabilis
gtgtcattaagtgaaaatcaggaacgcttgatacctgaatttaaagcctttgctgaaaaaatgggattggatttaccaccagacacaatgtggtcaatggtgatgaacggtatgcgccttaattatggcgatgaagtgatttggtttgagaacgggaaggctcaaatttcatcggcgaatagtgaaaacgttaattttgaagaagtgaggaggaaaaatattgagaaaaggagagataggataatggataaggttagaaatcatggaaaattaattgattga

SEQ ID NO: 308817 - DNA, 723 bp, Proteus mirabilis
gtgagtatcgctgataagttgggtgatatagcggaaaaagtaagagcgtccgccgatgcgggagatttcgccgcttatatcgagcaccaaggaggccctaacgttaagcgtaacctacaaacgttattagtcgctcgtactgttgccgatgagccgaattcttatgatgaagaggtgatgagagtcatcggattatattcgccgataaaaagtagtgatttagtaaaaacgcgtgagcgtcagtatcgtttagttcgtaaatctaagcaggatattgaggcaattgagcataagcgtaagtcagaaacggggcgggttttgactttaaaaagcgcgatcagcgcgcctcggagtcctgtcaataactgtggatcgggcagttcacccgatattaaaaaaccacacgataggggcttaaaatcgcccgtatgggggatttctgagcctgaatatttcgaccttcattcacaatatagcgattgggagaaatcatttggcgaggttttagagcataaaaagagtcagcggataatttcaaccgtgtcattaagtaaaaatcaggaacgtttgatacctgaattcaaagcctttgccgaaaaaatgggattggatttaccgcccgactcaatgtggtcaatggtgatgaacggtatgcgcctgagttatggcgatgaagtgatttggtttgatggtagtagggtgcagatttcatcaaagaaataa

SEQ ID NO: 308818 - DNA, 228 bp, Proteus mirabilis
atgcccgaaagccacttgtgtgaatatgaagctttttatcgcaaacaaccctttggtttatggcgagaggattatcggatggcacaagtggcgcatcttcttgcgatgataaatcgtgatccgaaaacgtctccaccggaattgatggattttatgccgatgtggcaaaagaaagccgcagaagaaacgtgggatgcggtcacagatcaagtcttagcatatcgatag

SEQ ID NO: 308819 - DNA, 249 bp, Proteus mirabilis; identical to SEQ ID NO: 305011

SEQ ID NO: 308820 - DNA, 423 bp, Proteus mirabilis; identical to SEQ ID NO: 298890

SEQ ID NO: 308821 - DNA, 600 bp, Proteus mirabilis
gtgagcaaagcggatgccgcacagaaaaccgcaaatgatgctgtaagtaaagccaccgccgcacaaactgccgcaaacaatgctaacactaacgccaatgggcgagtgcctaacacgcgtaaagtgaatggcaagccattgagcggagatattagtttaaatgcgagtgatgtaggggctgcaacaccggcacaagtgaatgaggccaagactgccgcaaacaatgctaacaataatgccaatgggcgggtgcctaacacgcgtaaagtaaatggtaagccactaagtgctgatattcgtttaacggcgagtgatgtaggggcgggggctaaaaatactgcaagtaaagctgaaaatggttggtggaaatgtggtgatacaggaattatttatcaatgggggaaaaagacaattacctataatgattattttattaatttcccgattgcgtttcctaataaattgttatcatttcatgccattgattatgatggagcaaataatccagggcttaaattaagcaaatcaaatttatctaaagcagcaatggaaatgccatcagggataattgctgttatgtggcttgcagtggggtattaa

SEQ ID NO: 308822 - DNA, 246 bp, Proteus mirabilis; identical to SEQ ID NO: 305160

SEQ ID NO: 308823 - DNA, 336 bp, Proteus mirabilis; identical to SEQ ID NO: 308538

SEQ ID NO: 308824 - DNA, 132 bp, Proteus mirabilis
gtgaatagtcagcctttttctgtcgcgttaacacaaacggaagatggctatccggctctggtacgtacgctaggggaaggatggcagaatgtcgtcgctgagatcgcaaaaacaattaaatcacaatattaa

SEQ ID NO: 308825 - DNA, 303 bp, Proteus mirabilis
atgataaaggttattgcagaagattttattaaatcagcatcaatagaaacggttttaccactttaccaagaattggtgaaagctagccaacaagaagcgctttgtattagctatgatttatttgttgatgagaaagatcccggtcactttatttttattgaattatggccaaataaagaagcactagatattcattgtaatagtgaacattttcgtcgcatcattccgatgattaaacaatatacaaaagcagagtcaaaaatcactttagtcaatagtgtatttgataaaaatatagattaa

SEQ ID NO: 308826 - DNA, 237 bp, Proteus mirabilis; identical to SEQ ID NO: 308584

SEQ ID NO: 308827 - DNA, 225 bp, Proteus mirabilis
atggaggttggtgccgatatttgccaacaaattagcgcaggagaaaaagctttaattggtgtaatggttgaaagtcatttagaagagggcaatcaatcattagaaagtggtgaacctttggtatacggtaaaagtgtcacagatgcttgtattgggtgggatgatacagaaacgttattacgccaattagccgatgcagtcgctactcgtcgtaataaatcataa

SEQ ID NO: 308828 - DNA, 198 bp, Proteus mirabilis
  misc_feature (183)..(192): n is a, c, g, or t
atgaaagtgatcatcttaggtggcggcgttattggtgtaacaagtgcgtggtacttagtacaacaagggcatgaagtcattgttgtcgataggcaaagtagtgcggcagaagagacgagtgcaggtaatgcagggcaaatatctccgggttatgcaacaccttggggtgccccgggtattccnnnnnnnnnncagtaa

SEQ ID NO: 308829 - DNA, 804 bp, Proteus mirabilis
atgagaaaattattattagtggtgcttttggcctgtacttcattggttttaaccgcttgctcaccagatgaaggtgacaaaccgttaaaagtggcaataaatacagggccagatcagcaaatttgggatgaagttgttaagctggcaaaagaaaagcagggattagatatcaaggtgatcacctttaatgactacgtgttacctaatgaagctttgcgtaataatgatgttgatgtgaatgcgttccaaaccgtaccttactacgaagctcaaagcaaagagcgtggttatcaatttgaaatcataggtaaaacctttatttttcctattgcagcttattcaaataaaatcaaaaccatagaggcgcttcctgatggtgctaccgtcgctatttctaatgaagcaaccaccctaggtcgtagtttattattactgcaggctcaaggattgattaaattaaaagatggggtggggtatttaccaacgacacttgatattattgaaaaccctaagaaacttaaatttgcagaaattgatacaccacaactaactcgtacgttaagtgatcctaatatttacctttccatcatcaataataacttctcttcacaagtgggattattagccaaacgagatggtttatttatggaaaataccgattctccttatgttaatttgattgttgccagagccatagacaaagataacgaacgattaaaaaaactcgtcgcggttttccaaagtgatgaaattttgcaaaaagcgcaagaagtttataaaggtgatgcggtgaaagcgtggtaa

SEQ ID NO: 308830 - DNA, 741 bp, Proteus mirabilis
atggagtatataactaataaacattgggccaaatatatcaagggatatatttttactggttgtgcaatccgagataaaaatattgtgtacttttgtttgcgcaaagatattccatacgaaaaggctcgaaacttatggaacagcgaaatcccctcacagttattatgtatttatttagacacaccagatgacccgattgattatattagaattgaagggttcgataatcctaaagtaggtatttgtttaaaaccgaaagaacaagggatgcttgcatctagaggcgatggtgggtttgtcaagtgtatgggcagtggatctaaatttccgctagaaaaagttatggatggtgactatgcaaaccctaaaaatatcaaatgtgttggtggatatgcttattatgttggtacttcgcgcgaaatttataaacgagtggatattggaaaatggcagagaattcaacatgggataccaggaggagaaaccaatacagatatgggattcactgatctcgatggtttctctgaacaggatatgtatgccgttggcggtgcaggtgatgtttggcattataatggcgaaatctggatcccctgtggttttccctctaatgagcaattaagtgcagttttatgtgcccctgatggttatgtgtatattggcggtgaaggggcagtttatggcgagggcgtgaataccaatgggaaaaactttatcacggcagttcggctattttactga

SEQ ID NO: 308831 - DNA, 594 bp, Proteus mirabilis
atgagcaaacaacaacgtatcgctttatttgttttattattagctggattcgttactatctttgatctatttgtcgttaatgtcgctatagttaatattgaacaaacacttaacgccacactcaccgaactcacattgattattgtcggatacgaattagcatttggcttgctattaatcacaggtggacgattaggtgatatttatggacgtcgaacactctatcgctttggaatgtttggctttacgttatcatctgtattatgtgcaatttctccaagtgctgttttacttgttattgcccgttgttttcaaggactaactgcagccttgttattccctcaagtatattcaagtattcgccttaattttgatagctcacaagccaaaaaagtattcggcttacttggtatgacgttaggtgctgccgctatagcagggcaagccttaggtggattattaatatcattaaatatatttgggttagcgtggcgtactatttttttgataaatctttttattggtggatcgcattatttttttcgcgctatcttacccaaaatgaattatccgatcataccaaattggatatag

SEQ ID NO: 308832 - DNA, 759 bp, Proteus mirabilis
atgcttcctatctggcactggcaatggtttagttcattattttttcttgttggaataagtctattaatactatttttttgttatgaaaaaaaattaaaataccaagggaagcaacctctatttgacctgatactctttactaatcatcaatatgttattgggctcattattgttgtttttgtttattcaacatcatctgcttttcctatgataatgtcgatattattacaaagtgggtttaatcgtacggtttttgattctggcttaatgtttgttcctgcaagtatcggttttatactttcctctttattcacaccgaagtggatcaaaaatattggcgaacatgttatctattggggcgcagtctgttatgccttcagctatattttgcttattttaggcgtctattatttgattacccctaagaacactacattaattattcctttcttattgttagttggctttacacaaggcatgattatgactcctatgctgaatttagtgttagaaaaagtgaagcctgaacttgtagggattgcttccggattaacggcaacattacaacaaattggggctgctataggggtaacatctgtttccatcattttgcaatttagcctcacacaggttatatcaaggaatataattgaacattataagatagcgtttagttttagtatgttgtttaattttataatggctatatgtgcggcttttttcttgaaaaaaataacaaaccataagaatacgttataa

SEQ ID NO: 308833 - DNA, 1077 bp, Proteus mirabilis
atgaaaacttttatctgtgtatttgagcctacgaccgaggctcgtacaaacaacggtgctgtaccgctggccatagcgttaaacaccgctaatgcaaaactggcaacagcgactgcagtagtaaaattatctgaagcatatccagaagctatggataactttaacaccgatgagccattaattagcgaacatattgacggttctgtatgccctactttagatgctttcgatgaaaaatttgctgttgaaaatgagtatgacggtactcaatggaaacctattgaatataagaatttcaaaaaactaggaacaaagcccagaattgcgtgtttacttttatttggaaagactcaaataacaaacaaagagttctcttttacattgaaatatcttgctggcacagaagatcccaaaattcgtaatatcgccacaggccttgctgaaataacaaagttatctttgatggatgctgaacaaacgatggaaatagcacaggctatctatgagtttgctaatgaagatgtcaccgttgaagaagctaaatcactaggtgaaagctggctgacagaagaacctgagcaaccacaagaagaaatatcttctatcaagcgtaactacacaactatagatactgaaatcgccttagcgctgttagatgattttgatccgaataatgtcctcgcatctcaagtaaaaaaagccaaagaactgatagatgacgataataaagcatggaaacgctggtcaatggatttacgcacaacagctggaatcttggatataccacgtgaaaagattttctcgttaatagctgaaagtaaaaaacaacctgaactattagataatcccaatgcgcgaaaagaatttattgaccttcatttaggtattaacaagcctactggcaacgctggaaaagaagaaagcatcacctctaaccaattggataataccccttcggtatctagcaaaagcaccgttgaaaaggaaactaagcctaaacgttcacgtaaaaagcaagaagtagcccctaaaacagaaagttctccagtggttgaacaaactgtagaacctaaataa

SEQ ID NO: 308834 - DNA, 264 bp, Proteus mirabilis; identical to SEQ ID NO: 307943

SEQ ID NO: 308835 - DNA, 432 bp, Proteus mirabilis
  misc_feature (391)..(400): n is a, c, g, or t
atggggcgattaaagcagtttagtgtgtttgcactttgcctctcttttcaatccatacccgcaaatgcaattaactcagctcaaattattgcaagtgcattatcaccacactgtttggaatacaaaatagtggggatctgttactggctattttgcacaccattgggttgtgttgtgagaacgtcgataaaagtcagtcattatattccaaatgccgttgtttctagttatgaccaaactgggagtaattcatggggcgaaatatcacctttaggagcaggaatatcgggctttgctgaaggtggtggtgctaataaacaaaaacgagtaagaaataaaaataacctacattttaaaaatgtggatgtgattgggcatcctgctttagcgnnnnnnnnnntcctatatttgggcaatttatggggcaaatga

SEQ ID NO: 308836 - DNA, 156 bp, Proteus mirabilis
atgtatcgcggtttcaccattattaaactgccaagaaaagcagtaacaccgataactcgttatcacgtttggttagatgatcagtcatttggtaagtttgatgcaatggcagaagcaacacattatatcgacttattaaaaggtgatattcaatga

SEQ ID NO: 308837 - DNA, 150 bp, Proteus mirabilis; identical to SEQ ID NO: 308520

SEQ ID NO: 308838 - DNA, 222 bp, Proteus mirabilis; identical to SEQ ID NO: 308523

SEQ ID NO: 308839 - DNA, 828 bp, Proteus mirabilis; identical to SEQ ID NO: 308524

SEQ ID NO: 308840 - DNA, 324 bp, Proteus mirabilis; identical to SEQ ID NO: 308688

SEQ ID NO: 308841 - DNA, 357 bp, Proteus mirabilis
atgggcattgataccaccggcttaggacatggggtttatcagaatgtcatccagttttttcctgctgcgcgtgagtttatttataacccgaatgtcaaaaatgccttagtgattaaagcctatgacgtgattagtcacggacgtttagagttcgatgcacagtgcgttgatatcattcaatcttttacttccattcgccgtacgaccaccggaagtggtaaccgacctacttatgaagcctcacgcagtgaagaaagcggacacgctgaccttgcatgggcaacgatgcatgcccttttcaacgaaccattaaccggcaccaccgagaacagtaataacattgtggagatttattga

SEQ ID NO: 308842 - DNA, 756 bp, Proteus mirabilis
ttgatccttgattataatattaacaccactcatgaaggaagcaatacgcaaagtatttattacaatggtactgttggttataacttcggtagctggcgtattcgttctgattatcaagggaattataatcgaacctctggtgatgcggaaaacaataaagatttattaaattttactcgagtttatggatatcgcgcgatccgcagtttaaagtctaacctaaccatcggtgaaaactttataaactccaatatatttaattcctggcgttatacggggattagtttagaaagtgatgatcggatgctctctcctcaactaaggggatatgcaccacaagttacagggatcgctgaaactaacgcaagggtagttgttaagcatcaaggacgtattctttacgattcaacagtacccgcaggtccatttgccattcaagatttagacagttcggtgcgtggtaaattggatgttgagattattgagcaaaatggaaagacgaataaatttcaaattgatacagcctatgttccttatttaacaagaccgggacaagttcgttataaggttgttgcaggacgctctagagataaattacataatacagaaggacctatatttggtacgactgaagctgcttttggtttaagtaatgcttggactatgtatggtggtaccattttcgccggtgattataatgttcgctttcggtgcggtatctgccgatattacacaatcttatgctcgattacctga

SEQ ID NO: 308843 - DNA, 1080 bp, Proteus mirabilis
atgttcgctttcggtgcggtatctgccgatattacacaatcttatgctcgattacctgatcgtggcactatgcaaggtaagtcatggcgagtcagttactctaaacgttttgataatttggatgcggatgtaaccttcgctggataccgatttaatgaacgtaattatatgacgatgcaaaattatttagatgcacgttatcgtgatgattttactggaaaagagaaagaactctatacagtaacctttaataaaggtctttctgaatataacacatcaattggggtgcaatataatcatcagacatattgggatcaaagtaattccgattattattctattaacttaaataaatatatggatgtttttgcagttaaaaatatttcattaaatttatctgcatcgagatctaaatactatggcaaagataatgatagtagttcaagcttctctggctattatggacgctatacttcaatcgctaatattaatgcgaatgctactatctcaaataaaaatacctcatcatttggtttttctgctaatgggggcttaacgattaccgctaaaggagcagcgcttcacccagatggatttaatggtggtactcgcttattagttgatactgaaggtgttgcaggagtaccagttgatggtggccgtgtaacaaccaataattggggttatggtgttgttaccgatattaatagttattatcgcaatgaaacaacgatcgatttaactaaattacctaataatatagaagcgacacaggcgattgtagaatcttcattaactgaaggtgctattggttatagaaaatttgaagtgttaaaaggtgagaaggcctttgcaataattaggttagctgataactcttatccaccatttggttcaataattagtaatgctaaaggacgagagctaggaataattagtgatgatggttttgcttggctaacaggtattaacccaaatgaagaaattagagtatcttggggagctgaacaacaatgtgtcgctaaacttccaaataaaatagaaccgagtaataagatattattattgtgtgaaaaataa

SEQ ID NO: 308844 - DNA, 168 bp, Proteus mirabilis
atgatggatcagtgggctgatgctgtaactcgcctagccggtgatgaggtggtacatgatactgttgaggacctccttgtagctctaaaacgagcagggaaaatcaccaagcaagaagttgcgatgctgtcagtcaattacctgcgggagcaaaaacaaagtgtttga

SEQ ID NO: 308845 - DNA, 1770 bp, Proteus mirabilis; identical to SEQ ID NO: 305496

SEQ ID NO: 308846 - DNA, 612 bp, Proteus mirabilis; identical to SEQ ID NO: 308531

SEQ ID NO: 308847 - DNA, 501 bp, Proteus mirabilis; identical to SEQ ID NO: 308530

SEQ ID NO: 308848 - DNA, 624 bp, Proteus mirabilis
atgttaaataaaaaaatagcgtcggtgatgctatcaacaattattgctgcttcttttgctacggctgctaatgcagatactcgtgttgcacaagcaactgctacttggcaagcaactgcaattaaagatacaaccagtatgttagttgtcactccattaaaaagtctgacttttaattatgctgaaggacaaaaatcatttaaccaacaaaatggtgcatttgatattgctattcaaggccaatctggcgcaaccgattttaaattatcatcaaaactaattgctaatacgttagcaagaacaactgatgattcaacattaacagttggcgttaaatggaatggggaagacctttctaaaacaactgatgtcgtgttaattgatacatcaaaagggttaacctcaggtttagataatttagctgctgatggtatttacaatggctctgagcgcgctacagatcgtggtgaattcacttttgtaattgccagtgcacaagcagcaggagcaacagccgattttaaatcactggctgatggtgtctgggatggtgatgtaaaagtgcaatttaccgccacttgggatggtgacttttctaccgttaaacctaatccagaaccttaa

SEQ ID NO: 308849 - DNA, 273 bp, Proteus mirabilis
atgcttgaggatatgggggtgagaggatcattcccgctgattttaggttattaccacaccaaggaaaaaaatatattattagcgtcagcaggactacgagctgaaataaaaatagagaataaaaaatatgttttaaatagtggtatacctttaggaacactacactctttatatattaaccaaataaagtgtgtgggaatagattggcaatgtaaaatttggaatcagcaccataaaattaatttaatgttctcacctatacataaacgttaa

SEQ ID NO: 308850 - DNA, 852 bp, Proteus mirabilis
gtgggtgtcaaagggtgcgcgatacatttatccttttccactggaaacgccgtcctaatgcgtgacaaactgccaaaatcaacccgaacacagggaggtgatactatcgctgattatatcatggcagacacgccgctgcctctctttctgccttatccccgtttcctgctgaaaatggagatttcccagaccgccaagctgctgtattcgcttctgttagaccgctcaaccctctcacagaaaaacaagtggcaggacgacaagggcaggatttatattatctatcccatcgcggagatagccgaaatactggataaaggcagcaccaccataaagggggcgcttaacgaactggacatggcggggcttttggaacgggaacggggcggcttctccgcaccgaaccggctatatgtgaaagtgccacgtgtgccacaggtacagttttccgaccaactgatggccggaaaaccgaccctcacagagccggaaaaccgacctactgatggtcagaaaaccgaccttatgatggtcggaaaaccgtcccctaaccaaactactataaacaaccttacagagagccaaacaatgggagcgagtggggagccgcccgcaccctatggccgataccagaatatttttctgtcaaagaccgaatacgacgagttgcaggcagagtaccccgacaggctggaacggttcattgaggaaatgagccgctaccttgccgccaacgggaaaagctaccagaactatgccgccgccctgcggatatgggcggggaacgacaaaaaggaagccccgaaaaagggcataccagactactcatgcaaggagggcgagagtttatga

SEQ ID NO: 308851 - DNA, 168 bp, Proteus mirabilis; identical to SEQ ID NO: 298470

SEQ ID NO: 308852 - DNA, 249 bp, Proteus mirabilis
  misc_feature (22)..(31): n is a, c, g, or t
gtgaagcggaaggtctggcagnnnnnnnnnngtctggcagatcgtggtactttcgttgttgacccacaaggtatcatccaagcaatcgaaattactgctgaaggtattggccgtgatgcagctgacctgttacgtaaagtaaaagcagctcaatatgttgctagccacccaggtgaagtttgcccagcaaaatggaaagaaggtgatgcaactttagctccatcactggatttagttggcaaaatctaa

SEQ ID NO: 308853 - DNA, 303 bp, Proteus mirabilis
atgaaaaaagcccgttttagtgaaactcaaatcgttaatattttaaaactcgctgattctgatatgaaagtggaagatatttgtcgccagaatgggatcagtaatgctacttattataattggaaatcaaagtatggtggtatggaatctaatgatattaaacgattaaaagagcttgaagatgaaaatgctaaactgaaaaagctatttgcagaagtcagccttgaaaatcatgccatgaaggagcttttcgcaaaaaagggttggtgctggctgagaaaaagtcctgtgctcaggctttaa

SEQ ID NO: 308854 - DNA, 843 bp, Proteus mirabilis
gtgctggctgagaaaaagtcctgtgctcaggctttaaacgaggcaggattatcagtcattaaggcttgtctgctcacgtcattgcctcgatccacgttttatcggaagactcaaaattggcgtgagaaggataaaatcgttattgatgccatccaaactgtgttagctaaatcacctcaagccggtttctggaaatactatttccggctacgctttcaaggctatctgtttaatcataaacgagtttatcgcgtttactgtcgactaggactgaacttgaagcgacgggttaaaaaagtgcttacaaagcgtgaaaaaagacccttaaaaattgaaaatgtcccgaatattcaatgggcattagatttcatgcacgacagtttatattgtggtaagcgtttcagaacattcaatattattgatgaagggacgcgtgaatgtttggcaattgaggttgatacatcacttcctgcagagcgtgttataagggtactagaacgattaagaatggaaagaggattaccaaaacagatccgagtcgataatgggcctgagctaatctcgattaatttattgaattactgcgaaactcaccacgttgagctttgccatattcaactaggcaagccacagcaaaatggctttattgaacgatttaatggctcatttcaccatgaatttttaaatgcctatttatttgaatcattaagtcaggtgcgagaaatggtgtggttttggcagcaagattataatcagaaccgtactcatgaaagtttaaatcacctcccgccggaggcatacagaaaacagttagaaaactctaatttaacgtgtctcaattaa

SEQ ID NO: 308855 - DNA, 888 bp, Proteus mirabilis
atgcaaaatcaagtcgcacaatcaatgaaaaacagtatcaaggtatacttggtaaactcatttactcgtgatcattgcggtggcaaccctgccggagtcgttctcaatcctcccaagctaacgacagaacaaaaaatcgccattgctcaacaagttggattttctgaaacggcatttgtctattcgggtgatgacactgattttaaagtagatttttttactgctgaaggagaagttgatttttgtgggcatgcaacattagcggtttttttcactctgtcatcgcttaagttactcaaacctggcgattatagccaaaaaaccaaggcaggaattttaaccgttaccattaatcacgataatattgtgatggaacaaacgcttcctattacccgtaaggggccttgtgttaacgatgtcgcaaaggcgctgggcattctacctgaagtgatagaaaagacagatttaccaatagagattgtctcaacaggattaaacgatatttttgttcccgtacaatttggctatttagatgctttacagcctgactatcaagctatcgctgctttaagccataaatttgatactatcggctttcatgtctttgaacttagtcatgatcaaaatattactgcccactgccgaaactttgcaccacgctatggcattaacgaagaatcagccacaggtagctcgagcggtgctttagggtgttatcttgttcatcaccttttgccaaacaaaaggcaatttttgttcgaacaaggtagagcaatgcaatgctcttctttaattgacgtatttattgattcgacagtaaaaaacgtcactcgcgttcaagttggtggaaaagcgacattgattggtacaaaaataattgagatctaa

SEQ ID NO: 308856 - DNA, 3708 bp, Proteus mirabilis
gtggcaccgtcggctcctgtattaaaagcagaggacgatggttcggtttcagttgacttaccaacagatgccaataaaggtgatacggtagaaattacctttgaagatgaaaagggtgataagcacacggttactttagaaaaaggggataacggttggacatctgatacaccggcgttgatcccagacagcaacggcgataaggcgaccattcctgcggataatgtaaaagacaacagtgaagtaacggggattgccaaagatccgagtggcaacgaaagtgacccatcaacggtgacttcgaaaacggacggtgtcgctgatgcgcctgtactgactatcccagaagtggctgacggttatgcgaatgcggatgaactgaaagacggcttacaagcagaagttaccttgccagcgggtacggttgaaggggcggaaatcaccttaacggtcactcgcccagacaaaaccactgaaaccgtaacgcatacagtcactaaagatgaagctgctgcgggtaaagtatctgttgatattcctaaagatgcggtacaaaacggccaaaacagtgtcgatgtcagcttaactcaaggcaataatccagccaaaccaggaaacaaagtagattttgctgttgatggacaaattccgggcgatacagatggtgatggtacggtggataccacaccggtggtgaccattccggaagctgcggacggtgtaaatgctgacgagctaaaagatggcgtacagaccgaagtgactgtaccgggaggtagtgcagcaggtgacacactgacactcactattaccaaaccagatggatcaaccgacactgttgaacacacactgactgcagatgaagtgacggcaggtaaagccgatgtgacaatccccgcagataaagtgacagcagatggtaactattctgttaccgcagaaattactgatccggcgggtaataccagtggtcagggtaaacctacggactttatggttgatacgcaaatcccaggcgatacagacggtgatggtgtggtggatacaacaccggtagtgaccattccagaagctacggacggggtaaatgctgacgagctaaaagatggcgtacagaccgaagtgactgtaccgagaggtagtgcggcaggtgacacactgacactcactattactaaaccagacggctcaaccgacaccgttgaacacacactgactgcagatgaagtgacggcaggtaaagccgatgtgactatccctgcagataaagcaactccggatggtaattattctgttaaagcagaaattacagatcccgcaggtaacacgagtggtgaaggtaaagcaacggacttcactgtagataccgttgccccatctacccctgtattaaatgctgaggataatggctctgtttctgttgaactgccaggggatgccaacaaaggcgatacggtagaaattacctttgaagatgaaaaaggggataaacagactgtaacaatggagaaaggggataatggttggacatctagtgatcctaatttgatcccagacagtcagggcaataacaccgctattccatctgataatgtaaaagataacagtgaagtaaccgcaatagctaaagatccaagcggtaatgaaagtgctccagcaacagcaacgtccaaaacagatgtgctaccgacagtgagtattagtgttgatacaacatcagtaaatgacaatggagataagattagtgctgatgcttctgtttcgggtgaaataacagaagttcctgcaacaatagaggacaaggatgatactaccggattagtatataccgttgctctagattatgttgcagcacaggatgtgaccgtaaccataaccttaacaaatgatgcaggtcatgcaagtgcgccggattattcaacgcttgcaggctctcagcatgatgggaaaatcgccctacatggggacactggtaaagtaacctatgatggagcttcaactgtaacggttgttattcctgctggatctaagagtgtttcatttatagttgatccaacaatggaagctaaccaaaatgcatttaatgctgaaggtatggagaaagttgttgcaaccattacgggaacatctaataacgctaccgctgtaactgatacagtaaataatgcaggtgcttctgctacgggggttatttatgatggcaaccctatttcattacgtaatctggacggcgattttacactgaagtattcattatcctcatcggtggctgaaaatggggactttggatataccatcggagttgatagcggtaaaaaagatcctaagctaacgacagattacaatgatacgatttatgttggttattatcaggatggtagcgaaacttcatcatacagcaatcttgctaactcgcaggataatggacctgatggcacaaaaacagatggtaatcaaagtattacaactgttgatttaggtgctggtgatgacctgatggtgatccgcggtaatatgttaaccaatacacgagtctatgctggtgaaggtaatgatacctttactatggacggcatgaatacagcgttacgttctatgtatgctggtagttatctctttatggaatctggtaatgataccgttacgattaaacgtacaggggtaaccaatgctggtcaaatctatcttggctcaggtagtgatacctttactcaaggtgatgccaatgatcaaaataataccgaattgtccggtttattagatctgggtagtggtactcaagataagtcaaatatgccaaatgagtatctttctgtttatcaggatggcagtaatttaagcttaggtaatgacaataacattgatgcggtcacagatgttaatactgtcactatttatggttctgtctccggtgaaattttaggtggatatggtagtgataatatcactatcactaaaaatctgactggtaatgtttctgttggtgataatacagacactctaactgctgggtggatttatggtggtgccactgtttctatgggggatggcaatgatacggttactgtcactgaaggtgcgtataacacaactatttcactaggggcaggagatgatgtgtttgatgctactgctggtgttatgggggattctgttagcgcgacattagtgaatggtgaagatggcaatgacaccataaaattaggcacaattggtaaaaatctgacagttgatgcgggtgctggcgatgatactgtgattttgacaaaagattatgatccttcacctataggtaatcagggatatattaatgggggagagggaactgatactttagtcttatcaggtacgattacggtaaatatggccactaagactgatgaaggtattgctaatttcgaaaaagtcgatatgacggttaacagtgagttgaaagtggacaatagctctcagactattaagttaaccgcatctgatgtgttgggaatgaatgcaaattcaacgatttatatttccggtgatgctaatgataaggtggatttaggtgccgatggtgctggaggtttaggtacatttacagctactgccactacaacaaaagcaaccgcattagatggtactgaacatacttacactctttatagcagtgcaagtggtgctaatgtctatattgataataatattatcgataatggaggtgttatttaa

SEQ ID NO: 308857 - DNA, 1038 bp, Proteus mirabilis
atgataagaaaaacattgctagccagcttattaaccgtaattagtggtaccgtttttgctttacctaatgtgacaatcctcgcaactgggggaaccatcgcagggggtggtgactctgcaacttcttcaagctacaccgcaggaaaattaggcattgatacattgattaatgccgtacctgaggcaaaaaaagtggctaacttaacaggcgagcaagtggttaatattggttcgcaagatatgaacgaccaagtgtggttaaaactggcgaataaaattaatacggattgtgataaaacagacggctttgtgataacccatggtacagatacgatggaagagaccgcctattttcttgacttaaccacagcatgtaaaaaaccggtggtgatggtaggggcaatgcgcccagcaacagcattaggtgctgatggtccattaaacctctataatgccgtggtggtggcaagtgataaagcatctgaaaatcgtggtgtattagttaccatgaataattcggtgattagtggtaaagatgttgtcaaaatgaatacgacagaagtgcaagcattccagccgattaatgcaggtgctcaaggttatgttcatgatggtaaagtacactattacactgctgcaacaccacgcgctgagaaagttgcctttgatgtcagcaaattaaccgaattaccaaaagtaggtattgtttataactatgctaatgcatctgatttaccggctaaagcgtttatagataaccactttaaaggtattgttagtgcaggtgtcggcaatggtaacttatattctgacatcttaaatactttagcagatggtgtaaaaaaaggtgttgttgtggttcgttcaagtcgtgttccggttggatttaccacacaaaatggtgaagtagatgatgcaaaatatggctttattgcttcagaacgtctaaatccacagaaagcaagagtgttattacagttatctttgacagaaacacaagatcccgccacgatccaagaaaactttgaaaaatattaa

SEQ ID NO: 308858 - DNA, 615 bp, Proteus mirabilis
atgacttatacagttgctcttacaggtggtattggtagtggtaaaacgaccatcgctaatggttttgcctcactcggcgtccctcttgtggatgcggatgtcattgcacgattagtggtagagcctgattcgccaggattaaaagccttacagcaacacttcggtgacactattttattgcctgatggcaagttaaatagagcgcaattacgtcatattatttttcaaaatcaacaagaaaaagcgtgggtaaaccagttactccatccacttatacaacaagagacgcaaaaacaaattcaacaaattcgcgccccttattttatttgggttgttcctttattagttgaaaataaactaacacatttagccgatcgtattcttgtggttgatgtgactgaagaagaacaaattaccagaactatgcaacgtgatggtgtaagccgagatcatgtactcaaaattttacaagcccaagctaaaagagaacaacgattagccgttgctgatgatattattgaaaatcacgataatagcttaaatcaagatgaacaaataaaacaacttcatcagcattacttagaattagctcaaaaaagcaatacaggacaatag

SEQ ID NO: 308859 - DNA, 753 bp, Proteus mirabilis
atgagtgaagaaacctcaacaattatttttgaacacccgcttaatgagaaaatgcgttcatggcttagaattgaaaactcattaattcaattaaatagttttcaatctattaattcattatcttctgcattatctttttttcgtgccgtttcagaatttattgaagttttagatcgcggggagatccgcgcagagctacttaaagagttagaaaaaagacaaaaaaaactgcaacagtggttatcctttcctaatgtcgataaagagattgtcagtcatattattaatgagttatcagaaagtgcttgcgcattaagtaaagcaccacgtattggacaacatttaaaacaagataaaatcatcagcttagtaaaacaacgcctcagcattccgggaggatgttgtagctttgatgtccctactttgcatttgtggttaaatcttcctcaaacggtgcgtactgaaaagttaacttgttggcaggaagggttatatcctctacaaaatgcattaaatgccctattaacacttattcgtcaatcagatacatttaaaccggtattaagccataatggtttttatcaagacagtacggaagaaggtgaattattacggatcaaactacttgccagccagcaaatttaccctcaagtctcaggacacaaaaaccgttatgctattcgctttttgcctcttgacagtgagcatggcacaatcccttctgaactaccttttgagatttcatgttgttaa

SEQ ID NO: 308860 - DNA, 612 bp, Proteus mirabilis; identical to SEQ ID NO: 14549

SEQ ID NO: 308861 - DNA, 141 bp, Proteus mirabilis; identical to SEQ ID NO: 300062

SEQ ID NO: 308862 - DNA, 255 bp, Proteus mirabilis
atggcaaacacattgacattccctttagcattaacggcaacactcacttatatcttattgtctttcactaccccgttaggggatagcgctggatttgttggctatatttggataaaagcagccgttattctaatctgtagtacatggataggattaaaaatagctgaacgttttttatcacgtataccggataaatggcatgctagagtttatccgctgttattgatattggtgttagtcgttatgctgaactaa

SEQ ID NO: 308863 - DNA, 738 bp, Proteus mirabilis
atgtatccagttgatttacatgcacataccattgcgagtacacatgcttatagtacggttagcgaatattttcaacaagctaaaaagaaagggattaagctatttgcgattacagatcatggtcccgatatggatgacgctcctcatgaatggcatttttcaaatttgccggtgatccccagaatggtcgatggtgttggtattctttatggcatcgaagcaaatatcaaaaatataaaaggtgaaatcgactgtactgagaagatgagtaaaaaattagatattgtactcgctggttttcatgatcctgttatgggatcactaggtatggttgataatactaaagcgcttattgcaacaataagtagtggtttagtacaggtgatcacccatccgggaaaccctaaatatcctatagatattaaggaagtcgcaaaggttgctgctgagttcaatgttgcattagaaatgaataattcttcttttatacattctcgagtaggaagtgagaaaaactgcattgaaatagcaaaagcggtgcttgatgccggaggtttaattgcgcttggctccgattcacatattgcatcatctttggggaattttgagcgagtattagaagtattggcggagatccaatttccacaacagaagatattgaatacatcaccaagaaaggtgcttgattttttacaagctcatggcaaaaaagagatcacagcgtttcaacatctttga

SEQ ID NO: 308864 - DNA, 1518 bp, Proteus mirabilis
atggttggagaaaataactataaaaactatcactcaggacagccattttctactcaaaaaataggtaattttagtgctaaaaatattccctttttttcgtcggctattgataatgcaagggttcactttgatagagcaaaacaacaatatgcattaaaaaaatatggtgcaatggtaaaagatatcgcgaaaagtcttgatcctggttttagagggatgttttctactataaaagctatagttaattctgctacattaccgagaacaattaaaacagatgctctaaatgatgtaaaaaaagcgattaaacatgattatcatctgcttaataaatatattactggaattaacaatggtaaatctcaaggtgaggttgtttattctttagtagaacaattaaatgataaagagagtattacaattagccaatataatgatatccgtgcattctttggcattagtgcatttaatttacctaaaagcattgatgtaaatgcatttcttttagctaattatgcaaaaacacatgctctgacaatttcaaaaaataagcaagatgaagttgtattctcatttgtaaataaaatggatgcggggattgctacgggcttatctgctggggtttttagctatgatcaaaaatggagagaagggccgattgattatggttttgttacaccgttaatggccagtgtgatactcgattatcattatgaaaaaaaatctaatttttcatttaaaattcaaccaaaagatttagtcgaatttattaatcaaggggtatctcttacagagagtgaacttaaggataatgcaacgctggaatttaatagaacacaaaacgcgtcattaggtgttgaacttagaagtgaagctagttttgatgtgggagtttctgctaatgaaaatatagaattaaatttaccgagaaatgcggttggtgctaatctctctttaaaaataataaatgtcattcacaatataaataaatttattggtcatggagaaaccaaagcaaaacagttggaaaaaaatgttgatgttgagtattttagcggaagttttgaattataccgagatttaaaatttacaccttcagcgacaaaagcatcgcataatattcactggtatccattgacatcattgaaaaattttgaagtcatgttagaaaaaagagttaattcactatttaaacatagaatttatgatggcaaaataaaacaagacaaaaaagaatttgaagcacataaaaataatttaaaaggactttataaaagagtacttaaaataaataacctatttgataaataccctgttcaatacgatgttaaaagaagtataaataaacttgatcatgtttatttacagttggatgcaaataagaaattaaaaaacaaactaaatccacaattgatggagaatgatctttctctcaagagtgatgtaatagataactcaatagatctagtacacaataataacagagtacaacaattcctgtctcttatacacatctga

SEQ ID NO: 308865 - DNA, 345 bp, Proteus mirabilis
atgcaacgcttatttgattatttaagtgatacaggtgctatgcctttgttagggactattgaagcaccacccgctgaatttttatctttatctgatttatttactaaaacttatgagcacgagaagtttattacagctgaaattaataaacttgctcacctagcagtgacaacacaagattactcaacatttaacttcttacaatggtatgttgctgaacaacatgaagaagagaagttatttaaatctattctggataaacttgctatggtcggtgatggtggtaaggcattgttcttgttagataaagacttaagtgctctttctacatccgcgcatatttaa

SEQ ID NO: 308866 - DNA, 390 bp, Proteus mirabilis
atgttaaaattaaataaaattcatcatgtggcgattatttgttctgattataccatcagcaaacatttttattgtcaaatactggggcttaccctattaaatgaaaaataccgtgaagaaatacaatcttggaaagcagagcttgcgttaggtacagtctaccaaattgaattatttagcttcccagatgcgccagcacgcttaagttacccagaagctcgtggtctacgccatgtggcatttgcagtggacgatcttgatgcttcagttgcttatttacaacaaaacaatattcaatgcgagccaatacgtctagatcctagtagccaaaaacgttttaccttttttcaagatcccgatggcttacctttagagctttattcaatatag

SEQ ID NO: 308867 - DNA, 123 bp, Proteus mirabilis; identical to SEQ ID NO: 308585

SEQ ID NO: 308868 - DNA, 264 bp, Proteus mirabilis; identical to SEQ ID NO: 307943

SEQ ID NO: 308869 - DNA, 1527 bp, Proteus mirabilis
atgtcagactatctatcatttttactgggaattgttcctttagccgttctgatttttatgattttaaaaatgaaatcggccgttcatcacgctgtcctcgtttcgctaattatcactgtggctctcgctatttttcattggaataacacccttcaatttgcctctgtatctgtactttatggtgcggtaaaggggttatggccgattatcatcgttattctggcggctatttacagctataacctaatgctaaaaacagggggaatggaggtattaaaagacgtattagcggggatcagcgatgataaacgcgtacaagttttacttatctcttggtgttttggcggttttttagaagcagttgcaggttatggtacagcagttgctattcctatcggtattttaatcgcactaggttttgatccctttaaagcagctgtcgcttcactagtcgcaaatacggtacctaccgcatttggtgccgttggtattccagtgtctattttggcacaaaataccggccttgatgtattggtgttaagtaaaaccattattatccaacttggtttattcaatattctattaccttttgtcattgttgctattgctggtggtggtattaaagccattaaaggtgtcggctttattactttaatgtgtgggatcagcaccttaatccctcaatatattgtcgcagctaatttaggtgcagaattacctgcctttgcaggaagtctagtcagtctgattgtggttattttcttggctaaacgcatgaaaacaggccatgataaaagtaaacagccaacaaagcactcagctaaagagctattagtcgctagctctatctatctgtttacttttatttttatcttagcctgctctccgctattccctacaatccaaaccgcagtaggaactattgcaactaaaattccttttgtattaagtgatactcaaactgaatatcaaactattgcttggttaagtacgcctggggtattgattattttagcgagttttgttggtggcactattcaaggtgcaagactttcaacactcttttctgtattagtaaaaaccacaattcaattaaagaactccattattgccattatggcaattgttgcgatggcaacggttatggatttcagtggcatgattggtagcattgcggaaacattagttaactttactggcgctggatttatctttattgccccagtcattggtgcactaggaacgtttgtaaccggaagcgatacaaactctaacgtactatttggcaagcttcaaaccagtgcagcggcaaaactccatgttgatccctttattctcgcagcggctaatacctctggggcgactggcggtaagatgatttcaccacaaagtatcgcgatcgccgtttcggcgaccaaaatggatgggcaaagcagtgccattatgcgagaaacattaaaatattgtattgcctatatcatcattctaggtgccaaaatcggcattatttatcacctaatgaattaa

SEQ ID NO: 308870 - DNA, 414 bp, Proteus mirabilis
  misc_feature (368)..(377): n is a, c, g, or t
gtggttgccattcctaatgaagcaagtatgaaagggcgagctttattattacttgcagaaaatcacctcatttctttaaaagagggagttggttttttaccttccgttgaagacattattgataatcctaatgccttgatatttcatgaagttgaaactcccatgttagttgaagcccttgatgatcctgaggttacgatggcggttatcaacaataatttttcctctcaaattggcttacttgctacccgcgacggtttaattatggagaataaacattcgccttatgccaatgttgttgttactcgtatagataatatgaatgatgaaaaaataaagaaattaattactgttttacattcaagacnnnnnnnnnncaagacaagtcgaattaaaggtgcaagaaatgtataa

SEQ ID NO: 308871 - DNA, 330 bp, Proteus mirabilis
  misc_feature (299)..(308): n is a, c, g, or t
atgaaggaaattattacaggtttgcttctagcctcaataagcttattttctgtctcttgttcgcaagaagatacagatgtcgtcaaagtagcaatcaatactggaccagaccaagtcatttgggatgaagtgatccgtttagctaaacttaccgaaggattaaatgttgaagttattgcatttaacgactatgaacgtcctaataaagccctagaaaatagagaagttaactacagaccagaatgctttgatataatcaggacgacggttttgatacacgacggcgaatttgatgagtnnnnnnnnnnccttatttacaatcagagataa

SEQ ID NO: 308872 - DNA, 171 bp, Proteus mirabilis
atgtatggtttattccttttggtatgtagttcgatgatttgtcagttcgaaccctatggctacatttatcctgatgaacaaaattgtttaattgataaggaattattcgcgaccaaaggaaaaattgcagagtgctatccagtagaggggattattcgagtaaaaagttga

SEQ ID NO: 308873 - DNA, 921 bp, Proteus mirabilis; identical to SEQ ID NO: 305922

SEQ ID NO: 308874 - DNA, 756 bp, Proteus mirabilis
atgaaacgccaagttttggtaggtttaggttttgcactaggattattttgccataatagctttgctgtagagcttcatctttatgctggcgcaggattaaaacagcctgtagagcaagttgttggtctatttgaaaaagaaaccggcaatacagtgactatcgaatatggcggttcaggccaaattcttacacgctttaatctcactcaacaaggtgatctgttttttcccggctctcaagagtatgtagagaagttagcgaaacaaaatcaggtggttagccaatatcctattgtgcgtcatattcctgttattgctgtcagaaaagataaaatcggtgagatcaaaactatcacagatcttgcaaatagttcattgaaattaggtatgggagatgcaaaagcaattgcattaggtaaaagcggtgaacaattaatcgaagcgtcaggccaaggtgagcagttacgaaataaagtggttgttcgtacagcaaccattaaacagttacttatgtatttattaaatggtgaggttgatgctgccattattggttacgctgatgcaatgaaaaaccaagataaattagttttattacccatacctgaaggaagccccgaagaaattgcgacattagcggtgttaaaaacttcaacaaatcccacacaagcacaacaattggctgattatttttctcgtcccgaaggaataaaggcttttactgattatggttttcttcctattatttcaaaaccatag

SEQ ID NO: 308875 - DNA, 984 bp, Proteus mirabilis; identical to SEQ ID NO: 306071

SEQ ID NO: 308876 - DNA, 303 bp, Proteus mirabilis; identical to SEQ ID NO: 296533

SEQ ID NO: 308877 - DNA, 1179 bp, Proteus mirabilis
atggttcagggaatatctaactcaaataagatgacgctatctagtgaaaaaacggaaagtgatattccaactgagtcttatagcgtaaataggtatttgaataaatgtcagcttacacctgaaagtataaaaaaattagcagagaaattagatatacttaaaaaaatagcgagtttaaaagacaatattgccagtcataacgatgagcaagatcttcaggaagataaaatgccagaaaattatgaaggtttgctattaagtcatcggtatttattatcatctggtggttctaaaactaaaaaaatatctttagatataaatataaaaaaaggatttaactctttatatataggaagagaagaaaaaaaagcacagctcactgatcagagaataaataaaaaaacatctaagatagataaatacaaactacaaccccatgtaggaatagaagaaaaaactgtcattaaagacataataagaaaaaacaatgttaaaacgatggttaatgaattcttatcggcaaaaaagagttcagtatttcctattttcgtagataaaaaaataaatcaacaacggtatattaagttagtagaaaaaataattaaaaaagaacccgttaataatgataatgttgatttagttagcagtgcaactaagcaggaaaaacaggctcaaattcatcagaaagagaataacagcgcatacaaaaatattgagtctagtatggcaatgccgctaaataacgtatcaaaagttgatacaaaagaagagccggaaatttatcaagaaaatatcactgaaactaataaagttgttcctttttcttcgcaagttacaccaataaaaacggtaattgcattaccaaaagtagccaaaatggtttcacagctacctgcttggcaagtaatagataaaaaaatatctatgttgactctaccacccagcattacttatacatttacaaaatggaagagtcgttatcatcaggctaaaattcattttattgataaacaagttcagttaattgcctcctcaggacgcgtttatcaaacagcattagagaatttgaagcaatataatgggggattatccatagatctaactaatagccataaaaataaatcgtggtatatcaactctattaatgctatttatgaaagagaggatgaaaatgaatga

SEQ ID NO: 308878 - DNA, 195 bp, Proteus mirabilis
  misc_feature (15)..(21): n is a, c, g, or t
atgttctttatactnnnnnnncacagagtagatcgtcggcagcgtcagatgtgtataagagacagtcgtaatacagcaattggtgccggtgctggtgctataggtggtgcaattttaacagatggtagtccattaggaaccattggcggcggtgtattaggtggtgttattggccatcaagttggcaaaaaataa

SEQ ID NO: 308879 - DNA, 939 bp, Proteus mirabilis
atgccattgagagagaaaaagtatcaccaaaatcaagagagcattttattttttccaggtcagggtaggccttatttaggtatgggaaatagggtatatcgtgacgttccatcaataaaagaagtatggaattgtgcgagtgaaatagcagggttcgatgtaaggactgtttgtttaaaagggcccatgaataaattggtacaaacctgttatcagcaagtggcgttaacaactatcaatattgcttctctttatttactgcgtgagcattgttgtgtgaatgaggcgggttattcagggcacagcgctggagaatattcagcgttatttgcggcgaacgtactggaacttgaatctgtctttaagttaattagttatcgcgcatctatcatgcaacagctcgctaagaataacaaaggggtaatgtatgttgttaaaaattgctcttatcagacgttatcaacattgattgaccagcaagatctcgcaacaaaggtgaatatttgctgtgataacagtgaacttcaccaagttattgggggggagtatgcaagtgtacgtaaggttgttaatcaattagctaatatgaaaatagaaacgaataaattagccgttaatggtgcttggcacactgaattgatgagcgaagggaaaaatttacttgctcactttttacagacaatccctttttcaatcccagataaacccctagtgatgaatgtttctgctgagattgttagcgatattgagacaattaaacagaatttagttaatcaactcacagaaaccgtaagatggacagcaactatggcgctatggtgtcatttaggctatcacaattttattgaacttggtgatagcaagtcattgtattatttagcgaaaaattcatatacgctaaaagataaaaatatattgcatgttaatgattatatttaa

SEQ ID NO: 308880 - DNA, 1062 bp, Proteus mirabilis
atggggaagtatataccggttacattaaataatattactgcacttgaatttcaatcatccttaccacaaggcaaagttgcattagtttgcgaaggcggtggacagcgaggcatctttactgctggtgttcttgatgaatttatgcgctctcaatttgatccttttgatctactcctaggggtatccgcgggggcgcaaaacttatctgcttttgcttgtggacaaaggggttacgcccgcagagtcattaaccgttataccaccaataaccaattctttaatccgattcgttttgttcgtgggggaaatttactcgatcttgactggtatatagaaaccacttcgaaagaaatgcctttaaatatgcctaaagcattacgtcgtttcgatagtggtcgcgagttttatatggtggcaagtcgctccgacaattttaaggcaaattattttcaaccagaaaaaagcacatggcttgatattgtgaaagcctccagtgcgatccccgcgttttatcgcaatggtgttttatttcaagatgttgtttaccatgatggcggtattagtgatgcgatcccggtaaaagaggcttatcgtcgtggttgtcgtacaattgtcgttatacgaaccgtaccgtctgaatatcaatataccaccgagtgggtggataaaatgggaaaatggtttgagaatggccgttttcaacgctttctcaatatggctcaagtccatattgaaacttatactgacacactaagatttatccaatctccacctgaagatgccgttatcattgaaatatatccaccaacaacactacaatctagtgcattaggaagccgtttaagtgcattaaatcatgattatcatgttggtagacgctgtgggcgctattttctagccactattggtcaacacttctctaagaaaaaatttcagcaacacgataaaaaaatatttagcctatttgaaaatgaagcaaaagcagataaagcggaagatgccgaaatcattcaaaaaggaactcggagtgtgcaccctgaagtaaggagtgttcaagaatga

SEQ ID NO: 308881 - DNA, 672 bp, Proteus mirabilis
atgcgtatgaaaactctcccgatatgtcttgccctgacttcactgttgttggggggctgtgcagacaagccagcccagcctacggaagcggtggcagacatagcgattccgctcaacgtcggttatgctcagccgctgctcccagatatttatccgtcagccccggaagtggtgcgttatgaccgttaccggctggttgatatttcgccttcacaggcacagcgttacctgctggaacaaattgttcatctgcgtattcctgcttccgtctccccgacagtcggggatgcgctacattatgccctgcgtgattccggatatcgtctgtgcacgtccgatggacaggcgaaccacctttatcgtctgccgttacccgctgttcattatcagatgggatcgatccgcctgaatgtggcgttacagatccttgtcggtccggcctggcagttgtgggtggatgatgtgcaacgggaagtgtgttaccgacttcgtccggaatacacgccatctgcgccggatgcaggaatgagcggcatgagcggcgcttcatccgtctctgtggtcaccccactttctgcgggcagtacgccattaccggtgccaccggtgcttaacacttccactggtcataccgatgtgaataaggttcatcgcggagggtggctgaaatga

SEQ ID NO: 308882 - DNA, 1149 bp, Proteus mirabilis
atgaaatactttgaaatggaaaataaagcgaatgtattattcggtgaatataatggagtgacacttcccaaacgttatactaatgaacatgaggcttatttctcggtaagaaatagcatattaatgacagacttttctcattatggcatggtgaaaatttctggtgaagatgcttggcggttactcaattatcttatttctgcagacatttcatctattcgtgatgaacaactactttatacattgttgctagataaagaagggaaaataataagtgatgcctatgtactatgtgataatgaacactattttttaatttcagagtggatgaatagtgatgccatatgccagcagataaaaaaagtattagataagcaagatgaacggggtgaatgctaccaaattgatgctatcgcttctcttactccagattggcgtatgatctgtctagaaggcccctatgcttgggaaattttatctgaaatcgtcggtatggatattattggattaccttttcatgagtttatgtatgttgatgaagatgtcattactatgcgtgttggtaaacacggtgaatattgttatcacattatgggagatgaagagaagttaatgtctatttggcgacatttatgcactttatctgagaaatttgatttaaagattggcggggttgatgatttaaaaaatatacgactagaaaacccttgttgggagcctcaagtgattaatccttttagtcgctgtcctattgagttacaaatgcaatgggcgattagttacgataaagatgtatttattggtcaagatgcaataaaacaacgtgctgataatggggtagatcagaaaatagtgggcgcaagaataattaatatgcctcagaatgctgcaattttacaaggcgatgcaatctattaccaaaatgaacaaataggcgtagttattcaagcgggatactcttttatattaaaagaacatattgccagaatattattaaaacgagaatttgcttacgttgatattgatgactataaaataaaaacggtttatggtgatattgattttatcacaacgagtattccctttgttaataatttaagtttaataattaatccaaccgaagatagttatcttgaaagacatcaataa

SEQ ID NO: 308883 - DNA, 729 bp, Proteus mirabilis
gtggttaatggagcaacgtcattcttagcggggaatatcgcggtagctggcaatgcagctcatgttgttatagccaacccaaatggtattgaatgccataattgtagtttttcgaatacattacaagaaacgttaacaacagggaaacctgttatcaataataataatgatgaattaatcggctaccgcttagaaaaagctatcgctcctataaataaaggatataggggtggaaaatcaattgaacatattggaaaaattgtattcagtaataaaaatgaccgtagttctagtcattcttttaataaacttaatatcatatctaataacattaagttagaaaacggctttatatcctctaaaggagatataaatatttattcaggtaaaagagatataataattaaaaaaggtgaaagtatcttaaaacaagaatacgccatgcgctcacatataaaaagaaataatctccccaatcagataatattaggtgataaaaatggtgatcctaaaaaacaaggtttaatctcttctaaaaatatcattattaatgcttctgatactactatttataattatggtagtttagaaagtagtaaccgtagtaaaaatgccatacaacttaatctaaataaaacaacatttaataaccatggatatattctcgccagaggcggatatttagatctgcaaaataagtctttcttctataatatggaaagtggctaa

SEQ ID NO: 308884 - DNA, 810 bp, Proteus mirabilis; identical to SEQ ID NO: 308432

SEQ ID NO: 308885 - DNA, 291 bp, Proteus mirabilis
atgcgccgtcagcttgagtacaagcagctctggcgaggaggtcaggtactggcaatacctcctgcctataccagtcagaagtgcgcttgctgtggtcatacagcaaaggaaaaccgccagtcacaaagtcaattcgagtgccttgaatgtggatatacagcgaatgctgatatcaacggggcacgtaacattttagcggcaggacatgccgtgcttgcctgtggagggagggtgcagtcagaccgcccgtcgaagcaggaacccgccgaggtgattcagacatcagtctga

SEQ ID NO: 308886 - DNA, 2727 bp, Proteus mirabilis
atgacagatgaaacagtaaaatcacttgcagaagagattcagacaccggttgaacgtttggtacagcagtttgctgatgccggtattaagaaaaccgtctctgattctgtctcccaaaaagagaaagaaaccttgctggcttggttgaaccgtgataaagagtcaaccagccaaccagaaaaattaacgttacagcgcaaagtgcgtagtacgttaagtgttcctggtacaggtggcaaaaataaatcagtagccatcgaagtccgcaaaaaacgcacttatgtgaaccgtgatgcagttgaaaaagcacaagcggcagagcaagctcagcgtgaagcggaagaaaaggcgcgtcgcgaagcagaagaaaaagcacagcgcgaagctgaagaaaaagcaaaacgtgaagctgaagaagccaagaaaaaggctgaagaaaaggcaaaacgtgaagctgaagaagcaaaacgtgaagcagcggaattagctaagcgcgaagcagcggaaaaagacaaagtgaaacaaaacgagaaaccaaaagctgataaggctgatcaggaaaaagcacgtcgcatagccgaacaggctgaactgaaacgtaaaacagaagaagctcagcgtcgtaaagctgaagaagaagctcgcattgcagcagaaaaagcgcgtcgcttagcggaagaaaatgctgaaaaatggacttcagatacgtcatctgaaacagaaggtactgactatcatgtgacgacatctcgctatgcgcgtgatgcagaagatgaaagtgatgctgaggttgaaggtggccgtggccgtggtcgtgcagcaaaagcccctcgtccaaagaaaaataaccgtcactctgaaaaagcagatcgtgaagaagctcgcgctgctggccgttctaacaagaaaggcaaaggacgtaaaaacagcacattacagcaaggcttcaataagccagcagctgctgtaaaccgcgatgttgtcattggtgagactatttcagttgctgatttagcaaacaaaatggcagtgaaaggttctgaagtcattaaaacaatgatgaaaatgggtgcaatggcaaccatcaatcaagttttagaccaagaaacggcacaactggttgcggaagaaatgggtcacaaagttatcttacgtcgtgaaaacgagttagaagaacaagtgatgaacgaccgtgatactagcgatgaaatggctgtatctcgtgcgcctgtggtgactattatgggtcacgttgaccatggtaaaacctctttactcgactacattcgctcaacgaaagtggcttcaggtgaagcaggtggtattactcagcatatcggtgcttatcacgttaaaaccgacaaaggtgaaattaccttcctagatactcctggtcacgccgcatttacttcaatgcgtgcccgtggtgctcaggtaacggatatcgttgttctggttgttgctgctgatgatggtgtgatgccacaaactatcgaagctatccaacacgccaaagcagcaaatgtgcctgttgttgttgccgtgaacaaaattgataaaccagaagctgatcctgatcgtgttaaaactgagctgtctcaatatggcattctgccagaagattggggtggtgagactcagtttatccatgtgtcagcaaaacaaggtttaggtattgacgagttgctggatgctatcttattacaagctgaagtacttgaactgaaagcagtaaaagaaggtatggcaagcggtgttgttatcgaatcttacctcgataaaggccgtggtcctgttgcgactatccttgttcgtgaaggtactttgaataaaggtgatatcgttctgtgtggctttgaatacggtcgtattcgtgcaatgcgtaacgaattaggtaaagaagtacaatctgccggcccatcaatgcctgttgagattttaggtctgtctaatgtaccttctgcgggtgatgaagcaaccgttgttcgtgatgagaaaaaagcgcgtgaagttgccttatatcgtcaaggtaaattccgtgaagtgaaactggctcgtcaacagaaatctaaactggaaaacatgtttgctaacatggaagaaggtaaagtttctgaactgaacatcgtactgaaaacggatgttcaaggaacttgcgaagccatcactgatgcattagttaaactttctacagatgaagttaaactgaaaattatcggttctggcgtgggtggtatcactgaaacagatgcgactttagcggctgcttctgatgctatcattcttggtttcaacgttcgtgctgatgcttctgctcgtcgtattatcgaacaagaaagtgttgatttacgttactactccgttatctatagcttgattgatgaaattaaatcagcaatgagcggtatgttagagcctgaatacaaacaagaaatcatgggtcttgctgaggttcgtgatgtgtttaaatcacctaaattcggcgctatcgcgggttgtatggtggttgaaggtaatatcaaacgtaacaatcctattcgcgtattacgtgataacgtggttatttacgaaggtgagcttgaatcactgcgtcgctttaaagatgacgtcaacgaagtccgtaatggtatggaatgtggtatcggtgtgaaaaactacaacgatgtccgtgttggcgatatgattgaagtgttccaagttatcgaaattaaacgttctatcgattaa

SEQ ID NO: 308887 - DNA, 363 bp, Proteus mirabilis
atgaataacgtaattacctgtattgatggctcaatctatgctgattccacttgccgtgctggcatttgggcatcgaataaattgaataaaaaattgttgttgttacacgcaattgagaaaacaccatcaacccaagccgaagatcttagtggtgctattggcttaggcgctcgttcatctttattaactgaaatggccagtttagatgaacaaaaaagcaaattagccttggagttaggtaaagagatgctggaacatgcttctcaattagcgcaagcacaaggttgtcacacaattgaaaaatgcaacgacatagcggtatcgttgaagccatttatgatctggaagaagaggctcgtttaa

SEQ ID NO: 308888 - DNA, 162 bp, Proteus mirabilis
atgtatcaaataaattttcttccttggcgtcaagccttatatcgacatcaagcacaacggtggctttattggagcatgatactcgttgttattacattcagtgcttgcggttactacgcttattatttcctagattctacgtcagtacttcaaaaagcataa

SEQ ID NO: 308889 - DNA, 207 bp, Proteus mirabilis
  misc_feature (156)..(165): n is a, c, g, or t
atgctttcatcaaatgatgatccccaaaaacgggatttaaagcataaccttaacgatataaagtctacaatgaacttaaaaagttacaagtatccctttaaaattcgacttaaaattttaaaaagatcggccgttattcacaataagaattattcnnnnnnnnnngaattattctatatttttgttaaatttcttgtaaccatatga

SEQ ID NO: 308890 - DNA, 1005 bp, Proteus mirabilis
atgagtctagatattaaccagttagttttgcaccaacttattaagcgtgatgagcagacattagaagtggtactacgtgattcactcttagccattgagccggttgttcaagagatggtcgaagagttacatcgtgtttatagtgcaaaaagtaaagcctatggtttatttaatgaagagagcgaattagctcaagcattacgtttacaacgtcaaggtgaagaagaatttttaggtttttctcgtgcagcgacggttagacttaaagatgagttagcgaaatacccttttgctgaagggggaacggttcttttttgtcattatcgttatctcgcggtggaatatttattaatcgctgtattgaatagctgtaatagcatgtgggtcaatgacagtcttgatgtatcttcaacgcgctatttagatattcctcatgcagatattatcgctcgtattgatttaactgaatgggaaacttcacccgattctttacgttatttaaccttcttaaaagggcgtgtaggacgcaaagtttcagatttctttatggactttttaggggcgcaagaaggtttaaatactaaagtacaaaataaaggcttattacaagcggttgatgacttttgcgaagcatcagacatgaataaacaagagcgccaaacttgtcgtgaacaagtctacagctattgtaatgagcaattgcaatcgggtgaagagattgcattaactgaactagcacaagagttaccgccattaggtgatcaaaactttgcacagtttacagaagaaaaagggtatgaattagcggaaacttttcccgcagatcgcagtacattacgccaattaatgaagtattcaggaagtggtggggggataacggttaattttgatgcgaaactgttgggggaaagaattttttgggatcccgctaccgatacactgacgataaaaggaactccacctaatttacgcgaccagttacagcgtagagtttcagaaaaatag

SEQ ID NO: 308891 - DNA, 462 bp, Proteus mirabilis
atgaaacactggaaactttacattgtcgttgtgatggtggggattgttgctggtggttgtgcgctgattaatgcacaagcgaaaagaattaacacactgacagaaaacaacaaagaactgactaccgcactcgaagagcagaaggatatcaatattgactatcaagcacgcatagagcgactaaatcaacttgatacaaggcacacacaggagcttgttaatgcaaagaatgaaattagtcgcttgcgtgatattagtgagcgtaatcctgaacgggtgtacatccgagccagttgtccgaaagacgaaaccaattcaacctccggcatggatgatgcaaccaccgccagacctactgactccgctgtcagaaattattggctactcagagagcgaattgcagagtcagaacagatgattaaagggttgcaggattacattagagtggagtgtgtgaactaa

SEQ ID NO: 308892 - DNA, 213 bp, Proteus mirabilis; identical to SEQ ID NO: 308557

SEQ ID NO: 308893 - DNA, 1743 bp, Proteus mirabilis; identical to SEQ ID NO: 308555

SEQ ID NO: 308894 - DNA, 1332 bp, Proteus mirabilis
atgcgtaacgtgaaaaaaaagagccgaataaaatcggcgatcctcaattggatggggatacccattagtttaactgatggcgccttttgggaagaatggattggaaagagtagcagtggcaaggtggtcaccgcagataatgcattacagctgtctgcggtatggtcttgcgttcggttactcagtgaatctatttcgacattgccattgaaaatctatcaaacgaaggcggatggctcgcgcgaactggcgaaacatcatcccgcttacaccgtcttatgtcgaaaacccaatgcagaaatgacgccttctcgttttatgttgatggttgttgccagcttatgtttaagaggaaatgcgtttattgaaaaatgttatatcgggaaaaagttggtttcacttcaaccgttattacctcaaaacatgacggtgaaacgattggaaaatgggcagttggaatatacctataccacgcctaaatcgaataaacgggttattcccgttaaaaatatgatgcatattcgagggtttggtatggacggtgtgtgtggaatgataccgatccagattggacgtgatgtgattggtactgcgttatcgacggatgaagcggccgggaaagtgtttgaaaatgggttacaaaccagtggattattgacgtcaaagaatgccttgaaagccgatcaacgagaacgcctaagaaagcatttaatgacgtttaccggctcaaaaaatgctggaaaggtgatgatcctcgaagcggatttgtcttatcaaaatgtcaccatgaaccctgaaactgcgcaattattacaaagtcgtggatttagcattgaggaaatttgccgttggtttcgcgttccgccttttatggtggggcatgccgataagcaaagtagttgggcatccagtgtggaagggatgaatatgcagtttttgactaatacactacgtcccttattggtcaatattgagcaagaaattaatcgttgtttactcgacagtgatgaagattattatgcggaattttctgttgagggcttattacgtgcagacagtgcaggacgttcagcttattacacaacagcgttacaaaatggctggatgagccgaaatgatgttcgacggttagagaatttaccgcctattgaagggggcgatatttatacggttcagcttaatttaacgccactggatcagctcggaaaagacatcacgaacaatgaagctgaaaagctcaaagcacagatcactaactggttatttcctgaaggtgaacctgtaaccccatctcaatccaatccacctcgtcctgaggagtcatcgttatga

SEQ ID NO: 308895 - DNA, 852 bp, Proteus mirabilis; identical to SEQ ID NO: 308553

SEQ ID NO: 308896 - DNA, 1215 bp, Proteus mirabilis; identical to SEQ ID NO: 308552

SEQ ID NO: 308897 - DNA, 1095 bp, Proteus mirabilis
gtggaggcttctggtgtttgctcagctcaaaccgatttaattcttgaagaattagcggggcaaatcagccgagaccaactcgcacaagacttattgggtgagataaatagcaaagctgaccaatcagccgttgttgagttaaatacgcaagtgaaagcgaaccatgatgcgattttagcggagcaagttgcaagaggtgcgataattaaccaagagcaacaagctcgcgctgaagctgataaagcggaggctcaacaacgccaattcttagctacacaacttcgtggtgattatacaggcaatgatttatcgaaagtcaccgcaggacttatctccgctgagaagcaagcgcgagttacaggtgaccaagcagaagcgaaagcccgacaatcattggaaacacggatgaatgggaatgtttccgcgattaataaatcattaggaaccctcacctcgaaacagcaagcgcaaacacaagagatttcaacgctcaattcaaatttgaaagggaaagctgatagcagtgcggtaaatgcgttaaatacgcgggtgtcgaatatcgatggaaaaatgacggctaccgctcagcaagtcactcgcctagaaagccaagtgggtacaagttcagccaaaatagagcaaacctcgaaagtggtcacagacataaatggcaaaatctccgcatcatggacaatgaaagtccaacaagatagcaaagggaataaagtcattaccggcattggattaggattcaatgcgcaaggaaatagtcaatttctggttaatgcccaaaactttgcggtgatatcgtcattaaacggcaaagtggtgacaccgtttgtcgtgaagaatggacaggtggttattcatgaagccttaatggataaagcgtggatacagaaactagtagtactcaattattttaaatcatcgggatttgataaagggaatggctttttattggatgctaaaaacaatgtttttcgctttacgagtggtaatggagggacaacattaaccaatcaaaatttatatgtaaaagacgaaactgggtataacgttgttattattggtgatatcacaaatgagcgataa

SEQ ID NO: 308898 - DNA, 282 bp, Proteus mirabilis
atgaacatgaaaattaaaaaaatattaaataacagtgttgtgatctctctggatgaagcagaaaaagaaattatcgtcatgggaaaagggattgcctacgccaaaaaagtaggtgatgagataacatctgaacaaataaccaaaaaatttatcttaagtcctaaaaattgtccgcagagagtgctcgatcttttatcgaatattacgttagattacgtagaaattgcggacaatattattcagtatgcaaaagaaaaaatgacattaatatcattagtataa

SEQ ID NO: 308899 - DNA, 393 bp, Proteus mirabilis
atgactatagaaaaaaatgttataccactgtcagaaaaaatttcagatgatccaaagaaatttctcgttattggatggactgtggttttattaggcttagcaatttttattttttgggctgctttcgcgccccttgataaaggcgttcctgcaataggaaacgtagtaatatcggggaataaaaaaagtgtacagtcttctgttgaaggtattattactcatatttttgtaaaaaatggtgatccggtatcagctggacaaactctgatacagctaagccctattcaatctcaagccttagtaaaatcgttatcagagcaatatgataatttactgatcactcaacaaagattatacgctgaacttaatcaacaaacttcatttattaaatga

SEQ ID NO: 308900 - DNA, 378 bp, Proteus mirabilis
atgtgtttgtattattggcaatatgatgtattattatttttaataaaaaaggtaccgcaatattattacagtgccttttctattttttctgttactgaattttttggtttaaataatctcttttttatcataattaggaggtatataagttatttgtgtgatattgctatgtggttatttagctcaaccatacatatcatctataactattttaccatcagacaaatagaagtaagttgtttttttattgaattaaaactattcatactaaatccttttaccaaaagagaattttctatatttcttaattttataattaatggatatatatatgggaataacttttataaaacaaactatttattagtatgtttttag

SEQ ID NO: 308901 - DNA, 621 bp, Proteus mirabilis
atgcttgatatggggatagatagagagaatatatttactatttataatcccataacagaaaataatataattataccaagaaataataagataagatttctatatgttggaagattggttgcgtatgctcctaaaaatgttaatgaattattttatgcgctttccaaattgaatggcgattggacgcttgatattgttggggatggagaagataccgattttttaaaaagcttagcactagaattaaaaatagccactaagatcaactggcatggttggcaaaaagatgtttggtcatatattaagaggaatataaaatatacgtctacattagtattgacatcaatatctgaagggtttcccatggtgttatgtgaagcttcttcttatggtattttttgtattagctctaattgcccaaccggtcctgaagatattataacgcctgaatcgaatggattactgtacccagtaaaggatgtagctagtttagctaatcacttacaaagtattattgatgggcgtttattgcctacgcataatgaaataaaaaatgctattactaaatttaatgatgaaaactttgcaaatcgtttattatctgcattaaagttgagttga

SEQ ID NO: 308902 - DNA, 294 bp, Proteus mirabilis
atgaaaaaagtattaattattggttataatttaggtggatttggcggtatggaaaccgtttttaaaaaatctataaatatattggcatcgcatgctatccactcggagtttatcttttttaatgaaggggataataaagttaatgatgattggttagttgattgtaaatatagaaggctatcttctaagataaaaaatactaagttaagaaggatgagctatgcagttcagttagcaagaattcttaaacaagaaaagccagacattattatttcttatgatacggtgtgttga

SEQ ID NO: 308903 - DNA, 927 bp, Proteus mirabilis; identical to SEQ ID NO: 300061

SEQ ID NO: 308904 - DNA, 264 bp, Proteus mirabilis
atgcgcgtgttacagcaaggggatcgcttaactgtgggcaatgaactcaaaatggtggtggcggatgtggtcagtgatcatcaaggacgtgccattattcttatttcgccgatgttaagaatgtcacctaccgtcaatgaaatgctcgaggttgagcgtccttttggagtatttcggctcgttgataatgaacagggtaaatttcagcatcgtcgcttggggtataccaatatcacgttatcttttgaggaggtgttgtactga

SEQ ID NO: 308905 - DNA, 417 bp, Proteus mirabilis
atgtctaacgcgttattgcgagaattagtgttaaaccaagcactgaaagtgacgccttttacctatttagacaacaccttttatgtcaaagagttggatgttggcaccatgaattacattcagcgcaaacttcgccaaattaaaatcaagctcgctgaggcgcaggacatttatttagacgaagacgagcccgaacaatttaatgaggcgataaatcgtgtctacgatgaatatgatgtcgccagaatgttggcttttaagttgtgtgatgaaaaaggggaactgctttttgatgcagaaaatgaagaagacttaaaaggtcttaatcgtttaggacaagggttctctaatgcggtgtttacagccgaagcggggaatagcgaaaaaaacttggagaacggcgacaatttcaattga

SEQ ID NO: 308906 - DNA, 627 bp, Proteus mirabilis
atgaaatctgggacttataattcatataatatcagtgattttgaattaattcctcggtttgataagattatttttggaaagagtaaaactaaacgttttattgtaattcatttatatggttcgcatcctatggcttgcgatagattatttgattataaaaaaatcatagagcctaaagatcctaaatatgattatttagcatgttatatttcaacaataaataaaacagatgatttgttaaagtcattagtaaattctttgaataaaaactatcaagataacaatcgaacatactcattaatttatttttcagatcatggtcaggttcataatgaagtaaatggaaaaatattatttaataatgcgttcgctggaaaacggcactatgatgtacctattttcaaaatatcttatgatgatcacgaaagaaatgttattaaaaatttcaaatcaggcttaaattttatcgatgggattgctcattggattggtattgagaatgataaattaaatataggatatgatatttttactaataaagatgaccaaaatgattatgggttatcggatagaataaaagcaattaataaagaagatgatcctgcgatagatataaaggataaatag

SEQ ID NO: 308907 - DNA, 948 bp, Proteus mirabilis
atgctaacaatcatcggtggctcaggctttattggcactcgcttatcagatcaattaactaaagaaaatattgagtttaaaattgtggatattgctaaaagcgataaatatcctgaaaaatgggtctttggcgatgtcactaagccagaatctttactagaaccattaaaaggctctgatgtaattatcaatttagcagcacaacataaagataatgttcatcctattagcttatattatgaagttaacgtagatggtgctaaaaatgtttgtgatattgctgaacaattaaatattaaacatattgtatttacttcatctgttgctgtatatggttttgtcgaaaaagaaacaggtgaagatggtgagttccatccatttaacgattatggaaaatcaaaacttgaagctgaacataagtatgaagcttggtataaaaaagataatacaaatacattagttgtaatcagaccaaccgttgtatttggtgaaggtaatagaggaaatgtatacaacctattccgccaaatagcttcaggtaaatttttaatggtaggctcaggtaataataaaaaatctatggcttatgtagaaaatattgcggcgttcttaaaatttgctactcaaatagaatctggtcatcatatatttaattatatagataagcctgattttactatgactgagttaaccgatattatctatactgctctcgacaaacaccatagtcatattaaagtaccttatgctattgggcttcttggtgggtattgttttgatattctggctaaagttacaggtaaagagtttcctgtaagtagtattcgaattaaaaaattctgtgcacgtactcaatttaaatcaaatagtattgctaacactaattttaaagcgccagtctctcttgaacaaggtattgcgaatacagttaaaaatgaatttatgtaa

SEQ ID NO: 308908 - DNA, 894 bp, Proteus mirabilis; identical to SEQ ID NO: 308440

SEQ ID NO: 308909 - DNA, 426 bp, Proteus mirabilis
atgagccttaagaaaaatataattaatttatttggaactcaagtagttagctacttagttccattattgcaatatccctatcttagccgagtattaaataccgaactattaggtttatatattttttcattatccataattatgatcgtaacactaattgctaattttggatttgatatttctttaccaaaaaaaatagctgaaggctttagcacaaagaaaaatctaggagaattaataacatctgtaacgataataaaaacttttttactctttatctcactactacttttttttatttttaatttatactttcattattataaatataaagtattatttttaatggcgatagtttgtttagcaaatggatataattttgtttggttatatttaggtattgaaaaattatatatatataactga

SEQ ID NO: 308910 - DNA, 333 bp, Proteus mirabilis; identical to SEQ ID NO: 289919

SEQ ID NO: 308911 - DNA, 291 bp, Proteus mirabilis
  misc_feature (248)..(257): n is a, c, g, or t
atggatgctaaattaacctatcaattacggttagcattatcagaaaaaatgcagagattaccgctcaattggtttattagccaagggaaaaacggtgttagccaatatgttcaacatgatattaaagcattacatcaattaattgcgcatgcacctgctgatattgtgcaatttatcgttgtacctgttattgcgatcattgtgttatctatattaaatttttcattactactttttgcttttattcnnnnnnnnnnttattcctcttatcattgcttatttttgttttaa

SEQ ID NO: 308912 - DNA, 891 bp, Proteus mirabilis
  misc_feature (850)..(859): n is a, c, g, or t
atgccgatatttcgttttactgcgcttgcaatgacattggggttattatcaaccccctatcatgttattgctgccaccagcaatcctgcatttgatcccaatcatcttatgcaatcagaaatctatcattttgcacaaagtgatccattagctgatttttcatcagataaaaattcaacactaactttatctgataagcgtagcattatgggaaaccaatcccttttatggcaatggaaaggtggcagtagttttactttacataaaaagcttatagttcccacagataaagaagcctctaaagcatggggacgcgcttctacacctgttttatcattttggctttacaacgaaaaacctattgatggttacctcactgttgatttaggggaaaagctcaatgccaccagcgaagcccaagctggttttaaagtaaaactaaatttcactggctggcgtgctattggtatctctttaaataacgatcttgaaaatcgtgagatgactttaaatgcaacaaatacatcatccgatggtactcaagatagtattggtcgctctttaggtgcgaatgttgacagcattcgttttaaagccccttctaatatcagtcagggtgaaatctatatcgaccgtattatgttttctattgatgatgcccgttaccaatggtctgattatcaaataaaaacacgattatcagagccggaaattgaatttcacaccgtacaacctcaattacctgtaacaccagaaaatttagctgcgatagatcttattcgccaacgtcttatcaatgaatttgttggtggtgaaaaagagacgaatcttgctttagaagagaatatcnnnnnnnnnngagaatatcagcaagctaaaaacggattttga

SEQ ID NO: 308913 - DNA, 573 bp, Proteus mirabilis
atgaaatatattattgggatcgcggtattgatgctgacggcttgttcaagtgtgcctgataaagcttattatcaattacctgatgtttatcaaggtgcaaataataaggttgttacaaccactgagagcgcaaagcaagatcagatttggattcagcctatccgtttatctgatatgttagttaacacgggaattgtctatcaaaccagtgatatcaattataccgttgctaaccaacatttgtggataaacccgcttgatcaacagctacagcaaaatctggttgtgggattagcaaaagaattccctaatcgagtggtctcgacacaacctattgaagataaacttgctaaattgactgtcaatgttaattattttcaaggtcgatatgacggcaaagtgattattgctggtgattggatctacactcaaggcaataaagtgattagtcagcctttttctgtcgcgttaacacaaacggaagatggctatccggctctggtacgtacgctaggggaaggatggcagaatgtcgtcgctgagatcgcaaaaacaattaaatcacaatattaa

SEQ ID NO: 308914 - DNA, 462 bp, Proteus mirabilis
atgatgataagctataaaaaaacaatgcgttttttattgtatttaagcttcggtttattttcaaacccagtactatcatttacttgtaaagtcgcttcaacgggacaaattgtcggtgatggtgctgctaatatacgcgttaatttaacgcctcgagttgaagtaaaccagaatttggtagtggatctatctcaacaaattctttgtaaaaatgattcttatggtggacctagagatccaatagacgttgaccatgttaatttagttagtggaacgacttttggaggcgcgctgaataattttgacggctctttattatggtataacagttattatcctattcctctttattacgatacaaaagttattaatattaaagacagaaattttatcccactaaatcttagattgtatttgaaaagtattggtgctgcgggagggaagcaaataaataagggataa

SEQ ID NO: 308915 - DNA, 618 bp, Proteus mirabilis
atggatacgcgagtttatgttaacggacgagaaatttgctctaaagcatccgatggtgtatcaacggccgcgtttccagatccttgctggtctcctggcccctcagtggttccttatcctaacacctctagcgcagatgctttatcaaatggtacagcgactgtttttatccgaaatagtatggttgcacaagaagatcgttcattcttttctattagtacaggagatgagccagcaactaatgggttagccaaaggcgtgataacaggcgttattaaaggtaaagcctattttcggtcatggtcacttaatgtgaagtttgaaggatatggtgttgcacgtcatcaagatcttatgtcacataatcatggctcttttccatctaacacaccgacatttccgtatatttctcgaggggttttgggcggtattaaagattgtagcaaagaaaatacacagattgaaaagcgctgtaaacccgataaggataactcggatattcaacaagagttaaaaaaagaaagtgcgcttagaaaagcattagcaagaagaaaaaaaatacaaaataaaaaaatagcaataaatggcactggacggaggatcattgtgctgggttag

SEQ ID NO: 308916 - DNA, 321 bp, Proteus mirabilis
atgattgaacaatttgataaccaaatattagatatttttggaatagagcaagatagctttgatgtggattttttgcaatggaattatacttttagtaaagaaggcatcaaattattttttgtatactctatggataaaacagtatctatttcactgtatttaaatgatatttcaattgctttttgttttggttatggattggaaacattgagtataaaagataataaaatttatggtgactttgattctaattgcggtaaaagaacgttagaactagatcctataaatattacatttaaatggatagataagctttcataa

SEQ ID NO: 308917 - DNA, 279 bp, Proteus mirabilis
  misc_feature (36)..(45): n is a, c, g, or t
gtgcctttaatcaaaataccacgccaaaaattcctnnnnnnnnnncctggtgaagtaacgattatttctgccgatagattaattgatgaacgaacaaccgagccatattatcaagttcttattaacataaaagattatacattattagcagataataaaaataaattgaaagcaggcatgcccgttgatgtatttattaaaactggcgatcgctcattattaaattatcttttcaaaccagtattggataggctccatacttcattaacggaagaataa

SEQ ID NO: 308918 - DNA, 456 bp, Proteus mirabilis
  misc_feature (439)..(448): n is a, c, g, or t
atgataagagaattagctgaaaataacaatcaacttaacgagacttttgggcaaataagcgcattagaaaagcaaaaattagaatatgaacaaagaatattgcaacgtaatgctaattactaccaattagctagaacagagctaaataaaatacaattacaaatcagtgaaacagaaaaacaacttattatagaaaaagataaattagctaaaatggcgattatcgcaccgatatcgggtactgtaatggatctttctgtttttacccaaggtggctttgtaaaaacaggtcagacattaatggacatagtgcctgaagatcatcaacttgttatcgaagcacgtcttgctccgcatcttattgataaggtaactcctggccttcccgttgatttgatctttagtgcctttaatcaaaataccacgccaaaaattcctnnnnnnnnnncctggtga

SEQ ID NO: 308919 - DNA, 288 bp, Proteus mirabilis
atggatttatctaatattatagattttggtaaaagtaataatgataacttaaataatatacttaggaataagttatttattactaatgatgatattcaactttctgaaatgatgatagcatcgggtttgggaaaaaaattaatgtcagagatgacattttctccgatatttatgattgttccaacattacgctgtgatcatacttgcaagtattgtcaagttagtagagcctctataagtgcacaacattatttcattaataaaaagaatatcaaaaaaaaactataa

SEQ ID NO: 308920 - DNA, 360 bp, Proteus mirabilis
  misc_feature (299)..(308): n is a, c, g, or t
ttggatccagaattatctattcctaatattgtctatttagatgcagaagcgcgtaaatgggtaaatccaacagcaacgagaaaatcattatacccagacgatcttaaccaagcatggctcgcgacttatacggtgactaatgattggaatgggcaaatagaaacttcactgtttaatttaaaagcgacactgcctaatgaataccctaacatgataaagagtttaaattactttttttcagataaaagaattgatagtgaaattcttccaggtacacgtcaacagattattttatcaannnnnnnnnntctggcgaacatcaaatacttattatgttatttacaatccaacgttggctaa

SEQ ID NO: 308921 - DNA, 243 bp, Proteus mirabilis
atgttatttacaatccaacgttggctaaaaccaggaggaattgtattaatagatgaacctgatctacatctacatccttctgttatcgcacctctcttagcggctatcgaaaatattgtggctaataagaaagggcagttaattttaacgtcacactcaacagaagtttggcaacgctatgaaaattttggttcacgtattgatcttactttgctaaaaggatcggtgaatgtcgaaaattga

SEQ ID NO: 308922 - DNA, 504 bp, Proteus mirabilis
atgcatcaagtagcaatttatggtgtagccgaacaactatataaagcaggtgttcttgtcgtatcttctatatcaacaccattaacaccatatatggttagaacaaaaaatttcaatatattctttaaagtgacaatgctaagtatgctaattactgccatgggtgcatgtgttggtattttctttggtgataaaataatagatatgatctatggtgaaaacttactatcagcgtatcctgttttaatcatttttatgtttacaattttaattagtgtacttggtatacattttggttatccagcattattaccattaaatcaagctaggaaagccaattatagtgtcatatatgctggtattttacaaatactattaatattttctatatatatgttacatattacagcaacagcaaaaataattgctattacttatcttttatgtgacttatttatgctaatctatcgactaaatatatttataaaaaattatggaaaatga

SEQ ID NO: 308923 - DNA, 864 bp, Proteus mirabilis
atgggttttgctaacgatattgagactattgcaggggaaactcgttggcgtaaacaaacattactcttttcagccacattagaaggcaatgctgtgattgattttgcacagcgaattcttaatgaaccggttgaactgaatgctgacccttctcgtcgtgagcgtaaaaaaattcaacaattttactatcatgcagataatcttgaccataaaactgccttacttgcacatttactcaaacaagaagaagttaaaaaatcgattgtttttgtacgtaaaagagagcgagtcagagaattagccgcagcattagaaaaacaaggtatcaaagccagctaccttgaaggcgaaatggctcaaacacaacgtaacgaagcgattaaacgtgtagagtctggcaaaatgcatgtgctgatcgcgacagatgtggcgtctcgaggtcttgatttagaagatatcacccacgtctttaactttgacttaccgcgcacagctgatgtttatttacaccgtattggccgtacaggtcgagcgggtcgtaaagggactgccatttcattagttgaagcacacgattatccgctacttggtaaaattagccgttatatccaagagccgattaaatatcgtgttgtagcacaattacgtccagtgactaaagcccctagtcaaaaagcatcatttaagccttctaaaaaagtattagcaaaacgcaaagcgaaaaaagtagaagagaaaaaaaacgttaaagagaaagtacgcgcacgcgatcgtaaaaatattggtaaacgccgtaaaaccgctactgataaaaccaccatcactgcggaaaaaaccaatcatataaaaacagagcaacaataa

SEQ ID NO: 308924 - DNA, 1260 bp, Proteus mirabilis
atgactaaaatatttaaaatcccctttgccacgcaaggggataaaacagttgtgcctgttgaaatccaaacagatggctcagtatcttatactcaaggttacggttatgattatgagcgtgaccaagtcactgatccggcggcaaaagatattgaacgtgaaaaaatgaatagcctatttcacgatatcaccgagtctattggtgaaatgcaattacaaggttttgctaaatggtcagaagcgggcaagccctatgccattcgtagtgtggtttatcataacaataaggtatggcagtctaaaattgagaataataatattgagcctattgccggtaatgcatgggctgagctaaaagctgatatcaccgcgaatgaagtgggcgcttataacaaagccgaggctgataagcgttttcagccggtgggtaaatatcaagcggaaggttatagctatgcaaaagcggaatctgatactaaatatcagcccaaaggcaattatgctcctgcgggaaattatgcgaataaaggcgatagttataccaaagcagagtctgatgggaaatatcaacctaaaggcaattatcaagcatcaggagattatgccaccaataccaatttaaaaaatgagcttaataaaaaatttgataaaggtaatattgctcaagcaaccggaacctcaacggctcatgttattagccaaaaagccgctactgatgcttttcagccaaaagggaattatcaacccaaagggaattatgcattagtgggtgcatcctatacgaaaacggaatctgataataaatatcaacctaaaggcaattatttagcgacaggttatagttattctaaatcagagtcagatggtaaatatcagcctaaggggaattatcaacccaaagggaattatcaacccaaagggaattatgcagttattgggagtagctatactaaagcggaaagtgatagtcgatactcgaaacaaaaagtaacaggttggaaagaactatataatggtaattggctaagtggtgagggtgttaatataaatgaagatattcgaggtaaaatagtatgggttgatcttggtggtaatcaatggagttcatttactatgcctcctatagatgatattccaatgtggtgtggtcactctgataataattggtgtgcattcaaaacatctaataatggtaaaaaaatacatcgcgcttttggtaaagggaatacgggaatagtaagagtttgtgttattagttaa

SEQ ID NO: 308925 - DNA, 627 bp, Proteus mirabilis; identical to SEQ ID NO: 308906

SEQ ID NO: 308926 - DNA, 1299 bp, Proteus mirabilis
gtggtgttaacggcaaaatttgaggaaaaattccttgaagttccggctgaagcactggtttataccatgaaaggcgatcagaaatattttcctgtctacgataaacaaggtgcgctattacctcactttattttcgtttctaacattgaatcctctgatcctcaacagataatcagtggtaacgaaaaagtggttcgccctcgtttagcggatgcggaattcttctttaaaactgaccgaaaacagcgtttagaagataacttaccacgccttgaaactgttcttttccaaaaagatttaggctctctacgcgacaaaacagaccgtattcaagctctcgccggttttattgctgagaaaatgggtgctgatgtcaataaagcaacacgtgctggtttattatcaaaatgtgacttaatgaccaatatggtgtttgaattcaccgatacccaaggggttatggggatgcattatgctcgccatgatggtgaagatgaagaagttgctgtcgcattaaaagagcaatatcaaccacgttttgcaggtgatgcactaccatctaacccagtagcaagtgctgtcgctatagctgaaaaaatggatacgctggcgggtatctttggtattggtcaacaccctaaaggggataaagatcctttcgctttacgtcgtgctgcccttggtgtgctacgtattattgttgaacaagatttaccattagatattgaagaattaacccaagaagcggctcgcttatatggtgacaaactgacgaacaaaaatgtcgtcagtgatgtcgtagagtttatgctaggtcgtttccgtgcttggtatcaagagctgggttatagtattgatactattcaagcggtattagcgcgccgcccaacacaacctgctgactttaacgctcgtgtaaaagccgttacttacttccgaaccttagaagaagcagctgcattagccgaagccaataaacgtgtttctaatatcttagccaaatcagcagatgttaagctcaacgataaagtattagcctcggtgctaaaagcgcctgaagaagttcagctagcggctaatctttctgtgctacaagataagctagcccctctatttgctgaacgtaaataccaagaagcattagttgaactcgcctctttacgtgatgttgtgaataacttctttgataaagtgatggtaatggataaagacgaagaaattcgtatcaaccgtttaaccatgctacatgaattacgcgagttgttcttaaaagtcgctgatatttctgttttacaataa

SEQ ID NO: 308927 - DNA, 618 bp, Proteus mirabilis; identical to SEQ ID NO: 308915

SEQ ID NO: 308928 - DNA, 228 bp, Proteus mirabilis; identical to SEQ ID NO: 308442

SEQ ID NO: 308929 - DNA, 1011 bp, Proteus mirabilis
ttggaagaagcgggtattggcggcatagatgagctacaggagaagtttgttcgttgtaatggatcgcctgactgtgagcggaatacgcgcaatgaatatcgaataaaagaaaaagaagcaggagagaatcttgttgctctctatcagtctggtcagttaacaaaggatgaatttgattatctggtaacagagtatgcaaacagaatgttatctggtattgaaaaaggtgaaaaattaagtgataccggattcaacctcgtgggtgatatttaccggttgtcagggagtgactggactcctatgggggaaatccggaatccttatttttccgcaatcagaagcagtgagcgaatagctgattggaaggctcagggattgagtaatgacaaaattaaggaattgatgttaaaggatgataccatcagttcaattatggctccggttgatgtcaatggtattatgaatttggtagataacggggctagtaaggaagagtttgctaagtttatgtctggcatgatctttagcaaattaactcaagataaagtaaataataacactaataaagttatcagtcagccgaaagccaatcctgaccaggtcaaagaaaatattgctgccagccagaaaggaaatagttcaagcaattttagtaaatatcttgaaaaagaaaaattagtcaatccagcaaataataagatagttactgagcatacaatagtttcttctggaaaagctccaaaaacgtcaacaccaaattcagtttatgaagtgtcccgtgcaaatggaactaagagtattacttattatgattcaagagggaatatgttctctcgagaggattatggacaacaacgaactcatggttctttaggttatgatgctaatggtaaagttccgccacatgagcataaaatcgaatataactccaaagggcaaccagtaggtaagtattatcgagagatagataataatggtaacgctgttggagattgggttaaggaaaaataa

SEQ ID NO: 308930 - DNA, 750 bp, Proteus mirabilis
atgattatatttatcaccggtgcttctgcaggttttggagaagctattgctcgtcactttattaaccatggacacaaagttattggtaccgcgagacgtcttgataaactgcaagctcttcatcaagaactgggcgatctattctatcctttacaattagatgtcaccgataaaaaagcagtcagtgaaatttatcatcaattgccagaacaatggcgctcaattgatgtattagtcaataatgcaggactcgctttaggattaagtaccgctgataaagccaatcttgatgattgggatactatgatcgaaactaataataaaggtttagtgcatgtcactcgtgcattactaccctcaatggttgaacgcaatgtcgggcatattattaatatcagctcaacagcggcttcttggccttatatggggggaaatgtatatggtgcaaccaaagcctttgttaagcaatttagcctaggcttacgtgccgatcttcaaggtaaaaaaatacgtgttactgatattgaacccggtcttgtgggtggaactgagttctcattagtacgctttaaaggtgataccgataaagtagaacaaacttatgcaggagcagatgcgcttacccctgaagatgttgcacaggcggttttttggacggcaacattgcctgcacatgttaatattaatacgcttgagatgatgcccgtcagtcaatcttttgccggattaagtgtgcaccgacaaaattaa

SEQ ID NO: 308931 - DNA, 927 bp, Proteus mirabilis
atgaccagtttacgcactgtatcaaaacacccagagcaattagaaaccacaccattaattgcggaaagtcatcactatgatgatcctttagcacctcaaaagctagtgtttttagaggcagttaatcaacagcgttgtgtaattaactcaccacagcgcaatagccaactcactaatacaatacctttttttatcgtacttttagttatggcctgttatacattatttggttttatttccgaacatataaattataaaagacattttcagagtatggtcgaaaaagttgaggctaaatatagtaatgaacttaatttagatgcgcctacattaaaatatgtaaacacgtacagaccatattttgggaaaaaaaatataaattattgggattatataaaggcttataattcaggtgaattttttactgatggccaatatgaaaagtacctcgtcattggctggctaatttttttccccggttttttatggctatttggctatctctctttctttacacctcctgtataccttattgctgataggcaaagaggaatactgtatagctatggcatggggaaagtgcgtttaacccgctataaagaggcacaatttggttatgcgggcaatatgttggcgattaaactatatggcattaatgaaaaaacaggccaattaaaaacgatcctctatcgccccaatgtgtcccactactccagtttcctaaccagtactgacagtgaaaaccaccgttttatcactttccttaatgcctatatgcaacaaggccgagatgctgtttcgcctgttgattaccaagcccgtaagccctttttatcttttggcaaaaaccctcttcctgctgattttgagcaacaggtcggacagattctggcaaagcttgatcaggagaaaaaacaccatgcgtag

SEQ ID NO: 308932 - DNA, 198 bp, Proteus mirabilis; identical to SEQ ID NO: 308245

SEQ ID NO: 308933 - DNA, 600 bp, Proteus mirabilis
gtgccattaactaaagaaaatattaatgccgtagtaaatttggctgataaataccaatctaatatatcagatattaattggaacgctttaaatgcaaaaatcaacattgctgatcatgctcgtttaattcaagctatcataaaacccatttttatttggtgggttgagcatataacaccgcatatatttacactttatgagataaaaaaagagctcgaatatcaaattaatcaatgtgaaaacattaaattatttgaagaaaaggaaccatcaaatatagcctcttcttttttatctttagaagatataaaaataaaattagaagctgataaagcacggatcgttgtgatagatgatttgctgaaaaaggatattaaattagttatagaagcttgggaaaaagagccggtattcaataaaaaaataaataatacattagagtacttacaaaatacacaaccgcattctgagttattacaaccattatgggatattctaatcactattccacaacaccctgaaaattgtaaaaaattaaaacactggctagtagaacactctttatgtttaattaatgatgaatttatgtggcatgtataa

SEQ ID NO: 308934 - DNA, 267 bp, Proteus mirabilis
ttgatccttgattataatattaacaccaatgttaatatccctcatgaaggaagcaatacgcaaagtatttattacaatggtactgttggttataacttcggtagctggcgtattcgttctgattatcaagggaattataatcgaacctctggtgatgcggaaaacaataaagatttattaaattttactcgagtttatggatatcacgcccaaccccaagtgctacactattataatcaccggcgaaaatggtaccaccatacatag

SEQ ID NO: 308935 - DNA, 696 bp, Proteus mirabilis
atgaaaaaattattacttagccttactatgctggcgataatatctacgccagtgttagctaaatcccctgtagctaacttaaaaatcaacggtgatattaagccaccaacttgtactattaatggggcgacacagcgtgatgttatttttgattacggagtcataagcccaacacttatccctcaatcgactgtctactcttattctgacattggagttcaaaatacagttacgattgaatgtgatgcaaaaacatatttaacatttactgcatctgacacttatgctgatacagaattaagtgttaataatacatcaggctggtttcatttagttgataaagcaaatcctgaaaccgcggttggtgcggcattcttcgcatgggataatgtgactgtcgatagcaaacctgcgtatatttcacgagcaaacgatgtgtctattacaggaaccagctacaataacgccctatataaagggccaaccaatggttggacatcagaaagacaaacaagtgttgataaaaacgctctggctctcatttcaggtgaaattttccaagcaagttttagacaaggattgacgatgagtacttttattttatctaaagatgaattaagtaaaaaaggaatagatttatctaatggtttagattttatgggggaagctgttctcacttttaactttggtgtctaa

SEQ ID NO: 308936 - DNA, 423 bp, Proteus mirabilis
atgtcccgcttgcctttgcgttcaatcttgcccgattttttaacttccgttgctcgtgtacttctaggtacactgcgcgacggcttgaaaaaatcgaccaaccttgttagcaaattcggcgctattttcggtgatgttattgcatcactcagtgcgaggcacttgagtgatggggctcctactgcttgtacgtacacggtttcaggttctttttcactcccctcgccggggttcttttcgcctttccctcacggtactggttcactatcggtcaatcaggagtatttagccttggaggatggtccccccatattcagacaggataacacgtgtcccgccctactcgtcgagttcacaataacagcatcttcagatacggggctatcaccctttactgccggactttccagaccgttctcctga

SEQ ID NO: 308937 - DNA, 423 bp, Proteus mirabilis; identical to SEQ ID NO: 308936

SEQ ID NO: 308938 - DNA, 225 bp, Proteus mirabilis
ttggtcaaagaaaccattatgaatacatccgatactgtgattgattttggtgcaggtcactctataattgaatctgaatcaacttttaactatataagaaaattaatgaaggaaagagggattactatttttttagataaaaaaattatctcaaaaccgtcaaataattatatcaaatttttacttaatagaatgaaaaatatcccaataattacagctctatag

SEQ ID NO: 308939 - DNA, 276 bp, Proteus mirabilis
ttggtttggatacgctctcgacaaggtaaggttattactcgtgctgcggtcagtgatagaccaaataaaggtgcggtatatatgacttaccaatggtggattggggcttgtaacgaactagttgcagaaaacttaagtccaataaccaaaacacctgagtataagtattgtgcggtttgtgttgagtcaattaaagatcaagctcaagctgagcactatgtaaaaacagaatataacaatattaaacgtcgtttaagagaagccgctgaaggctaa

SEQ ID NO: 308940 - DNA, 207 bp, Proteus mirabilis
ttgccaaatacgagtgcgccagacagggaaaaacgattagcaatggaactgctacacatgaacttggacgcatcgaaaaatcaccctcctctacctgctcatattcaggcattacgtgatgcggaaaggaattctgcaccgagtaataagtttgaagtcgattactacggaagcgatcgacgtcaaggtcaatacttaggagattag

SEQ ID NO: 308941 - DNA, 162 bp, Proteus mirabilis
atgttaaactcagtttgtttgcacactggactatttgtacgcgatgttaccagtcaactacaagagccagatgacgggatactgccacgtccggctccgtgggagtggagagggaaagttcccctccacgacgcgataacctcatataatactagaaaataa

SEQ ID NO: 308942 - DNA, 378 bp, Proteus mirabilis
  misc_feature (14)..(23): n is a, c, g, or t
atgactttaaagannnnnnnnnnagatctttgtaaaaagaaatttaaattagatttacatgaactttttgaatatgcgaaagacattagatacaaagctaaagaaattaaagtaatagctgagtttcctcctatacaaacaacatttacctatttatctaattcaggaaaaattagaagaaccgtagatataaatcaatacaaaaagaacagttatggtgacgagtatgttgctggttattgtcatgtaaggaatgagcatcgaacgtttgctgttagaaggattcaaacgatgatggcaagtgaaggtcataaaaaatattattttcatgattggctaaaaaatgtagttggtataaacaacgatggcaataaataa

SEQ ID NO: 308943 - DNA, 351 bp, Proteus mirabilis; identical to SEQ ID NO: 308391

SEQ ID NO: 308944 - DNA, 837 bp, Proteus mirabilis
atgagtttattagcttcgcgttttggctctgctaacagtattcgccgtgaccgtccactcaccattgaagaattatttcgtactgtaccgagcgttttctccgaagataagcatgggtcacgcagtgaacggtatacttacattcccaccatcaccttgttagacagcctacaaaaagaaggcttttacccgttctttgcctgccagactcgagtgcgtgatgtcagccgtcgagagcacaccaagcatatgttacgacttcggcgacatgaccaaattacgggcgtacaagtgcctgaaattattttgctcaatagccatgacggttcgagtagctaccagatgttgccgggactctttagagctgtatgctccaacggtttggtgtgcggtgatgtattaggtgaagtgcgtgtaccccataaaggggatgtggtggggaaagtgattgaaggggcatatgaggtactcgatacgtttgagcaagtggctgaaaaacgcgaaagtatgcagtcgttattgttacccccaccagcccagcaagcctttgctgaagcggctttgacctaccgttttggtgaagagttccagcccgtcacgcgagagcaagttctacagcctcgacgctttgaagataaaaaagaagacctttggacggtgtaccaacgtctacaagaaaacctgattaaagggggattatcaggccgtactgcaaaaggtaaacgcgctcgtactcgttcggtgaatgggattgatggcgatatcaaactcaataaagccctgtgggtgatggcggatatcttatttaaccaactcgtccctcgccaacccaactaa

SEQ ID NO: 308945 - DNA, 576 bp, Proteus mirabilis
atgaaaaagctgcccgctcgttatgaagagttattgagttattatcaacgttggttaaatgggtatacgaagttgtccatttgtcaggggatgtgtcattcactcattcaaaacagtcactatttgatagtgtcgtacattcgtttttcgagtcatgaagtctgccagatggcggttattccagcttgtctctatcgactggtgtatggcaacgcctactctgataagctcaccgaagaagaggatttaaacctgagttttcatatcgatgaacggttgttacgctatcacccgatgctggaaggtatactgctgagtgaatgtgtgcgtcttaaccagcactcctttgcgaacaaattaatcagtttatttcagcaatttaatgatccggaaatacgcccgaaattggtctggttatgttggtatgatttgttgttaggggcaccgttagacgattggaaccatacacttaaattgaaatccaaagagcaacttgtggaatggttgattgataggcaagccgaaaattggggattaacagctattatggatgaatatgtattgttcagcagataa

SEQ ID NO: 308946 - DNA, 330 bp, Proteus mirabilis
atgacaggtagcagatggcggatcagatatgaactctgggaaaaattagcaccgcttatcccagaacacaaaactaatcatccgctcggcactcaccgcaaacgagttgataaccgtgctgccatgaatgccatattctttgtactcagaactggctgtcagtggaacgcccagaatgccacgggatatgttcttcgagttctgcacaccggcgctttcaggaatggcgtgatgccggtgtctttgagcgcttttggcagaatggtttgcttacctgtgaatatctggacggtattgactggtcatggttgtcaatggacggctgcatga

SEQ ID NO: 308947 - DNA, 3333 bp, Proteus mirabilis
atgaaaataatcgataaccttaacaacctattaggtgacgagcttcaacagacgctgacaccgaatacaaagttaaagattgctgcatcttgcttttctatttatgcgtatgaggctctcaaaaaggagttagcgaagatagactcacttgagttcatcttcacatcacctacttttgtcgcagatgaagttaccgataaattcaaaaaagaaaaacgagagttctttatccccaaagctggccgtgaacgcagcctttacggaactgactttgaaatacagttaaagaataagctcactcaaaaagcgatcgctaaagagtgtgcaaactgggtcagaaagaaagcgacattcaaatcaaacaaaactgattctccaatgcagtcgtttgttgtgacggaagcatctagacagcaagcagatgcaataagtgcagtttttgctccggttagcggttttacggcggttgatctagggtatcagcgaggcaatgctatttcgaattttgtgcaaaaaatcgatgagccaaatttcacagcgcagtacttacagttattcgaccaaatttggaaagatcctgcgaaacttcaagatgttactaaaaccatttgcgagcatatagaatctgtctaccaagaaaactcacccgaaaaagtctatttcattattttgtataacatttttaatgaatttcttgatgatattacagaggatgtattaccaaatgatcgaaccggctatcaggacaccttgatttggaacaagttatttaactaccaaaaagatgccgcgactgggattatcaataagttagagacctataacggctgcattctggctgatagtgttggtcttggtaaaacatttacagcgttagccgtcatcaagtattacgagctcagaaacaaatctgtgctgcttctatgtccgaaaaagttagcggataactggctcaactttaatcgaaacttaaagacaaatatctttgctaaagaccgttttagttacgatgttttgtgtcacacagatttgagcagaacctctggcgaatccttcggtactccgttgaatagaataaactggggtaactatgacttggtcgtcattgatgagtcgcataactttagaaataacgatgcagtgaaagatcgagaaactcgatatcagaaactgatgaataaagttattcgggctggcgtgaaaaccaaagttctgatgctatcagcgacaccagtgaataatagatttactgacctaagaaaccagctcgcgttagcttatgaaggcgagtcgagcaatctcacaaagcatcttaaaaccacaaaaagcgtagaacagatattcaaccaagcacaagccgcatttaacgcttggtccaaactagacccagagacgcgaacagctaaagccattctcgatgccttggattttgacttttttgaactgcttgatagcgtcactatcgctcgctcacgaaagcacatcacaactttctacgacacaacagatattggccatttccctgaacgtaacaagccaatatcgtttcattgtccgcttactactcgttcggatgtagtaagcctgaatgagatctttgaacagcttaagctactcaagctatctgtctatgcgccagtaagttatatcctaccgagtagattgaaaaaatacgaagagatgtatgacacgcaagttgaaggcggaaaaggtaagttaaaacaaagcgaccgtgaaaaaagcttggtagcattgatgacaacgaaccttctaaagcgtcttgagagttccgtatactcgttcagaagcaccttgcaatctctccatgataaccatgttcgtgttcttggcattattgacgagttttataagcgagacgggcaaatcgaagtgagcagtctggttgaagcgcttgagtctattgaagcagatgaagacgatatgccctcttatcacgatatggaaatcggcaacaaggtcaaaatcaagctgatggatatggatcttccatcctggcagcaagatttagatggagatttggagctgatcaaaggcttactagattcagttcgtaaaattaagccagaagaagatgctaagttgcagcatctaaagtcgcatattgctgcaaaaataaataatccgataaaccctgggaacaggaaaatcatcgtgttcacggcgtttgctgacaccgctcaatatctgtacgaacagttgtcacctgtgatgttaagtgaacatagaatccatactgcgatgatcactggtggtgccagtttacctaagaccaccttaaaaaccggacgaaaaggttacgacacccaagaggtgctcaccctgttttctccagtttccaaatcgaaagcaagtgtattacctgacgaacccgctgaaatcgatttgttgattgctacagactgtatctctgaagggcaaaacttacaggactgtgattacttaattaactttgatattcactggaatccagttcggattgttcagcgctttgggcgagttgaccgtattggctcgccgaataaatgcattcagttagttaactactggcctgatatatcgctggatgagtacatcaatttaaaagaacgtgttgaaagtcgaatgacgattgttgacgtgacagcgaccggtgatgataacgttttaagtagtcaagctaacgatgtgtcttaccgtaaagagcagttaaagaagctgcaagaagaagtcatcgagcttgaagatttaaaaacgggggtttctatcaccgatctaggtctaaacgaatttcggatggacctacttaatttaatgaaactctacggcgaaccaagaaatgcaccaagtggcatgcatgcggtggttgaggctaagccagagttcgggttattgcctggcgtggtgtttgcgctgaaaaacgtcaataacagtatcgatagagatctgcaaaacaggctccacccttattaccttgtctatgtatcgaatgaggggcacatcgtcgctaatcattttgaggtaaagagactattagatttaatccgaagtagctgtaaagggcaaacagagccgctcagtgagatttgtgcgttatttaatcgcctaacacaagacggtcgagatatgcagcgttactctcaccttctaacggatgccataaaaagcatggttgaagttaaggaagaaaaagatattgatagtttgttcagtggtggcgctacctcagctttagtaaatacatttgctgggcttgatgattttgaattgctggcatttattgtgatccagcaaaagcagctgatagaacacagtgctcaggatgaggttagctag

SEQ ID NO: 308948 - DNA, 687 bp, Proteus mirabilis
atgaactcagcttggatatttcctgacaaagcaaagttcggtcgagtcgtgccgaagaacaaaatatacgaacacagcgcggcaagcgctagattgaagtcactttttgtagagcaagtagagcaaatcgtttgggcttacaagctatcgcctagcacgctgaatattccccaaaccagtgaggtcagtgaaatacaggttttcagtgtgaagcttaaaggtgactcaatagacgacagcgtactaaaagcgattgatttggccataccttttcccattctatttgaggtatggcttgctggtggtgagcaaggccactacgccgcttgctataagcgtaaggcagagaacaatcagtccaaatggttttgtagccgttatttacgctcagaaaccttcaattccggtgatgcattaacagtgacttcagaagtattgggtttaccaactgcaatcgatatggcggagctgtatcaaaagcttcttgctcgcttgttacccatacccaaacgaaccgctgagagtattgaaggggtcattgaacgcttggtggcaattcaggcattggaaaagcaaatctcgcaatataagaagaaggttcatgctgagaaacagtttaaccgcaaggttgagctcaataagcagttaaagaatttaaggtgcgagcttgaagagttactcgcataa

SEQ ID NO: 308949 - DNA, 1854 bp, Proteus mirabilis
atggataaattaaagatgcacagccccgacatgacgcagcaaaacatagagaaaattcaggcgttgtttccgaactgcgtgacggaatcaaaaggggctgacggagagctaaagttagccattgattttgaccaacttaaacaagagctatcaaattcaatcgttgaaggcccgcaagagcgctatcagctgaactggcccggtaagcgagaagcactactaacagcgaatgcacctattgccaagaccttaagaccttgtcgagaagaaagtgtcaattttgacaccactgaaaacctctttattgaaggcgataaccttgatgcgctaaagatgttgcaagaaacatatttaggcaaggttaagatgatctatattgaccccccttataatactggaaaagactttatttatgcagatgactttgcagaaaatacagaggattacttaaaaagctctggacaaaaagatagtgttggcaatcgcatgatcgcaaatagtgaaaacaacggtcgatttcactctgattggctttctatgatgtattcaagattgaagttgtcacgcaatctaatgaaagatgatgggttgatatttataagtattgatgaagttgaaatatcaaatctaaaaaaaatggctgatgagatttttggagctgacaattttatagctgattttatttggcaaaataaaaaaggtggtggtaatgatgctaagtattgtgctgtagagcatgagtatgtggttatttatgcgaaaaatattcaatcattaccaagattatttgagtcattttcagatggctatgcgaaaaggtacaaagaggaggatgagcgcggtaggtttttctgggatacattcaaacgaaagtcaggtaagcaatattatgcaataacttgtcccgatggaacagttttagaaaatgatgaatatggaaatccattaagttggcttcgatctgaagctcgtttcaaaaaggatgtagacgatggtgaaataaagtttgaaaagcggactgacggttggagcgtcatgtttaagcagcgtatgcctgaagggaaaaaaccccgcagtcttgtgcttgataagggaactacaagtgatggaagttctgaaatcctaagtttatttgggaaaaatattttcagtaatccaaaaccaacaagtttattacgttacttgttagggatagggctgaatgaaagtgagattgtactagatttttttgccggttctgccacaactgctcatgcagtaacacatcttaatgctgaagatggcggtaaccgaaaatttattatggttcagctccctgaagaatgtgacaaaaagtcagaggcttataaagcaggctataaaacaattgcagaaatttccaaggagcgcatccgccgagctggcgcaaaaatattagaaggcgagtgccataaagactggaataaagacgttggattccgagtacttaaagtggatacttccaatatggcagatgtgtactactcgccagatcaggtttctcagggggcgttagacttattggtagataatattaaatctgaccgcactgctgaagatctactctttcaagtgctgctggattggggcgtcgatttaaccttaccaatcagaaaagaaatgattcaaggcaagatagttttctttgttgatgatgatgcgttggtggcctgttttgatctgcgtataaatgaagctttgattaaagagttagctgcaaaagaaccacttcgcgtggttttccgtgatgacggctttgagagtgatgcagtaaaaatcaatgctgagcagattttcaagcaagtgtcgccacatactgaagttaaagcgatataa

SEQ ID NO: 308950 - DNA, 1107 bp, Proteus mirabilis
atgagtgacgcattagacaaactcaccattcagggctttaagtcgattaaagaactcaacgattttgaattgaacaacctgaatatcattgtcggtgccaatggtgcgggtaaaagtaacttaatcgctttttttaaactattacgctctttgattgatggcaacctgaaccgctatgtgcgcgaccaaggtggtgcgagtgacttgctatttaatggccgaaaagtcactgaaaaaatggtttttgaaacccgttttggctcgcgtggttttcgttttagcctagtgccgacaccaagcgacagttgcgccattgaagatgaagcacgctattacagcggcggttcaacaggttggtggtatttaggcgacagtgaagacggcaagtctaaaatggtcgctgaggtaaagcaaaatgccagcgatgccagatattctcgccctgtttttaatgctattgcctcatggcagatttatcactttcacgataccagcagcagcgccgccatgcgtggttatgaaattgtgcaagataacgccgtgttacgcgccgatgcggcaaatattggcgcttttctattacgccttaaaacagaattttcagcgagctataaccaaattgtggatgctattaaattagtcatgccattttttgatgattttgtgttagaaccacgtaaaagcggtgataaagaagaagtgaacttaagctggcgacaacaggggtctgattacccaatgcagccctaccatttatcggatggttctattcgttttatctgcctagcggccgctttgctgcaacccaaaccgccaactaccgttattattgatgaacccgaattaggcttgcaccctgctgccttggcgattttggcggagcttatccaatccgccgccacccgaactcaagtgattgtagcaacccaatctccagcactgatcgatcaattctcgattaatgatattgtggtggttagtcgtaaagagggcgcttcttgttttgagcggttacaagaagaagactttagtcaatggctagaagattattcggtgggtgagttgtggactaaaaatgtgattgctggggggccgagctatgagtga

SEQ ID NO: 308951 - DNA, 705 bp, Proteus mirabilis
atgagtgaaaacttagccaaccattacattgaagtcattgcgattgttgaaggcaaaactgagcaagtatttattgaatcgattttggcgccttatttagcagcaaaaaatatttttattcgtaccacccaagtgtcaaaaccggggcaaaaaggtggggatgttaagttcagtcgtaccattaaagatattggcaaccatcttaaacagcgtgctaatactttcgtttgtacttttatcgattattacggcgtaaaagagtggccaggtgttggtcaagtccctaaggcggcaacgcctaaacaaatcgctgaaattgttaatttagccagccaaaatgcggttgctaaatattatcctgagttacaaacaacaagacgttatattccttaccttgcagtacatgaatttgaggcactattgttcagtgatgtcgaaatattagcaaccaagatgggtgtgaatgaacttgaaattcaacaagtgttaaatgattgcggtgaacctgaagccattaataatagcccgacaacagccccctctaaacgcttggatggctggagtaatggtaactttaaaaaaaccagcacaggcattgccattgcccgcgaaattggagtgagcgcaatgcgcgaaaaatgccctgtatttaatgcatggttagataaagttgagcatttagtgggagttaatcatgaagcttaa

SEQ ID NO: 308952 - DNA, 3078 bp, Proteus mirabilis
atgaagcttaagttcaaagtccagccttatcaaacggttgccgtagagtcggttgttgactgctttgcagggcaacctaatacctccggcgtaacctaccgaatcgatcctggtgttgccaaagataaatttggtaatgctggctgggatatgagtgaccaggatggttttaaaaatgctgaactcgctattacagaatcgcagttattgcagaatatccatggtgttcaaagtagacagaacctccctgtttcagaagcgttagtaagtaatgctagcgctaagattaatctcgatgttgaaatggaaaccggtacgggtaagacatattgctacatcaaaaccatctttgagatgaataagcgctatggctggagcaaatttattatcgtagtgcctagcatcgccattcgtgaaggtgtttacaagtcgctgcaaatcaccggtgagcattttgctcagaattacgacggtaaaaaggcacggtttttcatctataactcaaaacaattacaccagttagaaagtttttcttctgacagtggcatcaatgtcatggtcatcaatattcaagcctttaatgcgtcaggaaaagacaatcgacgaatttatgaagagttggatgacttccagtctaggcgtcctattgatgttattagtgcaaaccgtccaatcctgattttggatgagccgcagaagatggaaggtaagaagacattagatgccttagccaaattcaaaccactgatggtacttcgatactccgccacgcataagacaacacataataaagtacatcgcctggatgcgcttgacgcttataacaataagctggttaagaaaattgctgttcgtggtatttcagtaaaaggcttggcgggaacgacagcctatctatatttggaatccatcgagatctcgaaaaaaatgccagtggctcgcattgagatcgaagttaaacaacaaaatggcattaaacgcatacccaagaaggttactaagggcgataatctttttgatcttagcaatggtctggaccagtaccgtgactttgtggttactgatgtcaacgcgattaacgacacgattgaattcaaaaatggccatgttttaaccgcgggcgatgccacgggagacgtgaccgaagagaccattcgccgaatacagatccgcgagacaattaaagcgcactttgaaaaagaaaaaacactttttaaccagggtataaaggttctctctctcttttttattgacgaagtcgcaaagtatagggactactctcaagcggatgagaaaggtgattatgctcgcgtctttgaggaagagtactccttgcttgtacaggagtatcttgatgagttgacacttttaccgagtgagcagaataatgcctataaagcctatctatcagctattgaaagctctagaacgcataatggttacttctcaattgataagaagtcaaatcgacttcagaaccccggctttaaagtccgtggtgaagatgctgggctatcagacgatgtagacgcgtatgacttgattctaaaagataaagaaaagttactttcgtttgaagagcctactcgatttatcttttcacactcggccttgcgcgaggggtgggataatccaaacgtatttgtcatgtgtatgttaaaacacagcgacaacactatctctcgtcgtcaagaagttgggcgaggtttacgtctggccgtcaataaacatggtgacagacaagatcacccggcaactgtgcatgaaattaatgttttgtcggtgattgcaagtgaaagctataaagactttgtcacgaatctgcaaaaagagatcagcgagtctctctcagcgagacctagaaaagcagatgaagcttattttacaggtaagacaattacaacggctgatggacctgtagaagtaacacctgtcatggctaagcaaatttataagtatttgcttaaaaatgattataccaatgaagctgacgattcaatcgcaccatcattccaccaggctaaggctagtggacagttagcgccaatgcctattgagttagagccttaccgagagcaaatattgactctgatagacggtgtttatagtgaagcgcaattgccaggtgttggtgatgatcgtaaacctaaaaacaatccgttgaatgctaattttgataagaaagagtttcaggagctttggcagaaaattaatcgcaaagcggtttataaggttgattttgattcgtctgagttgattaaaaattgtattcgggtactcaataaagagcttaaggtaacgcctcttcagtacaccattcaagatggtgttcaattggatggcattaccgacgaacaactcaaagctggacaaagtttcaaggtgaaaaacactgagactgaaactcatcaatcgagcattcattctgctgttcgttatgacttggttggtaagatggctgaaaattgtgtgctgactcgcaaaacagtcgccgaaatactgatgggtatagaacctgttgtatttgcacaatttaagcagaaccctgagcattttctggctgaggcttcacgtctcgtgaaagaacaaaaggcatctgtaattatcgagaagctatcatatgatccaacgaacgaatcttatgatgttgatatattcacggcagagcaaaaaattactgatatgacaaaagccgttagtggcgttaataagcatatttatgattatgttgtcgttgattcacaaggcattgaacgagactttgttaccgagcttgatacaagcaaagaagtcgtggtttatgcaaaactgcctcgtggttttctgataccaacgcctgttggcgactacaaccctgattgggcgatttctttcaaagaaggaagtgttaaacacatttactttattgcagagactaaaggaacgatgtcttcgcttaaattgcgtggcatagaagatcgcaagattgaatgtgctaggaaattctttgaaaaaattaatgcagagatcacgagtgaaaatgtcaaatatgatgttgtaacgagttactcgaaattgatggaagtagtaagcggctag

SEQ ID NO: 308953 - DNA, 285 bp, Proteus mirabilis
atggaaaattacattcgttgcccggcctgcgattcaactcgcattcgtgaacgtcatatagggaaaaagacaggagctgttgctggtggcgtatcaggcgcactagctggagcgtctatcggctctgctgttcctgttgtagggacgattgctggtgctgcggtaggcgctctatttggacgtttagtagctggagctactgctggggctgtgagtggttcagctttagatggcgtggtatttgatcgttatgaatgtatcgagtgtgaatacacgtttgattga

SEQ ID NO: 308954 - DNA, 201 bp, Proteus mirabilis
atgagtttttacgccacaattattctcgcccttgctctttctatggacgcatttgccgtcgctgtctgtaaaggcgccaccttacataaacctcattttcgtgaagccctccgcaccggttttatctttggtattattgaagcaagcaccccgattattggttgggcattaggtttatataccagtcaatatattatttag

SEQ ID NO: 308955 - DNA, 438 bp, Proteus mirabilis
atgaatctaggcgaaacaatagtgtccgtgggcgttattttgatgatgagcgtcggtatgacttggcaagggaataggatagataaactgaaagcctcaaatagtgaactaaccgctcagttatcagaacaagttaaaatcaacgaaaaataccaagctcgcattaccaaattaaacgagcttgatacaaaacacacgacggaactcacaaatgcaaaagctgaaattgataggttgcgcgttagtgctgagcgtaatcctgacagggtgtacatcaaagccgagtgtacttccaccgccagcatggatgatgcaaccatcgcccgacctactgacaccgctatccgaaattattggttactcagagagcgaattgcagagtcagaacagatgattaaagggttgcaggattatatcaaacaagaatgcatggaataa

SEQ ID NO: 308956 - DNA, 438 bp, Proteus mirabilis; identical to SEQ ID NO: 14572

SEQ ID NO: 308957 - DNA, 201 bp, Proteus mirabilis; identical to SEQ ID NO: 306886

SEQ ID NO: 308958 - DNA, 510 bp, Proteus mirabilis
atgagcagaaaattcagtaactcaaagacagataaatacctcgatactttatcgcaatatatcagtttagataatgacgattgtgatttatcaaaacgttcgaaatttaatttttcctatttttgtgatgaccagaaatgtgcttgctcaattgatgagtggggaggagataattcatcggcgtttctgaaaaaattaatagaacttagtaaacactctttgttggatttaaggcggctgccaattggcagtggtagaaagcggcgtaatattcttgaagtttatcagcaatatcctagccatagtaatttttctcgcccagtacatgtacctcatcaggctgaatgggctagaattagactagatagtgcaacccgactaataggatttgtattaccagatgattatcatggagcccatcatcaagtaacatcatatcaatatgataaaaatacattttatgttgtttttatagataaaaatcataatttctatccaacaaaaaaataa

SEQ ID NO: 308959 - DNA, 780 bp, Proteus mirabilis
ttggttctagaaagagatgagaatgaaataaagtatattcataaagatttttctgaactagagaagattccagtattaagaagtaatgtttcaataattagcatggcccgtcaatttggacttggatctgtatctgatatttggttattttttacaggtataatgtcaaatgtttcttattctggcttaatgatggatgcttttgagttagataaaataaatgaactaatgcattcaaataaagaattattgagttttaccaaaagatttgtatcaaagtttgatccatctattaaagatatttttataaaagaaagtgaaacaacagttcttttgacaggaagtaataaaaagacatttgacccttggttcgtttatgatgtagatggagaggtggagtttctttcatttcataaccagtcgagtgggacaaaatctttatataagcaatcattgctttattattttgttatagagcatggttccgtacttgtgatggatgaatttgatataaatttacatccacatatattaccacatcttatagatttctttttagacgaagacataaataagaacaacgcacagttgttgtttacaactcataatactgaaatattagatattttaggaagatatagaacgtatttagtaaataaagatggtactgaaagtttttgctaccgattagatgaaataaagggagatatcatcaggaacgatcgctcaatagctaaagtttataaccagggaaaaataggaggagttcctaggttatga

SEQ ID NO: 308960 - DNA, 135 bp, Proteus mirabilis
atgaaaggaacagaatttaaaaagttgatgtggttctacgctgatgaggcaatgatacgcaagcgtagatatgtgagaggcggaaaaaaagacagcggatcgcaatcgaaaaatgcacaaaccatatcgttgtga

SEQ ID NO: 308961 - DNA, 300 bp, Proteus mirabilis; identical to SEQ ID NO: 302231

SEQ ID NO: 308962 - DNA, 162 bp, Proteus mirabilis
atgaaaaatcgggcggtgttgaataatacgccacccagcagaagggatgttgcggtggcttccccttatacaaaatcagatcttctgaataaagatgaaaaaaaagaacgctctgataaatttagatcttcacttctaagaaataaatattttaaactataa

SEQ ID NO: 308963 - DNA, 153 bp, Proteus mirabilis
atggcacaagtggcgcatcttcttgcgatgataaatcgtgatccgaaaacgtctccgcctgaattgatggattttatgccgatgtggaagaagaaaatcacggaagaagaggtgtgggataacgtcactgagagtgtattagctaatcgatag

SEQ ID NO: 308964 - DNA, 369 bp, Proteus mirabilis
atggaagggatgaccatgccaagaaaagaagctgccgcatatattggtatatcagaagacacactctctcgttggtgcaagctaggattgattgcatacacaagaaaggacccatcaaagaaaaactcgccatacctatttacgagagctgcgtgtattgcggcagctaataaatcaattcacaatataccagtgaacgctggtgagacacgagagggaaaatcatgtctttattcagaagaggtaaaatatggtacggaaactacacgacgccaagcggtaaaagaatcaaggaatctcttggcacagaggacaagaagctcgcgcaggagttgcacgacacaagaaaggtcgagttatggcgcatag

SEQ ID NO: 308965 - DNA, 645 bp, Proteus mirabilis
atgtgtataagagacaggtctaattctgcttattttggtattgatcatagtattattaatacgggatatgcgatttctcagaatggccatcaaactaccagttctattaatgcttcaggaagtttattagccaccccagatacaggattattattcagtaatgtcagaagagatactgtcgcaattgcaaaaattaaaaatatagagggtataacattcaatgactcaccgccaactgacaaagaaggaaacactattgttggggtatcaccatacattgaaaataatttaaaaataaatacagaagaaattccgaataatgttgaattacttgattctgttcaaaattttactccagtagataaagctattatttatcgcgagtttaaatattcaacaattcaaaggtatatattaagaataaaaaataaaaatggtgattttatttctgctggaagtgctgttagaaataaaaatgatgaatatataggatttgtttcaaattctggggttcttttattaaatttattagataagcctaataagctattcgttatatcacctaatggtgaaaaatgtactttaaatttggagaaagtagaatctaatgatcataaaattatggaaattgaatgtaatgaatag

SEQ ID NO: 308966 - DNA, 924 bp, Proteus mirabilis
atgcaggccacgtttgagcaatcaggcgacggtgttgtgacccactcgattaatatcacgattaaacacaatggagtgaattataacgctgcagggcaagtgattagcgctcaggttaagaacggcaagcttgaaagtttcattggctataacgcgaataactttgcttggtataaccctgtaaatggcaagatggaattgtttatggctgccaaaaacgggcagttgtttattcgagacttatttatcgaagatggctctattacaaatgcaaaaatagggaatgtgattcaatctaataattatttaaatgggaggccgagctggataattaataaaaatgggtttgctgaattccagaatataaaagcgagaggagaaatagaggcaacttctggacgtttaaaaaatgttgttattgaagaaagttgtgacattctcggtaagctaaaggttgagaatttagaggggaatatagtcacagttactcaggacatttatcacaacctctcattctctcataacaatattgttgagttatttaaagttaagcgcagaactcaaaagtgttttatatgggtgcaaggggcattaaatccttacgaagtgataccaaatggtagttctagggtagagaatagatcggcatttgcatatcgtgcacctggttacgattctaatggaggagaggcggatatctatattgatggagttatccagcctaggccgaacatctacaacatgcgggggacatcagtgtctgatacttatgctgtaaatgagtttgtactggagttaagcccaggtgaaggtgttgcaagtattggtataaaaatccctcgacttaacagtgaagcgacgcgttttattatgcgagccagaataatcgtattcccagataaccaagatgttatttttaattaa

SEQ ID NO: 308967 - DNA, 306 bp, Proteus mirabilis; identical to SEQ ID NO: 297209

SEQ ID NO: 308968 - DNA, 150 bp, Proteus mirabilis
atgaacttggacgcatcaaaaaatcaccctcctattcctccacatattcaggcgttacgtgatgcagaaaggaattctgtaccaagtgataaatttgaagtcgattactacggaagtgattaccgacctggtaagtatttaggggattaa

SEQ ID NO: 308969 - DNA, 480 bp, Proteus mirabilis
atgtttttgttttcttggcaaaatttgacaaaggtttgcacccaagaaaggactttagttaacgctggtaacgcactattcataatactcatcatgacactactgaatacggtttttaatcctccagtcacttccttatatttttgggattgtaatgcaagttcctttgtaacaacgccattttccttttgctttttagtcaactcctcgagttcttttcgtcctttaagaatggattcaacaattttattgtctgttattcccacttctttaattcgaaatacggcttcttctttgctcatcccttgtacagcatcagacaagcgatatatgccctccattgcgccaatagattcgcctttcatatcttttaatgagatatttaaacttttgaaaacatctgctttccctgatgaagtatcttgtaatgcttcaccaatactttcagacatatccatcaatgagtcacgagcgccttga

SEQ ID NO: 308970 - DNA, 318 bp, Proteus mirabilis
atgaaagtcatacccttaaaagctattccaaaccaacgcttatccgtcaatttggaaggtgttaattggacgttgacaataaaagccggtcgtcatgcgatgtatctcgatattgaacgagaaagtgaggttattgccgtaggcatgcgtgcggtggcaaacacacctatcattccttatcgctatctgactgatggtacaaatttagcgtttataacagaaaatgatgatctgccctggtatgaatcatttgatagaacccaatcattaattatttggagtgatgatggacttacgacgaatacgggtggggattga

SEQ ID NO: 308971 - DNA, 528 bp, Proteus mirabilis
atgatcacagaggtcaaaatttttgatttagcgtcgttttctacactgtttgatagcgtgagtccgattcaaatcaatgtaagagatgagcataaggcaacacaatttcaagttgaaagtggtgaaactcgcagtgatcatgtgatcattaaccccgttgagattggtatagatttgctattaacgggagagatgaaaaacatcttctcatcgatgcaacaagcttttgacgaacacaaacttgttggtattcaaacccgagtaaaaacctatcaaccaatgttattaacgggttttaatcatgatgaaatacccgacatgatagatgcgataaaactgtcgctacggtttgttgagtggcgcaccattgagcctgaatacggagatttaccgcctcgagccactcaaaagccaacgcagtcatcaacggtaaatcggggaaatgtgcaaacaaaagacgccgatactgagactaagaaaaaaggttcggtcgcaacacgtatcgcagatggggattggagcttctaa

SEQ ID NO: 308972 - DNA, 318 bp, Proteus mirabilis
atgaaagtcatacccttaaaagctattccaaaccaacgcctatccgtcaatttggaaggtgttaattggacgttgacaataaaagccggtcgccatgcgatgtatctcgatattgaacgagaaagtgaggttatcgccgtaggcatgcgtgcggtggcaaacggccctattattccttatcgctacctgactgatggtacaaatttagcgtttataacagaaaatgatgatctgccctggtatgaatcatttgatagaacccaatcattaattatttggagtgatgatggacttacgacgaatacgggtggggattga

SEQ ID NO: 308973 - DNA, 318 bp, Proteus mirabilis
atgaaagtcatacccttaaaagctattccaaaccaacgcctatccgtcaatttggaaggtgttaattggacgttgacaataaaagccggtcgtcatgcgatgtatctcgatattgaacgagaaagtgaggttatcgccgtcggcatgcgtgcggtggcaaacacacctatcattccttatcgctatctgactgatggtacaaatttagcgtttataacagaaaatgatgatctgccctggtatgaatcatttgatagaacccaatcattaattatttggagtgatgatggacttacgacgaatacgggtggggattga

SEQ ID NO: 308974 - DNA, 318 bp, Proteus mirabilis
atgaaagtcatacccttaaaagctattccaaaccaacgcctatccgtcaatttggaaggtgttaattggacgttgacaataaaagccggtcgccatgcgatgtatctcgatattgaacgagaaagtgaggttatcgccgtaggcatgcgtgcggtggcaaacacacctatcattccttatcgctatctgactgatggtacaaatttagcgtttataacagaaaatgatgatctgccctggtatgaatcatttgatagaacccaatcattaattatttggagtgatgatggacttacgacgaatacgggtggggattga

SEQ ID NO: 308975 - DNA, 528 bp, Proteus mirabilis
atgatcacagaggtcaaaatttttgatttagcgtcgttttctacactgtttgatagcgtgagtccgattcaaatcaatgtaagagatgagcataaagccactcaatttcaagttgaaaacggtgaaactcgcagtgaccatgtgattattaaccccgttgaaattggtatagatttgctattaacaggggagatgaaaaacatcttctcatcgatgcaacaagcttttgacgaacacaaacttgttggtattcaaacccgagtaaaaacctatcaaccaatgttattaacgggttttaatcatgatgaaatacccgacatgatagatgcgataaaactgtcgctacggtttgttgagtggcgcaccattgagcctgaatacggagatttaccgcctcgagccactcaaaagccaacgcagtcatcaacggtaaatcggggaaatgtgcaaacaaaagacgccgatactgagactaagaaaaaaggttcggtcgcaacacgtatcgcagatggggattggagcttctaa

SEQ ID NO: 308976 - DNA, 813 bp, Proteus mirabilis
atggacttacgacgaatacgggtggggattgaagtcgcagaacgactgcagtggtatgaaggattgcgtattaaagctaacggtaccaagtacgcaaaccccttacaaaacgaatgcacagttagcattgatggattaaacgctcacactcgagattatctgcttactgaaaccagcccttatcataaaagcaaacaaactcgccgtctttaccttgaagtaggacgcgtcaataccggattatttcgtatctttaccggtgatattgtcagtgcagaaattgcctcacctcctgatgttacgttaatcattaaagccaaaactaataatgccagttcaggtgatattgtttcttccagtggtggcgccatgcagaaaatgagcgagatcgcttcatcagtagctaaggattgcaaggttagattggactttcaagccactgataagaatattgccaattggtatttttgcggttcagcgttacagcaagtacaacgactgcaggaaacgggaaacgttaaagcctttatcgatgatgatacgttatttgtaaaagatgacgacaaagcactaaaaagccgtttgcgtattttaaatatgaattcaggcatggtgggtataccgaaagccaccgaaaaaggattatctgtcacttatttgattgatggagcctcagaactagggggcatgctacgactcgagagtaaattcaattccgcacttaatggtgactatattattgagcaactgaaattcgatgttgcttcacatgatgatcctttcttttatcaggctacctgtaaacgagcataa

SEQ ID NO: 308977 - DNA, 300 bp, Proteus mirabilis
atgtatttagggcgctgtgttgaaaagggcactaaaacacagatatttgaaaacccacaacatccttacacccaagcgttattatcggcaacaccaagattaacaccgacattaaggcgagagagaattaaattaacgggtgaattacctagtccgttaaatccaccaccaggatgtgcttttgctgctcgttgtcggcgcgcatttggaatgtgtacacaattacaaccgactttaaaagagtatcatgggcagttgattgcttgttttgccgtagagcaagatcacggcgagttttaa

SEQ ID NO: 308978 - DNA, 537 bp, Proteus mirabilis
atgttaaaaaaaacaacactagctttatttgttgcaacgttctttctttctactaatgcattggcgttatctgataatactattacttttcagggggaagtttctgatgaaacttgttctgtctcaattaatggtaatcaggcaaaacctgtggttattttaccgactgttagtgccaaggagctaaaagatagtggagataccgcaggacaggtaacatttgatattggtctttctggttgtacaggtaatacagataaacccactaaaatatcgacagtttttgtcggtaatcaagttaccagcaatggcaaccttggcaatacgggaaacgctaccaatgtggaaattcaacttctggatactgctcagaaagttatcaatttaactggtggttttaaaggtgagggagatctgcaattaaagccaggagaaacgcaagccagcgcaacttacactgcacaatactatgctacaggtgccgcatcagcgggtactgttgaagcaactctacaatatgcggtttcttatctgtaa

SEQ ID NO: 308979 - DNA, 474 bp, Proteus mirabilis
atgatgggtgaaattaaaatcagtggattgtctgaacttgctcaacgaatgcaagacattgcccgtaaaaccagaaatcaaagtgcgcgtaaggcaatgaatgcaggggctttggcgttaaagcaggaaatcaaacatcgagtgcctatccttaaggaaacggtaccgcatcgacgtaaaggcaccatcaagcgcaatattcgttctaaaacgaaagtgcagcgcaatggacaagtcaaaacgcgtatttgggtgaaatcattatcgggtaaaaaagtgtctgcctttaaacaggcaacgggaaaaagtgcggcattgaacccaaatgatccgttttattggtggtttgtcgagtttggtaccgccaagatgcccgcacaaccgtttatgcgcctcagctttgaggcgaaaaaggaagcgacggctaaagtgattgttcaaacactcaaagaggatattgaaaaaacaaggtag

SEQ ID NO: 308980 - DNA, 318 bp, Proteus mirabilis
atgaaagtcatacccttaaaagctattccaaaccaacgcttatccgtcaatttggaaggtgttaattggacgttgacaataaaagccggtcgtcatgcgatgtatctcgatattgaacgagaaagtgaggttatcgccgtcggcatgcgtgcggtggcaaacacacctatcattccttatcgctacctgactgatggtacaaatttagcgtttataacagaaaatgatgatctgccctggtatgaatcatttgatagaacccaatcattaattatttggagtgatgatggacttacgacgaatacgggtggggattga

SEQ ID NO: 308981 - DNA, 318 bp, Proteus mirabilis; identical to SEQ ID NO: 308974

SEQ ID NO: 308982 - DNA, 210 bp, Proteus mirabilis
atgatagatgcgataaaactgtcgctacggtttgttgagtggcgcaccattgagcctgaatacggagatttaccgcctcgagccactcaaaagccaacgcagtcatcaacggtaaatcggggaaatgtgcaaacaaaagacgccgatactgagactaagaaaaaaggttcggtcgcaacacgtatcgcagatggggattggagcttctaa

SEQ ID NO: 308983 - DNA, 474 bp, Proteus mirabilis
atgatgggtgaaattaaaatcagtggattgtctgaacttgctcaacgaatgcaagacattgcccgtaaaaccagaaatcaaagtgcgcgtaaggcaatgaatgcaggggctttggcgttaaagcaggaaatcaaacatcgagtgcctatccttaaggaaacggtgcctcatcgacgcaaaggcactatcaagcgcaatattcgttctaaaacgaaagtacaacgcaatgggcaagtcaaaacgcgcatttgggtgaaatcattatcgggtaaaaaggtgtctgcctttaaacaagcaacggggaaaagtgcagcattgaacccaaatgatccgttttattggtggtttgttgagtttggtactgccaagatgcccgcacaaccgtttatgcgccccagctttgaggcgaaaaaggaagcgacggctaaagtgattgttcaaacacttaaagaggatattgaaaaagcaaggtag

SEQ ID NO: 308984 - DNA, 474 bp, Proteus mirabilis
atgatgggtgaaattaaaatcagtggattgtctgaacttgctcaacgaatgcaagacattgcccgtaaaaccagaaatcaaagtgcgcgtaaggcaatgaatgcaggggctttggcgttaaagcaggaaatcaaacatcgagtgcctatccttaaggaaacggtaccgcatcgacgtaaaggcaccatcaagcgcaatattcgttctaaaacgaaagtacaacgcaatgggcaagtcaaaacgcgcatttgggtgaaatcattatcgggtaaaaaggtgtctgcctttaaacaagcaacggggaaaagtgcagcattgaacccaaatgatccgttttattggtggtttgttgagtttggtactgccaagatgcccgcacaaccgtttatgcgccccagctttgaggcgaaaaaggaagcgacggctaaagtgattgttcaaacacttaaagaggatattgaaaaagcaaggtag

SEQ ID NO: 308985 - DNA, 210 bp, Proteus mirabilis
atgatagatgcgataaaactgtcgctacggtttgttgagtggcgcaccattgagcctgaatacggagatttaccgcctcgagccactcaaaagccaacgcagtcatcaacggtaaatcggggaaatgtgcaaacaaaagaagccgatactgagaccaagaaaaaaggttcggttgcaacacgtatcgcagatggggattggagcttctaa

SEQ ID NO: 308986 - DNA, 318 bp, Proteus mirabilis
atgaaagtcatacccttaaaagctattccaaaccaacgcttatccgtcaatttggaaggtgttaattggacgttgacaataaaagccggtcgtcatgcgatgtatctcgatattgaacgagaaagtgaggttattgccgtcggcatgcgtgcggtggcaaacacacctatcattccttatcgctatctgactgatggtacaaatttagcgtttataacagaaaatgatgatctgccctggtatgaatcatttgatagaacccaatcattaattatttggagtgatgatggacttacgacgaatacgggtggggattga

SEQ ID NO: 308987 - DNA, 318 bp, Proteus mirabilis; identical to SEQ ID NO: 308974

SEQ ID NO: 308988 - DNA, 318 bp, Proteus mirabilis; identical to SEQ ID NO: 308970

SEQ ID NO: 308989 - DNA, 318 bp, Proteus mirabilis; identical to SEQ ID NO: 308974

SEQ ID NO: 308990 - DNA, 3336 bp, Proteus mirabilis
atgaacactacacaattacattctacgtttgctagagaaaatcaagcacatcacaaaacgtggctctcgcagtttcagaaaagtcgaactgggatacgccatggttcaccgctttatcgataccacctttcactcaatgagtaccttgcccttagagatgtgcttgcgaagagttatggggtaggtagtagaacgatattttcttctgagtggtgcgcttctttcgtactttattgctctgagtggtttcgccgagaatacaacttggagtggagttggaacagcatccacgatacgttggggtttgagctttcaccacaacagcgctcagatgtcgttcaaagagggttgaagcattgggggcgttctgtttcccgctacgagaactctcaagggaacaactatctcggatcggttttccgagaaggtggattaccaaccaagctactctctgacgatcacaacggatatcaagatgctttttcaaagatattcggtcgatacagtgaggccaaggagctagggcagcattctgttcggcagcttatccaatcccgtatccaacgtttaccagaggcactgcaaggtgatgactctgtagaactattcgctgatatgctcgataagcttgatagcctagtttaccagtttgggttagatcggcagtcggtacccgcaaactatctcgatatacattgtccgaactggcgtactcagttcccgctgccactggaagatgacataggtacgcgctttctgaacaacttattggtgattgcatccaacgaggttaaaaagaaagcgaagaaggaagtcaaacttagctgcacgcactatttttcatgggacaaccaatcgattcgcaccgaagtcactttgccacataagcaactgttcatgtttactcgagaacagttaagtgttagcagaattgatttggtgttgtttgaaggtcaaaagctgcttgccaaccttggcactggttatgcgcagtttgacggggagcagtgtcatgttgtgatccgaaaaacgcgtgctgaagtgaaaagggttgacgccaaacaaaggctttctcttgtggccatgcaatcgggtgaaaagcttgctcaggtatcaataggtgacagcgagctggattggggcgaagtgccagttatcttgagtgaggaagatggtgaatggcgagtgttagggcaagcctcactctcaatccgcaaaaaacatgtttacatattaatcccggaagaagcgaagacggaaacgctatcgggtgagcttactgacactccataccgtttttgtcgcttaaaagtttgccaagtaacaggaacatgtttaatcactctacccggtgatgatacgtatcgtatagcgacggggtgcgatgatccggaacatgttggcgttatgcttgaaagcgatgtaatgacgtggcaaaccaagccgactatgatttttcgtggtttaagagtcatcaaccatgcggctaccagagtaactggtgaaagcttggatgtttgtcttgatggaaaatcggtctcgcacttaactcgagagaattttcttggtaaacagcgtttaaccatcaaaaagcacagtggtgaagtgctattgcgaaaacaagttggtgtgctgcccgcagattttgatattagctttaaaagtggtgatgcacccaatactggcgtgattatcatcactactgccgcacccaaggtctgtgcaattaaaactcctggggtgattcttgagaacatagagaaatctgaaaaacaggttgctttgcaccttctagctgaagggacgccgccttcttctgtccaagttgacatcacgttgaatatgctgggtgaggcgataacctttatcctgccttttccttcaaaaggtgctgtcgcttttaatgcacatggtaaacctttagcacaaagattaacagtggatgacttacttggcagtcgactacatctgttctctatgtcaggtcaggtggctcgctatcaaatagaagcatcaagcaatattaaggggataaagcaaacctccgcgccttattaccgctggcaatatgtggtgagcgataagcctgtagaagtgagcctttacgcgctgaaaaccagtctactggagttgttgtcgctgaataatcacttggatagcatcgttgatctcgtcatttcgggcccaggaaagacacttcgtttttccatcagtcattactcatcagtcatggattatgatcgggagagaaatgtggtttatgcgcgttcaaaccgactcgctgacacgcaggctcttcgccctgcgttgatgcaccttacagcaccagagcaagcgccaatctatcttgaaagtcttactactgaaggtgtttcaacaggggagtttgccttgcctagttacgtgacagaaggtggtccttggcttgtagttcctgcttcggactctgatgttctatttcgggctaaatttatcccatgcatgggtgagcaaacaaatgactgtgacgtaaaaacgttacaaaaggcatctcgtctttttcacccttcatctaatcccaatgtgattgcagatgtgtttcatcaaatgaaaacagattggggacacagcggttggcagtacctgcgcgatacatataagaactacgggcatcttccactttcaacgtttgaagtgttcaagtatttggtgagagataccaaagcattggctgtggcattgtttcagtttgaattgaacccagagctgatttcgcgactggaaagtgagttgccagtgttttggcagtttgtacccctggtggattggcggcatgcgattcagcttcaaatctcgatgctggaaggtatgtgtttaccagccgaaatcgttgatgagttgatggctaaacaaataacgaagttggttgacgccattcctgctttgtcagacgaagtggctattttcttagaaacaggcaaattaccccaactttgtccgagcgctttgatggagattcttgttcataacgagtggtatcaagatcttttgcgccagaacgcagaaaataacagttggccaaccgagtttggcgctgatttgaaacgctggtgcacacagtctggcttaatgccgtttgaaattaaaaccaatgcctggttccatgatggagttgtttacctgccggttttcgctgctgctgtggtaacagagcttgtgcctgccgaagtatcttcaaccttccgtgattacgacttgttccatttaagaaaactacgtgacttcgattgtgcgtggtttgaacccgtattccgctgttttgtctcctattttttgttaaaccaaacaggtaattag

SEQ ID NO: 308991 - DNA, 6285 bp, Proteus mirabilis
atgacccgttatttttcttctctcgttgagcaagctattagtcgtactaaagaatcgacattgagtatcttgggcgtaactaatcctaatcttcgcaatcaccttagcgaaatcatgtcttctgattgtggccaagagagtgcatttttggcaccaccggtattcgagcataccttcggctgggagtttgcagacccgaagatgagcgatctggcggggaatcttctgtctgaagcggttgttgctgccctggatagcaaaaagaacgggcgctatcgatttggtgcagattttcaacctttccgccatcagctccgcagttgggagcatctcttaaacgagcataaatcgctagtcgtgacatcaggcacgggttcaggcaaaacagagtgtttcatggtgccgatcattaatgatttacaccgcgaatacgaagataaaggagagcccttggtcggtgtgagggcgttatttctgtaccccctcaatgcactaattaactcccaaaaagagcgtttggatgcatggaccaaacattttgatgatggcattcggtattgcctttacaacggcaataccgagaactctaagaacaagatgcgtggaaagcaaaaagatcgtccgaatgaagtgctttcacgtgaattaatgcgggaagcaccagcgccaattttggtgacgaacggcaccatgcttgaatatatgatggttcgccaaattgacgctccgatcattcaacgctcgcgcgaagaaaagtctttgcgctggattgtactggatgaagcgcacacttatgttggctcccaagctgcagaactggcgttgcagttacgtcgtgtacttcaagcttttgatatagaagcaaaggatgtacgttttgttgctacatcagcgaccattgccgacgaggatgcggaaaaacagctaaagaactacctagctcatttggcgggtgtggaaccgaaccagattgaagttgttggcggtaagcggagcgtccctgaccttcctgagtgcccgagcaacaactattcaattgaagaactgctttctattgagcctgatggtgaaccgactacaggcaaaaccaagcaaatgcccgatgtgtcaaagcgtcgatttgaagctctctgtggaaacacaacggcacttgctcttcgaaacacattagtggaagcgaaaaaaccgctggatctgaatgacatcaactcccagttgtccattcgtctgaatcgtgctctctttacgcaacaacaactccttgagtggcttgatatcgcatcgggtacaaaagcaactggcagcggcgaagcatttttaaagttacgcgcgcatttcttccagcggatgacccaggggctttgggcttgtattgatgctagttgtgggtgtaagaaaaacacaccgcttgaagataactggccatttggttttgtttacgcaacacaacgtcaacagtgtgattgcggcgccccagtacttgagctgaccttctgccaagactgtaatgaaccccacttgctgggcaaagtctcccgtaaaaatcaacttcgccaatggaacgccagtgcgggagatgagttttcacttctcaatgaaacctccagtgacgatgatgactatgagaaccaagactgtgaaacaacaaacagcccatatgtgttttcacgaccatttgcagataaaaatggttacagtgacgtgcatgtagggaagtctggtgtttatggtgcactggaaggtgaacgcattggtttgtcgcaatactttaggggcgaggagaacggtgttcgaatgggggagcatcgctgtgtcgaatgtggttttgagggctatcgtggcgcaatgccttttcgcagagcaatgctaggctcgccattttatgtggctaacgccgtgcctactttgctggaatattgcccggatatcgacgtagataaagacactaaacttgggcctcaatctctacctggccgcggtcgacgtctgattacctttaccgacagtcgccaaggtactgcacgcatggcagtgcgtatgcagcaagaagctgagcgctcaaagctgagaggtctggtgttcgacattttaagagatgctcagctatcccagccaataccagaactccctccttcaaatacatcaccggaggagttgttggcccttgcggataacctgcgaaagtttgggcaatcagacatggcttcgcagcttgaacagcaggctagagctttgcaaaacggaggtataacgctacctattgtcgatgtgacatggtcggagatggtttcacgtctctccaaaaaaactgatgtcactggcagcatgctggaatacggcaagtatttatcgccagagacgtttaagcaatctgatggtcccttgaagctcgctgagatgctcttgtttcgcgagttttcgcgtcgtccgaaacgacagaacagctgtgaaacacaaggcctaattaaagttggatactcaggtctgaaggctataaagcgtgtacctgaaaaatgggagcagcatggattaacactccaggattggctggactttcttaaagttgccttggatttttatatccgcgaaaacaccttcatgctgttggaggaagattggagaaagtggattggtaatcgcttttctgcaaaacgcttgagaaaccctgactcggaagagcaagatgagaacagtgtgaagaaatggccacttgcaagccgaaacagtatgaaccgattggtcaagctgcttgctttaggaagtggtgtggataaagactcggtgattggcattgaccttattgatagctggctacgcgcggcatggggtgacctaacatcgaaaaacgtgggtgttctaaaaaatgatgggaacaaattcttcctaaacagagaacaacttaccttctcattcaccgataaagtgtacgtttgctcgcgtactcataagcttctcgatacgaccttcaagggattgacgccatatttaccggtaaagctgggtaacgatgattacacctgcgtggctgtagactacccacagatttgggaatttggagacgaccaagctgatttcggtaagggtctactgcttacacgtaagcaggtctcagaggatccaaaggtacaggctttaagggagcaaaacttatggacggatatcaacgacagagtcgttgaaggtggtttttactaccgtaccgctgaacattctgcacagcagtctgctgagcgtttagagaaatatgaggagatgttcaagtcgggcaaaatcaacgtgctcaactgttctacaaccatggaaatgggcgttgatatcggtggtatttctgcagtagtgatgaataacgtaccgcctcacccagctaactatttacagcgagctggacgtgcgggccggagcaaagagtcacgcgctatttcctacacgttgtgtaagggaaaccctcatgatcagcaggcgttcaataaccctaagtggccttttgaaacgtcgatcccagcaccgtatgtcgcgtttaattcttcacgcttggttcagcgtcatgtcaattccatgctgctttctgtgttcctgcgagaacaggtcggaaatacaaaaacagagcgaacgtcgcttaatttggagtggttctatcttgcgtcaggagagtcaatatccgtcagcgatagattcataacatggctaaagacaggtgcgatcgcgttagacaaggagctccaaaccctagtagctggaacagtgctggcctccagttcagctaccagcttattggaacaagcgtcgcttatgatgcaaacgctttccaaacgctggctggaagactacaagcgacttgaatctgagcaagcgagagctgaagagggaagtccttttgctttccgtctcaaacaagaactgaaccgtttatgtaaagagtatttacttcgagaattggcggcgaaatcattcttaccaggttatggcttcccaactgatgtggtcacgttcaataacactaatattgaagacttcaagcgagacaagctcgaagggaagaagaaagaagatgacagggaagataatgtctctcgagcgcggggtttaccaagccgaaaccttgcggttgccattcgagagtatgcccccggtgcagaagttgttctggatggccgagtattccgttcaggtggtgttgcccttaactggcacaacatttctaaatcggatgcagtggaggctcaaaagtttgatttggcctggcgctgcaatcattgcgggcagaccggttatctagatggtgtcgcgattgaacaagatgatatctattgtgataacgaaaaatgtggcgagaagatagacacgaagaatcagcgcaaggtgcttcagccaacagggttcgttacagacttctatcacagtccttcaaacgatatctcgcagcaggcttttatccccgttgaggcaccatggatctctgtttctggaacacaaaagaacttacctaaccctgatatgggttatatggttgctagccctgatgggagagtcttcaatcacacagcaggtgcatctggcaaagggtatgcactgtgtatgtcatgcggtcgcgctgagtcaatgatttctagcggcgagtttcctaaacacttctcaccgtctgtacttcatgttccgttgcaggcaggtaagcttgatggtgaggaccctcgagcctcgtgtggcggtagcacgacaatattgaaagatgttcatttggggagtcacataaagacagacgtttttgagcttgttctcaagcatccgcttcgaaatgagtttattgcagacaatgaagatgggagaacagttgctaccacgcttgctgtgtctcttcgtgctgctcttgctgagcttcttggtgttgcggttaatgaaatgggttatgcggttcgaccgataattctacccaatggtgaagcaggtttggccttacagctcttcgatataatcagtggtggtgcgggtttcgcttcatcagcaccaaagcatatagaggctttactggcaaagacagtatcaaagttgaagtgtccaaagtgccaatcagtttgtggtgactgcctactagagaccgattcaaggcatgatgttgaaaaactcgacagactcgctgctttagactggcttgaagggttggatctatcgaacacgggtccagaagtgattgatggagggtcgtatagtcctttctcagttgcagagaatgttgaccattatgttcagaggggctgttcgaaggttgttttcttactctcagatagcgtaaatgactgggatctctgccatccagttttcaagaaacagctagctagctttgttttaaatgaagatcgtgttgttaagtttatcttacctaaaaatattgttctggatgaagaaacaaaatccgaactgaatgcatatcgtgcaatgggcgttgaagtagaagaagcagttcttagcccagaaaacctcgttgcacagattgttggcgattcaggcgttgtctcttttgccgctcgggacgcagatgcacttcgcgtacctggtcgatattggatgatgtcatcgggcgcttcaactattagcaaaacactagctttagttgattctgtgcccgttgctttggagttggctgagttcaatcagcctactcaatatggcgaagcggaaatcgttagcgaactaaatggtaagttagactcctttggtgttagtttctggcagcatcttttattaaataacccagatctgaaaacactgatgcagaatgataatattgaagcgattcaatattcagatagatatcttcaatcacctgctgctctgctgttcttacgtcaggtattctcttcactgactagcgttatgaagacaagcccaactttgaccattgaaacgcttttcagtgagaaagaacaaaatgcaagatttcttcaccaggattggtatcacaaggatgatcaaagacttgttatgacaagggtcattgagcaagcaacaggcattgcacctgaagttgtcctattcgaaaaccgtagcgatattgctcatcgccgaatgctgacccttgctcttaaatccggtaagcgggtagtcataaggcttgatcaggggtttggctactggcgtttgaaaatgaccggctggcaaaacaagccgcttcaatatagtttcaatgctcattggactgagcaagttgaaattctagaggagtatgtcaaatacttggaagtgtataacagtgagaaatggtcaactgatattagttttcgcgtggtttaa

SEQ ID NO: 308992 - DNA, 657 bp, Proteus mirabilis
atgaaaccgaaggctaggttcactcagttatcgttactcattttgctcactggatgtgcctctacatcaagtcctatccaatatgacaacagccacagccgtgctcataacattgctcatgcaggtgggctctaccaaacagaagacaaagtcattcaaatgagagactttgaggaatttaagctcgcgaaagctgccgcaggaaatacattgttgttcacgtcttcagtaggtgcgggacttgagttaaatgaaggactaggtcttggtatgctaacgtcattgctggaacagcctgataccgcttcgcgaaacagcattattgcttggatgcctatacaagaagcgacatccgctcgagacgcacagcaaaagttgctctaccacttcaacgaagccatcgaaaccgtgcttcaagaacaatctattcactatgagcgcactaatggcaattcagaacaaaagatagagttctacttccatagtgcagactaccaatgcccaaaataccaagctggtatgacaaaccaggacctatgctacatcaccgctgaagttttcgaaccgagaagaacaatgtcaccgtctttcgtcaacgatggacaggaaagttatgcatttgagtctcacagcagtatctcattaagggatacctga

SEQ ID NO: 308993 - DNA, 168 bp, Proteus mirabilis
atgaaaacactaaaaaagttcgcactattttgcgttttttgtcttggtgcgttagtgactgtatatcaaagctggggaatgatgttgatggccttcccaggcgttattttgctccataagcctctggatgttatccacaaaaataagtacatcgcgttgttattttag

SEQ ID NO: 308994 - DNA, 240 bp, Proteus mirabilis
ttgggtatggacccaagttcagcgagtggccgtatgaatcattatgaaaaagggcgtcatatgcccgatatcggtacgctacaaaagcttgctcaggagcttggtgtgcctgttgcgtttttcttttcagattccgacagctcagcagaactggcatgtctgattgaaaaactcagtgaaactaaaaagcaggcgcttattgatcagatcaggcaggagctcgataacatcgaccagtaa

SEQ ID NO: 308995 - DNA, 630 bp, Proteus mirabilis
atgagattgaaagttcaggttgaaaaaatcaatgctgcaagcgtcgatatcgtttggttcgcggggttgaacaatcacggtatcgttacggttcaaattgctcaaagtgagttccggtgcgctatagcagagttaacggcggctaggttcttaattctcgacaaacaggtattcggacgcgtaccaaacagcggtaaaggtctcgcgctcagcctaaccaaagaaaccattttagcggccaagaatgaagctctcaaaactgccgcactgtttttgtccaaccgtctatccggtatcaaactttattctgacgagattgttgatatcactcatccagcaataaaagacattattacgccttatgcttcaccctatccgacgtttgaggttgcaaaacttggcaccatcgccatcagtaaccatgcaatgcaacgctaccgacaaaggcacaagcaaggtgatattcgcaatccatggcacagcttacagaagcaactctcccatccaaatctagaaagactggcttgtcatcaagaacacgttttcaaaagctactccgttacggaagcgagcaacatgaaatttgggccaaccctacaggcaatctttacttccaaattgcatccttag

SEQ ID NO: 308996 - DNA, 510 bp, Proteus mirabilis
atggctaagaaaaccacgcccaacgtcggcataacacaactaaacaaggaaattgagttaagtaatctcaagttgaagctgcctgagccagttcctttgccagaaagaatcgatggtttatctgatttcgttgcgacagagtcaaagcacttgatggcagcagcaaaagaactgaataaacaaatggataaactaaagaaatccttgtcaaaagagtacaacgtcgagtacccatttcgttatgagttcattgttacgagtgaacagcgcttacctaaaatcaaatggcaccgcgtgatcgctcgtggaggctggtatcctgagcttgaaacccaagaggtttcaaatggggtgttacgtcgtttttcacatgcaatgggttgggaaatccctctctatctttatttgctagaccaactcaaccaactggaacagcgtgtgaagcctataagagaactgtctagtcaggtgagaaaaacgatgcgagcgataaaaaaactgcaattttag

SEQ ID NO: 308997 - DNA, 579 bp, Proteus mirabilis
atgactgtattaaatgaacattccgccgcctatcaatggcatcaacgagcccagcagcgacaccccgaaagtgaacaagagtgctttgaactcgcgctatcacaatcgctaaaagtccttaatgatatcgagaactttgcaatgcaggagccctatctactggagtttttagccagttgctacgctaaccaattttggcgaatccatcgaacacataaggaaacctcacctggccgctacggctgtcgggttcggattcgcaaccatcgctttgaagcggcttggtactacaactggtatatcagtaccaatcaaatggcacagcgacacaacaaagaacaacgtgttcgttctaagcatttagccaaaggcaaaagctttcgttacccaccggggcgcttttcaaaagccaacgatgaatgggaatccgatcttattgagtacacagaagatgccttcgcactgatccgtgaagtgcggcatgaaatcctcaccatcaaacaaaaagcccaaatctgtacaaaacgacttcacaagcttcgtgaacactttgaaaaaatggagaaaccaaatggctaa

SEQ ID NO: 308998 - DNA, 471 bp, Proteus mirabilis
atgacagacgacactcagcctcggtacttttacttcgatgtggagtacgcagttaaaacccacgattggataattgaaacaacaggaggaagtcatggttctgaaaatattggtttgttagaaagcccattaaatcatatacagaatgatgattattaccctgaggtcgaggacaaactgactcacttagtgttctcaattaataaaaaccatgcatttacagatggcaataaacgctcttcattggcgctcggagcctactttttagagctaaatggatttgactacatagtgcagcatttcgttcgcgaaatggaaaacatcgccgtttgggtcgccgacaacgttattgataaagatctactgcataaaatcattagctctattctgtatgaagatgagtactccatagcgttgaaactggaaatttatgaggccgttcaacgagcagaggacaacaagcaacaataa

SEQ ID NO: 308999 - DNA, 1014 bp, Proteus mirabilis
atggctaaagatctcactgagtctttgcatgacagacaaaacattcttaataaccgttacgccttgcaaaaagcagagcagcatctggcattaggcggcgtgcagtttgacggtgaaacagtatttaccaaacaacaggtgatagagctgttcgatatcagcgatgccaccgtagagcgttacttgtcttcgcatggagatgaactaaaagcgaatggttatactctactaagaggcactaagctaaagaagttcaaagagatagctgttggtaccctcatcagtgagggtaccaaaactacggtgttaggcatctttacttttcgcgccattttgaacttgggcatgctactcactgacagtgagcgcgccaaagaactgcgctctcgtgtacttgatattgtcattgatgtactcgcagaacgcgcagggggtcataccaagttcatcaaccagcgcgatcaagattacttgatggcggcgttccaagaggaaaactaccgcaaacagtttaccgacgccttggacaagtacgtagacggcaataagtggaagtatggccgctttactaacctaatctatcaaagcattttccatgagaatgcagcggagtataagaaaatactcaagctggccgaaaaggataagatccgtgaaaccatgtactccgaagtgcttacgctaattgccagctttgaatctggtatcgctcacgagctagagcgccagagcatcaacctaggccgcccattgacgcaaaaagaagcagagctgctgttcgccagctttgagcagcatcctctctttagaccgctgataaccgatgctaggaccaaaatggccagccgagatttgtgctttagagatgctttgcatgaaaagctggaggcttacattaaatccgtaccggaggcagacttcgaacgcttccttggcgagaaaagcaagtctcttgaagagcaactcagcgatcctgaaacacttgacgtatttaaacgcttgaaggaccgctga

SEQ ID NO: 309000 - DNA, 2412 bp, Proteus mirabilis
atgcttaagaaaatccaatacattaaaaatcttggtgttttcaaagacttcagttgggatagtgaagttaaaaacaaaggtggtgctgttcagaactttgttgatatcaacatcatctatggtcgcaactactccggtaaaaccacactatcacgtattgcgcgtgccctagagacaggctatttatctgacaaatatggctcgccatcgttccagctaaaatttgctgacaacccagatgtaacacttgaaacattatctacccataataagaacattcgcgtatttaacgaagattttattaaagataatctacgttttatcaccaaccctgacgacagtattgagccatttgctattttaggtgatgacaataataagatcgaaaaagagattgaagctctagaggtagaactcggttctagtattgaaggacaagaaaccggtttgtttgccgaaaaaaagcaggcctctgctgcatacagcgatgcttttaccgctcataaacaatcgaatgatagtctagaaaaacaattgggtgataaagcgaccaataaagacatcggcattaaatacaagcctgagcgttttggtgaccaaaactacaccattaccaaattaaaggctgatattaaaactgtaagtagccctgattttcagcagttaacatcagagcaagtgagcgagcacgaaaaactgattgatgaaaaagttttgcctgctataccggctttttcgccgcctaagctaagttttttgagcttggcacaacaagttgaaacgctggtaaccaagcccatcagtgagtctgacaaaattcaggcgttagtaaaagatgcagtgcttaaccgctgggtcaatgaaggtcgtacccatcatcgaaacaagtatgaaaaatgcgcattttgcgacaatgaaatttcagctgagcgatgggcggagcttgataagcactttgatgaagaatctgagctattggaaaagtcgattgatgcattacttgctaagatagaaaccgaaaaccaaacagttcatgccgcactcaccattgatcaatctgttttttactccaagttttactcacaactaaccgcattggattgcagattaaaagcttcaatcaaagactatcagcttgctttaggtaatctagccaagcaacttaaggcgcgaaaaggtgatattttaaacgctaaagattatgagagcctcgatgataacacagcgaaactaacacaaatctggcaggaatatagtgacctttgcgctcaatcagagctatttagtagctcattatccagcgaacaaaccaaggccaaagccgacttgcgattgaaagaggtcgctgagtatttgcttacgattgattaccaaacacagctcaattcaattgaaaccttacagcaaaaaagagacgaggctcagcaagcacaagcgactatcaatgcgaatattaccaaaaaacaagcacaagttacggctaagaaacgtgaactgaatgatgaagaaaaaggggctaaaaaggtaaatgaatatctgaataattttttcgggcatcagtttttgacgttggaggctaaaaaggatgaaggaccaacgcaagaggcaaaacgtattcggtttgaagtgatccgtgacggtaagaaagcttatcacttaagcgaaggtgagtgcagcttgctggcattctgctactttttggccaagttggatgatgtcgcaaccaaagactctaaacccattatttggattgatgatcctatatcctcgctcgatggcaaccatattttctttatttatagcttgttgaatgcggaagtggtcgagaaggggaaatttgcacagctatttgtttcaacacacaaccttgatttcttaaagtatttgaagaggcttaaagacaattaccttactgctgaaggcgacaaggtgaaatgtcagaaagcttactttgttgtggttagacaggataaaaaatccaccttacaggtaatgccatcgtacctaaaagaatatgttactgagtttaactacctgtttcatcagatccataaatgtgcctctcttgatactatcgatgataccaactacgtaaccttttataattttgccaacaatgcgaggaagtttttcgagatttatctctattacagatatcccgatcaaggcatgacgccagagaccctaagtgcattttttggtgaagatagtattccggcggtcttaacagacaggattaacaatgagtattctcacctgtcaggagtctttgagaggggcgcatcccctgttgaagttccagaaatgcaaactaccgctaagcaaatcattgaaatactcaagcaggatagagaccaatttacctctttgatgaaaagtgttggtgagagtacagagggacaaccagcataa

SEQ ID NO: 309001 - DNA, 513 bp, Proteus mirabilis
atgaaagcaaccaagatagaccctcaactacttgataaagccacgagtatctttgctgaattaggtttaccgattgagcaggccatcaacgtatttttagcaaagtccgttcaggccaaaggctttccgttttctgttgctctggaaaatgaagcagaagcgcaggaggcctcacacaaccaagcacaaaacaaaatcagcaatgccgaaataaccgaagctatccaatacctggttgaacacgctctaccactgagtgaaatagaaaacctcacgcagctaacctattgtcgcaacaccttcgggttgtcattcccggtgctcaaactggctaaatcaccacggtcagaagacattcgcagtgcagccaaagatgccaaagagcgaaaccgctactccaccactaaagtggcccaacgagatgaaaaaacctacgtgatttgcacccagtggacagacaggcaccgcaatgcgttttgtcggtggcaagccatctttagcagtgaagcgtaa

SEQ ID NO: 309002 - DNA, 192 bp, Proteus mirabilis
atgaccgaacaaaaacaatcaaatcagctattaagctatcaagaagtttgcaaactaacgcaactatctcaagcgacgattcgccgctatgtaaaaaatggttcctttcctacaccagtcacactttcacctggcgctagaagtgtgagatttcgccttgaagatgtgcagaagtggcttctgagcctgtga

SEQ ID NO: 309003 - DNA, 1674 bp, Proteus mirabilis
atgaagtttcgtcatcatcatgatcaactacagtatttctgccgtgagcgaggttggcgttcgttgagctcttcggtcaaggttcttgctagaacgcgttcacctgatcggaaatcaggtttcagtgcttgtattgaaatcgtcaatatggataagcagacgattcgaatgatagtgcctgccagaaagatcatgggagggaccaactatcatttaagagatgaattgttcgataccggttattggctggagccagaacaaactgcatggaatatggtccagcgctatttgcgggaagagctcagagcggaggaaacggccttttgtgtcacaagaacaggttggcatgacaaggtgttcgttactccggaaaaaagtttcggacggtcagatgagtcttactacttttctggtggtatggctgattcactctgtttggcagaaggcagcttagcggaatggcaaagtgaagtcggttctttgttggtcggcaatcctttgctcatattttctgttggcgtcgcgttggccgtgccgcttctcaagcctgttggaatggaaagtgcggcattccatattatggggccatcttcgtcgggtaagtctgtcacatcgtttgtcgctgcgtctatttatgctgataagtcttatatcaagtcttggaaaacaaccgctaacggtattgaggcggttgcatcagaacatcacgaaatgttgcttgtgttagatgagctagggttgtgctctgcggaagaagccagttctgcggcttatcaaatcgtaaatggatgtgggaagctgcgagccacggaaacaggcggcctggcgaatattgccaattggcgaacgttgacattgagcaatggagagattggcctgacagagctgatggagtcctctggttatcaagtgaaagcaggtcagctgattcgagtcatcgaaattcctgccgaagagcgtttcggttgttttgcggagctacaccgattttcttcaccatctcagtttgctgagcacttggaaaagcagacgcaaaagtactttggcactttgttcacggcttggatgacgcttatttcagataagcccgatctggaagtcgttttacagcgtgaaatcgaaacgctgaggcagcattggtctaaaagcaattattccggtcaggttcatcgggtattgaagcgctttgtcttggttggtgtcgcgttgtctgttgcgtcacgaaaccagttagtgctatggtctgaagaagagtcgctctattccgtatatagcgtttttagccgctggttatctcacagagggcaccagtacaatcaagaaacgtatgaggtgttgagtgctttgaaacaagccattagccattgggaaaataagcttcctgaattctgtacaagcagaccgtcaaagtttggttactggcggcaggatggtgatgacgtccagtggcttatccacaaacaagaatttgttaagcagctacgactgcggcgtcagtataagagtcaattgagccctttgattcataaagggtggtttgaaaccaatgaagatcgtaggggaacacttcggattatcgaaaagaagaacggtactgagtttgatcatcgttttttcgccttctggccggaaaagatcctctctgagttgaaggagatgggtattgatgaatag

SEQ ID NO: 309004 - DNA, 336 bp, Proteus mirabilis
atgacaaccaacgagcaagttcttcttcaatccattctcgccaagattgatcgtgtcgagcgcgctgttctggagcagcgtttgcagcaacaaaaggtggagttgcttggaaaggatattctaactgttgatgaatgtgctgtcttactcggtttgtctacaaaccagctgtataagctaacgagctcggcagagatcccttactttaagcttggcaaacacctccgatttgagcgccaagctatcatgagttgggttgaggagcagcgtgtttcatctcgccatgcgatagaaaaaatggcagcaaactatgtcgccaccacttctcgtaagtaa

SEQ ID NO: 309005 - DNA, 1176 bp, Proteus mirabilis
atgaaaattttcattgaaaaacgggcacttaaatcagatggaacgcgcacattgcgtctcatttatgaccacggttataccattcaatcaaacggatctcgtcaacgaaaacgtgaatacgaagtactggatctgtttatctatgacaaacccaaaacgccagctcagcggaaacataacaaagagcaccttctcctagccgaaaccatgaagaataaacggctggttgagtggcaatccaaaaagcatggttttgaggatcgaaccaagcgttcagctagcttcattgattactttcaacggcaaattgacatcaaagaacaaactacctcaagctccaaccattcgatctggctttctgctcgtaagcacctgctgttctactgcgggaaacatgatcttagctttgatgagctggataaagactggttagatgggttcaagtattacctgaccaatgaagcgaaaaccaagagtgatgagcctttgtctcgcaacacgcaaagctcctacttcaataaagttcgagcggcgatcaacgaagcacatcgagagggtattattcgcgataacccgcttgcacaagtaaccagcatcaaagcaaagactactcagcgtgtttatctgacattagatgaggttaactctctagctcaaacggaatgtcgctacccaattctcaagcgtgcatttcttttctcctgctcaacaggtatgcgttggtgcgacattcaaaagctcacctggtcagaaatagagacgtttcaagagcataaacgaattatcttcgaccagagaaagctctctcacggcgatgctaagagccttcagtatttagatataccaaagtcagctgaaactcttctggatagccctaaagcttctcacgagcgcgtattcaagggattaaagtactcttcgtacatgaacgttgaattgcttagatggagcctggctgctgggatcagtaaacacgttacattccacagtggccgccatacctttgccgtgatccaattgagcagaggtgtagatatttactcagtgtctcgattgctcggtcatagcgaacttaagacaacagagatctacgctgacatcattgaacaacgcaggatggaagccatgctgacattccctgatatttttgcttctggaaaggattcagcggcctga

SEQ ID NO: 309006 - DNA, 132 bp, Proteus mirabilis
atgggaataaaaagagaaacagtcttaattgcgaatgataattttacaaattcatcggccgttatacatctaaaaaatgatatatataatgctattgaaaaagctgtatggcctcaaggtgaagtggcatag

SEQ ID NO: 309007 - DNA, 891 bp, Proteus mirabilis
atgataactaaaattgaattagatgatggttttttacccgccaccatatcagaagttgtgaagacaaatgtgattaactctctaaatgaaataaaaactattaatgataaattcattatcaatgatagttcgttcatgagaaagcaaagtaacaatcgaataacgccttgtgtaatgaactctgcatcatttatttccagcaaatttcaaaataatttaagtttattacctaattgtttgggtgaaaatagtttaaaccaacaaagaatagatgggctaataaaagttgaatataatggatttgcgtatagaataaaagataaaaataaaatattggaagtagcattcaaatatataaagtccaaaaaactccccaacaatgtaatatacactttattccctatgttttatgggatgtatgtagatagattatgcttcagcgtaccagaacttgatgacatagaacatttatttgatattgagaaggtaaattatcactataaaattggtatcgaatttgagacaggaaatgttgcaagttcttttagagccatcaacaaattaaacaatctcttccacgatggtcatattgacgggggttgtttcattacaagtattgataagagaaactcagccactagaatttggcccgtatcaaatagaaatggttcatttcaagaactaaaaaatagagcctacatatctcaaatatctttaccactaatttgcattggttttgcacctgatgatttttcacaaacagccccattcttaggagcaaatggtgaactttacgaattagagaatacatttcgaagagatcttgaaactaattttgaaatattcactaaacatgatggattagaatttttaaaggctccattcaagtaa

SEQ ID NO: 309008 - DNA, 243 bp, Proteus mirabilis
atgaaaataaaaagaaaatctttcgcaactatgattggtagtagattgcttgtagcaagagtacagaagggattcagtcaaaacgatatccaaaatgctacgggtattgatagagcaaccttatcacggatagagaatggtaaacaacacatagccctctatcaattgcttcagatcttatcagttctaaatatggaaatagcagagtttcttaaagatatagaggtagataatgataactaa

SEQ ID NO: 309009 - DNA, 1230 bp, Proteus mirabilis
atgagttattcggatcagtttcttaaagctttaggtgtagtcgatgtttcggctaagtcttataatgaaattagtaaacgaacaaaaataccgactgacagacttaaatattataatcaaagaaatattatgccaagcgggaaggatcttagcatcctttgcgaagaatttagtatatcacctgtgtattttcaattgatgatggggcatatggatatgcaaatattggaacttatccaagaaaacgcatctttcatccaagaaaaaatacaatcttcaaataaaaatattgatgataatgccgaaatttctgatgttgaattagcactgcaaaccaaaaatggtaaattgtacaatggcgattgcttagatgtttcaaaaaaaattgaatctgattctgtcgacatgatttttgccgatcctccatttaatcttgataagttatatccttcaaaaatgaatgataacttaaaagaagaagagtatatcaagtggacacaccagtggttaaatgagtgcattcgagttttaaaaacgggtggttcattattcttatggaacttacctttgtggaacagtaaaatagctaactttttacatgggagacttaatttcaagcattggatagctgtcgatatgaagaataatatgccgattaaaggtcgattatatccctctcattattctctactttattttattaaaggtgaaaaagctaatgtgtttgaaccggatagattaccagcacaaacttgtccaaaatgctttggtgatcttaaggattatggtggatataaaagtaagatgaatccacttggtattaatcttaccgatgtttggtatgatattcctcctgtacgacacaaaaaatataagaaaagaaacggggcaaacgaattaagtataaaggttttagacagagtaattgagatgtctacaaaagaaggtgatctcatttttgatccatttggaggctctggaacaacttatgttattgcggaaataaaaaatcgcaaatgggtcggttctgaaatagataattgtgaaattattaaagatagatttaacaatatctctgaggacaaagaacacttaattgagcttcgtggaaaacttaattctttattcccttcaactataaaaagagagagagaaaaacgagggttatggactgtcgaaagtgtaagaataaagaatgaacagttaggttttcttcaaggtgaagattag

SEQ ID NO: 309010 - DNA, 159 bp, Proteus mirabilis
atgaatttttacattgataaatcaggtaatttttcactaaaggattcagtgggtagtgaggcaatatcttttaattatatcaactacctgaaatcatggatattattcattcctaaaatacgtcatattggtaataaatttatttttttagaaaactaa

SEQ ID NO: 309011 - DNA, 135 bp, Proteus mirabilis
atgataactttagtaagtaaagcaaaaaataaatatttcacatggtggaataaaaaagaactatctgaccaagttattttgatagcatttgttccgattatctatggtatttgcttggtagttataacttggtaa

SEQ ID NO: 309012 - DNA, 231 bp, Proteus mirabilis
atgaaaagaaaaaaatcattaatgccaaatatttccgttaagggatggtttgcatttgtgattatgttgtttataattttaaacggagttatgttttttcaatgggatagtgatgtaatctattttggtatgtttaatgctattgttatatatttggactctttcttcattgttgcttttattgtgaatgccgtcagttttatctttaaaaaaggcatttatgaaaaatga

SEQ ID NO: 309013 - DNA, 195 bp, Proteus mirabilis
atgtttttttctgtttctaacaactctaatgaaggtaatgcctctaaatctttatttccagttaagagatatagaagtgcaaatattgctgttgataaggttagaatgaaattattagcgtgcttatatgatcttcttttcaagtataagcagaatgtgattactgatgatattataatccatatggttaaataa

SEQ ID NO: 309014 - DNA, 243 bp, Proteus mirabilis
atgagatatattgcttcaacgatcctgaatgagaaaagctttccaccagacgtgattgaagctgctttagctcatatcgatactaacaaagtcaggagagcctacaatcgctctcaataccttgaacaacgtagagagatgatgggctggtggggagagcatgtggaagcagcttcttctggggcaacgagcatgggaacaattcctaccatgataaggatttctccagccatacgccgatga

SEQ ID NO: 309015 - DNA, 1257 bp, Proteus mirabilis
atggcctcactcactgtcaggacagttcaggctctcatcaaagcaggtcagccaggaaagtatggtgatgggcgtggtttgtatctgaaagtcccacctaaaggtgagccgtattggatgcttcgatacacaatcggctctaagagacgagaaatcaccttaggtaaggtatctcatctatctctgtccgaggtacgtagcctcgctgaggatactcgaagaaaagttgccaccggggatgatcctattgctgagaaaaaactcaatcgccctaagcaactgaccacagtagatggactatttgaagactggcacaaagatctagttaaacgattaaaacatcctcacatacctgaacgggtttaccggaaagatattgcccctacaataggtagacttgccttggtaaaagttaaccccctcgatgttcggtcgatcctgcaaaaaattacagatagcggaagaccaaccatttcaaatgatgccctactctacatgaagcaactctccgaccacggcactaagcttggtctgcttcagagcaacccagcaatggcgttcaaggtaaatgatgcaggtggaatcgaaaaaagcagagaaagagcattaagtctcgaagaaattggtcaggtgtttaaagttttcagaaaacactctgacagcttctctcgtgataactaccttgcctgtgccctgctactactccttgctgttcgcaaaagtgagctaaccgaggctccttgggcagaattcgatttggatgagaaaaaatggtctttacccaaggaaagaagtaagtctggtgtagcaatcgtcatcccgcttcccccgctcgctatgaagattcttgaagagctaaaggtcagagctttcggttctgattatgtctttcctaaccgcagatccagtaagaatctacacatggggaaaggcacgctcaacagagctatagcgaagctgttcggtatcgagcctggcaggaagcagcagccaccaaatgttatgggtgatattgaatatttcactgtccatgacttaagaaggacttgtagaagtttacttgcatcactgtctgttcccccacatgtcgcagaaagatgtctgaaccacaaactcaaaggagtcgaagggatttatgacagatatgattactttgaagaaagaaaagatgctcttaagaagttagctgatacattaaataattcattgggttataacttttttaaaaggacaatcgtcaataaacatggggattag

SEQ ID NO: 309016 - DNA, 1524 bp, Proteus mirabilis
atgaacaaaatcaactccgtctgtccttattgtggcgctggctgcaaaatcaatctctgtgtcgaaaatggtcgaataatcaaagctgaaggtgctaatggtgtcactaatcaaggcgagctttgtttaaaaggtctctatggatgggattttttaaatgacaataaattactgacagccagaattcatcaaccgatgatccgccgacaaaaaggggctgattttgaaattgtcagttgggatgaagcgattgagtttacggctaaaaagttactcgcaattaaagagaaatacggtgctaaatctattatgtgtaccggctcctctcggggtacaggtaacgaaaccaattttgtgatgcaaaaatttgctcgtgctgtactaggtaataataatgttgattgctgtgcccgtgtttgtcatggcccttctgttgctggtttacaagaaacactaggcaatggggcaatgagtaattcaattgctgatattgaagattcagattgtttgttggtgtttggttataactgtgctgattctcaccctattgtggcgcgccgtgtggtgaaagcgaaacaaaaaggggccaaaattattgtttgtgatccccgtaaaatagaaacagcgaagattgctaatcaatatcttcccttaaagaatggcaccaatatggcgttagttaatgcatttgcctatacgctgattgatgaagatctttatgacaaagaatatgtcagtcgttacaccgaaggttttgaagaatataaaaaacagctggtggattatagccctgaagcagtagaacgtattgttggggtttctgcgagcgagatccgccaagctatgcgcacttatgcagccgcaaaaacagcaaccattatgtggggaatgggggtaacacaatttggtcaagcggtagatgttgtgaaagggctagcgagtttagcgttattgacgggtaatttaggcaaaccacatgcgggcgttgcccctgttcgcgggcaaaataatgtacaaggtgcttgtgatatgggggttttacccaatatgttccccggctatcaaagtgtgacagatgaaggtattcgtcaaaaatttgctcaagcttggcatattccggttgaaaaactcgatccgcaagtgggttatcgcattactgaagtccctcatttagccattgaaggtaaagtgaaagcttattacatcatgggcgaagatccacttcaaactgaggcagatttaggtctggttagaaaaggttttcaagcgctcgattttattgtggttcaagatatctttatgacgaaaacggcagagcaagcagatgtcattttaccttctaccagttggggtgagcacggtggtatttttacttgtgccgatagaggttttcaacgttttgaacaggcagtacaagcacgtggtaacgttaaacgtgattgggaaatcattagtttattagccacggctatgggctatccaatgtcttatacagataatgaagaaatttggcatatgaggtaa

SEQ ID NO: 309017 - DNA, 5349 bp, Proteus mirabilis
atgcataaaaaggatatttcgcgaaaacagcgtttaataagctattgtgttatttatttaaccgctatttacccattgcatccagcttggggctctgtcattacttcatctgataaaacgataacaataaatcagcaaaataatattcctattattaatattgcaacacctaatgacagtggtgtttctcataataggtttaatgtctttaatgttaataaacagggggcagtacttaataattcgcaagttgatgccaatagtcaattagcaaaaaaaatatctgctaataaaaatttaaaaggtaatacggctaatttaattattaatgaaattgtcggtaatagtcgttcacagttattaggtaaattagaagttgcagggcaacaagcggatgttttaattgctaatcctaatggaattagttgtgatggttgctcatttattaatactccatcaattactctcacgacaggaaagcctcaatttagccctcaaggtatctattcggcactagaagtaaaaaaaggcagtattgttattggtaagcaaggtatgaatgccgatttgcaaaattatgccgatattattagtcgtagtattgaaataaatggaaagataaatgctaaaaatctctctttaatgcaagggaataaccatattgatttcggccaagggacagtaaatagcattaatggagaaggtgtaaaaccgaccgtcgctattgatacaaaagcattgggtggaatgtatgccaatcaaatacgcttagttagcacagaaaaaggggtcggtgttaatttaactgatattcaaacaaagcaaaatagtatcaatttaacagttgatggcaaaattacctttaatggcaatattcaatctgagcaagatattaatgttagtagcaaagcactacaagtgaatagtaatgccagcttaaaagcgcaaagagatattacattagcaactaatacgctaacgaatcatagtgatattatcgcagaaaaggatatgcgtttattcgtagataaattcactaataaaggtgaaaaagcgcttattcaagcaaaagataatttatggatacaaaaaaatgcacagggtgaaccaagtagtttaattgaaaatcaatcagccaccataaaaacagaaaagggtgatttgattattagaaccaagaaattggttaatgaatctattactcctttatttaaagaaataaagcaagagcctgattctacatcgtctataaatataggtactcattttcttcatccttacaatagtcctacgaataatttccttataattattttacttgctgaattaaaagaactctctgataaaaagtggtttgatatattagatttaaaaaataatggaggtgttaatgtagagcgctcattatttgaaaagaataaaaagtatgttcctagtgttatttattctggtaaaaatttatatatacaatctaacgagttttttaatacccaatctgatatttttgcaactaatgatcttatcgcaacgggaaacaatgcaaaagtatactattatcggtttggacaccttaataaatgggatctttattctcatgataatgctcatattttttatcgagatgatgtaaacaaatataatattgatgaaacaaaatttcaaaaaatagttcattttattccctttaccaaaactggaagtcattatgaatttattgtagatagtgcttctgaatatatgataaaagcaggtaataatttagttttagattttaaagatagtatagagttagaacgtaaatttccatttttagaaaaagaaattaaaaagtatagaagaatatctgattttgaaagtactatattagctaaaaatatactattaaatgctaataatttaaatatctcattaaatttaaaatcaagtaactctttgtctgtcattgctaataaaaatataaatataagtaattcaaatttattatctggtgatactgtaaatttaacagcaattgataatgttaattctgaaaatgtagatgtaacggcaaagcatttttccatcataactaagaatggagatattaattattcatttagccctatagcctcttatgctacgaatagcattaaggcaccatttattgatgtgtctgaaaaaatagacttttattcaggtaaaaatatatatatttcaaatgtaataattaatgaatcaaatgaaaaaagtttatcagcattagagaatattaaaataaaacgcgatgagtctttatttttcaacctaatgacaaattttagagatgaacaatatattccagcgtttttatttaatatggggctttggaaaagtaaagataatataagcttgatggctggtaaagatattgttagtcagggaataaaatattatagtgataaagcaataacttttaatgcaggacaagatatttttcttgcctccaaattaataaaagaagccgatcctttttttagtgatattcattacccccaactacaatctaaattattttcagataataaccttattttaaatgccgcgcgtgatattgatttaagttcaacagtattaaattcaaaagataaaatcattgtattagcgggtagaaatataaaactgggtgcaaatgcttattccgccatcaaagatccccacgaagatgcgcaagacattcaatatgccactacatccattacaggaaataaaggtatttctattgcatcatcaggctcactcacaacagaaggaagttcacttaaatcagagggggatattgctatttccagtggtggcaatatccaattgggatcagtaagaacacattttcgtaaagaatcgggttctgacttagaagaacttcgtaaacaagtcagtactgaaattaatagcggtaatcatctaacactattatctgaaggcagtattttatttcaggcatcaaaattaactgcaaataaaaagatggatattgcggctaaaggtggatttctttatgcacaggcaatggaagaatccagttactatgaagaagaaaagaaaaaatgtaattggtggacactgtgtgcgactaaaaagaaatataccaaaacatttaataacacaacgaataaagttaccgagtttattgctaatgacgatattaatttaattgctaaagatgatatcactttagaagcaagcaaattagagacagcaaagaatgccaaattaaccagtaaaacaggaggcattaattttaaagcggtgaaagatactgcttttaaacaagttattactcgttcaaaagatatatatatcactcaacgtaatcagggatacaccaagggaacatggctattacctgaactctatattggcggaaagctgactattgatgcgccaaaaggcatatctgcagatattaaagccaaaaaagagcaatctttagagcaggcgttaactaccttaagtaacacaccagaatatgcttggcttaatgttctccaacgtcaagaaaatattaattggaatttagtgaaagacacttattccagttgggatgataaaactcagcagttaaatccggttgttggtgcggttattgccatcgcggtaggggttgcaacttatggtacggcaacggctgcctcaataggaggaatggcaagtaatgccactattgctgcaggagcctctgcgggggttgcgtcaacggcatcagttgcggcacaagccggctttgcttctttagtttcgcaagctgcggtctctttagccgaaaatcaaggcaatatttctaaaacatttggcgccttaagtcgcagtgatacggtgaaatccattgtcaccagtatggccgttgcaggcgccttgcaaggtcttgaccaatttatgggttgggatcaagcaatacaggggggaacattaccgacaacaggcaagttgcttgcgacggataatgccacatggactcaagttgctcaacgcgttgcctcacagtcagtagtaagttctacactgggcacagccattcaaggtggcagttttattgataattttaaaactgcgttattaagccatatcggcagtcaatttcacgcagaaggcgccaatctcattggtgataacggtgcggtattagggcatgcaggaaaggttttaagccatgctgttgttgcaggagtgagcgctgaaattgcaggaggcagtgtaacaggtgcagtagccggcgccttggcagcagagatagcggcaatatcgctacaaagtaaattatttgagcctagttatttaaatgaaactgacagacaagttgcattaattcaagaggcactacatggcaatgaaggaaaaacacagctcactaaattaattggtgcactgacaggcgctattgtgactcgtaagcctgagggcgtattttctgcggctaattctgcggagttagtttatcgacataattacagcgaacatatgctttcaaagctagcactagaaaataataaggacataattgcagcgtcaaaaggtgatgttgcagcagcagaaagagttgtaaatcgacaaaatgcagggatgattgcgattgctcttggtttaggaggaagtgcgagtattattggtggtcacactgttattgcagcaacaccagaacttattgctattacgcaagctgcatttagtacatgtaaaactaattgggtttattgtgctaatcagctaggtattaatattgctgggatatcagctccagaagctgcaatcgctggtgtcaccgttggtactggttataaagtattagctagttcagaagaaagtgctaaagctttctctagcatgttagctaatagttcaaagtctttaatgacttcaggaaaattaaatataactgctataaaaccgatagtagatcaagaaaagttatttatagcagcaaataaacgtgtaatagatgaaattaataaaatatcttcaaaaaataaagctaaagatatagctacaatggtagctgcatatgatattaaaacaggaactattatagtaagaggaagtgttggttctgacattaaaatagaaatgcttcataaagatactgtggttctactaaaaaataaattaggtgatgttaaagttggaacaaaaacagtacattgtgataatattgtaggaggatgcggtgaagtattagccgcagatcagctgattcgaaaaggggtcaaacctcaagatatcagaatttctcaggcatatcgccccagaaaagcttacggatatgatttatctactatgccagaagaagcatttgttgatacatgtaaaaattgtattaaagtttttttagatgaatag

SEQ ID NO: 309018 - DNA, 603 bp, Proteus mirabilis
atgagattgttacttgatataaattggtatccaggtcagggaagaaatcattcatgggttgctatggataaaaatggatatatttcaatgatgctaaataatggatatggatggttacctaaatgtatattagaaataaataatataaaagaatcacttaatgatttatgtgaatatatcgatggcgactctgaaaagtataataataatgttaataaaaaaggtgagtatcttatagatttatattctagctgggtatataaaaaatataaaaataagcaagaaataattaataactttaactttagattagaaaataaaaaaaactgtgatgctgagttagcaactaaaatgggaatgttttattttgaagcattagaggggcaatcaataggagaggattatcccattggatatgaaggcaaaaccaaaatgggtgattattttcgttttattgttcctaccgtttatgcaacaatagcagatattccagaagagttaaggaaatatattgtagtctctgatagtattgattttaccaaagatagattgtttgataataataaaattagcgattattttactcatatgtattcagaataa

SEQ ID NO: 309019 - DNA, 588 bp, Proteus mirabilis
atgggcaaatttaatctagaaatgtttggtgatagcgcacccgtactagaccgcattattgaggcgtacggttttagttcaaaaataatgctagcccaacactttgaaatggcatcgagtagcttggctggacgatacaaaagagataattttccagctgatttagttgtcagatgtatggctgagacaggagcaaaccttgaatggcttgcaacaggtcaagggaaaaaatttgataatcaagagttagatatacttcgcttgcaaaaatataaaataattgatggtaaagaatttaatgcagaccgagtaatgtatgacaaagtactctttaagcaaggcgtacctttgccaattgacccaatagtagttcaagatggggaaaatcattttattgttgaccggaaatttaatgaagtctatgacgggaaatggcttgttaaaattgatgataaaataagtattcgtgaattaactagaatgccactgcaacgcgttagaatttcaggtgttggtatggctttcgattgtgaattgaaagatatatctattatagggcgtgtagttaccattattgaaaatcaataa

SEQ ID NO: 309020 - DNA, 240 bp, Proteus mirabilis
atgcgtccagtgatttcaatcagcattccaacgccctatatcacagttgctgagtacagcaagcagtcagggttaccggaagcaaccatccgtgacatgattagtgatggccgtttagttgtagaaaaaaaagctaaagcaactaaaaaaggatcaagagtattaattaatatgtcacatcagtatcttaaatctttaaaagagagtgggttcgatatatctcttaatagtagcctgtaa

SEQ ID NO: 309021 - DNA, 252 bp, Proteus mirabilis
atgacaggcgagaggaaagggcgcattttatcacttatggggaaggataacgcgatagaggaagagtacaagagaattgtgaacggggttgatactgtcagtaaacagcatcaaccattaacatcaaacacgctaattatgtggtatcaccacttttccataccatttttaggtacgagcgctaatctgtctgctaatcgttctccgtcatcagggaaacaaagttcaggtgctaaatccgccaatggataa

SEQ ID NO: 309022 - DNA, 936 bp, Proteus mirabilis
atgacttcccccgataaatatcaaaaaacatatcaaaatatttctaaaaacattgcgttacgcctaacgctgaccaaatggttacaagtctattcttcttattctgtttcctttagagcacctaccttaagcgaaatgtataatgactcagtacatttcactatccctcattatgctatactgaaatatcctttttatatagaaaactttgaagctcgttgggttccaaattccacattagaaccagagacgaatagaacatgggaacatggtgtcattttacagaaaaatgcgttgctttttgccaatgaccagctaaacattaaagcttcttattacagcactgaatcgattgatcacattacctaccaacagtggtatcatagtcgtaaaccaaaacaatcaacaattgataatagtccggcaatttcccccattaaagatcttcgcgaagttgcgttatttcaatcagttaacttgcctaaagcacttattcacggatttgatgtaagattactatattctcatccatacatcgctatggggctgaattacaaccaaactaaaaccttagagctatcatctctagaaaccatttcaatgactcgacctgaaacattaactgcttttataaatgtacccattatcaaaacaccgttttcggttgcttggtcaggaaaatttgccggtccaacagacaaaaaaggtacacatcaataccctggctcaagtgaagtgactactcggttaaaagaaaatcttcagcaataccctggctatggtgtgcatagttttgcagtcaactatcaatccaataataaagatattcaagcctcattggtactcgataatgcatttaacaaagtgtattactcaacggtaggagtacctcaagaagctagaaatatcaaaatgtctgtcagttatcgctggtaa

SEQ ID NO: 309023 - DNA, 546 bp, Proteus mirabilis
atgaaaactatttctgtttctagtgctaataatagaatatcatttctaaatgagacgctaaataagtgtgaacgtactttttatcagttgaaagataatattgtatcaataaaaaatagcgcaaatgagataataaactcatttttgagtttatacaaaggtaaaacgaatagtctttcaaattccttttcaaaaataataaaacatataaataatagttgtaattttaaccttatgaataataaaataaaatttattcagatgcaattatctgctaatcgaatttatgaacaattggaagaatgctcatatataaaaaataatgtttcattaaaacatggacataccgatagtcaagttaatcagctttttatatcagcttatgaaatactgcaaagccctttattgggagatgagatgaaaaagaaaatcattgattatataagctttcatttttttattgaagaaaagaattataaatatttaaggaaagaaggatttaatgaaatgataaagaatttaaaagagaaagagagaaatatttaa

SEQ ID NO: 309024 - DNA, 768 bp, Proteus mirabilis
atgcttcgactttgtttttttgatgaaggtttgtgtcatttttttaatcatataataaataatactctttctaaaataacaaacaggattgatttaaattggaatgaagactatataactcgtagtattttgaatgatttgacgaatgaattttctgaaatagagtggtctaaagaccttttttatacaaaatggaatgcttttaagttaaatggaagtaaagaaaaaaattatggcgatatagctattttagttaagttggaaaatggaaaaggtaattatacagaaggggtagctttctatgaagctaaaagagtttttccagatatagataaaaataaaggattgttatataggtatcgaagcataaaaaatgagcaacttgaaaggcttgaaaatgttattactatgagtgtcctattgtatgatatggatcctaaaatagtaacagctattccaattaaaactttcaatatgttagcaaatagtaacagaatggtcattagtcctaaagaacatactttaggactaaattttggagatgctttatttctgaatttaaaaggaataaaactagattattctcatgattcagtacaggcgattaaaaatattatctctgaaccttaccctggtttaaatactatagttgcagttagtggctctaaagatatttcattaaaacaagcttattctgatagtgatgatattggaaaagttataaataaattatatagtcctatttcaaatgaaaaattccatgattaa

SEQ ID NO: 309025 - DNA, 363 bp, Proteus mirabilis
atgcgttttaaactgttaaaagttgccgccttatctttagtcgtaatgacttcaggttgctcgatgttcgaaagactggtttatcacccagatatcaatcagggtaattatttaacaccagctgaagtcgccaaagttcaacaaggaatgacacagcagcaagttcaatttaccctcggaacacctatgctgaaagatcctttcggaactcaaacttggtattatgttttccgtgaacagccaggtcatcaaaaggtgcgtcaagaaactctgacactgacatttgataataatggcatactggctaagattgacaaacaaggtgatatgccgagtttttctaatcaaaccagtaaagactaa

SEQ ID NO: 309026 - DNA, 372 bp, Proteus mirabilis
gtgaataaaattattatcattactataaaaaaatctatcggtgatctgctcgagtttaatcgattaggtatttggcaaggtggtttttctcgattatttattttattggctatttttataactataacactttctataacgatattattaattcatcagctattatcttggttgattaatttgaaacaaatcactatttctttatctgataataatagttattcattgatgatcccttggctatggcaatatgatgctatgtttaaaatcgctctattattattgttttccgcagtcatcgcttcgtgtaactctatttttaaagttagccaccatttaaagaaacatcaaaaaaataatattactatttag

SEQ ID NO: 309027 - DNA, 138 bp, Proteus mirabilis
atggtaaatttctgtcaaattttaattacgataggtgtaatgttttgtttacaaaataaaggagatataaaaaaacgccaacaaaatgttggcgctatttatcatgtttttgattttttgaaggacaaaaaagattaa

SEQ ID NO: 309028 - DNA, 1221 bp, Proteus mirabilis
atggctggagtacctaccgacaaatatgctgcaagtgagcagggattgggatatatttatcagacacgtcttgctcttctgcatttacttcaattaccagaagatacagctgtttttcttgaaaaagatgatgatctagattttcttgataataaaggtagtaaatccttagcttcacttaaacataaagcaagaggtgataaattaagtaatctatcaattgatttttggaaatcagtcaacatttggatagatagatataaacgagatggccggataggatcgaacttacggtttttcttgtttactactgctacagtatcatcaaactcgtttcttgcccgctttcttcctgaacaatctatcccctctaatgccgagacactaagcaagttagctaattctgtacttgctgagtcaagatctacacttattatgaatattgctagcttatttaatgaactaaattcgtttgaacaacaagattttcttgaacgtattcttatttttgatggtagtcctcgtattgaggatatacctacaattatcaaagacaagcatatgagaagtattcggcgtgaacacagagaacctatatttgaaagattggaaggttggtggacagatttagtaatccaacagttaacaaatataagaacagaaggtattttcggctacgaagtctccgacaaactttccaatttttcagaagagtataagtctgataatttaccaattactttccgtggtgaaattccacatcaagatatcgacactgacattgatcctagactatttgtaagacaactgcgtgagataggtatttcttctagtcgtattagaagtgcaattctcgactattatcgagctttcgagcaacgatctgcttgggctcgtgaaaatttattaatgttaggagaagtagaaaagtatgaagactatctcacagacgaatggaatcgctataaagatgttgtttttgagagtctagaagacaatagtgctgagaaggctttatgtgaggctggaattgaactttacaactgggcacagtttgaaacaggaaagatagaatcttttcgtatccgagcacgagtgagggagccttatgttcttcgtggtagcttccatatattagctgatgctatgcctaaacctaaagtttattggcatcctagatttcttgaccgtttagaaagcatattaggagaaaagcgatga

SEQ ID NO: 309029 - DNA, 489 bp, Proteus mirabilis
atgaaacaatgggatcaacgtccttttgagattcgaaatttatttaatccagcattctgcggtttagttattttccgtgctttaaatggctatgaagaagagaatagtcgtggtatgccattttctttatcgttactagtgttacctctttgtttatataaaagttcaagagaaataatcgcgaataatcttcgtagttacttgctcaaaactacagagatgaacccagaaataatgataggatttgctgaacgtgttacacaaatgttgccttatacgtttgaaggttttggtctattgatggagagaggttgtataacaattacagatgatggttgcattcagagtgtatccaataaggtccgtaagagcattagaggaactgatgaaatagttacttgccaaaaagtggctcgtattattggtagggagtttgcgcgcatagctgatcgtacgacagtttatactacttttgggattcgaccatga

SEQ ID NO: 309030 - DNA, 1956 bp, Proteus mirabilis
atgaaaataagatctatccatatatatagtcatgatggccagcgccgtgatctccaatttaaaataaatggcctcaatgtaattactggtagctcttccacgggtaagtctgctctctcggaaattattgaatattgtatgggacgttcttcatttaatgttcctgagggtattattcgagataaagtggcttggtttgctgtaatctaccaatttgagaaagaacaggttttgattgctaaacctacaccatttaaaggtggctctagttgtagtgtggctatgcttcgaaggggatctgagttacaaataccagatttcaaagagttaataatcaatacagatgatcaaagtgtagttgaactattatcacgtttgcttggtatacctaaaaaccgtactgaagtaccaattgaacatagtcgcaatagttatattgctaatataaaacacacattctattacctatttcaaaaacaaggattagttgctaacaaagatcagttattttatcgccaaaatgagcaataccagccacagacaatccgagatacattaccaattttactcggaatatcttctcataatcggtatgaattggaatcgaagttacggatagaaaagagaaatttgaagctcagtgataagaaattagaacaagtatattctgctacaaatttacttcatgatcaggctatgaatctttactctgaagctaaggttgcaggggttattggtagtgtgaatgaaaatctaaatactgatgagataattaatgtattgaaatccacactgttatggagtccagaagcagtgctgagtgatgatgaaaaccaaatttcgtttttagaaggtgaattagctcaattacgtcaagagcgtcgtaatatccaaatgcgtatagatgcagccaaacgcttttccaaacgagcgggtggatatgaaaatgaggcaacagaacaaatggaacgcctagcctcaattaaagctttacccaagaatcctgataatggtgaatggcagtggccatttagtgagcaaaacttagctttagagtctccattagctgaagttttactcaatgaattgaaatctcttgataaagaattacggattgccagtagtcaacgtcctaagcttgatgcctatcaggctaaacttgttaatgaatttgataagattgtgtatgacataaaacaaaaggaagcagaactatctgctgctatttttgctgacgaaattattactcaaatgaaaagtcgtaataatgtagctgcacatgtagttggtcgaataagcatgtttctcgaaacaatattcccaaacgaaaatctctctgaattagaattagaaaacaaacgactcaaaaataaagtggcatatcttgaaacgcaaattggtaatgatgatagtaatgagcgtttgacttcaattcttaataatatttccgctcaaataactcgttatattcaaaaatttgaggcggagtttaaaaattttccagtgaggcttaatctatcacaattaacaatcatttttgatcgacctgaacgtcctgtacctatgcatcgtactggaggtggtgagaatcatttagcctatcatttatccgctttacttgctttgcatatgtttgcaatgaaaaataactgtcccattccacattttctcttaatagatcaaccaactcaagtttatttcccttctgagcaggtttataaggatgcagatggttctgtacaacgaactgaaattgatgcagaccttaaagctgtgcgacgattgtttgaattattgctagaatttactaaagaagatgcaccaggtttccaattgattgttactgaacatgcaaatttgcgtgaacaatggtttcaggattctctagttgaaccaccttggacaaagccacctgcacttgttcctgaatattggccatcgaaagaaagcgggtga

SEQ ID NO: 309031 - DNA, 780 bp, Proteus mirabilis
atgaataaaaaaaatgattttttaaatcaattttcttatgagctaaatgctctccaagctaaagacaatagttataagacagattccttaagtgatctttttaataatgttaaacaatctattatttcaggaaaagaggattatcttgatgtattgaaagatattttttctaactacatgaattttgtcaatgaattgaggcaaaccatctctaatttaagtaaatatcagaaagccggaagtaaagaaggcatggtgcattttgattttaaatctttttttatggatttatcgaacattagagataaatataaaaatccaacaggctctgccgacgatccttttgtgtttaaatctcgcttgttttttcaacatcaagaagatgggacatatgtacgtaccattgatggtcaagaagtgcattataatgataaacagcaggtgaacaatgcgatagatgcattagaaaatctcttgagaggtataaaaggaatagttataacgaaggataatcgttggggcgagtttgatgttgatgttgatttgcgggggaaaatagattgtactgatctagaaacattgctaaatgatttatctaagaagacatctaacacggaggatattcagcaaaccgaatttgaactatttagaaaaactatcgatgcattagataaaaagattaatactaatttagatgaactttctaaaaaatacagcacagcaaatagtaattatgataattttgttaaaattgtcagtagcgctattattattttataa

SEQ ID NO: 309032 - DNA, 786 bp, Proteus mirabilis
atgataaaagcggtagatttaaatagtgatttaggtgaaagctttggtcaatggcgtatgggcaatgatgctgcagtgcttgaaattgtcagcagtgccaatattgcttgtggttttcatgctggttcaccagacggaattttaacaacattaaaagcggcgaaacagcatcaggtcgcgataggtgctcatgttgcttatcctgacttagtggggtttggtcgacgtaatatggatattgccagcgatgaattaaccgctgatgtcatttatcaaattggcgctttgcaaggtttagcaaaagctgtcggtatgaaggtgacttatgttaaaccccatggtgcgctttataacaccattgctcatgataaacgccaagcattggcggtcattgaagctattttagctattgatccacaacttatattagtggcgttagcgggatcaccgctgatcacacttgcgaaagagaaagggttacgtgttgttgccgaagcttttgctgatagagcttatcatgctgatggcacattagtttcgcgcaaacaagagggggcagtattacacgatcctcaattggtggctcagcgtatgttaaaactagtgcaagaagggggcgttgaatcgatagaggggacttttactgctatacaggcggattctatttgtgttcatggtgatagccctgatgcggttaatctagcgaagagtgtcaaagagatcttaataacgcacggtattgcgataaaacctttcacatcagcaataggaataaaggaggcgtaa

SEQ ID NO: 309033 - DNA, 1236 bp, Proteus mirabilis
atgtatttggaaagttttacgataaaaaattatcgaaagtttggggaaaacaataatacagtatattttgtcaatgctaatgagatttgccattctcctgataacaatgatggagaaataaaacctttaatatctccatcaagtacattaattattggtaaaaataatgcaggaaaaacaacaataactaatgcattaacttttattactgaggcaaaaaataagtcgcctaaatcctctgattttaacgtgtattatttaaagaaattgcttgaacaatataacgtagcttatcaagaaaatggctcttttgataatctcttaatccctaagttagaattcattttgaaaataaaaattgattctagtgaatataatgatctcattactaacctttctaattttattacactgagtaatgactcgttggaagagccgattgaaattaaagttatatatgaactcaaagattcacaaattttttataaaaatattaaaagaattatttcagaaactgaaactgagcagccccaagctgatgatatttttaaaatcaatatacaattagagaagttgtgtgaactgcttgatgataaaacaatcgttgaatataaagttacatataaaaacataaacgatactgatattagttcattttcgttacataacctattttccattaaaaatataagagctaatcgtcacttaaatgaaaatgtactttcaagtgtgtttcagcgaattgtatcttctcaatttgagaataaaacaattaccgaaagagtacagggaaaaaatgaatcagtttctacaattttaaaaaaaattgaacaaggaaatcatgttggtatgcagttaagaggtaatgtaacccaacaaagtattttaaggaatttaattaaatatagctttactgatggtgatgatttcataccagaagatcaatttggtttaggttatgtaaacttactcaatatcataggtgaaattattcattatattgatacttatgaggaaaatagccatcaaagtcggataaatttattattcattgaagagcctgaaatatttatgcacccgcagatgcaggagttctttatctctcgtattgataatgcagtccataaagctttagaactggctaattttgtacctgagaataaaaaatcactacagtgtcaaattgtagtaacgacgcattcctctcatattgtaaatagcaaaattcatttttga

SEQ ID NO: 309034 - DNA, 582 bp, Proteus mirabilis
atggaacagcatttccagcatagtaacatatctgaatcaagaaaggctttggaagggcaacttagggagtgttatggtcgagttgtatactcccataagacacatgaaaaatgctcagacattcttctttctcgactttctactatcaaattatggcagataattctttcagccttaaccactggcggttttttagctacttttttcggagctggagaaatcggtacaggtgttggcattattgtttcaacatttcttcttatacttaatgcttatacaaaaaattatgatcttggggaactagcgcaaaaacataagcaagctgcaaatgaaatctggctaatccgagaaaagtatctatccttgctaactgatttagttataggagaaaaaacaatcgaacaactacaattagagagagactccttgcttgaaaatctgcacgctgtgtattcaggctctcccagcacaacattcaaagcttataaaaaagcacaggatgcattaaaaacaaaagaagatatgacattttctgacgaagaaatagatgcttttctccctaaagagcttaaaaggcgttaa

SEQ ID NO: 309035 - DNA, 882 bp, Proteus mirabilis
atgggattagctgagtggttctgtgacttttcttccaatctcgtagtaaaagacagtggcacaatttcaactcgatacagaaacataactaaacgtttaaatactgattattggagtagcatttctgagacatctcatagtttatatgttggatcatatggtagaaataccgctattcaaggctttagcgatcttgatatgatttttcagctaccatattctgaatatgtaaaatacaataattacgagggaaatggtcagtcagcattgcttcaatcggttaaacagtctattgaaaaaacatacgcagttacaaagatcaggggggatggtcaagtagttctcgtaccattcaatgatggaattacttttgaagtcgttcctgcttttataaatagagataatagctttacatatcctgatgcaaacggtggtggtcggtggagaaccacaaacccaaaaccagaaatttctgctatgaagtttcgaaatgatgctacaaacagaaatttggtacaactttgtagaatgacaagagcttggaagcgtaaatgggatgtaccaataggcggtttactcattgatacacttgcgtatcaatttattgaaaattgggcgtatagggataagtcatatttgtattacgattatatgagtcgtgattttttcaaatggatggcagaacaagatgtaaacaaggagtattggaaatctccaggaagtggccagtatgtttatgggaaagggcttttccaatacaaagcaaaacgttgctataatatttcactcgaagcaatagaacatgaaatagcaaccccaaaacgtgaatggtctgctaagcaaaaatggcgtgagatttatggaacagcatttccagcatag

SEQ ID NO: 309036 - DNA, 198 bp, Proteus mirabilis
atgactgcctatctattattaacactaagtatattagctaaagctttagatatctgtcttgctgaagctaaagaactaaaatatgaagacggaataactcactatggtaatacgtcatttcacctaactccaattgtttgtctgcgctcctcttccgccttctgctctttttccatttcacattcatttttgttgtga

SEQ ID NO: 309037 - DNA, 258 bp, Proteus mirabilis
atgggattgaaattaagaatttattggttcgataagaaaacagaagactttgctggtgaggagtattctaaagatttcggtgatgacgatttccttattgaggaaacagttaacccaaaaaatgagaatctcatcaataatggtgagtttgatctaaaaaaagaatggattaatactattcaaaaacatgtaactcacaaaattaatccggctaaatatacttatttcattgcgtttgattaccgagataagtggtaa

SEQ ID NO: 309038 - DNA, 804 bp, Proteus mirabilis
atggcccaagcgattgagtcttgctttctgcaataccaaataaaaggtgaggttgtcggttatgacgaagacgcaacatttaccctctttagaatcgaattgggtagagggataaaagcctctaaagtgacggcgctagtgccaaaattgtgtcgttcccttagcgtcgttgatataaaagttattgattttattgtgggtacaccttatatcggattgtgcgtgactaatacctatcgtagagcggtgccttttgttgaatgctttaatctatggagcggaatcaatgggttatctactctttctatcatgttaggtgaagatattataggagaaccaataggctgggatctagctcaaatgccacatttacttattgcaggcgtgacgcgctcaggtaagtcaatgttaatgcattccttggtaatgagcattttatacagaaacccaccggataaagttcgctttgtgatgtttgatacaagccagcttgaactcagtttatacaacgatataccccacttattgtttcctgttgtctctgattctattgaatcaataaagccattatcgtttttagtctctgaatttcaacgccgtcaaaaattatttagtgcgttaaaccagcgcaatttgagtggttacaataaggtaatatcaaatgcaaaagagttaggtaagcctatacctgatccttttgggcgctctaatgaaaattatagtgagcatccttatttagacagtgagcctgaaattgttgtttgtgttgatgattacgtccaacttattggggagaaacaataa

SEQ ID NO: 309039 - DNA, 597 bp, Proteus mirabilis
  misc_feature (554)..(563): n is a, c, g, or t
ttgcatctatatacacaagaaaaccataaaaaatggctggtaggttactttggagatacaaaacaaaatatctatgatgatggtgttggtggcaatattcaggcaattcattcgaatataataaatattgataaactattcaatcgacgtgctcatttacaacttactaatctaattaacaaaataagaaatgataacattcaacaagtacctattgatcccgatcgaataaatggtgatatccaatttttctatttacagaatccggatgaaaatcatagaacaagtaaaatacaagaatttatagaacagtttaaaaactcgattcctcaagaccaaaaaatagattgcttagttcctgttaatcgttcattagctagtttaggcggatttgaggctgtttataattctgtttatgactctaaaattatttattgggcagatcttaattctcagcttttatcacaccagttagagaaacttcatcctgcggtacttactttttatcatctagttatgctttataaaaaactaagaagtaagaatacgacatnnnnnnnnnncatattacgagttattaggaaaaacaaacaatga

SEQ ID NO: 309040 - DNA, 816 bp, Proteus mirabilis
  misc_feature (674)..(683): n is a, c, g, or t
atgaaactgaccattgacaatataaagccttaccttttatttgaaacaatttcaggtagtcgttcacaaaatctggcaacagatagttcagatactgatattaaaggtgttttttatctacctaaagagatgttttatggttctgattatgtgccacaagtaagcaataaaactaatgatatcgtttattatgaattagggcgatttgttgaattactgtgcgcgtctaatcctaatattttagaattattaaatgcaccagagcatgttgttatttatcgtcatccattatttatgcaatttaaaccagaatggtttttatcaaaggaatgcgtacagacttttgtgcattatgctcaagggcaaataaaaaaagcgcaagggttaaataagaaaatcatggatcctatagataaagagttaaaaacaatccttgatttctgttatatcattgaagatggaaaaagcctattactgaataattggcttaaaaaacgccgttgggagcagcaaaatattgggttggttaaagtcaatcatgcacaaaatctttatgcagttttttatgatccaaatagtgattatcaaggcgtaataaaaaaagataatgccaccgatgtgttattaagcagtgtctctgaaaccgccatattacaagcctatcttagttttannnnnnnnnnagttttaataaagatggctacagtacctattgcaagcagtatcatgcttattggcaatgggttgaggagcgtaatgaagcccgctatcagcaaaatattgaacatggacgaagttacgatagtaaaaatatga

SEQ ID NO: 309041 - DNA, 276 bp, Proteus mirabilis
atgcttattaagcttgatgatattaataaagagcttaatcaaatatatcataaatataaacaattaacgcctaaaatagaatatcaattaaaaacaattaatttaatgaccacaggagaggttgaatatagtgatagaataataccaacaggagcaatgcgtttaggaaacaaaaagaatttcacccaagataagctaatggggaaaattatgtttaattatcaaggtgaaagcactaatctcaatactattgaaactgaatattattttatttaa

SEQ ID NO: 309042 - DNA, 219 bp, Proteus mirabilis
atgaagcatataactaaaaacactccacatcttcatccttcaattattgatgggcttatttatttttcaaaaaagaataaaggaacattaaaaaaagagcagcttattcattttttaggtaatgacgataacctctcagaattaaatgtaatagaagcagctcagcagctcaatttaaaatctgtctcttatacacatctccgagcccacgagacgtag

SEQ ID NO: 309043 - DNA, 669 bp, Proteus mirabilis
atgatacctagttgggctcctatgtattcttggtggattctcgatggaaccatgaaaaaacttaggtgggaggaagattcgttaggaaaaccatcagataaggttgctggattggtcatctacattgtattagtaatgatctctatgggagtgttatctggaggtacagtaaaaattacatatacccgcttatctgaactaacaggattaagtcgagatcttattaggcgaggaacgatggttttggttgccattggtgtaattgatgtggagcgggatggtagaaataacatctataagatagttaatgccagtgagctaaaaaaaggagggtggtgtaaaatacctgtaaaacaattacttaatgaaaatggtaaaagcattgatgctttcaaagaattaaaactaagaaagaaagttgagcttcatgcattaaaaatttttctgtatttagctgctatacgtgaaaatcatacagaatatagtcaggctacatatccaacaattcgtaatgccgttggtgtatcggatagagatatatcgagggctttaacgttactgcaattgattgggttgttgcagagagtttcaacagaaaaagttgaaaatggtaaacagaatgagcctaacaaatattacttgcgggggtataagtcattcacaaggtga

SEQ ID NO: 309044 - DNA, 135 bp, Proteus mirabilis
atgaatatcaatgaattaattatttttttggttgaatctattcgtttttctggcaacgatttgacgttgtttgtgttgtctctatctgttttggttgcttttgttgttataggaatagttatctggagaaaataa

SEQ ID NO: 309045 - DNA, 378 bp, Proteus mirabilis
atgagactaaaaaattataatttcgaatttcaaaatttaggggcggttatggcttataaaaataaaggtggtcaatcaagagagcgaacaatgatcgccgcatattctcttgttgaacaatttggggcgaaacaaaaagatgtagccacagctcttgattgtgctccatcaactatccatcaatgggtaaaagacattcgataccaaagggaaatatcagacttaaagtatcaactggatgatgcaagagattatatcgatcatttagctgatcaattacaactagaatatcaacataacaatcaacccgatgatgagttcgagccagatgatgaattcgatctaaatagtgattttgatgacgatgaagacgattga

SEQ ID NO: 309046 - DNA, 960 bp, Proteus mirabilis
atgctgcataatgccccttttaatattaacgactgcatactggaaacatcagctgttagattatcttcgtatcgtaattttttccaagtaaataacaacgatgcttattctatatataaatggaatgaagaactatcatcaagaatgatgaagctcattgccattattgaggtaattttacgtaatagaatacactcaacaatgagtgattatatgtatggcaaagccacaggcagcgaaacaagcaacgattggtttaattatttatcattaaagtcagcagcgataaaaaaaatacagaatgcgataacagataataaaggtcgcgcaataagacctacaccatcagcaaattttgttatatcaaacatgacgtatggattttggccaaacatactaaagacagataatgacactgcaaacaatagcttaccatgggactcattatttaaatccatattccctggtttaccaaaacaagcggcagggtactggagtaaattgaagaaaagagagccattaatatgcagatgctttgcagtaggcgctctaagaaataggattgctcatttcgaaccaatatggaaatttggtgatgaacttgaggaagtatttaaaaggagaggggtaacacctagagtaattacaacggccccgacaaacaaaaaagaggcaatacagagactagtaaaagaattcaacaaagctcttgagcttctattgtggctctcccctagctcataccaagactatatgaactcagaaaacaaaaagtcaattgagtggcttctttcagaaaaagcaatgaattcatttattaatcataaagaaatgacaaaaatatcattcaataggataacaaaagcaagaaaaatcaagcgaatggcaacatctagccaaggatgttcaataattacaatcaagaaaagtaacgtcggtcttctctttctttacccttag

SEQ ID NO: 309047 - DNA, 231 bp, Proteus mirabilis
atgagtagtgaatatgaggaatatgcaaagtgggaagaaaggaaggctaatatcgcagtgggtcgacatcctaatgcaccgtctagttctgttgcttttagtgaaccatctaatggggaaaaattaatacgtcaacctaaggaaaaaccaattgtatatagcgatgaaaatggccgaaagtttactgttttttccggtcgcagagactatttcgatgaagacgatttatag

SEQ ID NO: 309048 - DNA, 180 bp, Proteus mirabilis
atgaagtggattacacataaagaattacatgatgaattcctcaaagattcgaaatatagggttgcttatgaagcagagcttaaaaatccagaacctgactatcagatcatttaccattatgatgacggtacagaagaggtggtttttgatgccctgaatggtaatcttcaggaggaatga

SEQ ID NO: 309049 - DNA, 225 bp, Proteus mirabilis
atgaatccatcacatcaaaaatactattctttacttatttctacccaatttacgtttattggcgctatggctagttatatcactcttattaaatattattgccaaaatctaggtgtcctaacgtataaactcacctttctaaaaaacttaaaaagcaaattaaatcagttagataataatatctctagatttaataatgttcacaccctcttttataacaattaa

SEQ ID NO: 309050 - DNA, 351 bp, Proteus mirabilis
atgaaaaaagatatatggaagaatattcaacccttaagaataccgagtaggtgggtaattgatgtaaataatttctatcactatgagcccactaaagaaaatatggattggttctatgggtcaattttgatcagtggacatagttcttttaatggcctttgctttgattcacggtatgaaccagaaggagaccctaatggtttatttgtattagattttttcatcataaaaacaaataaaaaaacaggaaaaatagaagaggaaaaattcctaggcagtaagcaaacaagagataaggccatgttcattaatatgcttgaagaatttatgtttactggaaaatatgaatag

SEQ ID NO: 309051 - DNA, 396 bp, Proteus mirabilis
atggaaaataaaatccatttgtggataggtagtaattttttacctgaagaacaatacataagctactttcagttggactattctgttgaaggagattttgatgaccctaactataaaatatgtcagttttgtaaggatataggtcttaaatggtatgatgaggattttattgggatcataccaaggcataaagaagatgtttctttagatgatattctagttgatgcggcagttgatagtagtgagttaaatataattaaagaaaaatgtaataaattgggaataaaaaaagcaaatgcgattttttggtatcaaaataaagattttaaaataaaaaaaccaataaaggattcttataatggtttgaagtatataggtctatttcaagctgactga

SEQ ID NO: 309052 - DNA, 513 bp, Proteus mirabilis
ttggcacctgatttaggtaatacttttgctattgtaaatacgaatggcattgccggaattaaaactaatcgttcttcacaaaccactacagacaataacggtaatttaatattaccgcacatcatgccatatcgtaaaaatactattggactaaacataaattcattacccgagtttagtaatactaaaactcaaagtaaaatcatcgtacctactttaggtgcggtagcaaaaatcgatttccctataaatatcggctataatgttttatttacctcaaatacaccaattccttttgctgccaatgtaatggtatttgatgataataataatctcatttctagtgattttgtctatgaccataatagaatattcctctccggaataaaagaaaccggaacggtacaagtaaaatggggagatacagaggagcaacaatgtttcttccattataacgtaaaaaatgaaaataaaaacaattcaattattaagaaacaaattgattgccaataa

SEQ ID NO: 309053 - DNA, 144 bp, Proteus mirabilis
atgaaaatgatagattttagcgcctctataataagttataaatcaatgggtaatatttttgttggtgaaaatattagtctttacattagcgagttgtatgaacatcatgatgtcagtcaatctaattattatttacctaattaa

SEQ ID NO: 309054 - DNA, 252 bp, Proteus mirabilis
atggcattaattgaagcactaaaaataggattatatcccttatgctctaatattgatatatttaaagagttaagaaaaaatttgaatttagatttagaaatttttaatataaatgataatcaaaatctcgatattgcttttaaaaaagcgatgacaaaatatgaaatatctaataataattatattattaagaaacatttttcttccggtgtaatggctaagaaatatttagagatttttataaatgcataa

SEQ ID NO: 309055 - DNA, 147 bp, Proteus mirabilis
atggataaagcaataggtagtggtattaacttaaacgatttaggttttgctgatccaacacgagaaataacgaatacttggttagattgggtttctggtgcttctgtacgccaaggattaccggcaaagattgagcgtatcgcttaa

SEQ ID NO: 309056 - DNA, 318 bp, Proteus mirabilis; identical to SEQ ID NO: 297691

SEQ ID NO: 309057 - DNA, 438 bp, Proteus mirabilis
gtgggaagatcctatagtaacagtgacaaattagcaccttatacatatagcactcattttaaagatcatattgttacacatgatgatgaaacactggtaattacaggaatgcctcttggtgaagggagtattgatatcgatgaatgttttcgtttattagttgaacattcacctgtaacacgtattaacttagaaaactgttttccctatacatctcattttgctagagataaaggaacggggggagtatttgaattaagtggaagctttgaagttaaatcaccaccttttgatacgcaattaattaaccccttggaatattattatccagctaaaatttctcctgttgcattaaaaacattaatggacgcacaagagcgttgtgtacaagtttctgttaataaattaaaagaactaagaaaaaaatattattattaa

SEQ ID NO: 309058 - DNA, 261 bp, Proteus mirabilis
atggatatgttccgctctgtaaataaaatttcgcttacggcattatgcttagttgcctcaatcttctttataacccctgcacaggcaaaagataagctaaaagttgtcacgacttttactattatccaagatatcgcacaaaatgttgctggcgatgctgccgttgttgaatctatcaccaaacccggtgcagaaattcatgattatcaaccaacgccaaaagatattgtcaaagcgcaaaaagctgatcttattttatga

SEQ ID NO: 309059 - DNA, 459 bp, Proteus mirabilis
  misc_feature (9)..(18): n is a, c, g, or t
ttgttgagnnnnnnnnnngctccagtagttgctccagctccagttgttgagaacaaaacctttactctgcgttcagacgttctgttcaactacaacaaatcttctctgaaagctgaaggtcaagaagcactgaatggtctgtacaacgaattagctaacatcgacccaactcaaggtcgtgtcgtagttatcggttacactgaccgtatcggttctcaaaactacaacctgcctctgtcagaaaaacgtgctcaatctgtagttgattacctagtatctaaaggtattcctgcaaacagcatctctgcagaaggtcgtggtaaagaaaacccagtaactggcaacacttgtgacaacatcaaagctcgtgcagctctgatcgattgcttagcgccagaccgtcgtgtagaaatcgaaatccaaggtacaactgaagttgttgttcaacctggtcaataa

SEQ ID NO: 309060 - DNA, 327 bp, Proteus mirabilis
atggaatacacaaatacacgcaaacaatttaataaattcatttcaaatcacttgatggcttcggcattacaggcattgagaaataaaactcagtcagtggtcgctaaaacattaggtgttcatgactcaactatcctacgcagaactgaaaaatatcctgagatatgcgagacattagtcgcatcagggatagtcgattttgtgatggaaggtgagagaaaaatatcagaggaagaataccgatttttgtggaaacaaataggtgaactgtcacagatgagaacaaaagaaaacgccccgattgttggagcaaccgaggcgcattaa

SEQ ID NO: 309061 - DNA, 501 bp, Proteus mirabilis; identical to SEQ ID NO: 304242

SEQ ID NO: 309062 - DNA, 456 bp, Proteus mirabilis
atgccgatatgggttgatgctgatgcctgtcctaaagttattaaagagatactttatcgggcagcagatagagaaaaagtgatgatcacttttgtggcaaatcagcgattaagtatacccgcatcgccttatttgcgcacattgcaggtttctgcaggttttgatgtggctgataatgaaattgtacaacgtgcaaaccaagatgatttggtgatcactgccgatattcctttagcggctgaagtgatcgaaaaaggggctattgcactaaatcctcgaggtgaacgttatacagagtcaacaatccgcgaacgattaaatattcgtgattttatggatacgatgagagcaagtggcattcaaacaggaggaccagcaagtttatcacagcgcgaccggcaactttttgctaatgagttggataaatggttactacagcaaaaacgtaaaaaataa

SEQ ID NO: 309063 - DNA, 282 bp, Proteus mirabilis
gtgttttctataaataaactcaaaataataacgtttgttattttaggaggtgtattatttaattcacatgcaaactctttaaagtatatattaaataattcattaaataatgcgcctgagttattagaagctaaagctgatatagatatagccgttgcaaaagttaatcagactagagctcaacattttcccgtaataagcgtaactggaaataaattattaggacaatatcatagagataaaagcgactatgataataatctgtctcttatacacatctga

SEQ ID NO: 309064 - DNA, 1476 bp, Proteus mirabilis
atgacattatcatttgctcgattacgcaaaccagtttattggtggataattggttatgcggttttatggattatcgtcagctatttatttgatcccaccgtaccttatgatgccgtagaagcggttaactggggtactaatggcggttggggctcacctaaaaacccttggtttgttggttttattatgtggccagccatttatggtggtattgattttagcttttattggtattttatccactttgtgatgatagccatcggcttattaggtgtttggaatttagcctataagttaaccaaaaattatcacctagcttggtttgccatgttaggtttaaatttatcaggaattattaatttcgatatcattccttataacgataattatattttagtgggttgctggccttgggcgctctatttctttttatgcgctatcaatgacaaccccaaatattggtgtggattcgctgcagtgatgggggtggctactatggggaaatactcctcattagccctgattggtgcggtattcttattaagcgtattagtacctaaagttcgtcaaagttatcgctccccttatttttactttgcgatagctatttggttggcgtttgtcatacctaattttatttggttgtggcaaaacgactttgccgcctttaaatgggtcgactcacaaatagaagcacgttttaatttacgtacgttacgtgccgctttaacggttttctatccagtgctactaatgtggggaattgtacgtctttatggtgggcgagttagttggcgtacttctcaagatagtcaattattgaattttattttgctattcccattagcgattatttttatttggtttagtttccatgaagggggacgtatcactgagtggttacaaccttttatgtcagtggctactgctctttttgtcggctcaattagcgtcatacctaagcgttcattacgtggtgtgttatatggtttagcggtttttggtatgttagtggtatctggttatacggtggtacaagctgctaatgtgcgtaatgcgggtcaaaagtttattggtgttaaaacctttgtacaagatgtcgagaatgcttggcatcagcattatcatcagcctttatcttatgtagggggtgagtatatgcatgagtggatcactttttatggcaaagatagaccgctatcagcccaaccctggattgtcgagaaagatgttcagcaccctaatatttataaccgtcatattacgttggcgcaattagaggacaaaggtgtcttattgattggcccggtggggtattactgtgataaagcccatttcgatgcgggattacaatattggccgagtttaaaaatagcagatactcaagaagtcatgtttcgctctgagcccgatgcactggcagagccggtatgtatcgcttttgtctcgcctaaacagcaatcagagaagttgtaa

SEQ ID NO: 309065 - DNA, 366 bp, Proteus mirabilis; identical to SEQ ID NO: 25794

SEQ ID NO: 309066 - DNA, 705 bp, Proteus mirabilis; identical to SEQ ID NO: 8686

SEQ ID NO: 309067 - DNA, 147 bp, Proteus mirabilis; identical to SEQ ID NO: 304244

SEQ ID NO: 309068 - DNA, 564 bp, Proteus mirabilis
  misc_feature (225)..(234): n is a, c, g, or t
atggtaaaaccaaaatgctacccatgcatctatatgaataagatgatagataagataaataagatgacagataagataaacagtacctatatgccttacaaacattataaaaatagcatagcaatattattcctcgcctctgccttgctacctagattttctgtggctgaatcacttactcatttacctcaaaaagatcgcatttcttattttgctcaagcggannnnnnnnnncaagcggagaaaatggccatcactggtgtggctatcaaaaccaaacccgttttagccagacctgcaaaagaaggagaagtgatcaccacttacataaaaggtgaaggggttgaaactatttcggagccagccaaagcgggtgattgggttgtacaaaatatttgtccagcaacaggtaatgaagaaattctggtcagaaaagataaatttgctcagcgctataatctggctgatgcagacaaagcgaaaagcatcacaccgataaggcaaggctatcaagtttttatccctaaagggattgaaatgaattattttattgttccaaaataa

SEQ ID NO: 309069 - DNA, 1092 bp, Proteus mirabilis
atgggatttaaatgtggtatcgtcggtctgcctaacgtagggaaatctacactgtttaatgccttaactaaggcaggtattgaggcagccaacttcccattctgtactattgagccaaatacaggtgttgtacccatgcctgatcctcgcttagataagttagcagaaattgtaaaaccacaacgagtgttacccactacaatggagtttgttgatattgcaggtttggttaaaggtgcatctaaaggtgaaggcttaggtaaccaattccttaccaatatccgcgaaactgaagctatcggccatgtcgtgcgttgttttgaaaatgacaatattgtgcatgtggcgggtaaagtcgatcctgctgaagatattgaaacaattaataccgaattagcgctttctgacttagatacctgtgaacgagcaatgcatcgtaatcagaaaaaagccaaaggtggtgataaagttgctaaagcagagatggaagttttagagaaatgtttaccgcacttagaaaaagccggtatgttgcgtgcattagatttaagtgatgaagaaaaagcgattatccgttatttaagctttttaaccctgaaaccaaccatgtatattgctaacgtcaatgaagatggtttcgaaaataatccttatcttgatacggtacgtaaaatcgctgaagccgaaggctctgttgttgttcctgtttgtgctgctatcgaagcagatattgcagagctagacgatgaagagcgcgaagagtttatgcaagatttaggcatcgaagagccgggcttaaaccgtgttatccgtgcaggttatgcgttactcgatttacaaacttactttactgctggtgtaaaagaagtccgtgcttggacaatccctgtaggtgcaactgccccacaagctgcaggtaagatccatactgactttgaaaaaggttttatccgcgcccaaaccatctcatataatgactttatcacttatggtggtgaacaaggtgcgaaagaagcaggtaaaatgcgtgcggaaggtaaagattatatcgtgcaagatggcgatgtgatgaacttcttgtttaatgtgtaa

SEQ ID NO: 309070 - DNA, 1092 bp, Proteus mirabilis
atggagattgtgccaataaaactgactgatgataatcagtttaatcattgtgttggtgcgctcattttattgaaatatcgcggaataattcatgagcatccgaaattaattgttaatgataattcgggatttgaacaagttattgctgttagcacccccatgaaacaattagttgaacgcgctaagaaaatggcaaaaatggatgatcctttattattagtgggggatacggggacgggcaaagatctatttgctaaggcttgccacttattaagtcctcgagccagagagccatttttaggcctcaattgtgcctctatgcctgatgatgtggttgaaagtgagttatttggttatgcggcaggtgcatatcctaatgctatcgaaggtaaaaaaggcttttttgaacaagccaatcgaggcactgttttgctggatgaaattggcgaaatgtcgccacaaatgcaaattaaactcctgcgttttttaaatgatggtactttccgtcgtgttggtgaagagcacgaagttaaagttgatgttcgaataatttgtgcaacacaaaaaaacttatgggaattagtacaaaaagggctatttagggaagatctctactatcgacttaatgtattgacattaactctaccaccgttgcgggaaagaaaagcggatatcatgccgttagcactgcattttattaatcaatattgtttagagcagaaagcatcaaaacctgttatttcccctgatttatctgcttatttagtacaatatggctggcctggtaatgttcgtcaattaagaaatacaatttatcaagccatggctcagttagtaggcaatacattgcgacctcaagatatcgccttgcctgagcatactgcggatactttatttgatgaagatttgcttgaaggctcgttagatgaaatgactaagcgatttgaagcttctattttaaggcgtttatatcgtgattatccaagtacacgtaaactggctaaacgtttaggtatttctcataccgcgatcgcaaataaattacgtgaatatgatttaacaagtaaaaaagcggataaaacagagaaataa

SEQ ID NO: 309071 - DNA, 1743 bp, Proteus mirabilis
atgagcacattattatctacacaaaacctctcttttcataataatcacggtatattgctgagtaatatttctttggccctcactaaaggtgagaaaattggtttaattggctacaacggttgtggaaaaagtacactattaaaacttttatcacaccaattaataccaacagatggctctattactatcgccaatcaagtcattatggcttatgtcgaacaacagttaccaagtgagctacagtcaatgcgtctcattgatgcggttcttcataaattacctgaagagctacgcatatctgaaagttggcgcagtgaattattattaagtgaaatgggatttaaagccaatgaaatcaatctattagtctcacaattaagtggtggtcaacatactcgtttattacttgcgagagcattgattttacaaccagacttactgctattagatgagccaagtaaccacttagatctaccgactatcttgtggttagaaacatttttaacacagtggcgaggaagttttattcttgtttcacatgacaataggttgttagataaagtgaccaattgtacgtggatcattcgtgataaaaccctatctgtttttcgcttgccctgctctcaggcaagacaagagcaagaagcacaagatatcagtgcgcaacatcgttgtgatgcacaacaaaaagagatagatcgtattgcacaaagtgcgaagcaattggccatctggggaaaagtgtatgataacgaaagtttgtcacgtaaagccaaacaaatggaaaaacaaattgttcgtttaaaagacgaacaagtcgatgtaacagaaggcaatcaatggacgttacagttatcaggaacaatattacgggcagatagattgcttgagctgcatcagctttcagtgatccctgcgccagatgcaccgattttatataccatcgataatcaacggatcaaaagtggtgatcgagtcgctattgttggtgctaatgggacaggtaagtcatcattattaaaaatgatttggtcatcatttcatggttcaaccacatcaacagaaaatgtgatcaggctgcatcccagagttgagttaggttattacgatcaaagtctcgcacaacttaatgataatgatacccttgccgatgcactaaagccctttgcaccgctattagatgagcaaaggaaaatggcattaataaatgcaggttttgtttattctcgccataatcagcaagtaaagtcattaagtggtggtgaacgagctcgtttactttttattggtctcagtttggcaaaatattcattattaatgctagatgaaccaacaaaccatcttgatatggaaggtaaacaggcattagctgagcaaattcaacaattttcagggggaattttactcgtcagccatgatagagaattgatagagaaaagctgtaatcgtttttggtatattcacaatggtattcttagcgaacatcatgatattgaaacaatttatcagcttatttctcaacaagatatgtcatcggtctctaatgagcaaaatggccatcatgctccatctgttgaaatagtaaaacatcataatgaagatgaattgctaatgaaattgatagcacttgaagataaattgaatgctgatttagcaagaaaatctgctcatcaaaagcctatattacaggctcaatggcaagcagaaatagagatcttaaagcagcaacttgatttagcttaa

SEQ ID NO: 309072 - DNA, 1185 bp, Proteus mirabilis
atgactaaatatgttatttttagtttttttttagtattgatttatcctcttggtgttgatctatacttaactggattaacagcaattgctagcgatttaaatgcttctgaagtgacattgcaccatgcattttcaatttatttgatgggaatggtgtcatccatgttaattgctggatggtgcagtgacaatttaggtcgtaagcctgttattttatttggtactctgatttttttcttagcgtcattaagtgctgggctttcgataacggaaaaacagttcttgatttcacgattttttcaaggtagtgggtcaggtttttgttacgttgttacttttgcgatattaagagatacattaacagaacaacaacgtgctaaagtactttctatgataaatggtattacttgtattattccggtattagctcccgttctaggctttattattttattatattgcgaatggtcaatgatgttctatcttatgggggcttattccctattggtttttatcttttgttttttggggataaaagagacttaccataaaaaagaaattaaaaataaaaaagtaaatctatctgtaataaaaccaacaacagactcttttttcactcgctattttttaagtcgtttacttatttcctgcttaggaatggccgttattcttacttatgtcaatatttcccctattgtagtgatgcaacaaatgaattattcaacaggagagtattcaatattaatgacatcattagcaatgataagtatgaccatttcttttttaatgccaaaaatattaatgaaataccgctataagcatattttatcagtagggtttatatgttttggaataggtattattttcctttttatagggaaaaagagtgaaatgcgttggttttttattacctttgcattatgcggctcaggatttgcgttattatttgggattattatgagccaagcactttctccatttagccaacgagccggcgttgcgagctctgtgctgggtatttcacaattaagtttttcttcactttatatttgggtaatggggtggattgaagtatcctcaataaatatgttggtggttattttatttatcagttgtattgtaggtactctttttctatgctttcctcggttcacagaacaaaaaaaggttaaatataatgtctaa

SEQ ID NO: 309073 - DNA, 150 bp, Proteus mirabilis; identical to SEQ ID NO: 308689

SEQ ID NO: 309074 - DNA, 822 bp, Proteus mirabilis; identical to SEQ ID NO: 304259

SEQ ID NO: 309075 - DNA, 558 bp, Proteus mirabilis; identical to SEQ ID NO: 7707

SEQ ID NO: 309076 - DNA, 903 bp, Proteus mirabilis
atggattaccaagggttttatgataaaaacgatgccgaagatgttcaatattctccgcagataaaatcactccatgcagcctcttttgcacaggatgaattagcgaataaattgtgggctgaatatcagttagatttcccacctattcctatctattgtgctagtaattctgcgttaatggctgtgcatataggacataatgaaataagccaagatatggcggatattgtaatagtattgtcgtggaatagcttacttttacaagatatagcctttatggatagccaaggcatgttagttgaagcgcacgctcaacctttgagtaaatacagtgatggggtcaccttatcagatggttatgccgtgatgattttagaaagccaacaacagataaactcgagacaatatcttgcacctgcttatatctatcattccgtttttatgcaaagtaatgctgaacggacaatgggaggcacattatttaacttttatacgatatcaaaagtgatttctcagcttctcgatcttagtcattatttaccaagtgatattggtgctatttttattcatggtaatggttcgattattagtgataaagctgagacggtagctattactaacatctttaaacaacccattcctattattagctataaagggcagataggttatatttctaattgctctggtattattgatttaatgattatagctgattcattaaaaaataatcgattgatcccctcaactacacattatccaatagatgatggaatggaggttaatttcctcactaatcaagagtgtgtgaactatagcgctaaacctattttaaaaatcggcttaggtatggatggctctattattgccatgttattaatcgcaaatggagagcaaggatga

SEQ ID NO: 309077 - DNA, 213 bp, Proteus mirabilis
gtgttattaattattggtatcattctattttatgtgttttttgctgaataccttggttttattgttacaggatttattgttattgcaccattaatgatgaaatacgcaaaagtaaaaccaatatttagttttattatttctgctggaattgtattaggcgtttactatttatttaccgctgtactgttagtaccgctacctcaattattttaa

SEQ ID NO: 309078 - DNA, 315 bp, Proteus mirabilis
atgttacaacttgcgattattagtaaaataaaattcttttatagaccaaaagatctcaccatatctccagatgaaaattataaaaaactacaatttaaacgtaataatgacacacttattataaaaaatccgacaccttattttattacgatgactgaattagaacttggtggtaaaaaattagagaatattatggttcctcctatgggaacagtaatgattaaagtcagcaagcctaactatagtcaaatatcttatcaaactattaatgattatggtgccatcacaccaaaaacaatcgtcgacgttagataa

SEQ ID NO: 309079 - DNA, 633 bp, Proteus mirabilis
atggatggattctcaaatgacttttccaactcgatgaaccaactggcacggatgacgcccgaacagcgcgatcagtttattgccgacgcacacaagggagatcagtacatcaaagatcagtatggccttccagggttcctggctactggtgcggccaacctggggagggacattatcggagcaggagtttccggtttctatgcagccaaggaatggctcaccgggaaatcggacctatccgaggcggccaagggcatgtcggttcgcgagcgtggtatgttcttcgcggcagcgtttgctagtgcgagcgaagcaggcgcagagcatgcagaggcctttgttcagcagtacggagatgagtttcgtaatttggccatgcagaccgcgatacaagagcatggcctccattcggatgcgggtgcacggttgtttgcctcatccatcttgggcgcaagcgatggaaaggaacaggaatatcgggcccaactccggagtgaaatgggcgatgacgccttggcgaacaaaacagcggatatcattgagtccgccgcaggggccggacgagagcaggccggggggtatctggctccagtttcgcgctattttgcagttaagcaaggaggtggttcatga

SEQ ID NO: 309080 - DNA, 1326 bp, Proteus mirabilis
atggaactgaaaaattgtcctcttattaacgaaattaaacgacaaattggctctcatactcatattttagtgggttttagtggtggagttgattcaaccgttttattgcatgggttggtttacttacgtgataaatatcaacttcctttagaattaacggcaatttatgttcatcatggattgaattcaaaagccgatgattggctcacgcattgcgaacatttttgtcataactggcaggtcagttttatcagtgaaagagtacaagtcaatgggaaagaaggggggattgagcagggtgccagagaagcgcgctatcaagcttatcgccaatatttacagcctaatcaagttttagtgacggcacaacatcaagatgatcaagcggaaactttcctattagcgcttaaacgcggtagtggaccggcagggttgtcttcaatgcctgcaaaaatgccttttgaacaagggtatttattacgaccattacttaatattacacgtgaacaaatcgaagcttatgcacatgagcacggtttattatggattgaggatgatagtaatcaagatgatcgctatgatcgcaatttcttacgtttacatgttatgcctctattgactcagcgctggccacatttttctcaagcagttactcgtagtgccgcactgtgtggtgaacaagaagcgctcttagatgagttactcgatgtagaattgcagcaattgattgatgagcatcagagtttagatatcaatttattgtcccgctgtagcgaaataaaacgtaatgcattgttgcgtcgttggtttgctaaatgtaataaaagcatgccatcaagatctcaattgtcgcggctatggcaagaagttgctttagctaaagcagatgcagagccacggttacgttttttccaagatgaagttaggcgttatcaacaacgcctctatcttgtacctgttatggaagaactaacggatagggttatcgaatggtcattatcacaacctttaattttgcctaatcagttagggatattagcggtgagtcgtgatagcggtaaaacaatctgcagagcaccgttagcagatgaaaaagtgacggttcgttttggcttaaccgcttcatctttacgtattgttgggcgagatttggccagatcaagcaagaaaatttggcaagagcttaatattgccccatggcaaagaactcgtatcccattgatttattataacgatacattaattgcagcggttaatacttttgtgactttagagggaaatgcaacaacagaacaaagtataacaattgagtggcaagcgtcgtaa

SEQ ID NO: 309081 - DNA, 612 bp, Proteus mirabilis
atgctggcgtcgatccgcgtcgcgccgcgccttgcgcgtagctttctgcgcggtggacacgatttcgcgcatctggccgatcatgcgaaacagcgccgactcatccacctgttcgcgcccttgctgccgcaatttcgccagcgcctgtcgttgttcccagagggtgacagccgggtgcgacaaggtgcggtatggaatttccagatagtgctgcccctccggctccagcacccaaatgcggctgatgtcgcgcgggtcgcgccggatcaggaacgcaggcaagcggtcgcgccgagctatccacggcttgagcgcatcggcgtagtaatggatgtggtcgatgacgaagccggtgcgggtcagcgtgcggcggatgatgggcagaaaatcgaccagaaaagccgtggtgcgagtgatgacggttggcacgccggtccgcgcgatagcttcggcccagcgcgctgccggcggctggagcaggccgttgtgcacggagccgtggtaggtgccgaccgccaatgtgagccagcgctccagctcacgcagcgtcagggttggagaaggtcgtccctggcaattcgtcgtggatcatctgcatcgccgtgccgatga

SEQ ID NO: 309082 - DNA, 276 bp, Proteus mirabilis
atgaacatcaaagcggaaaaatataatcgaaaagtcacattaaactgccctatctgtggtaacacactaatgttagtagatgaagaaactgaaaaagtcacatgttcagactgtggagtttcattcgaacatgacgaaatcattaatgagaatggtgaaaatataaatagccacattgaagatatggctaaaaaagctaaagatgacttagcaaaacagttaaacgaaacattaaaaaaagcttttaaaggaaacaaaaacatacggtttaaataa

SEQ ID NO: 309083 - DNA, 489 bp, Proteus mirabilis
atgaataatagtgaattaatagcttcattagctctattcgtttctattgttggtgctctattttcttactttggagaacgacgagcgcgaagaaatgagaaagaacaagaaaaaataaaagaggagcaggataggattagaaaactaattttaaaaaaagaagaaagaagtgaactcaatgagttaaaagcagatcttaatgctcgctttagctccgcaggactaaagaaaaaagtattaaaaatatataatacgggtaatcactctgctaaaaatataaatatagcatttcctaataatgaccaatttgattatttaattggaaatgaaattgactctttattcccatatgaagttttacataaaaacaattcaatagatctacttagctatgagcaaagtttaggggcagagcctaaaaaatgtaaaatagtgctcacatgggaagatggatataaaaaattcaatcaaaaagaaatttatctatag

SEQ ID NO: 309084 - DNA, 198 bp, Proteus mirabilis
atgaaaacaacagaaataaatgaagaaacatcaaatttatcatctcaagagaaagaaaaaatcactaatacactatttactttaaaatgtaatattgctgagatagtggcagatatagaggccctgcataaatggttagtacaagagaatttgataatgcactctatgtataaagacgaaccttcaccattccggtaa

SEQ ID NO: 309085 - DNA, 495 bp, Proteus mirabilis
atgagtaccattcaatgtaacgaattttatgactcgctaagatctcaatataaactgtgtaactcaacatatgcatattggtttaataaatctgcagaccttttggtttcagcaaatgtcttgtgggatgcaataaacatagacagtgatttaaatatacgatgctggtcatcttataaaatgtttatgggactatcatttgagcttctttttaaaacaatttgtattaaagaaaaaattgattttaaaaaaatccataatttagcaacgttagctgaaaaagcagagataagtttaacttcagatgaaaaaaaagtttttgaagtattaactgagtatattttatgggacggtaaatatcccactccgatcaaagaaaaatcattagaatgccattggaaaaatgaaagagaattagatgaaaccaaactagacttttctaatttggtaaaaatctggcaaaaatattcggcatcgttacatcaagatttttag

SEQ ID NO: 309086 - DNA, 177 bp, Proteus mirabilis
atgcttcatctgcctgaattgacacagttatctttagtaaaaaacgctgaacttcaatttaaaattttacgcgactcgacaccagaaacattagatataaatcaattagatagattaattaaacaagtcgaatctattgcattaaatgtgaaggaaatcaatgaagatgcctgttaa

SEQ ID NO: 309087 - DNA, 516 bp, Proteus mirabilis; identical to SEQ ID NO: 297175

SEQ ID NO: 309088 - DNA, 1125 bp, Proteus mirabilis
  misc_feature (1087)..(1096): n is a, c, g, or t
atgaaaaatatcgtaatacctacctcgttaagctgcttttttttacttttttcccattcaacatggtctgaaaccaatatttcacaaaccaagcaacgtattatcgaccaacgtaattattggttagatgaaatcaaaaatggtgttatcacaactagccctcaaaaaggatcgagaaccgccgaattagatagaataatcagtaataattatcaagccattaccggcaaacgtagagaacttgccgaagcggataaatcacagtctcatacttatgtgttgaatacctatgctaatattttatttggtgataaggctaaatcgatcaactttagcgatattcaagcttatcaagatctcaataaattacatagcacaggcacctatgcttatgatacaaataaaaaaagagtacgctcgatagattttatcttaaaagaactttttttacgtggccgaccttatcaagtacttgataaagaaggtcattatcttgataactacaccactataacaggctcatcttatcccagtggtcatacgtggaacggatacaaacaagctgcagtgttatccatcttattccctgaaaagggcagtgaaatgtttgccagagcaatagaatatggtgaaagtcgagttattgtcggggcacacttcgcaacagataccattgcatccagaataggcaattattacctgctgtcacaaatgcttgcagatgatgacaccacccgcacttttgtagagcttgccaaagaagtccgccaaaatgttgctagccaatgcaaaaatcaacattgcttaacgacctcgacaacaatcactaacgatgaaacaggttattacgcaaccaaagatccagagcctgcaccacgcattacccctaatgaaataccaacatctgccaacgctttactgcgtttacgctttgcctatttaaccagagagcaacgacaatctatcttagcgagtaccacctacccgagtaattcattggctggctgggctgcaaacaaagataatccaaacgccaattggggattaattaatctcccgaaagcctataatggccctacttatttcnnnnnnnnnnacttatttctacaatcattttattgttaa

SEQ ID NO: 309089 - DNA, 417 bp, Proteus mirabilis
atgaataaattagataaaactttaaattatataggatggcatatatttaaatcatggactagtcaaataatttcagcgattttgatattggtagttattcccataattatcatactaacacccgtattttatataaatatttctttgcttattatatcatttttgttatatctaatttcatgccatatatctaaaaatcacagtgatgatatattaagattaatatcatacatattaattataatttcaggtggtggtttatggaaagacgccatagaaaatgtaaactattgtcagattacttttctttcaatagtctcactcataataataattgccattccatttcttacatttttaataaaaaacaaacaattaaatgataaaaataatttaacaaatgaatctaaaaattaa

SEQ ID NO: 309090 - DNA, 2166 bp, Proteus mirabilis; identical to SEQ ID NO: 297375

SEQ ID NO: 309091 - DNA, 831 bp, Proteus mirabilis
  misc_feature (816)..(825): n is a, c, g, or t
atgcagcagcaactgcttacatggatacgtcagtttaatgaagagtacgctcaaatcacttctctgttacttgttttattgatcatttttgttgttgctcttgttctccactttattttgcacaaacttgtgctccctaagctttcaaaagctatcagtaaatacgatcaaaagtggcaactctcttttgaaattaataagttattcagtcgatttgcctttcttatccaaggtgtagtcattaatatccaagccttattatggatgggacccggtaagacacaggagatattaaccaccacagctcaagcatggtgtttacttttcggtttattgatgattttctcaattatggatctctgtttgcagatcatgagaaattccccttcttttggccgattaccccttagaggtattttccaaagtttaaaattagtcgccagcgtgctgattggtatcatgattgtttcattactgatcggtaaatcaccgcttattttattaagtggtttaggtgccatgactgcggtgttgatgttggtgtttaaagatccaattatgggacttgttgccggtattcaactctccgccaataatatgattagcttgggtgattggttagaaatgcctaaatatggtgctgatggtgccgtagtggatattagcctcaccacagtaaaagtacgtaattgggataataccgttacgaccattcctacttattctttaatttctgattcgtttaaaaactggcaagcgatgacacaatcaggtgggcgtcgaattaagcgcagtttatctcttgatatcaatagnnnnnnnnnncaatag

SEQ ID NO: 309092 - DNA, 396 bp, Proteus mirabilis
atggttaactttttattctatatggaaaaaggtgataatgataaaagcatgtctcaagtaataaacttttctcttttatttattttatctatagtacctgcactattagcgggttcaaccctgcatattgaacaaaagttctctatggtgattatcggttggctcctgatgttgctctgcgcaggtatctatcggtttactataggaaaagtgattacttttattgttgcagctttatggtctttaaacctctccatctcactgtttttttatcgtgaacatgatattcccttttcatcatcaatagcagaaactttcattaatactaatggaagtgaaactgttggtatgctctcttataataaatattatgtacttctctatacaaaaacttag

SEQ ID NO: 309093 - DNA, 750 bp, Proteus mirabilis; identical to SEQ ID NO: 299318

SEQ ID NO: 309094 - DNA, 252 bp, Proteus mirabilis; identical to SEQ ID NO: 297228

SEQ ID NO: 309095 - DNA, 342 bp, Proteus mirabilis
atgaagtttattgtcagtagttttttactgttctttctttcttttcctttatttgctcaaaagttggaaatgtctaatgttcctattacagaatttacaagctggtatagtcaaatgacagggaaaggtattattttgccacctgattttaaggagttaattaccatttataatacaaatattaatggtgataatattgatatgttctttgcttctgtaatggcatcaagaggatacgaggttttaacaggtaatcctatcattattcagaaaagtcgctcgatagatataaataagattattagatggattatccgattcagagccaacctaaactattag

SEQ ID NO: 309096 - DNA, 735 bp, Proteus mirabilis
atggattatccgattcagagccaacctaaactattagaaacgtcaacaaaaacatataagttaaataatattactgcttcatcagcatttccagccgttgatatttatctgaaatcatttcctacatctggttcgactgtgattattgataaagcatctaattcgttagttatttcaacaaataagggaaattttgataatctaaatacctttattcaagatattgatgttcgtacacatcaagtgttgattgaagccattatatttgaaataggaaagggtgaatcttttgatttttcatttggagcaggaaaaaggtcaaactcgcagataattggaggtataaatacaaacgctttaggggaatcactttcttctttaggcggttcatttgggatttattctggaaatatattatctttagcagtaactgccgttgaaggttcaaaagacagtaaaattttatcagtaccaagaatacttactttatcaggttctgagggatttatttcttctggccaaaatgttccgattgttactggaaaggttgttggagagggggttgacgtgaaaaatcctttccaaactataacacgaaaagatgtcggtattaatcttagagtaacacctattgtattgggtgataaatctattatgttggatattgaatccaattctggaagtatttcaaatataacggatgcttcagatatcatcatagaacactgtgattga

SEQ ID NO: 309097 - DNA, 228 bp, Proteus mirabilis
atgttcaagaaaatttttatcagttcatttattacattaagttctatcatttctacctcagctattgcggcagaaggtaatgtattacccatcggtgcaacggccgcccttgattctattaaagcagattctctagcaatgattgactatgcttggccaattcttgccgctattgtgggggcttttgttgttgttaagattttcaaacgtgttacttcaaaagtttaa

SEQ ID NO: 309098 - DNA, 195 bp, Proteus mirabilis
atgaacataatttattttgattacattgatgggttcggtattaatgccaatattggtgttgaatgggatttctatcgttcttttgatgaattgattaaagaatgttcatttcattttcataatgactttattttagcgccaacaactgcaagatcgggaaacttcattggttatcaggagatttatcatgactga

SEQ ID NO: 309099 - DNA, 1695 bp, Proteus mirabilis
atgggtgctcaacaagataatgccacaggaaaaaccttcactggtgcgcaattaattgtttatttactggaacggcaaggtatcactacggttgcggggatccccggcggagccgctcttcctttgtatgatgcattaagccaaagtcagtctattcgccatattttgacacgtcatgaacaaggggcgggttttattgcccaaggtatggctagagcaaatggtcagcctgcggtgtgtattgcctcaagtggaccgggggcgacaaacttagttacagccattgctgatgcaaaattagactcaattcctttggtttgcattacggggcaagtctcttctgccatgattgggactgatgcgtttcaagaagttgatacctatgggatgtctattcctattaccaaacacaactatttagtacgcgatatcgcacagttgccggaaattatctgtgatgcgtttcgtttggcaatgtcaggtcgccctggacctgtatgggttgatgtacctaaagatattcaacaagcgactatcaccttagatcaattgccaccgataccacaaaaagatgcagctccagcctttaataccgatttggtgatccaagccgcgcaaatgattaaccaagcgaaaaatcctgtgctttatttagggggcggtattattagctctgaagcgtgtaaagaagcgattgagttggcggagaaaaatagcctacccaccacgatgacgttaatgggattaggtttaatgccaccaacacactcgctatatttagggatgttaggtatgcatgcggcacggagtaccaactttattttagaagaagccgatctgctgatcgtattgggggcgcgatttgatgatagggcaattggtaaagcagaaaagttttgccccaatgcgaagatcatccatgttgatattgatagggcagagataagtaagatcaaacgtcctgatattgccattcatgcagatgctaaagcggtgctgtcgctgttattacctttaattaatatcaatcagcgcaacgaatggatagatagaattaataccttaaaacaagaatatcccttagaaatgaaaaactcacacaatattcttagcggttacggcatcgtacttgctgcggcaaattgtgttgatgatgaagcgattattaccaccgatgtagggcagcaccaaatgtgggttgctcaagcttatccactgaatcgaccgcgccaatggttaacatcaggaggcttggggacgatgggatttgggttgccggcagcgataggggccgcattggcagagccaaataaaaagatcctctgtttttcaggggatggtagcatcatgatgaatattcaggagctagcaacagccgctgagcatcagttagatgtaaagattattttgataaataatcaagcattagggttagtacaccaacaacaaacactcttttttgatgagcgtatttatgccgcagcctacccttatcaaacggattttattcgtattgctcaaggatttgggttggatacttgtgatttaaatcaagaagcagatcctcaggcagcgttacaagcggcaattgctaaacctgggccttgtttaattcatgccatgattgatattaacgaaaaagtatttccaatggttccgccgggggcggcaaatatcgagatgataggagcttaa

SEQ ID NO: 309100 - DNA, 171 bp, Proteus mirabilis
atgtcattaacaaaaattgttatagtcggtggtggagctggtggattagaactagcgactaaattgggtgataagttagggcgcaaaaaaaagcagaaattacccttgttgatagaaataatagtcacttatggaaacctctgttacatgaagttgccacaggctcgttag

SEQ ID NO: 309101 - DNA, 516 bp, Proteus mirabilis
gtggacaattatattgccgaattcttagagaagaatgatgtaggttctaatggattagaaaaacgtatagctactcgttttgccttagcatacgcaagtgggatactcggtattaaaactaaggttctcccctttactgagaaggaggtttttgatggagttacacattgttatctgaaagctatagatcaaaaccctattaaaaaggttgttttcaatcaaaagctattagatacattgaaaaatccctgtaaaccgaaaaagagtctagtagacaaggacgagctaaataacttagatgttattgctttaaaaatcaagggagaacattatatcacagtaaagtcatcattttttgatgataatattattgggaataaaaaaaccgtgattcgccagttggtctcagaaggaaagttacttactgatgcccaaggcaaaagcactcgccagtgcaaggttaatgacgtgaaattaagtcgtcgctattgtttgaaagtagatgttgtgagttaa

SEQ ID NO: 309102 - DNA, 1110 bp, Proteus mirabilis
atgaataatgaaggacgcattttgaatatagcagcaaaatttatagctagggatgatctcggcaacctaatcatcacattggtcgatgataaagaaatagtgattcatgatttttctgtcatgccaaacgactatcattctctacgtgaaatgatggagacggggactgctgacatcagattgtacaatgttcgtgcaattggtgtgcaagagcctttcagattagagctgaaaattacgtatctaagcgagcaggacacgtttctgatagtagatgggggatggataccgttatcacttatcaacagaaaagcgctcctgcttgctgacagaaatgtaatatcaacaatccaataccgttatagcctagggattttaaagaaggatgttcctcctaatgattttgatgctgtttttttacagcctgctggaatagagattgatatctctcttttttctatagaatcaaatcagagcaaaattcccgacaggggaactatggatgagcaaatcaacatagctaaagacattctccgatattctctccctgaactgaaaagagcgatataccctaatgcagataactacttttttgaccttttcgaaatgcttaagccaggattaattaacaggactaattttttcatggatattgctgctggtttaaatcgtgagttcacaccaaacaagaggaatgaatatgtaccctttatattctctaaggcaaaggataatggtttgaagaacaccgatattgcggtgttactcgcgttcttgcgtatcacgatgttaggaaaaaaaactgcggcaacacaggtaattaaagaatcacaaactttcagtgcgaaggatggttataatgtggcctgtgaccttatggcactggaagttctaatgaattacatttcctttcacaaaaaaaataagtctacttacatcccgtgttttatcactaaagataaggggttagccctgatcgcggcgttaatgatgaatattaaatctcatacctctgatggtgagaaggcctccatcacggtaaccctccctttggacatattctcagatgaacgagaagtgcagaaaatggttatgcagtaccttcagtga

SEQ ID NO: 309103 - DNA, 927 bp, Proteus mirabilis
atgagtacttatttatataactggggtagctggaaaggttgggataatgaaacatttaatactgtattaaaaaacatagcagatcttggttttcatgatgaagaatggactacaactagaactaaaataaatgttggagataaaatcttactcattagatccaagcaaaaatctaaaaatgggctaattggatgtggatatgtaatacgtggtgttcataaagggaaaaaacatgataatgataaaataggaaataaaatcacaattagatttacaactttatttaaatcggcggttatatctgcagaatctttaaaagaatatgataacacccagtgctgggtcggccaaactgcgggtatgatcgtaaagaactctcatgttgcagatgaacttttcaatgtgctaactagtttatcaaattcagaattaagtttagattcaattttaaatataaaaaataaagatcaattaaaaataaaaaataaactagaacaaattaaagatcctatacgcttaggtatagctaagtttcgtcttgggcaacaaaaattccgtaatattttattaaaaaaatggaaaaagcggtgtgtaatcactaaccttgatattgaaaatcttttagttgcttcgcatataaaaccctgggcattatcgtcgccatctgaaaaacttgacaaatataatggtcttttactatcagcacatttagatattttattcgacaaaggatttatttcttttgataataatggatttattttaatatctccaagtattaaaaatgaaaaagaagtattaggaattaatgataatatgaaatttaaaattgaaaaagaccatataaaatatcttgaatttcatagacaaaatatttttaagaaagaatcaccccatctgatattaaaatcaaataaaatcatttaa

SEQ ID NO: 309104 - DNA, 753 bp, Proteus mirabilis
atggaactatttattgttattggtgtagtctttgttcttttttttataatcagagcaagaaataaagtaaagtatgttgttaaaggtttaaaatggttcataggagttggtttttatgaaagaagcaaactttctccagcagaaacatttctattaaccatgagagtaacagcaaaatgtcgctttaacgcagctagtcgattaagtaacttaaataaattctcatttttgaccactaccttactatcattaggtttgatatttataccgttagctcaaaactctgatattgatatagtaattaaacaaggtgtaataaatatgatgcagatatttttggctgtatccgtcctcgtttattccataataataggaacatcaaaatacgaagtaagatctgagaaactaacagcatgtggtgactcattaaaagaactaataagaaaattgaacaagaaattaaaagaaaattcacttgaaataaatgagttagaagattaccaagtgacatatgctcatatcatatcaaaaacggaaaacccacaaaatgttgattatattatagccacacttgacatggggagagactacaagattacaggcttgagacgtttacatttaaaaatcaagtcttattttcttttatgcataccatactacattccagtattaatgttatctttagaagcaacatttatattctacatgcttataccagacaatgtgcctgactttttaaaattaaaaaactaa

SEQ ID NO: 309105 - DNA, 978 bp, Proteus mirabilis
atgagcgatttaatagaagaatataagaacaataagcattcatatgaaagtctattgatacagacgagacacacaataacctctttgctacgaaatactaatattgatgtattttcaatagaatcaagattaaaagatgaggaatcatttaaagaaaaactgcaaagaaaatcagattacaaagttttaggtgatattgaggatatttgtgggcttagagttatttgttattatgaatcagacctacaaaaactaagagaattaattactgaaaacttcgatgtcttatcatcttctgacaaaaaagaggaatctgatgttgataaattcgggtattcttcgagtcacttcatcgctagatttaaagataattggttgcaaaatcccatttataacaatctaggtggtttgaaattcgaaatacaaataagaactatgttaatgcatacatgggcagctatcagtcataaaacactctataaaaatgaatcagatgctccgaggcatatgagaagaacatttggtcaattaagtgccttaatagaacttgctgatgagcaattttcccgaattaaagaaatgaaaactgaatatcaaaacagcaacaaagaagctaacgatgaagcatttgtccatttagagctaaactctgacacgttgctagatttgatatttaaatatttccctaagcgaaaagtaaattatgcggatatacctactgttttaaatgaaataaaagtatacgactcatatgtaaaggattttgaacaaagaataaaaaaatgcctaccttaccttgatgatcttgaacgtgatgaagctaattttgtaggtagtgtcacccctatgtgggaagtctctggattatgtagaaccattctagatttaaccaattctgattattatagcagtcgctcattttctaatgaatataaacaaatgactgatcggtatatagatttaataaatcgacagtaa

SEQ ID NO: 309106 - DNA, 1269 bp, Proteus mirabilis
atggataaatatcagccaacaatttcttttagcatcaaaaatagtgaacagctagaaagtggttatctgccaaatgcgactttaactcaaagtggcggacagattggtagtggcaatcaatgtgactggaaaatccaagataatgaaggtgctattgccgatcggcaatgtacggtgttttggaaagatcaacacttttgcttaaaagtaaattcaggtcctgtttacattaataatgcgattattccattgcatcttgatgccgttagactgacccaaggtgatcagataaaggtgggtaaattagttattgccaccaatattagtcttaccggagagccggtacaaaatatgatggcgatgacgcctcagtctattatcgcaaaagatcataatccgctagattcattatttgatgttgatacaacagtcaaaaatgagcggaaagagcctccgtttgtaccaaccgttcagggggcattaacaacagacccactacaggctttagaaaacgaaaatctaagcttaatttctaaaaacacacaagctacttcagacgatcctttattgagtgacccccactcgtattcatctgcctttccgacatcagataatcaagagaatactatggtccaagaatttattgatttacctaaaatcacacctaatgaaaacgaacatatgaccgatgtcgatcatgtggcggttaaccctctgatgaagggattaggtatccaccttaatttaacaaatacacagcatgctaatgattttcttgttgaactgggtaaaaccgtcaaagcgactattgaaggtttactgattttgcaacaacaacaagaaagcttacaagataagcaattacgcccaattgaagataatcctctacgtcttaatagtggctatgaagagacaatgaagttgatgtttaccgatgaacgtagccctgtacatctttcagcaccagcggcagtaacagaaagcttgcacaacatccaattgcattatcaagcgaatcaagaagctatttcaaccgcactatcaaccatgttggcagcattctctcctgaacatttattaaaccgcttttctcagtatcgacgagcttcagataacacaccaatgaatgatggctgggcttgggaaatgtacaacaactattacaaagaactctcttcatctcggcaacagggttttgaaaaattattctatgaagtatacagccacgcttatgacagagcgctgagaaaaggaatagaggaagcttaa

SEQ ID NO: 309107 - DNA, 1173 bp, Proteus mirabilis
atggaactggaatttgatatccaaaaacgattaggtaagttctacattccaatatgggttggctgtgataaatccgtagcggctgctattaagattttcagggaacaatggcattcatattctcaagtttccaaaagctataatataaccagattaatcagggaattagttgacccagccgtatctgaatacttgaatagtcttccagacaactatctgcgatacagtccaatagcgtcagctaagctaacttacagcgatttaatcaaaatgagaggttttcgttactgctctgattgtattggcgattatcttaggccttttattgaacattctacgtatacagagtcagataaattatttatagctactcaagaaacattaaaaagcttattttcccactgcaaaggaaaacaccccaaaagatcaagacttgcacctgatatctactttaatacgataagaggcaaaggattatgtcgtctttgtggcaacccaactgagttttcttcatttattaccaattgggataacgacggttttattgatgatactgaagaaaaatatggactaaagaaagggccagattttagccataaatactgtgctcaccataaaccacaattacaagatggctcttggaacccagcctataaacaagcaatgcgctcttctaaacaatttgaattggaagttttaagattatgtcgccaaatagctaaaccagagcgtttaaacgctatgtcaggtgataatctcatagatgagtatttttattattatcttaaaaataaaacaataaattacgctcaatcacttacatgttttgagcatatccaaaatacattttctggatcaattaccgttgatgaaaaaacatgtgaggaaataattagtattgttaataacatgacaaatgcaggaatttctttggggcctgatgatatagacaagatacgcaatattgcccgtgaaatggtcaattcacgtttatcagataataaaaaacgcatgttagttttacgcaagaaaggttttaatcaacgagagatagctgaaataatcagctcactgagcggtaaaaaattatcacaccaagcggtatctaaggccatgcagtctgtgtgtaagaattttttgttagaaggctctctagatatagagtctgaataa

SEQ ID NO: 309108 - DNA, 777 bp, Proteus mirabilis
atgacgataactggtaatgtggttgttccaacaagcacggttttacaggcgagagtggttatttatcagccgagtaaaaagcctttagagcgtaaaggtcagtggattgagacttcgtttggcaagtgcagagtgacaggaagactgggtcaacgtcatgctgacattgttgaaattatgctttttgtggctgagcgtaagcgtgatatagatgatggtggagttgagttgttggtcgaccctgcaaaacttagaaaaatgttatcagacaatcaatatagtggaggaagattaaataaattacttctggagttaaaggcagcaactgtcgaaattgtggcatctaagctggagaaagctgtagatgaggggcgtattatcggtggtttaattgaccatgttatttcgtcaccaatgactagatacaatcctcttacgggaggagttcgtaggctttggaaagttaggctaggcatcgcacttgttatgctactggagcatgatttgtctttatattatcggcctgaattaatcgcacgtctgaaacatggcattagtcaagcggtggctcgccatgtactgacacatagtaataatccttctgggggttggcatcttgatacgttattaatcgcagttagtggtaatgatattagtgcaaagacaatgcgtaattatcgaaccagaattaaagatgatatagaaagtttgcgtgttataggcgttgatatcaattcagaaaatcgtgtaaaacgactcacagaggcccgaaagtaa

SEQ ID NO: 309109 - DNA, 237 bp, Proteus mirabilis
atgagtaatttattttttatcgtgttgactttattttgtatttttttaactgggtgtgaaaggacaataatagaggctgataaaataacatgccatgaagataattatgaaaagtctttatcggaaattaaagacaagagttcacaggaagtatttattggtgaatgtaactccataagaaaatcaaaggaaatgagagagtggaaatttaaatcaagtccagaagacaacttttaa

SEQ ID NO: 309110 - DNA, 2313 bp, Proteus mirabilis
atgcatcttcacactctggcgtttaagaattttcgtaggctgaaagatgcgcgtatcgagtttgcgaacgacctgaccatatttgttggagctaataatagcggaaagacatcagcaactcatgcagtagatctgtttttgtccggctctaaggacaaattcactatcaatgatttcagcgcagattgctggccggcctttgaaagtttcccagcggaagatgcggctgagcaagcgcacgaattcccagcaataagtcttgacgtgtggataagcgttgatccagacaatctttaccgggttgtggatcttctacccagagccgcatgggaaggcgcactcgttggtgtccggattgagtttgccgtgaaggacgcggtccaaacgctggccagttatcggaagatgacgactgaggctgcgaaattcgcccagaataaggctgagcatggcgtagattacaagccttggcctcgaaacatgcgcgactacctcgcgcgcgagctgaagaatgaatacggcctgcgctatttcattctcgacgaagcatcgttatcccccgttaacgctggcgagacgtacacgccgaaagagatcctgggagacaccgaacgaacgggacactcaatcattaattcgctgattagggtggacttcctgagtgctcaacgacacctgagcgacggtaacgcgcaagctcgaaccgaggacttgtccaagcggctcagccgtttctacactcgtaaccagagcaagcgtgaagacgaccacaacgccctgcgcgcgttggcgctttctgaagagcaattgacgaagcatttttcggacgttttcaaggacacgttcaaatcgctgcgcaagctagggtatcccggcctttccaatcccgcactggagatccgcgcagccctccggctggagaggctgatgggcgatcaacaggctaaagttcactacctactcgaagaagcgatcggaggcgtagaagccctgtctctccccgacagctacaacgggttgggttttaaaaacctcatctatatgggagtcgaacttctcgatctccacgctgcatggtcggtcacagaggaaggagaggaaggtaaacgccagccaattcatctgatgtttatcgaggagccggaggcgcacatgcacgcgcaactccagcaggccttcgttcgtaagctcactgaactcatcccgcctgaagggggggacggttacggcacgcagttcgtgatcacgacgcattctccgcacatcctgtacgagcggggcttcaaaccgatccgctatttccgccgttctgccgaaatcggttccaaacaatgctcttctgttttcaacctctcagcattctacgaaagtaacaaggacgaccgggatttcctccagcgatatatgaagctgatgcattgcgacctcttcttcgctgacggtgcaattcttgttgagggcaacgtcgagcgcctcgtacttccgttgatgattggtcacggcgctaagaagctgaacgcggcttatctcagtattcttgaggtcggtggtgctttcgcctttcgtttccagaagctgattgagtttctcggcttgccgaccctgatcgtgacggatctcgatagcgtgtacccgcctaaacctaagaagactgctgacgccgcagcccaagacgataacgacgctggcgatgacgaggacgatgatctcgacgatgaggctgcggctgaaggggatgagccgaagccaaactcaaaatgccctgcaggaacggctggagctgttacggcaaaccagacccttcgccagtggctccccggcaagatactgattgaagaccttctggccgcaccgcctgaaagtaagctgcaagcgcctcaaaatggctcgggtgcgcatgtgatggtgacgtatcagtgccctgtaaccgtgaagtggggagaggagactgctgagctgaagagccgaaccctcgaagaggccttcgcctatgaaaaccttgagtggtgccagaagaaggagcaccacgatctgaagctgagatggagcaaggcgggaacgatgccgctggccgaccttgcttcgaaaatccatactcgcgtcaaagggcagcatttcaagaaaaccaacttcgccttgggcctgttggctagcagcgacgcgacgtgggtcgtccctacttacatccagcagggcttagactggctgacgcagcacgtcacaatcgtagaagaggtgtcggatggcacggctgaagtcgtcggtgtcgatgaagctcctgtccaacctcaaaatgttcaggtggatcaatga

SEQ ID NO: 309111 - DNA, 1890 bp, Proteus mirabilis
atgaccagtcgtgcgggaaagccggatacgccggctgatatcgaactgagaaccttgctagacgatgatgcgtctaccgggttcgtgatggtttcaggtgcagggtcgggaaaaacgacctcgatcgtcaaagcgctcgatcatcttctcaaaacacgaggccctgctctacgagcgcagtccaaaaagattgcctgcattacttacacagaagttgcggtcggcgagatttggggtgatgtcggcaacaaccagttgttccacgtgtccacaattcacagcttcctctgggcggccgtgaagccgtttcagagcgacatcgcagactgggtaggacgtcggctcgataagaaaatcaccgacactgaaactgagattgaaggcttcacgagcaggacgcgggcaccgacgcgagaacgtaaacacgccgacctagagcgatatcgagcccagaagctcacgatcggtgatgtgaagcgcttcacctacggtgtcgggagcgactacccgaagggcattctggggcatggcgacgttatcaagctttctaccgagctgattcgggatctgccggttatcgccaaggtcgttggacagaagtatcccttcatctttgtcgatgagagtcaggacactgatccggatgttgttgcggcattaaaggcgatctcagctttgctcggtaataagttttgcctcgggttcattggcgatccgatgcaaaaaatttacatgtccggggccggcgtcatagcccctctagatggttggaaacttattgagaagcctgaaaactttcgctgccctgtcgcagtcctcgatgtgatcaatcaaatccgcgcgggcgcagacggtcttgctcagaccggaggcaaaacgaaagaggtcggaggcgcacgcgttccggtccaaggttcagcgaagctgctcgtggtatccaaggccgaccgtaccaagagccttgccgaggcgagacagtggctggcccatcacaacagcgactccctttggcttagcgatgaagctgacgctgacgtaaaggtcttggtgattgcccatcgaatggcagccaaccgccttggcttcggctccctttacgaagccttccacgacaaaacgtctgacggtttcaaagatgggttcgatgacggcacacattggtctgtcgctcctttattgaagttgctggcccccttgatgctggccaatgtcaatgatgatcaattcgaggttatgagccttctacgtcgtcatgcgccttttttgcagcgcgagtacatgcaggcgaactccgtgcccggcattttgaaggatatggacactcgagtgaaggcgctcgggcagatctgcggagagtcttcagcaactcctgtattcgctgcgttcgaacacctgcgagatggaggcatgtttaagctggatgaacgcatcctagcggcaatggccgaatacgatgctgcggttccatcggctgagagcggcaaccatgccgctttggtgaagctccttcacacaccgattcggcaactatggggctatcgtcgctacatcgaggagcagtcgccgtttgaaacgcatcagggggtaaagggggcggagttcaaccgggtcctcgcgatcctcgatgacgaagaaggtcgccataaccagttccattacgggaagtatttcggaataacgcctctctccgacacggacaagcagaatatccgggatggcaacgaaacgacgattatgcgcacccgtcgacttctgtatgtctgctgttctagagctggagaggatctgggagtcgtgttttttgcggatgatcctgcgcaggcacatgctgccatcgtcgcgtcgggtctcttccccactcaggacgtgatcaatcttgccgcgccctag

SEQ ID NO: 309112 - DNA, 282 bp, Proteus mirabilis
atgaaaaatagtaacttaattaatcttgtatctgatgttgcagagataactctctgccagactgtccactccccctatcgtgaaacaaaaaaattagccacgactacaatcggacgttggaagcatgattgggtctgggacatttcaggcgtgtcctcgcgatttgtcgaacggcacatcagaccagtagcggatattcgacatctcaccgaacgaggacacggaaagatcttctatgcaccgcacgtcgatagcctttctgacagaacggtaggcctgtaa

SEQ ID NO: 309113 - DNA, 906 bp, Proteus mirabilis
ttggaacttgtatctaaagtcagaaaaaactcttggctctttctccgaagagcaataaaagaattggtgagccatgatgattccaaagatgaagcactaactgaagaaactgctacaatttcaacaacatttattcaaatagcttttgagctttcgttagttgctcattttataaaaaaagatggaatccatgggattgtcaaagaatcagattcttcacttactgaagaagagcttttagcaaaatttaaagataatgatctggacacgaaatcattcaatttactaaagaagcaagctattgataatcatctttttcttcgtgatgatgaacagtttattcatgactttcagaaggttagaaataaattagtgcatttgaactataaatttgatgctggggatttatatgattttaaatacgatctggtatattttatcgttaaaattatcattccaattctatctgaagagtatgaaaacccatccgcagccatatcaataaacctagactcaaaagattttgtaaaattaataaactttcctccttatgcgtatgaaatgtacaaagctgccaaggagcaatcagattttgtatatgagtgcattcactgtgggaatgaatcacttgcaatagattatgggaatgaactttgttattcatgttgctctgattttacaggagccggtttcattgattgtccttattgtaaaagtcgtggcgcaatgatttatgatgctttaaacattgatgcacaagataattttactattaaatctctgtgcttaaaatgtaaagaggatgacatggtgtaccactgtaaaaaatgtgacgcggaagttgctctagaagcatatgctggtcgtggaaagtgtcaatttggctattgtgaatgggacgagtaa

SEQ ID NO: 309114 - DNA, 198 bp, Proteus mirabilis
atgctgagtgttgaagagaaactagagcttcgtcgtgatatgcaagaagcctcagcttgggctaaagccgaactaaaacatagacgagtatcaaaaaattctgcgcatggtataggttatggtatcaataatgagtatatttttaactatttgttatataagtttattttgttttcattgatattcgagtgggaataa

SEQ ID NO: 309115 - DNA, 654 bp, Proteus mirabilis
atgagccgttatcttgccagtaagttaatgaaagaactcaagattgcaagttaccagcacgtaaaacatcgttataaacgcggaagtaaagaacatgtcgacatccctaatttactcgaccgccaatttgccgtcacggcgcctaatcaagtctggtgtggtgatgtgacctatgtttggacaggaaaacggtgggcttatcttgccgtcgtgttagacctttttgcgcggaaacccgttggttgggcactctccacgtcccccgataccacgttgacattaaaagccctgcaaatggcttgggaaatgcgcggtcagccaaaaggattgatgtttcatagcgatcagggctgccattataccagccttgagtatcgtcaacggttatggcgtcatcaaatcgtccaaagcctgagtcgacgaggtaactgttgggataatagtccaatggagcgattttttagaagtttaaaacatgaatggatggcttcaacgggttatgaaagtctgaaagaagctgaacacagaattattcattacatcacaggctattacagcgggatcaggcctcactggtataacggaggtctaaccccgaatgaatcagagaggctgttttacaaacagtctaatggcgtggccaatattagttga

SEQ ID NO: 309116 - DNA, 300 bp, Proteus mirabilis
atggttaaacaatattcagcagagtttaaactcgaagccactaaaatggtggttgaccatcattactccgtggctaaagccgctaaggcaatggacgtgagtcttgccgcacttaatcgatgggttaaaaaactgcgattagagcggcaaggtaaaacaccgacgggacttccgcttacacccgagcagattgaacttcgtgagatgaaaaaaaagatacaatgccttgaaatggaaaacgaaatcctaaaaaaggctacggcgctcttaatgtcggactcactgaaggattcgcgataa

SEQ ID NO: 309117 - DNA, 1194 bp, Proteus mirabilis
gtgaaaactctaattgttgatgaccaatatgaaaataaaggtaaagttattgccggacttttaaataaaattggatcatcaaaaattgaacttgttgttgattcaaaaagtgcaacaaaaaaaatgatggaaaccaaatatgatttattaattatagatctacaaatacccgagattttaggagaagatgttttaccaaatggaggcactcaattattagaatatattgaacttaatgattcaattcacaaaccaactatggttttaggaattacgtcacatcaagactcgttcaaccatagcttatctttttttcaaaaaagaggatggtctttaatacttggtgtagaagatgaagaatatattcaatcagtactcactacaatgagcgcacatgtgtctaatttaaataatacttttgatatagcttttattacagccttaccacatatcgaatatgaagccttaatgtcattaccattaaaatgggaactgcatcatgaaataaatgatgataatgtttatcataaatctatattaacacaatcagatggaagcgaacgaaccgttattgctacttgcttatcacacatgggtatagcaacagctgctgctgcaactgcaagtatatgtgtaaagttttcccctaagctaatagtgatgactggaatctgtgcaggtattgaaggtagagtcaatttaggtgatatattaattgcggatccatcttgggactgggggagtggtaaattaacttttgttgatggaaaggcaaaatttttaagccaacccactcagatagctatagaaccatcaattaggagaaaaattcaacatatctcttcctcaaacatctatatgaatgacatatattcaaattggaatgaaactaggccatcttacaatcccaaagttcacataggtccgatcgctactggagctgtagtcctagaagatcctcatacagtggaattaattaagtctcagaatcgttcaactaacggcatcgagatggaggcttttggtgttatgacggcggctttcaatgcaggtccaaataggcctaatgtattaatagcaaaatctgtatgtgattttgctaatcctgaaaagaatgatgattggcaaaaatatgcagcatatacaagctcaacttttgcatataaatttatagtaaatgactacaaattttaa

SEQ ID NO: 309118 - DNA, 456 bp, Proteus mirabilis
atgcgcataataattattgaagatgagcatgacaaacgcaagaatataaaaactgaagttgttcgcatagttggtgattcagctgatattcttgaagaggagtctcttcgaggaggtctgaaaactatacttactacaataaaaattgatcttatattgttagatatgagtatgcctagttttgacataactaatgaaacaagcagtgaagatcctgagagctttgctggctatgagataatggctcaaatgaagctccgcaatatacatattcccgttttaattataactcaatataaatcattcgaaaaaggaagtgtaagtgtcgaagagctaattgaaaaaatgaaatttaattatagcgatttttttaaaggtactatttattataattcttcattagaagaatggaaaaaacaactttttgactatatgaaattattaggaataatataa

SEQ ID NO: 309119 - DNA, 1932 bp, Proteus mirabilis
atgctaatcaaagagaaaaaatatgatgatgctattattgaattaaagaaccttaccgaatgctctgatattacaataaaaaatgatgcaattaaactacttgtttcaacgtatatattagcagataaaatagaactcgcaatttcattttatatcgacattgttatggataactttagtttcttacaagttttcgatagtcaattgctatgtgaacatgcagtccatattattaaagactcaaatgatatctccatacctatagcattatcattgcactctattaatgttaatagtaattttgaccctgcattaaagtattcttttgagcaatttttgattaataataattgtcagtcccctctgtgtagaataaaaatatgtagaaaattgattgaaagaggtcaatctcaagaggttttagtttttgaagtcaaagaaagaactaaacgacaagtaatactaaaagcagcaaaacaagttgataatagcagaatccatgcggatatcagtacattgattaattcatcaaattttaaaaaattgtatgatgcatacattacattaagtgcaaaggattattctaattcacatgatgaaattaacattaatacactattagtaaaattagaaaagataaaagaagatgaaggtttggagtgttttgaacaaacattatatatggtgcatattcaagatattgttttaaatgaaaaaaacaccatatttatgaagttaatgaagcttgtaagagatgagtttgcttttggtataaaaggattaaatggtcatttaagcacacgtattaggcatgggcacttaccaaatacaataagaaattgtttttcagagcaagaccttatctcaacaaaaataagtgcaaccggaggatttaaaataaataacacttggcaggataatttttcttatttaaataaatcaaaattagtatcagttgataaagagtttattgatttctcttcaaggttactggagataattaatgaaatcaatgacaaatggcttcagattattatatatgatcaagatattgctggactggaaaataacatacccgatagaacagctcaattcaattattctacgacctatactgaatgtatatatcttcaacgtagccttacatctcactttaattatagcgattttgttaaggtaatcatagcatggctatggaaaagaactgagataaatttaaaaaacattagaaccgaaatagaaacaagtctaaaatctaaactattcaatctattaaatacactggaaagtaatatatttaatatagttggagataccgatggattaacaaacttcactgatgccatagcaacatcaaggcgaaaaataaatactaatattgacactataattggatggttcaatcgagcaaaaggattatccattccttattttgattcagatgttgcagtttctataactaaatggtccgctggaatcgaaattaataatattgataacactaaattaaaatttcaaggttggtctttaacctattttgttgatgctctttatgtattgatagataattgcttaacaaaatctaatattacgaaaaataatcttaccataaatacattatggaatttgacatctaatggattagagctatcagtaactaataactgtatgaaaattaattctctagaggactctaactctagattaaatttttatagagaagcatatgggaaagaagatatatctattaaagcatcccaagaagaaggtaatagcggttttttcaaaatatggaagagcatagcaaaagatttagatatgttacatagtatttcttttggatattgtgatgatgagcatttcaacgtaactattaacattcctaaactagaattagataaggttatatataatgcgcataataattattga

SEQ ID NO: 309120 - DNA, 1866 bp, Proteus mirabilis
atgaatatagaaattgaagttagtgagctacaatctaggcaaagagtattgcatgaaaaaattgataatttggcaaaaaaactacctgaggaaagtgcaacgcgtaagcagttagctaatcatagagagctttttgacgacgccattcattatctttcaaattcaaagcaaagattggcatttatcggtaacattggtaccggaaagacaactgccatatgtcatctcttaggcttattagatgggaatgaaccaatccttagtactggtagcggtcggaccacgctttgcgaagttgaaatatccactggtgctcaattaaggattgaagtaactccgcactctgaagccgaggtgaagagctatcttaccgattttgctcaatacttacatgtatcagatatagcaacatcggatacttcagattcatttagactaagcgctgaagttgaaagagctctccgtaacatgctcgaccttcgaatatcacggacgaaaaatccagaaggaaaacgaattgctatagacagcgcgaagaatttcgcagctgattatcaatctgttgaacttttggctgctgggctgttggggcgcattaacttatcgtctcgtcaacaaacgttattcactaacgatgatggggcagagcaaaatctatggttgcattcaacattcaaagccataaataattgtactcacccaaacgttggcttaccaaagcatattcgaatatcagtacctttaaaactttttgatccactagattatgcactatcgataattgatacaaagggggtcgatcagacggttaaccgagtcgatctcgatagctgtctaactgataatcgcaccgtcaatgtaatatgttgccgatttaacgaggcacctgataaaactatgtcaggattactaaaacttgccaaggatgcggggctaagccaacgaatcgcaaatgaaacaattttgttaattctagatagggaaagtgaagctgaaaatattatcgatatagatgagccaattggtgacaaatttgagggacgcgaaattcgtgcagaacagatcacgaatgatctaaagcacacgctacaattggacaacttagatgtacaatttttcgatgtaaagtctgatgatccgaaccaccttagcaaaatattggtagaaaaagtttctaaattacgtcgtcaatatactcagaatgtaattgatatagagaaagctattagtgatatcgaaactgaattagtctctcaatctgcgaaggctgcgaagcatcaggtagctaacacactggaaccatggataaaaaaggctcaaagctgttctcctattttaaaagaatattttttacccttaattaatgatatcaagaacacgggaacatacgctgcgagtgttcgagctagtgtaaatcgccgaggtgagtggcacaatctagattactatcagcttttagctactggagctcgagagcaaactgttgatcaaattggtactctaaaagatgaattaattgtacttattgataatatgctttcccaaaacgagcttcaacctgcctatgcattacttaaacaattaaaacaaacaacggaaaaacggcttggtgatatatatcaaaaagcgtttgctaaaggacgtgctatttatgaagaaaagctttcatcagatgatcaactctggaatgctttatttatagaatggggaagggggcctggttataaagatagagtatccaaaaattctgaggcttggtttcacgctagaaaatatccagaatttgaaatcagagtgactcaacaagtggttaaggaatggcaactttatgtgaatgaagtgagtgatatgttgggttacgcataa

SEQ ID NO: 309121 - DNA, 153 bp, Proteus mirabilis
atgatgaacattcaagctaaacgagatattgcacataaaacaaaaatcttaaataatgccggcgagagcaaaaatattgctaaaacttgtcgccattggctttcagatacaaaaaagccacttactaagaagtggcttaatatgctgatttaa

SEQ ID NO: 309122 - DNA, 447 bp, Proteus mirabilis
atgattaatagagaaagaagtcatcgacagaactcagcattatctgctcgaagaaatttaggattagagagtgtagttaaagcaacccctggtttttcatgccaaggaaaggttggtgaatttattgacttttatcttcgttgtgaagtttttgctacaaaattgcaatctttttatcaaaaagataaaaatttaaataataaaagtgcattaaatataggtactttaagaaatgctttggaacattttaacttatattttaaatatgagtctttagatttaatttataagggggggactggaaatagagggagcaagagtgccagacaacttaggaatggttatctacatgggttgtcagaagctgataaaaatgagattgagcagagatcttctgaatatgtagaattaatgaagctttttttgcaacttaggttaacgtcctag

SEQ ID NO: 309123 - DNA, 1317 bp, Proteus mirabilis
atggcagtagctcctcaagtttttccacacacagctatttctacgtggagtggatttgtctatcagggcaagttggcgctgtaccattgtctgaagatgatgtcctcagactatgaagcgaatcgggatttgaagctgcagttggaaagtcaggatgacttcgcgatttttcgtcaccagcaatgcctgtcaatgcatcaggtcaaagcgtacaaggatacgcatttttctgcctacagtgatggaattacgactcaacgggataatgcgaggcagcggagagtgccactcgcttattttcatgttgcccgctcagtaacaaatatcccagcaacatttgatgctgactatacaccagtgagattttatgcttatcccattccgcccgatgaagccggtaatgtcacccaatcattttgcccgctgaaccaagttgacatatttattcgaaatgaactctccaacctacttattaatattgcaagacaaccctcctggaaaaataatattgttgtcaatattcagaacacgctggaagcaatgataaatacgaaggtcattatgacccatagcaagatacacgagtccactcgtcatcaaactgtaatcgctgccagcgagttcatcgagttttcagaactgtatcgcgtaatcgaagctgatgattatgccccgtatgagaatgaagcattcttccttagccgtctacagattgatattggtacgtactaccaagaattttgcgaacgccaagacggcctctctcaggcagcatgtcaaaaattagatgactatctggctactattactacactgaatgctgagggaatgaagacatttctacgagcaactatgccgcataaaaagggacgttttaaaacactgtttgaatttaaagaccaatcactcgatcgcgatgcaatgcgacttgggatgtttacgattttctggaaactagttcaagctgcacgtaatgatagttctgccgttacattttcgtggttgaatgaaggagttttttattatccaacaggtatttaccatgctacagaacatcaggatagtatctgtcgtgacatcatggaacaggctattaacgaagatgtggagtgcttatttgaatctggtgcacttatcactagcgccatagatagaccttcaatctcaaatgtgatcgtaggtattgactcggcggagggagttgatactcctgaacgcgaattactaaaggaaaaccgcatagggaattataagaagatagctatgatttctttaaacaatgtacctgagagtttgaaagatgcagaacttgattga

SEQ ID NO: 309124 - DNA, 705 bp, Proteus mirabilis
atgcagaacttgattgaacagctatttgagtcaagaggcttgactcgtaatctctccacagacttaccactataccaatataattgtactaaaaagacaaattattggctaataatccatgatgaaccaacaatcacccctgaaagtcaagctgagtggttacataaatgcaaaaatgctactgtcgatcctgctattgaaaaaaatattaacttattgattgtatggaacactagcagcagcaaagtgctcgccagtaagcaagctcaccatatagaagaagattactacttctttaaaaagcatgtacttccttacacgaccaaagaattcgaagcactacgtgagcagattgatcttcagggctttacaaccatttttcaagaatcaattactgccacagatacctttactgagtataaaatgcgctacctagaaggaggctggcaaagtctattatacagaattgcaataaagcttccctttatctccattaatagctcgggtacttccgatctaaccagcctcgaacgcaatattcgagaaaagatcctgcggacaactaatcctaatatactggttgcaacagattcggctattgactctctagcaaatcagatctcctcgccgaatatgctgccagaagatttattaactttaatggatgaaaaattatctgaggccggctatgaaagtgattattaa

SEQ ID NO: 309125 - DNA, 2355 bp, Proteus mirabilis
atgaaagtgattattaaacgcctagaagtacgtaacttcaaagtttttgaaaggcttgagttaacgcttgaaagtgaccatctcatcgttcttgatggccctaacggtttcggtaagtcatctttttttgatgccatagagctcttgctaacaggaaaaatccgtcgctatatcgagcttgaagaactaactgtagatcgacgccgcctgaaaacaggctgtccttggttatttaaacaagctaacgacaatgactggctttcaatccgtgcagagattgtagtagatggtcagagtcattttcttgagagagcagccagtaaagccgcactagacgaacataaaggtatcgctgatctgagtttatccctttatagactagtaagcttcaatgccgaacggggtgaagccattgtacaggaggaaagttatctttcggccttacttggtgagcaatataagcgtgattttgaattatttcattatgtcgagcaagaagaaaatactcggttattaaaacaaaaagaaaaagacaggcagggtcaaattgcacatctttttgatattggagaaattcaggacaaaattgataacattgaacaagcatcggccaaaataggaaatttgtgtaatcaacagaaaaaaaatgagctgaaacaacttctgaataaatgggaaacagctaagcaccagttgttacctgcaggtagttctgtcacatatgaaagaattattgaagttacggatcaaccatgggaccgtgatatagtagcgtttgatgtccaacaatttgaacagtggctatcagtagatggagaattatttcgagtaggacgatttgtaagtaatttcgaacattacaaaaaccaactctataataatgacttggtgaataaactcctaccgaaaaaggaactacaacagcgtcttttaatgttttatcgtcctcttgcacacatagaaaagtgggtagcagaggtcgcttgctttgatgccgcactagcaataagtaatgccttcaaagatataataaaggccattagtgaggatcgcctatcgattacagctccattggcgctgctccttccacccaatatcacggcagaggagtttcagcaacaggtcgtaggacttaaacagctgttaaccaccacagataaagttcaggaatgccatgcaaaactgatacagacacgtgaacaattattaaatgcattcaaggagcatcaatcgcattgcgatcctacaaatatttgtccgacatgcgggcattcttggccgactgtagcaacacttattgaaggaattgaaagccagagcaaattacttgaagctttagctgctcaacaaaataatcaattcacacaagcgctagcaagcttccgatacaactggcaggagcccatcgaacttgctctgcagttctatctggagcaaaataaagagatcattgagcgtaagcgtcaactcgcaagcttcactgaagtacaaatccattggctgaaaaattattatcaacaacttcagaccgcaggtatcagtattcaggatcttctatctgaaaatttcgagcttgtaacacagcaggcaacagacgaactagaacgtcaggttcggaaaaaatttaaacccttagacgatagctgcatttttgatgactacgagaggatttatcgtgaaatctttaaaaacgatccacaagctgttaaacaagttaccccgcaacgacttgaatcaaaaaaaatctatctgggacaacagcatgcaattgcatcttctaaatttatcttagagcgtgaacaagagtacaaaaaagcggagcttctatttaaaaaatctactaagcttaaagcacatctacgtaagctaaaagaaatctatgaaaatgagaaaagattatatcttgaatccatcgttaaagaaattgagattctttttcatatctactctggccgacttatgcaaaattatcagcaagggctaggtatttttatagaaaatgacggtaattcaattgctttcaatgaaacaccaggtcatgttcatgatgcggtattttccatgagttcaggacagctttcagcactagtgctatcatttacgctcgcgctgaaccaacggtacgcaaaacactctctattacttgtagacgatcctgtccaaacgctagatgaaattaatgtagcaggatttatagagttactgcgtactgaattccaagatcgccagatcattatgtcaacgcatgaagatcgtatgtcagcatatttccgttataaatacaaaaaattcggtatgtatgccagtcggatcaactttatggaacaatctcgttttccctttgatacccaataa

SEQ ID NO: 309126 - DNA, 276 bp, Proteus mirabilis
atgaggcgattagcctcacgctttgggcgtgccaacagtattcgtcgtgaccgcccattaacgattgaagaattattttgtactgtacccagtgttttctctgaagaaaaacatgagtcgagaagtgactgttatacctatattcccactattaccttactggatagtttacaaaaagaaggattctatccgttctttgcttgtcaaacacgagtaagagacagcagtagaaagatgcacaccaaacacatgctacgccttaggcgccatgactaa

SEQ ID NO: 309127 - DNA, 2994 bp, Proteus mirabilis
atgctgaattttgaaactttctatggtaatagtgaacctatagctgttattggtctttctggtcgcttccctgatgcacaaaatattgatcaattttggcataacataattaataaacacgatagctctcgtcttttttctgaagaagaactaaaagccgcaggtgtcgctgaacaaacttatcgttcacctgattttgttaatcgtggcgcgccgttagatgaagcggaatattttgacgctactctatttaattattcacgctcagaagctgaacttatcgatccccagcaaagaatttttttacaaggtgcttggcatgctttagagcatgctggatatgccccttgcaatataaccatcaaaacaggcgtttttgcttcagcaagaatgagcagctatcctgcccagcaagatttagcattgcacaatattggccatgtccgtggcatgcaaaaattattagggaatgataaagactatctcgcaacacgtattgcatataaattaaatttaactggtccagcattaactatacaaaccgcttgttctagctccttagttgccgtacatatggcttgtgaaagtttacgctctggtgaatgcagtatggctattgctggtggaattggtatcacatttccacaaaccggtggttatctatatcagaaaggcatgatcttctcaccagatggtatttgtcgtccttttgatgcagaggcaaacggtacttttgctggtaatggatttggtattgtagtgttacgtcgtcttgaagatgccttagtggatggaaacacaattattgctgtattacgtggtagtgccattaataatgatggtcatcaaaaagcgggattcacagctccctccgtagcaggccaagtttcagttattagagaagcaatacaactggccgatattaaaaatgaagatattgaacttattgaagcacacgcaacagctacaccattaggtgatccaattgagtttagtgcattatgtcaggttttcgctgatcgctctcttactgcttctaaatgcgctattggctcagttaaaggcaatatcggacatctggatacagcagcaggtatcactggcctaattaaaacgatattagcggtaaataaagcacttattcctccatctatgcattttaatcacccaaatcctcaattacaaatagaaaaaagcccgttctacattcctaaaaaccctaaagcttggtctagcagaatacgaactgctggtgtttcttcatttggtattggtggaacaaactgtcatatcattgtgcaatcattgcctgactcattagtatcaatcaaacctgaacaagaggtagacaataattttgaatactcattattgcttagtgccgccacaaaagagagtctaaaaaaacttgctggtgattatgcaccattaataaaaattaccccagcaaacattctggctcataatgcattacagcaaagacaactcaacttaccatggcgcttatctatccccttaacaagtgagagtgatatttcactgttagctttctctcaaggaagtgctgattctttaatacaatatggtcatacatcaacaaataagaaaatagcgtggctattttctggtatgggatcacaatatcctgctatgggtaaagtgatgtaccaacattcaacaacatttgccgaaacaatcgatcgttgtgagcaagcatgcctgcaacacttaacatttccgttaaaagaagtcatgtttggcctacatagcgataaacttgttaatgccagttatattcaagcggctattgtcgcctatgaaatcgcaatggcagcacattggcgagcaatcggtattttacctgaaataattgtaggtcattcttgcggagaatatgccgcagccgttatcgctggtttctatacaatcgaacaaatgatgccacttgctgtatatagtggacaattaatggaaagtcatgttaatggtgaaatgattgctgtatttgcaaaatatcaagatattcaaatcattgctaaacaatgtcatgttgaattagctgcaattaatggccataacaacttatcattcgcggggcaacccgatgatatgcaaaagtttactcaaatattgaaagcaaagaatattcgatttagagaaatgaataacgtgtgtgctgctcatacctcttatattgataatattcttgatcaattgatggaatttactgagtcattatcagcctcacaaggaaaaatagccttagtctcaggctatacagggcaattaatttctcaaaaagaacttcaacatccatcatattgggctcagcaactacgcaatacagttatgtatcaagatgcaatacaaacgttagtcaatcatggtgtcacccatgctatggaattaggaccaacttctgtattaagtgatcttggtgaacgtgaaggcattactgagattagttggataccaactgccagaatgggagttgatgaaattcagatgaaacaacaggctgcaacaaccctatttattgcaggctatgatttaccatggcagtcactgtttaaaactcaaggaagttatataccattacctctctatccctttgaaaaacaatattattggtatgaaaaaaaggatagtgaaaaatatcaaccacaaaaaagcgcatttgatttacctattagccaaggtcgtgaaacggcattaaaagcgcttacaacactcgatcttcctcgtttaaactcatttaattcaacacttaccactttacataattattacgtcgataaaatgatatgctcgtgtttaggccatgagttgaatacccccatgtctgtaatcgatattatgcgagcaggacgcattttaccccgctattatcaattattagtacgtttattagaggcctgtgttgaggatggatattatatttaccaacctgtctcttatacacatctgacgctgccgacgatctactctgtgtag

SEQ ID NO: 309128 - DNA, 807 bp, Proteus mirabilis
atgagctacaaggaattacttgtaaaagacaatgctgattggaaagaagcactgaatacgtatctatctttttttaaggttaatttatctaattatatgcatataggtattgaattctatgaagctctcgatatagataaaacggatacattaatattggaaacacttaggttagatgatgagtttgaacagtcattttacagttctaactatgtagttgacgcatgcgttgatgaaaagactattgaaattgtggaaaaaaaattatctatcaacattccacctgaacttaaaggcttgtatttaagtcacggctctttcagtttgtatagagaatttgatacatctgattcaataacaatttttcccattgacgaaaatgcagagatctcaaatgtgtttagaatatttggatttactattctttttagtcaattaacggatactttaactttaacagagcttgaagatatacaaagaagattcttattttttggacgtggattcattgatgaaggaacttctcggtgcctattatatttctacgattatgaactaaaaaaattcggtgagttatgcattcttacagatgaatgccctaaaatgaaaaatgtcatatttcctgctttatttagaggtgagctatctacattctcttttgatgaactaatcagaattcaagttaatcgtcttattttaatgaaattattctctccagattatggtgtcctttccatctatgaaatggaaaaggatcgatattatgacctaattgaatcatgcccacttacaaagcacattttatga

SEQ ID NO: 309129 - DNA, 528 bp, Proteus mirabilis
ttgcaatttaatgtagctattagttctggattttcaattgatgctaggccttattttttagattctagtacaaagataacagtccatgcattaaaagcctgcgatgtgacgccacaaacagcaacatcgattaactaccgtagtcaaatagcacaaaattttgctacaccgactaaactcgatgagaatattgccagtataaatgttgattgtccctatgctgggaatgtacatattacattaagaccgtttaataccttagtcaaaggcagtaatacgggaatggaattaaccggcactaaagcgcaggaaagcggttatgtggtgacttcgctaactagccaacaacaaaatactatttgtgaacctaattccagtgatgcgttaagttatgtcggtagtaataaattagttaatgctatgcccaaagtttttaatcaaacgttatattttaatctttgtgcaaatagtaatattcccgcagatagatactcgggcagtgtcgatgtagcgattttagtcgagtaa

SEQ ID NO: 309130 - DNA, 945 bp, Proteus mirabilis
atgaaaaataataccgattttcgtttcatattagtgatgcgaaaaagtcgcttacaagaattaattgagcgttttaacacttggtcacaagccaaattctatttagaacataaccatgttgaggtaacagattatcttaatgaacataatctctatcaaaaacaactcacagaagctgagcttattttaaaatcatttgggcgttttcagctcttagaaagaggattattgcctagttatcaattttcctctcatgatattgtagtggtaataggtcaagatggcctcgtcgctaatactctgaaatatcttaatcaacaacccgttattgctatcaatccagatccttcaagatgggatggtaagctcttgccctttgaaatagggcaattgaaagagattataattaatacaataaatcacaaaatgccttttaattcggtcacttttgcacaagcaaaaaccaatgatggtcaatcactgttagcggttaatgacttatttattggccctaaaagccacacttccgcacgttatatcttacaatggggagactctcaagaagtgcaatcctcatcaggcattattgtatcaacgggacttggctctacagggtggtttcaatctattcttgctggagccatggccatcaccggaaaagcatcacaccctcttttacaaggatttagctggagtgataaaaaattacaatttagtgtaagagagccatttcctagtagaacaacaggcaccgctttaacttttggcacgattgagccggactctccattgcaattaggatctttaatgcccgaaaatggtgttattttctcagacggtattgaagaggattatttacattttaatgctggctgtattgtgcaaatcaatatcgcagatagacaagggcaactcatcgcccctaaggggcgtcagcctatttaa

SEQ ID NO: 309131 - DNA, 450 bp, Proteus mirabilis
atgaataaagataagtatgttcaattgattgaaagtttttctgccctccttaagaagaacggattttctatttttggttgtgagaatgaagaagtcgatttattggaaaaaaaatacggaaagctaccagaattttacaaaatatatcttaggtctattggtcgtgatgcaggggattttaaagctggtacttggatgttctatcctgaaatagatgatattaacaatgaaacattagatttaatgcatcaaaatcatatcatcccaccggaaaacatgtttgcattcttaatgcatcaaggatacacatcattattctttactgaccgagaaaaggatgatcctcaaatatattgttatacagaatgtgaggaaataattgatataggaaaaacttttagtcagtgtattgaagctgacattaatgaatacttatcttgtttgaattag

SEQ ID NO: 309132 - DNA, 492 bp, Proteus mirabilis
atgaaattatattcagatgctgttttgtggggcgaaaattggcttaataacaacgggattaacataaaatggccgaaggaaggtgatgtattttattttcaattgagtgatggtcgtttgggttacggcatggtcgctttaggtaaaatagatgtcggcccatttaagaatgctattgtcatatacatatatgataattttatactgtcacttgacgaagatattatattgaataaagagaatctgttattaccgacgattataacggatgcatcatgctggaagaatggattttttgtaacattcaaaaatattgattcaaatagtatggatatttatcctgaacattacttcaaaaatccgataagaaataaagtgtatgatcatcatggcgcagtaactaacttgttaattgataatatacccgtaggtgaagagtcaattcagttctataagagtattataaaatctatagaaaatacattaaattaa

SEQ ID NO: 309133 - DNA, 849 bp, Proteus mirabilis
atgcaacaccaaaatactcaaaagaaaatactacgtactatttgtccagatgcgaaagggcttatcgcaaaaattactaatatttgttataaacatcagctcaatattgttcaaaataatgagtttgttgatcatcgcactggccgcttttttatgcgcactgagctagaaggtatttttaatgatgaaacctttttagccgatttagatgatgcacttccacaaggctcacagcgagagcttaatactgccggtcgccgccgtatcgtcattatggtcactaaagaagcccattgtattggtgacctcttaatgaaaagtgcttttggtgatctggatgttgaaattgcagcagttattggtaatcacgacacgctaaaacaccttgttgagcaatttgggatccctttccatctcattagtcatgaagggttaacccgtgatcagcatgatgaaaaactgatagcacaaattgaccaatacaaacctgattatgtggtattagctaaatatatgcgtgtattaacccccgcatttgtacaacattacccaaatcaaattattaatattcatcactctttcttaccggcatttattggcgcccgcccatatcatcaagcctatgaacgtggtgtaaaaattattggcgccacagctcactatgtaaatgataatttagatgaaggccctattattactcaaaatgtaataaacgtagaccacactttttcagcagaagatatgatgcgcgcaggacgggatgtagagaaaaacgtactaagccacgccctctattgggtgctctcgcaacgtgtttttgtctatggcaacagaacaattattttgtag

SEQ ID NO: 309134 - DNA, 486 bp, Proteus mirabilis
atggtgctaatcaggtttgaatcaacaaatgtgaccagagagataaacgtaaatagtttagatggctttgattttactaatgatttattacatacggccatttttgaaaaatattcattaaaaagagccatctttaaacaagctaatttacgtggtgcaaactttgcttattgcttattagatgaagctaattttactgattcattattgatgaactctaatttcatggaggcttctatggtaaatacaatattagtagattccaaacttgcaggcgccttctttttaaatgctaatttagaaaaagcaaatcttagtggtgctgacttatttgctacaaatatgaatggcgcaaatttgaaaggtgcaaatatgaatgcgagtagaatcagtgatgctacatttgttaatgcagagtatgacaatgatacaatgtggcctgataatttttcccctataaaggctggagctagatttattatttaa

SEQ ID NO: 309135 - DNA, 243 bp, Proteus mirabilis
atgtctggaagtagacccataatcatgggtaaggcaatggctttaaatggagacaaaacgacgacgggagccaattgcatcgcgactattgaaacggtaacttgctttaataaaaaagcattacgagttggagatccaacaacaaaatgccccaaatgtggtcaggctggggtagtcatctctgggcagccagggtttttaaatcatggcaagcttcaagcggttcatgattcactggtttaa

SEQ ID NO: 309136 - DNA, 285 bp, Proteus mirabilis
atggcaaaaaataccatgaatgagatttatgttattaatttatcctcaaataatgcagtttgtggtgtaaaaattaatgaaattctggttgcagataatacaaaaaatcctaaaggtaattattcttccggacaaaatatatctagtatattaactaatggaaaaaataccttaggtgtaattatgtttaatgggtcggtttttactggtgaagaaaacttacctctgatatgtggtgtgaagtcgaacttaagaaattatctgcaaatggcgataacaccttaa

SEQ ID NO: 309137 - DNA, 297 bp, Proteus mirabilis
gtgatggatattgatttttcaaaaaatagcggagtaatcacttttaatgatttttcagttagtgatgatataccacttgaaaatcaactcaatgaattaaaagaagatatgttacaagtagaatttcctgatggatatcttttagacataggttggagaccttcatttgaaattgatggacaatttaaattggttctaattaaagactatgactgggaacagccagtttattcagattcagcaagtaacctgtttgagttaaaagataaaattcaaatagcaataaataaattataa

SEQ ID NO: 309138 - DNA, 756 bp, Proteus mirabilis; identical to SEQ ID NO: 301109

SEQ ID NO: 309139 - DNA, 1230 bp, Proteus mirabilis
ttggctatccttaatgaatatctatctaaaaatcatttaaaaaaagcgaacaattttgccaatcaagcacaactaatacaaagtcatcatttagaacatccacagactatcgaagcgatgggaatgcttagtcaattacgtaaacaatggcaaacctctcatttcaaatatttacaagcacaaacacaagccagtgataatgcagctggtattaacgctatcacaaaagtaacacgtatggcattacaatctttaatgctaggtttagggggatggcttgctattgataatactatcagtcctggaatgatgattgccggttcaatacttttaggtcgagcattagcccctattgagcaagtgatcaatgtatggaaaagttgggatagtagtaaagcagcctacaatcgattgacaactttattaaaaacataccctcaagaaaataaaaaaatggccttacctaagcctcaaggccaattacttgttaatatcgatgaagccgtgtatccacacagtgacagaatattactaaataatatcaattttgctctattaccgggagatatactaggtattattggcccgagtgcttctggtaagtcttctttagcaaaatttattgtcggtatatggcaggtcaaaaaaggcattgtgcgattagataatgcggatatctttcagtggagtaaagaagaaattggtccacatattggttatttacctcaagaaatcgcccttttccccggcactatcgctgaaaatattgcacgctttactgaggttgatcctcaaaaagtgatccaagccgccaaaatggcacatgtacacgagatgattttacgctttcctcaaggatatgaaacccaaattggtgctcacggtgaaggattatccggcggacaaaaacaacgtattgcattagccagagcattatatggcgatcccacgttagttgtcttagatgagccaaattctaatttagatgatttaggtattagagcgttaacacaggcgatcgaaacattaaaacagcataaaaaaaccgttattttaattacccaccaaaaacagctactttctgtcactaataaattattagtgatatttgatggaaacaccaaattattcggtccaacggcgtctgttattgctgaattaaataatccaactatcacaaaaacggcaaacactatttcttcaacaccagcaacctcaaataacgcttaa

SEQ ID NO: 309140 - DNA, 1446 bp, Proteus mirabilis
atgtttaaaaacctatttgttgttttacaaaaaattggaaaatccttaatgttaccggtatctgtgctgcctattgccggtatcttactaggggttgggtctgcgggactatcatggatccctgtctctgtttctcaagtgatggcagaagcgggggggtcggttttctctaatatgccactgatttttgctattggtgtggcgttaggttttaccaataatgatggtgtctcagctcttgcgtccgtcgttgcctatggcatcatgtcaaaaaccatgctggtggtggcaccttgggtcttaggattatctcctgatagtgttgaaatacaacgtttaactgatacgggggtactaggtgggatcattgccggtattattgccgcatcaatgtttaaccgcttttatcgtattaaacttcctgagtatttaggcttctttgcaggtaaacgttttgtacctattatttctggtctgattgcgatttttgtcggtattcttttatcctttatttggcctcctattggtactgctattcaacgtttttctgagtgggctgcgtatcaaaatccagccgttgcatttggtatttatggtgttgttgagcgtgcgttagtgccatttggtctgcatcatatctggaatgtaccattccaaatgcaagtgggtgagtatgtaaatagcgcaggacaagtgttccacggtgatattccacgttatatggcaggtgatccaactgcggggatgttatcaggtggcttcctatttaaaatgtttggtctacccgctgcggccattgctatttggcatacagcacgtcctgaaaaccgtgtaaaagttggcgggatcatgatttctgcggcattgactgcctttttaacagggatcacagagccaattgaattctcatttatgttcgtagcacctattctttatgttattcatgccattcttgccggtttagcatttgttatttgtatcttgttaggtatgcgtgacggtacaagtttttctcatggcttaatcgactttatcgtattgagtggcaatagcagtaaactgtatctattcccaattattggcatactttatgcgataacttattactctattttccgtttcttaatcgtgaaactcaacctgaaaaccccagggcgagaagtagaagataaaaacgcgaaacaagcggataaaagtgcgatgggacaatctttagtcgctgctttcggtggtaaagataatatcagtagcttagatgcttgcattacacgcttgcgtattggtgtaaaagagattgataaggtcgatcgtgatgagctgaaaagactgggagcggctggtgttgtggtggttggatccggtattcaagcaatttttggccctaagtctgataatttaaaaactgaaatggatgaatatattaggtctttggatttgacgaaatag

SEQ ID NO: 309141 - DNA, 696 bp, Proteus mirabilis
gtgcagatatttccattaaaaaacacttttgtacaagatagaacctatatattacgtgatgaaaaagtggttttaccaggtataacaacggttttgcaacagctatttatgccatcgggagagaaagaaaaaacagtcagaagagcgcgtgagattatcgaagataatgataaatatcaggatgataaaattaccaacgatatacaagatactcattcaccgattatcactcaaatgggcaaatataatgttgaactcgttcctttacctggatcaaatagcctgttggttaaaacgagtcgagaaggtttagctttagttagctcacttatttcacaattagataaaccgaaaagacaagttgaattgtcattatggataattgatatttctaaaagtaaagccgatagtttgggggtgaattggcaggggagttatggctcgggtaaaaatacatttttctttaataccgctagtttaagtgctgtatctggttttagttttttaagtaaaatcaaagcactcagtgaggaaggggaagctaaaatggtttctcgtcctattttgttaactcaagaaaatacccccgccatatttgataataacaccaccttttatacacaaattaaaggtgagcgagttgcttcattagaatctacaacattcggcactatgatcagtgtattgcctctgtaa

SEQ ID NO: 309142 - DNA, 183 bp, Proteus mirabilis
atgttttttacttttgaagaaaaatttggagtaggtttcctgccggatataatgcaatatcttaatgaaatagaagttgagtatgaaactgaaatatctgcttattcacaattaaggaagaggagtaaagaaacctatgagctgactaaaactttttctggaacgggatactattttacttaa

SEQ ID NO: 309143 - DNA, 396 bp, Proteus mirabilis
atgattatcaatcttgaagatggcgccgagaaaaaaagtgatgatgaagatagagaagaagggattgaaaaattacctgttattaatcgcacaaatatcagcaccgtggcccgagtttctgaaggcggtagtttattaattggtggatatacacgagaagataacataaaagcagaaaacaaaattccttttttaagtgctatacctttagttggccgagcatttagctatcagtcagataataataaaaaaatggtgcgtatttttatgttacaaccgcgtttattagataaaactgatacgcacggattggactctttaactgaacacccatttttaccgatggataaaaaaacatctcaagcgctaaaacaaattcaggcatttatgaggtga

SEQ ID NO: 309144 - DNA, 696 bp, Proteus mirabilis
atgaaaaagaattttctctattttaccttatttacggctatatcaacatcagcactggctgtaacaccttcagctcaattacagatcaatggggatataaaaccaccaacttgtacaatcaatagttctaacaatacagaagttgtctttgactatggccgcatatcgccaagcttgataccacaatcttcaaactatcaatatgtggatatgaaaccagaaacaagcatcagtattgaatgtgatgctaaaacttatttgacttttatacccactgatacatatggtgatgtagctcttgattataatactagttttgatagtgcctggtttcgcttagttgataaagccaacccagataaagcagttggggcttcattttttaattggaaagatgcaactgttgacggaaaaacggcttttataagccgagcaacacctaaaacagctgaagtaggggtatctgtcttagttaaaaataatattcatgggtggacatcagagcaacaagaggatgtatccgccgcatctcttaaattagtctcaggtgaaatctttaccacaaaatttataccaggaatatcatctcatacatttattctttctcgtgataagctagctaaaaaagcgatagatattagtaatggactcgattttattggtgaggccgtgttaacattctctttcggtgtttaa

SEQ ID NO: 309145 - DNA, 543 bp, Proteus mirabilis; identical to SEQ ID NO: 298428

SEQ ID NO: 309146 - DNA, 543 bp, Proteus mirabilis
atgaaaagaaaagttatagcactagctactattctttctgctgcatttgctggctcatctatggcgtatgatggaacaattacatttacaggtaaagttgttgcgcaaacctgctctgtcaatacaaatgataagaatttagcggtaacattacctacagtatccaccactacattaaatgaaaatgcggctactgcaggtcttactccatttactattcatttaactggttgcgctgttggtatggatggtgcacaaagtgtcaaaacatattttgaaccttcaagtgacattgatgtaaccacacacaacttaaaaaatactgcacgaactaaagcaaataatgttcaagttcaattacttaactcagatgcagcaacaacaatccagttaggtactgattctgcaacacaagatgtccatccagtacaaatcgacaatgctaatgtaaaccttccatattttgctcaatattacgcaaccggacaatctaccgctggagatgtaaaagcaaccgtcaactataccattgcctacgagtaa

SEQ ID NO: 309147 - DNA, 180 bp, Proteus mirabilis
atgtttcttaaaaataatggatgtgaaatatatgactgggggggaattgcctttggtgatatggacggcattgctaaatttaaattatcattcggaggtgaagaaattgtctcaaatatttatttttctccattatattatttgacactactaattagagagaaactatggaaaaaataa

SEQ ID NO: 309148 - DNA, 174 bp, Proteus mirabilis
atgcattttattgagaataaatacacgattataaattgtgcaaatttcacaaaagcaaatgaaatcgcagcgccaatgagaccatacttaggtataaatataagaagtaatataacgttagtaataccagatgatatagttattaatgcgagacgagatgttttttttgaataa

SEQ ID NO: 309149 - DNA, 177 bp, Proteus mirabilis
atgtttccagaatatcgtgatttaattgctaagcttcgtcaaactgatccccatttccgtgccctgtttgaacaacataatgaacttgaccataaaattgttgaattaaaaaaacaaaaattacgtctaaaagaagaaatacatcagatcttaaaaaatcccccagaagatgagtag

SEQ ID NO: 309150 - DNA, 597 bp, Proteus mirabilis
gtgtccacatttattaaagcacaacacccacccggccagctccgacgccgaccaggagcacattccggtactggtcgtgcagatgccatccgaaccgtcggtaatccgcttctacgtcgcgctacttgccgcgatgggcgcgccattgcgcccgcgcccacggctgccggaaatggagcaattggcgctggcactgctacgcaaggtcggcgtgcgcatgctggtgatcgacgaattgcacaacgtcctggccggcaacagcgtcaaccgccgggaattcctcaacctgctgcgtttcctcggcaacgagctgcgcatcccgctggtcggggtcggcacacgcgatgcctacttggcgatccgctcggacgaccagttggaaaaccgcttcgagccgatgatgctgccggtgtgggaggccaacgacgattgctgctcactgctggccagcttcgcggcttcgctcccgctgcggcgaccctcgtcgattgccacgctggatatggcccgctacctgctcacgcgcagcgagggcaccatcggcgagctggcgcacctgttgatggcggcggccgtcgctgccgtggagagcggtga

SEQ ID NO: 309151 - DNA, 585 bp, Proteus mirabilis
atgaaagcttatacttataactctcaatatcaacaatcattcttgactgtaataaactatgctgtacaggagtttcctcgtacacttgctttacgagttgatcttcattttccatcttattataaatacggtgattcaaataaagagataactcgttttattgagtctttaaaggctaagattgaagttgattgtaaaaataagaatcaggattggggtcataactggagtaatcgtctacgatatatttgggttcgtgagattggagagcttaatcatcgtaaacactaccatattttattgttattaaataaagatttctattatagtgcgggaaagtttgattcaaagactagtttggctggattaattcaacaagcatggtgtagtgcgttgggaattgaaagatttcaatgcaatggactagttcattttactgagaacggtcaacatatgctcaatattaatcaaaggggctactctcagcaattagcaaatttacttcatcgtatggattatttagcaaaagatcacacaaagtgttatcacgatggatatcggtctataggaatgagtcgaggataa

SEQ ID NO: 309152 - DNA, 219 bp, Proteus mirabilis
atgagttctcatactcagactatgaaaattcttcgtatttctgcggttatggccaagattggtgtagcacgttcaacgatatacgactggctaaatccaaattcaaaacgctatgatcctacctttccgaagcaaaagcagttgggaaaaaagtctgttgggtggatagaagccgacttagatgaatggttgcatcaatgtggtagaactaagctataa

SEQ ID NO: 309153 - DNA, 552 bp, Proteus mirabilis
atgagctttgtatatgaagagcctctcgaagattactaccaccatattcttaatcgaattaacgagatacttcaagaaaaggggttgactggaaagcaagcagaaataaataagcactatatacttgctaatcttgaaatttgtttatctattgataaaaaatatatttcggattttgtcacgaaatctgataagaaaaaatatgaacaatttactgaatgccaaaaaaacttttctcttgccatgctttctgtaattaaatatcgattaaccgaatgttgttatgcatttgaatacccagatgcatctctcggcttttattatgaactggtaagccgtgatattattttatgtaaaaaatattcacgcaggattgattgttgcccaccagaattaggctcagagctatccctgttatttatccgagccggtttaattgttgagcttaagatgttacagaaaacggttagtagtatgatgtctttaagtacagttgaacctattttttttctccttttgatcctaatatatctcgtactgaacataaattga

SEQ ID NO: 309154 - DNA, 486 bp, Proteus mirabilis
ttgacaaaagattactataaaaggctaattgatacttcttggggagagaaaaaattaagtacatgcaaaatttttccgtgcaaagaacatgtttcggaagcagtcgctaaagatctacttacaagcatgaataaatattattttcataaaagaatgtttaatggtactcaaggaagttggttgggaactttaggagcatttgatattgaggctagccgatggcacgagccaaacaaagcaatttattatgaaactaataatagtaatacaatttcagagagcgttagagtgaaactttcagattatggttttagtgtaacggcaaaaagtttgtatctacggcataaaaaaataataaaagatagctaccctaaaatcaaacattattataatttcttacttagccgagaatatgcacttccttggtattataataactattgttattatgacgaaattcttaagcttaaaatgaaagaaaaatga

SEQ ID NO: 309155 - DNA, 1584 bp, Proteus mirabilis
gtgcttaaatatgcattacaaaaggattcaaacactttaagacatatagactctgtagaaaatggcttaaaatgcaattgcatatgctctggttgcggagaccgcctgattgctaaaaacaataaaattaacgggacaaaacatcattttgctcattactcgaaagacgagaatagtaattgtttaatgacccaacttcacatagtcgcacaacactttttccttgaatcacagccactttttcttcccccggtatcttttcgatacaaggggcaagtattagaccaaagtgaagtacaagccaatgtacataatgcaaacttagaaactcatgttggaaaatacattgcagatgtgtttttggagaccaatattggcaacatagtaattgaagtttttgtcactcatagaaatcaatcagataaaacaaagtattaccaagaaaataaaattccttctattgagtttgatttaagtacttatcttaatcgtagtattgaagaagctctttttgatttaaaaaccaacaaagtgccttacaagtggctttatgagtggtgccgagatcagcttgtagataaacatgaaatattgctagcacaaaaaaacgaaagaattgaaaaaaaacgtattcgtagtgcaaaagacacagcaagaaaattcatcaaaggcaaccatattcttttgccaagccttacccaaaagtttgagtgtataattgacggttatacatataaagacgaggtcagcatttattctcgatcagaacagcaagtagacaatgttgtccaagttaaactgacggaagaatttcttttacttaaagcgtcgataggtaacagctatatttgggtagtattattattaaaggattatttaccaaaagagattgataaccttgatggtagtgtaattattcgtactccagcaacatctgaaaataatcgagcaacatggacttggttaaaataccctaaattaattcaaaaaattaagaaatatgaacaaaatttctttgatgaatccaacttaaaagcccaaaaggcaaaaacaacagaagacgcagtaaaacaagcaacaaccaatgctaaatcttatctaacttcaaaaaatcacttattcaaaagagactatcccaaatggtcaaaatggatgataaagaataagttatttcaatatagcccttctaagaaacaccccaatttacctcatgcacttacttatatccgaagctacccttgtctttggccatttgaaacatgggatattttagccttgagtctcttagctgaaatagtcgacaataaacctaaaaatacgcaaatactctacgagactttattcaatgagctaatagagcatacagggctacataaagattttttcgatattgagcagcacattgccccacatgctgttgctgttgataaaaaatcgattgtactacgttctgaaattatcgaagaggcacttaggccatatgccaatacgggagctatcaattgctttaaaggtggatttaagcgtttaggttcgctaatggaagccatcgatttgacccctcactattattttggtcgctaa

SEQ ID NO: 309156 - DNA, 1377 bp, Proteus mirabilis
atggttgataatggtcttgatgctgtcaatgaaatcattgagcagtataaaaaatataactatccgatgtttattgttaccgataagggagaaccggaacaaattggcacattcgtcatcataaaattaaattccaatttctatctactgaccgctgcgcatgttgccaatatttgcagtaaaaaaggttactactacttttttgataatagtcacgttgagttcactggctgccttttaaaaaccgaaggctcaccatctgatgttactgatattgcaattctaaaactgaatgatgaatttcaggagagtggtcttaacgtcgttactgaggaattgcttcctagacccggacaggtttcagatggcatacactcagttatgggatatccaatcagtaaaacaaaactgaaccgccccgagaaaaaaattaggtcaaatctgcacgttttctataacacactttgtacgagtgacgtttacgaacataacgatttaaatattcaggatcacatagctatcgtatttgacaaaaaaaattgtttatcaagcgaaggagaaaagatcacattcccagacccgcagggaatgagcggaggtgggatatggtgccacgatgttatttctggtaaaacgttgctcgtgggcatagcttccacttggaaaaaaaacaataaatgtctatttggctcccggttaacacttataatgggtgtaatacaaatatctgatgaaatagataaagctttcagtgaagcagctgaaagttatgaattaattgtcaacctaattgagctcaatcaaccagaatccgccagtaattatataaatataaaccgagcttactttagaatatgcactaatttctaccaatccctgatgatacttattggggatggaaagccctatcctgccattgtcattcttaggtcaatgcttgaaatattcacgaaggctttatacctcgaatacgtagaaaagcctaaaggtaccgatatttggccaatgatatcaggtgaaaaaagctttcctaactttgcaaacatgtcgaaggagcttgatgaatttttatctgagcattcttatggtcccgatgattttttcaaacagttcactaaacgtggattaggtcaatacgaaaagttttcactatttacccacggtcgcggtgactatgtcattgctctgatgaagtctgcttacgctccccttcacttggatgatgtacgggatttgatattaacggccaaaggaatgtatgaagtttttgccctcttttattttggcgtacagggagaaaaacataaatttaggctcattagcgaaaaactgatgaaatcaagtcagcataatcctgataaaagtaatcacgaataa

SEQ ID NO: 309157 - DNA, 1014 bp, Proteus mirabilis
atgccagagattaaaattgatgaaaacttgattgattggaaagaaatttccgagtttgaatggaaaaacctgcttcttggaaatggtttcagtatcaatatctggaaccgatttgggtatggaacactgtttgaggttgcgcagatggaagaaatcgaccatcacctcacagcacaaagtctagccctttttgagcatgttggcagtactaactttgaagacgttttgagaatcttgtatcacgcgaagcttgtagatgaacagcttggtagtccacaagatgaggagattactgctctatatgaaagcgctaagagtgccttaggctcagccgttaactttgcacacataccgccagcacttgctaacgtcgctgaaattaatgcgagacttagatgttacaagaacatttttactacgaactatgacctaattccctattgggccattatgaattccgatacgtggagatttaaagattatttctggggggaagacggttgctttgattcatctgatacagctgttcctgcggacagaacaaaaatccactacctacatggcgctatccacatcgtagagcttccgaatgggatgactaaaaagctaactgctaatggactgaatcggctatcagaactcttcgatttagaccattcagagcagttccctctatttatcaccgaaggtacctctaaatggaaattgtcacggattaaacggaatgactatcttcgattttgttacgaaaaacttgcgagcagtaagaatggattggtggtaattgggcattctttgcataaagactatgaccaacacattattgatgcgatcctgcagagcgattctagtaaagtagcaatcggcgtatggccgcaccagacaggggtagaaattatcgctctgaaatctcggctaaccacagacctgaaaggcaaggaactttatttcttcaattctgaaagccatccccttgcttcagtagatctgaatgttcgagataaagatgcataa

SEQ ID NO: 309158 - DNA, 1380 bp, Proteus mirabilis
atgtacaacaacctctatgccctcacagaaagccttttttgggttgatcgacttttagaacaggaatatgaaaatatcggattgaacgaattactaattgagttagctgaatataataaaaagatagattcattcattatcaaacaaacaaattctgtacaagagtcccggctgaatgtttacatggcggggaatcgtaatattgaaaggtataagagtggtttgttttcaatggacagagtcattcttgatgacgttctgtattcattgagcctacgatacagagtaaatctatcagaaaacatacttgaaaaatttatcgaaagcgatagcaaagggaaggttgaacatctcaggaatgaaattgctaggtttattaggtttgctaaagaaaactttgatcttatccgtggagagtttatcgtttttgtacgaagagaatcttctattacagattcggagagagctaatagaattttagaagataactctgatactaatttcatatttcgatatctccccactaatattgcccgtctgtatgaaaatagactatccgtacagaatatagaacgtctgggcaatacaaataaatttcggttgttaaacagaaatgttttaacgaatgaaattatgttgaaaattaaagactgcgaaagctcgtatacaaatggatatatgtatcaacatataaataatgccattaataatgatgacggcaccatgtctatggaacttgtcatgggaaagcatagcggaaaaaaaagttatgaacggtgggtacagggagcaaaaaatcgtacagttctctttcattataaaaatcttattactgatcttaaccaagcgcattcatgcagagcgtccctgggggcatattgcccatttcatggagaaattcttcgtaaactggatcaaaagaatgaagttcagagggttaaactctctattgacgttccatttctagaggggcttactccaagcgaactctacaaaattagaactgactacgaatccagttttaatgccttccgctctgtgctacgtgaagctgcgtatgacatagaagcagaaagtgacccatataagagacagctgataaatcagcattttgtcgagcgcgtatgggatgaaggattgaccgatattgagcaaaaaatacagacctataagcggaaaagtaataaagaactttttcttaacattgccccatcattgataggttttattggagcaccaaatccagtgtcgttgactacaggagcctttacgattctaaaagaggtttttaatataacaagccattcttcagaaataaagagtcacccttcatacttccttctcatgacgtcaaaaggaaaaaataaattttatgactga

SEQ ID NO: 309159 - DNA, 519 bp, Proteus mirabilis
atgacgattcttgaagaaatggaagctgaagcatggcacatcctaacaaccatctatacgtatcagcggttgatggaaggccttaccaatagcagtacaagatatgagcttgccaatcagttggtagccctcaatgcattgttggaaatgttggtgatccgtttagcgcgtcttgcggataaaaggaaagatgtgagatctgtatcaatgtttttgaaacgcggctcgtcttctgcttcacccgaggctgtgaaattggcaactgaaaagttccttgcactcgcagaaccagtattaaagattaggcatgagcagattgcacatatgaagcctggcacactcagtagcttcgagtctcgagaacttccaaatgaagctctgagagcaactgaggctctaatcgatctcattgacattgctagagatcaccctctgtcttacacataccgagttggctcacaggagcctgtcattaatttgagagcttcagtagagactagcggactagttaaaatctaa

SEQ ID NO: 309160 - DNA, 171 bp, Proteus mirabilis
atgtatttccatatcaactctcaacatggtgatgatataaaatttaaagaactatatgtcgattataatgggtttttaattgggagtaagagagatagttcaggaaataacaatgaactttataaaataaaatttaaaaagattgaaggtgaatgtattaaaaataaatag

SEQ ID NO: 309161 - DNA, 336 bp, Proteus mirabilis
atgattgataaaataatgacatatgttaataagttaacagaggttggtgtttttaataattataaatcaacaaattatatttccgatgtgtctaatacccctgctgtatataatacaaatattaaacagtttagcttaaataatgtaaataattatgtttatcttggatcaacaaatagtccactacttaataatatgggaattacccttgatgatgatggaaccttaatgttaataaaagggaaaacatatgatttatttaccggattaattcaaaagtactttaatggaggttttaaatataatgtatttccatatcaactctcaacatggtga

SEQ ID NO: 309162 - DNA, 11010 bp, Proteus mirabilis
atgaataagcattgttatcgtttaatttttagccgcactcatggggaattacgtgttgtatcggaactggcgaaaagctgtagcaccgattcaggccaaacacgaggcgtaaatggtaatcgtctatgggtcactctacgccgcacctcattactgctgtggttagctttgtggggtacctcagccatggcgagcagcattattgccgataacaatgcaccacaaaaccaacgcccggaggtgatcaatacgcaaaatggacttccacaagtcaatattgcggcaccaaatggctccggtatttctcataaccaatataaacaatttgatgtcgataaccgtggcgccattctcaataactcggcgatgatgacttcaacacaaaccgcagggatgatccaaggtaacccgaatcttgacccaaacaaagctcctgcgcgcgtgattctgaatgaagtcaacagcaataacccaagccaaattaaaggctttctggaagttgcaggcggtaaagcgcaagtgattgtcgctaacccatcgggaattatttgtaatggctgcggcactatcaatgcaggtcgtatgacccttaccacagggaaaccccaatttaaccaagacggtagccttgcaggatatcaagtagaacgcggggttattcgtgttgaaggtggaggattaaatgccgatagtcgccacgatacgcagtatgttgatctgctcgcccgtgccgttgaaatcaattctggtgtgtgggcgaaagaaaaaatagcaatcgttgcgggtaaaaataaggtcgatacgcaaaataaagccactccgatagagagccaaactgcacaacctgaatttgccatcgacatgggccaaatgggcggcatgtacagcggttatattcacatggtgggcaccgaaaaaggtgtgggcgttcgcaaccaaggtgggcacatacaagcggataaaaccttaacggtgaaaagtaatgggcagttagtctggcaatcagcaaaaacacaagaagccgttacccaagccaacggggatattaccttattagccaaagacaaccttatacatcaaggtaaattacacagtggtggcgtcttaaacgtagaaagtcaaacaggttcagtggacaactcggggacacttgctgccctcaaagacgttaatatcaatgcgaaaggcgatatccacagtcaaggtaacgtgctcgcgggcagtgataataaaagtaagattattaataacgccaatatcatattagccagtgagggaaaaattgatactcgtggcacattgctaagtaagcaaaatatcactgcaacagcaaaatcactggatttaagccaaacacaaatcgcggcatcaaacttggcgctgacatctaaacaaggggatatcgcccttactcaagcaaaaattgatgtgagtgatgccaaactcagtagtgtacgtgatattcatactcagcaaattcaaattcaagcccaacaatggaatatcaacgccaataacctgtttaatcaaaatggaacttgggtacaaacagggaaaaatgagagccaattttccctcaaagggcaactaaataatcaaggcggtgcgattgaaacccaccgccttaagctcaatgccgattcactgaataaccaagcaggccgattagttgcattaagcaaaagccaacaagattggcagataaaaaatagcattaataatcaacaaggtgaagtcggggcaaatggcgatttaactcttaccgcaaactcaattgataatcaatcgggcaccattaaaagccaaactaaactggctttgaatgccaaagagcaaattgataatagcgcaggtaaccttgtggcaggaaatgccgtcaacctgcaagcaggcaaatcgctgaacaaccaatcggggacgattaatagccagcaagttactgtcaccacggacaatctcaataatgcactgggtaaactgattagccaaacaacgctcgatattatggctcagcagcaagtgaataatgccaacgggtttattggttcaggtgataaactcactctcgctacgcaaaatttggtaaatagccaacaagggacggtgcaaagtgagacacaatcaaatattcatgcgaaagaaattgataataacaaaggccaactgttggctggaaaagacattttactcacaaccaatgcattatattcagaaaaaggcaatgtgagcgctaaaaatgtcaatattcaggctgatacaataaataatattgaaggtaaaataattggccaagataaactcactatcgcccttaataatttactgaataatacccgcggtaaactgctcacgaataatgcgcttactgtatctgggcagggtgatattcataatcagaaaggtattttgcaaagtagtgaaaatgccactgtcgcattagaaaacatacacaacgaacaaggaaaaattgttgcatcacaaagacttacactaaatagcaaaaataaacttgataatatgcaaggtgaaataaatgctgaattattaacaatcactgctgataaattaaataatcagcaaggcaatattattgccactaaggatcttgatataacgtcaaatcaaactattaataacagacaaggtctagttgaagctggtcagaagttcatagccaaaacacaacgtgattgggataaccaacaaggcgttacacaagcaggtttatcaatgactgtcagcgcaaaaaacattgataatacaaaaggacaattacaatcaggtggtgagttagttttcagtacaacacatcatgttattaatacactgggaaaaatagccgcacaaaacgctttgtattggcaaggtacgggatcgagccaatttaataaccgcaacggtaaagtacagagtaatggcaccttaacgctaaatggcggtcaattagcgaatcaacagcaaggtaatatatttagtcaaaaaacattacaactcttattaaaaggcgatttgctcaatcaagacggtaagctgaccagtaatgaaaacactttgattaaaacgaataatctgattaatacacaaggagaaataaacgcattaaataatttggatattcaattaattaatcagttagataatcgtaatggtcgtctttttggtcaatattcacagaatttaaatgcgaacgatattctaaatgtatctggttggatgggaagtctaggctcttggtctgcaaaaacaaatatattcaataatcaaatggggcaaatccagagtcaaaaagacgcacatttaacaacaaatacctttaataatgagaaaggccttttccaatcaagtaataatattatattgcatattgcaaatagcattgataacacccaaggtaaaatcagcgcacaaaaagaaatttattctcaaggtcttcattctaatcaatcaacagatctcatcaaaaacaatgaaggtcagtggttagcggggaatacattaaaactattcgctttgaatattgataactcacaaaaagggttactgtatagtcaaaagcagatgcaacttgttgtcaaaaatgagctgaataaccaacaaggtaatatccaaagtggggataacctcgccttaactgcccaatcactgcaaaatcaatcaggattaatcgacagcctacaggctattaatttgcgtttatctaacttattggataacacgttaggtaaaataagaagtaaccaacatcagaccatccaagcctcagatattcaaaatcatcaaggtcatatcagtagccaaagtgaacttaccgtcaacgccacacagcttgataatgaccaaggtctgttgattagccaacaaaacagtgattaccaccttgagcgagtcaataaccagagcggtaaaatacacagcggtcaggggttaaccgtaacagcagacacactgcaaaatcaacaaggtcagctggtttcaacacaatcactgactatcaatacaacgcaattagataatcacaatcaaggtgttttaagtagccaagcgggtttaaatctcatcacgactaaccttaataaccgtgataatggtttaatttggggcacaacgcaaaatgtgatttcagcaaaaaatatcgataatacccaaggctatttacagagccatggcgcattgaccttagataatctaacgtcactagataaccaaaaaggtcatattttagctaatggggcgattgcgataaatgcgaaagacgcccctcttgcctcgaccttaatattattgaatcagcgtggcgttattcaaagtggtgataaactcacacttaatactcagactttcaataaccaaggaggcacgttacaaagccaaaatgctttaacgcttaccgcaaaacaagatcatactcaacgtaatggcgatatattaagtagcaatcaatccgtttccctttctatttctggtgtatttacgaatttagctgactggttattacctgcttcactgacgataaaaagccaaaatgtgatcaactcaggttcgttagtcagccgtacattaaatttcaatacaggcttattaaaaaaccgcggtcgccttgaagccgatgattttacgtttaatctcacaagtctagataataccgccgctattatgggcgataatgcggttattcacgcacaatcaatcgataacaacagtaaaaatgccgttattgcgatgacgcaatcactcgatttaaccgcgaacaataacctgataaatcataacggagccttgatttatagtggtgataaattatcgcttaccagcccagagattgaaaataaagccagttttattgaagctgaaggcgatgtggctattaaagctgatcaacttcgtaatttacgtgaaggactagagattgagcgagatgctgagaaaaaggattatcgttggcatcgttaccattatttttggcgttcttataattcaaatgtgattaccgacgctaccccttttgcgccgaccactcagaagttaacatttaatgatgataatgaggcaattaataataaatacggcacattaaccgctattgatgcttctaacaaaaaggcgcaagtcctagttaaaaacatcaatgacaacacaccaatgagcttatgggtgcattacgaatcactgatcccaaatagtgacggcacctataatatgactttttatcagacgacaggatttgaacagataggtggtgtacctactccttatcataatacagtatggcgagaatttacgggccagcctcgaattgagcaatgggatccagagatccatgtcagtagttatgatttaaaattcataagcgattatagtaatttccgtgaacgaacagtctcaggatcattgactcgggataaattgatttctgaaggagttggcgcacgtatcctttctggtggcaatatgaaccttaatatttcaggactattgcttaatgatgccagtgtgatcacctcaatgggaaatcaatccattgatggaaaagctaaaatagagaataacgcctattccattaatgaacgccgtcgagagtatattgttgatcactatgataaggatactaaacattggtatccaagttttgataacgatgaaaccatcgcattagccaccattgatagtattatttcaggtaatggcgatgtggcgatcaacggaacatcgatcactaataccacggtgaatgcggcacaaattaatgaaattgaagccgcattaaacgcagttaaggcagagcgcgctgagttcgagcgtaatccgctgggatttaatattgatggagtggagaaacaaaccgtcaataccgaaataaaaaccagtgataaaacagatgtacccctgaccgatgcgacctcccctttaacgcgtccgcttttaccttctgaaatcgcactgactgaaaaacaacatttaggcaatgtgatcaccgaacttcctgataacggcctctttcgacaaaatttatcccctgataatccgtttttaattgtcactgatgaacgctttaccaaccgtaataaatttattagcagtgactatttactcgatcgtgtaggttatgatccggcgcaagtgcataaacgcttaggggatgggttctacgaacaacgtcttgtgcgtgagcaagtattaaaactgacggggcgcccttcactttatgaaggcgatgccatggcacagtatcaatatcttatgaacaatggtgtgaaagtcgcgagtgattttcagttacgtcctggcgtggccttaacgcctgaacaaattgcagcattagaacaagatattgtttggttagtcagcgaaacggtagaaaccgcccaaggccctcaaacggtattggtaccaaaagtttatttagcgaataaaacgttagatttattaagtcatggcgcactcgttagcggtaataatttacatctttccgcagaaagcattgataatgcagggcaactattggcgaataaaggactagagattgaggccaaccaattcacacatcaaggcggagatattcatgcacaaaatatcacagttcaagccgatagcattaatttaagcaccaacttacaagatgccttgcgtcaagccacaatgagtgggacagatatcaccttaaaaggacataacattcaactgcaaggggcaaaactggatgccttaaaagacattaatctaaatgcacgtgataatttaactattactacagcaaaaagtacccattctggtgaatttgatgtgatatcgggttcaatgggtagtcggactgaaaattttatagaagaaccaggtgaacatcgccttgcacatctcagtggtgaatggcaacgtgcacaaggaagcgagttgaacgccggcggtaaccttaatctcaccgcggggaaagatgtcacactgcaaggcagtcaagtcaaagcggatcaacaactgaccgtaaatgcaggcgagaacctcaatatcctcgctgatagtaccacaaccaaaagccaccttgatgccaatagtaaaagcacctctgtgagcaatactcgtgaagaagagcgtttgcaattaagtacactgagtggcgataaaggcgtcagcctaaatgtgggacataccttgacagcacaaggtgctcaagtaaatagcaccgaaggtaaaaccaccgttcgtgctcaagatgtagatatccaatccgtcacacaacaggttgaagacagtgactatcagcattcaggcggaggacgtaaaagttacagtcgtcttgtggatactgcccaagaaaacgtggttggaagtacctttagcggacagcaaggtgttgcgattaccgcccgtgagggtgatattaatttaacaggtagcactttacacagtgaaaaaggggctgttgatttaagcgccacacaaaatattaatctcaataccgcgacagaaacccatacggagtttttagaagaacattcaaagagtaaaggatttttaagttctagtcagactcatactctccaaaatgatcatgtgacacgagagcaaggtagcgtcgtcagtggagagcaagtcaatattcaagcgggtaaagatattcaagttacaggctcttcggttgttgctgaaaatgatgtgtcattacacgcaggtaataacgtctctattacagcggccacagaaacagattctcattatttattagaagagaaaaaacgcagtggtctctttagtgatggggggatcggttttacggtgggtaaacaatcctcccgccatgaagtggatgaaaaaggtaccacccaaagccaaagtgtcagcactattggcagcacacaaggtaatgtcaacatcaccgctggcaacaaactgcatgtgggtggcgctgacctgattgcccaaaaagacttaaacctcaccggtgacagcgtccaaatcgacccaggctatgatgaacggactcacactgaaacctttgaaaccaaacaaagtgggtttagtgttgcactctctggcagtgcaggtagcgccctcaatactgccgtcagtaccgcacaacaagctcgcaaagaaagtgacggtcgtttaagtgctctgcaaaacaccaaggcagtattatccggcgtccaagctcagcaagcggttgagttagatgggctgaaaaccgatgcagccaatgcgcacaaccttgccgacaacctcaaaccgggcgataaagactatcaagaaggcgccaccaatacagttggtgtcagcgtgtcttacggcagccaatcgtcgaaaagcgaaacccataccgacagtcgccagtcccaaggcagtaccttaaatgccggacaaaatctgtcgattaccgcaacgggtaaaaataaagacagcaacccagacagcggtaatatcacggtcgtcggcagtgaactcaaagcgggtaaagacttatcactgtctgcctcgcaagatatcaaccttgtttctgcccaaaacaccgagcaaactaccagccaaaacagcagtaaaggtagcagtgtcggggttggcgtaggcgtgggtgcaggtggctacggggtcaatatctcagcttccgtcaaccaaggtaaaggccatgaaaaaggcaatggcctcacccacactgaaaccacgctggatgcaggtaataaactcaccttaaacagtggacaagataccaccctcaaaggcgctcaagttagtggtgagcaagtcaccgtcaatgtcggtcgtgacctcaccctgcaaagtgagcgagacagtgaccgctatgatgcgaaacagcaagaggtcagcgtcggtggcggttacacgataggtggtacgccaaacatcaatatcagtgccagtaaagacaagatacacagtaactacgacagtgtgaaagaacaaaccggtatttttgccggcaaaggtggctttgatgtcaacgtcaaagagcacactcagcttgatggtgcggtgattgcctccacggcggacaaagataaaaaccgccttgatacgggcacattaggctggaaagatatcgacaacaaagccgactttaccgccgagcacacgggcggctcgatgggcaccggtggcccaattggaggccaacttctcaccaatgccgcaggcgggttactctctaacgccaataacagtggccatgccgaaggcaccacgcaatcggcggtcagtgacggtagtgttattgttcgcaatgaagacaagcaaaaacaggatgttaacgagctcaatcgcgataccgagcacgccaataacggcagtattaacccgatattcgataaagagaaagagcaaaaccgcttaaaacaagcccagttgattggtgaaatcggcaatcaggcgatggacattattcgcactgaaggggatattgcgggctataaagcccaaaaagaccccgatgcgttagccatcgccaaaaaacaactggaagcggcgggtaaaacacctaccgagcaagccattaaagaccaagcctacaacaatgccatggcacaatatggcaccggcagtgatttccaaaaagcggctcaagcggtgacaggattactgcaagggctggcgggtgataacttagccggtgcattggcgaatgcttcatcgccgtacttagcaactaagattaaagagcttacaactgaccctgctactggtgaggttaacaaagcaaccaatgccatggcacatgcggtattaggtgctgtagtcgccgagttaaataaccaatctgccgttgcaggtggattaggtgctggtagcggtgaactgtccgctcatgttatcttaaacaccctcttcccgggcaagaaggtttcagacttaaccgagagtgagaagcagcaactcagtgcactgagccaattggcctcaggattagcgggtggattgactaccggtgatatggccggtgcgattactggctcgcaagctggaaagaatgcggttgagaataactatctgagcgactcagagcaccgccagaagacgtcactggagctaaaagagaagcaaggtaagctcactgaagtcgagcaacagaaactcgctgagctgcgaattaaagatacagaaacaacacaaagattacttgatgcctgtgcaggcggtgtttcacctgaatgtaccgctgctagaaaagatgcattcaaaacgatagatacctacgtcagtttgacgtatcaaaatccaaaaacagcgcaggctggttatcaagaaattgaaaggctattgaattcgacttcaccggaagcacagcaagcatataatctgttggaatcttatactaaagcgtttaaaaactttgggtatacagatgaagaagctcgctcacgtgcgggaatgtatgttggttcgatttatttgcttggtggtacgtctgcagttgcaaactcaggcgcattagtaaaacagtttggaaaagatgttgctaagccaaatgtcaaaccgaatgtaatagcgccaaaaggttcgaataatgggcttgaactagaagttatcaaaaatgaaaccattattactattacttatcctgatgggataagctttcaaatagaattaccaaaacatttagcgacaatggataaatttacccaaaaagcgggagtttcaggtgcccataatgcagatgtattttatagcgcagctaaagacaaaggtttacagattatcagtgaaacaccgacgggagtgaaaggtattacccaaattgaatacaggataccaacaaagaatgcggcaggaaatttaactggtaactataaaggtaatggtgtagaaccatttaagaaaacaatttatgatccgaaaatctatactgaccaaaaaatgttagacttaggacagcaagcggcagctaaaggttataaagacgcaatgacaagtaaaagtggtcaagctaatgcaacagttgatggtgttacctttagaatatatgttgataaatcaacgggaactgtaaaaaattttcatcctaattaa

SEQ ID NO: 309163 - DNA, 366 bp, Proteus mirabilis
atgataaaagaactttttaatcaacatgatattgataaaggtgtaaatgtcattgttgcatcatattttgatcgtatgtatgaggatggtgattttttgagggctatagaattactctctcagggaggtgcactaaatacagatggcgcatattgtcattttcctgatatgagtagctatgatgaatcggagcattttgatggtgttgaatttgcagtcggctaccctccaactgaggaagatacagtaatagttagcaaagaaacctgttatcgttatgtcaagatggcttgtgaaagatatttaaaaattcaccctgaagatcaagctagtgtaagtaacttactatcaaaaatgccagtataa

SEQ ID NO: 309164 - DNA, 768 bp, Proteus mirabilis
atggttctttcagattgtgaaataagaaaaaaaatagattcagttgacctcataactaattatgatgataaaaagctaagaggagcaagctatgaattaagaatgggaaatgtatattacgatctaacagaaagttcaaaccgaattgaattaaaaaaagatgaaaaggtaataatcaaaccaggccattatgttgttttaattacaaaagaaagcgttaacattcctaaagacctcattgcaaaaattacgagtaaaggctcattgtttagcatcgggctgtcgccagttgcaacttgcgctgatcctggatttagtgggcagctaggaattataactcaaaatatcagcaataaattcattgaattgcctcaagatgaaggtattgctaaaatagattttagtattttaagtggcaaagtttctcatgattataaaggacagcatggttaccagacaaatatatggccgattaagtatcatcttcagaaaagctatgatgatataaaaaacgatcgaagagtaaaaacagaagatgaagaggcgtacgttgttttaccatattcaacatctagaataataaaaaaaataatatcgaaacaaagaataacatttattttgttactttgcattgtttttataacaacactattaaatacatattttcttacagggtttaattccacattcttaataaatatagttgttaatattgtctgtggaatagttgtttggttaataacaaaatatatggaaccaaaggtgtaa

SEQ ID NO: 309165 - DNA, 354 bp, Proteus mirabilis
atgaatatcgatgagttaaaaaaaatccaaataatgcaagatgaaaatttcggttttcatgtaaaatttaataacgctgaagataaatatgcgcaaatatcaaaagatttgattggtcttttcggggagattggtgaattctctaatataataaaaaagataactataaaaaatgaaatgaaagatagctatgagctggatttgcctctggctgaaaaacatttaaaagaagaaattatagattgtttaatatatatacttagaatatctgccatattagaagtaaatattgaagatgaagttttaaataaaatgagaataaacagaaagaaatatgaaaaacttaaaaaataa

SEQ ID NO: 309166 - DNA, 972 bp, Proteus mirabilis
atgaaaaacttaaaaaataaaaagatatttttcttacctgtaaacactggttatggaagtgaacatagccctaactgtgaactaatagatttttatcgaaaaagaagctctaatagtatctattgttcaattgttggaaatgtagttattccaaatggatataaaagcaataattattgtattaaaatatcaaataatacaaactggagaaacttaacgtttgaaataaagtctcagggaagtaaacctggcatacaactaagttcagcatgggatggatatataggaaatttacatttcgtagcaaaacaatcagaaaatccagaaaagtattatttagatgcaataaattcaatagatgagtcaaaaataaatgaaattattagggacttaagacatggaatatccctatctatcgataacggatttgaacatattcaaattcatgcagctcatggatatttattcagcctattattagataattatttttctaaatacgccgatttatttcagcatgaattatcaaatattttttctgaattaaaaaatcacaacatagaaacatcattaagaatatctgttaagacagggatttatagaatagataaaaaaagagacaatataataaaaaatctatcctctattcctactgattatattgatctatcatcgggattttataacataaataagaacctaatatatccatctacatctagcatgctaaaaaaacgctatgaagattctattaaattaattaatcaatttaaaaatagaaaatttataatatctggaaaatcattgtctttatttgacaaaattttacctgaaaatgtcgatgtaggtatttgtagagatttaattgccaatcctaattttattacaaaacctgatttgaaatgtaatgattgtggtgattgccattattattcactaaggaaagataaattaaactgtagcttatggtaa

SEQ ID NO: 309167 - DNA, 1020 bp, Proteus mirabilis
atgtctcagttggatttatttacagatctagtgccagaagaacggcagcatcctatatataaaatgttgaaaaaggatgaatatcttccggaaaggagagttataaatgagtgggcacaagattttgttgatagagataataagtttaccaaggaatttcaaactagttttgaaccttgtttatgggaattatatttgcatatatatttaaaaaaaattgggttaacatctgatttttcttatgatgcacctgattttgtcgtcagagagacagaattttgtattgaggcaactgtcgcacttccgccaaatggtgcagtaggtacacgtgatttcagtttagcggatttacctactgaatttaacaaattcaattcagagtcatcaattagaataagtaatagttttgtatcaaaagtgagaaagctaagagaaaggtactctgagttacctcaatgtatagataaaccgtttgtgatagcgatagcttcgtttgataggccatttgcgcattttgctgcatctagaccaattctagcaacactttatgggctgtactatgatgaagataatactattgcatcaaattctgattctgtaatttcttatcgtgttaattccgctataaaaaatgaaaatgttgaaataaatatgggattattttgtagtcctgagtttgctgatgttagtgcagtcatttatagcagtcttgtaacttggggaaagattagagctttggctgataatccattagcaccaacagtttatacaacatttacccctaggtcggattctttatttccagaggttaaaacaactttaaaatgtgattatcgtgaggatttattagatggtttatatgttttgcataatccattcgctaaccataaattacctttggagacgttgagacacccaagaatagcacaaggatttatacaacctaatggaactttagattttgaagtacctgaggattttttacttttacgctatttaacttccattacggctaggtag

SEQ ID NO: 309168 - DNA, 1437 bp, Proteus mirabilis
atgtctcattttccattacaggcttttccatcatgtattcgtgaggttatccttgatattaatgaatgtactcaagctacgattcctttgatcgcctcctctgttcttagtgccatgtctttatcttgtcaaagtttgataaatgtaaaagttaatcaaatggaaccatttcccgtatcattatttttacttgtgattgcaaattcaggggaacgtaaaacaacggtagataaaatggttatgaaacctttttatcaacatgatttaaattcactaaaaacgtttgaacaagaaaaaataaactattcacttgaaataacagtttgggagcaaaaagaaaaagcgattttaagccagattcgtaagaaaacgacccaaggacaaaatacggaggaacagctagaaagactaaaaatactacaaatagataagcctattatgccgagatgtcatcggtacatttataacaatgtgacaccagaagcactgcaaataggtatgtataatcattacccttatattggattgattgcagatgaaggcgctaatattttagataggcaagtaatgaaggatttaagttttattaactcaatgtgggatggtgtggcttttcgtattgatagaaaaacaacacaaagttttacgatagaagatggacgaattacgctatcagttatggtacagagaaaaccttttgatttatatttaaagaggcaaggagataaagctcgtggaagtggtttttttgcgcgttgcttagttgtacatattgatgataatttgacgactcaaggtgagcgttttataagagatagtccaaatcataaagaatacctcgataaattttatatccgaataaatcaattattaactgagaataaggaaagaaaaaaaacagatagtaaatcatccttattgttagatgattcagctcaatatgcatgggaagaaatttatgatgacattgaaaataaacttcgcccagaagaagaatataccaatatgagggattttgcgtccaaattagcaaataatattgcacgtttagcagcagtttttagttattttattgaagggggttgtaaaataaaaaaagaatatattgatggggctgaggttatctgtgaatggtatatgcaacaagctgttaatttatttggttatgaagatggttattacgaagccttattattatcatggttaaatcgtgaatattatcgatataatacagaaagtataaggttgaatgatattcggagatatggaccaaatgtattacgaaaaggtaagttattacttaatgttatttcaaagcttgaaaaagagaatatagtatctatttatgtaccaccatacggtgcaaaaaggatcgaaaaaaacagagatttcaataacaatatttttacaaaacaccctatgtttttattttattaa

SEQ ID NO: 309169 - DNA, 1071 bp, Proteus mirabilis
ttgtcaatccaagatatactatatcgtgacgttttaaatgaaaaaagcgctctgtcacagtatattatcaataacaatcaagtgattgaagacctagctaataataaaatagctaaaaagctaaaagactttggtgctgaaagtaatttaagtatagcaaaagatatttgtccaacatgtcattcatcaattaatgattctttgttaataatgaatgatgctttagtacctatgagtattagtgaaaatatagcatatcttgaaagtcagtctaggatgttaaaaaaatatattgatggagcaaattatattatttcacagaaagagcgtgaattacaatcgttaagggaggatatttcttttgtacgtggagccatattatcatctaagtctgatatcagaagtagtgatgctatatctgaaaaagatataagaatgaaaattcatgcagaagaaaaaattaaagatttaatgatgaatggagaagctatatctaagattttagtgagaatgcgttttttaagtaatgagtataaaaataaaatgagtgagttatcaaaattaccaaaaaattcgtatacagctaatgatattaaaaaattaaacgagtttaatttatcatttaaaagtcttacgggtggctttggatacagaagcgcaccaatttctgatatagagatcaattatgaaactttatctccatttttatctggtttagagttgagggaaatcaaagtcaaggaaaaaattgatttaaaaactgattcttctgctagtgattttgttagattaatttggtcgtatttgatatctatttttatagtttctaaaaataatgcaggaaaccatccaggtattttaatatttgatgagccagcgcaacactctatgggaactaatggtttcaataaattattacgtacattatctaaccagaaaggactgcaaagtattgttgcagcttcatttgatgaaagtgaagaggttttcattgaatcaactaaagaagtgacttttaatctaattcagctaggtaataagttgataacagaaaagaaaagtgatttttag

SEQ ID NO: 309170 - DNA, 459 bp, Proteus mirabilis
  misc_feature (425)..(434): n is a, c, g, or t
atgaacgttaaaggtcttacccctaaggatctcgagcagtacggtattcatgacattagtgaagtcatttataaccctagctatgacttattatttgaagaagaaactaagccaggattaacaggttatgagaaaggtacattaacctcgttaggcgctattgctgttgatacggggatttttactggacgttctccgaaagataaatacattgttcgtgatgatgttactcgtgatactgtgtggtgggctgatcagggcaaaggtaaaaatgataataaaccactctcaccgcaagtatgggctgatttaaaatcattagttactgagcagctatcaggcaaacgtttgtttgtcgttgatgccttttgtggtgctaatgcagatacgcgattaaaagtgcgttttatcaccgaagtggcttnnnnnnnnnntggcttggcaggcgcattttgttaa

SEQ ID NO: 309171 - DNA, 537 bp, Proteus mirabilis
gtgctaatatggctaaataaaatgaaaaatttattgggtgtagctttattatttatttctctagtatgtaatgctgatatttttattaatatatctgcaacaatggttgaacctgtttgtaatatacgtagtgaaaatggtagtgctccattaaaaattggttttgatacattgacgatatcttcactgactaaatctcctgtggtaaaagatttttcactttatatatcagactgtaattttaataatacattagccattgttttaaacccaaaaggaggaagtacgcttttatataaaggaaaaaatatattagcaacaagtactgatgggttaggtatagatattaatgaagtgactggtggaactattcgttcactggaaacaagtaaaaagcataaaatcaatccagaacgaattaattcaactctttatcgtgttgacttacaagctcagttagtaaatacagtgcctattaatcaattaaaactagggacgttcaattcaatagttactatttcagtgacttataactaa

SEQ ID NO: 309172 - DNA, 1647 bp, Proteus mirabilis
atgaatatagcgatgacagaaagatataaatggttattgtttttcctatttatcttattaacttattttattcctttagaaacgcgactgttatggcaaccagatgaaattcgttatgctgaaattagccgtgaaatgttagtttctggcaattggtcagtgccttatcttcttgatattcgttattttgaaaaacctgttttaggatattggatcaattgtattgctcagtggctatttggtgaaagccattttgcggtgcgtattgttgtagtaacatcaaccttattaacaggatggcttatttataaagcggcaatggtagtttggcgcaatagcgctcttgcttttaatgctatgaccgtttttttatcttcttttctggtattagcaataggtacttataatatattagatcctattgtgacgctgtttgtgaccgctgcaatgtactcatttttagttgcgttatcgaccccgaataaaaagggcaaaataattgcttatatgggtattggctttttttgcgcacttggttttttaacaaaaggctttattgcggttgttttacctgcattagtttttttagtcatggcaattagtcaagctcgctttaaagaagtggtttgctattcctctattgcattgttagctctcgctattacagctggaccttgggtgattactgttgcattacaagcaccggattattggaattattttttctgggttgaacatgtacagcgttttattgctaaagagtctgctcgctcacaaccaacatggttctatatcccgatagttatattgggtgtattgccttggctaggttttttatttggtgcattaaaatcagctttctctttaaaaaaaggtacactctattttctgctgtggtttgctctcttttttgcttttttctcagcctcaaaaggaaaactattaacctatatgctaccgtgctttgtgccattatctattttaattgcacactatatcgaagagttaaaagatagacctgatgagaaaattagcaaagtgaatgcatctattaatattgcttttgggctaatgggtatatcagccgttatctattctttatacagtgccaaatttgcgctttatgatacgaatgaaacgttaaaaatagtgttagcaataagtgggtttttattttggagtgtgattggtgcgggggcgctatttagacaaacacagtttttaacgatgttttgctctatcggactaagtttagttattggctatgcaatcccagaaaagatagaaagtaggagtacaccagaaaatattatccaacgttattatgagcctttgagtaataaatcgtatcttttaacggacgaagttggtattggtacatcacttgcttggggactaaaacgtactgatattcgtttaacagagacgaaaggtgagttggcttatggtttaaattacccagatgtaaaaaataaatactatagccttgaacagctattagcattaattgaagcaaaccaatataaaggggtagcgattgttttagtcagacctgatagaaagcagattttgactaaattgactacattaaaggaaaagccgatagtagaaaaagagggcgatttaacgctggtgttctttaattag

SEQ ID NO: 309173 - DNA, 411 bp, Proteus mirabilis
atgaaattgattaccattagtgcgggttatattgatagtttttgggctccaatatgtgaaggaagaatcatccctaatgaatttataggattaaatctgaataattatgagagtgcacaaaaattaattggagaatatttaattccaaaagcgatgaaatacaaatcaaaatcatggcattattattttaaagaaacattaagatatgcaattaacttttggagtaatgagcgattgtataatatttatatgggggtattacctgaaatacctccacctcaaagtaagtatattaaaatgaaagatttttatttgttaatttggacaggaatgtaccctaatgaagaatgtgttgtatatacacctgaactttataaagaagttccttccatagaaataggatcattctag

SEQ ID NO: 309174 - DNA, 405 bp, Proteus mirabilis
  misc_feature (338)..(347): n is a, c, g, or t
atggctagacctgcacgcggtgaacgcaataacaatccaggtaatattcgtcacggttcaaaatggcaaggactatccgcacagcaaacagataaagacttctgccaatttgtctcacctgagtatggcattcgggcaatttatgtattgatgcgaacctacgaaaagaaatacgggttatgttctattcgtgaaattatcaatcgctacgcaccaccaaaagagaataatactgaaggttacattcagcgaacagctaaagagttaaatgtgaatgcggaagactgtttatcagtcagcaaaaaagaagttgctatcgcattggccacggcctgtcnnnnnnnnnngggtatcagccatacagcccaaaagtctttgaagatgcttggttgttgttatgagtaa

SEQ ID NO: 309175 - DNA, 258 bp, Proteus mirabilis
atgggattaataattcaagagcaatgtgttattgttgatcataattgccccgactggctaataactcggtctgaagggaatccaactattgattatacagatggcttaaaaatttatgctatttttaaaagacaattcctttcaggtaaaagaagacgtaatagaaaacaacgtcaactgggggataattgtcctttaatttatgctttgaaaaaaaaggatgatttatatactaatatcaatgccttcagcccataa

SEQ ID NO: 309176 - DNA, 270 bp, Proteus mirabilis
atgttattaagatctttagaggagaagaataatataccaagcgtctggggagttgaaccttcagttaatttttccttacagtttgcacttgcagaaggcttaatttttaaagctggaacgtcatttaaattatcacctaaaggtagtgaatttattaaaactagtcgttcttgtgaattactatctaatgactctaacttcttgaaaaaaataggactaagggtaactgaaaaaatgattgaagccactaccaatctttggaaagaatag

SEQ ID NO: 309177 - DNA, 378 bp, Proteus mirabilis
atggaattagatatcagcaggaaaaatgaaaaaagatgtatgaataataatttgctggataaggaaaaacatataaaactcaatcacttaactgagaagaagtttcttgctggtgatgttttattgaggcaaatagaaaaagattctgcaagcatttattttgaacttgcaagggttattagtcagtatgaaagtgaaatagaagaactctgcattacatggaatgaattgcctgaacagttgattgaaagggtaaaggataggctttcattgagaataaaggaagctattccaacattaggtgattcagagagacacaaactcgctgacagtcaagttgcaaagtggatagcgttatgcccattggagatatattaa

SEQ ID NO: 309178 - DNA, 603 bp, Proteus mirabilis
atgcttattacaaaaaagaagatgaaagaaatgagaaatgctgcatcatttgatccaacgaaaaaatcgcatgctgcatcaatacaaaaactttgtcagagtattgaatctgaaaaattaacaattcctgtatatcaacgtaatttaagttggactcatgaaaaagctgtagagctattcaattttcaattgaatggaaaatcagctatttcagctatttcaataattgaaattaataattatgtagataacgaagataataacaatgtagaaaaaaaaggtgtaaagcaattaaagtttttaacaagagagcctattcgtaaaagaggtagattagaaacagttattgatgggcagcagcgattatcaactaattatagagcttatattggtgatcctgaatttgataaaattgttctagatttagggactggtgattttaaaaatataaaagataaaaaacctacaattaaacaaattcctgtcacaaaattattgaataaagattcttctgtattaattcaatacttacaagataagtattctaatgatgaatttaatgaggtttatttggaaattccagaaagcacagagccgaaatga

SEQ ID NO: 309179 - DNA, 414 bp, Proteus mirabilis; identical to SEQ ID NO: 308657

SEQ ID NO: 309180 - DNA, 270 bp, Proteus mirabilis
atgctgggacaaactaaaacagaaatccatcaattcgacgtgtgtggccgcgtgtattatcgtggggttaactacaccgaaaaagaaggtgaattagctgttgaaactgtagaggcttcttctcatgatgaggctgaaaatatgtttaaaagcttacaggatgagtacgcttgtgagtgtaatcggactgttgagcgcgtcgatatcactttcactattgacttgacgatagctgaaagcgacaacgatgaaccgtacttagtgatttaa

SEQ ID NO: 309181 - DNA, 345 bp, Proteus mirabilis
atggctaagcaacctgtaactataccgccatctactccagcgacagcatgtgatataagcaatcttcccaagataatccaaggggcagggttagttaacttccaagtatcttgcagtaatggagagctaacagtaactggaaccaatcaaagcggacaacaagtaagaattaatcaatatcaaggaaatggttatactgaaggtacattgtctacttttcaacctagcaatatagaagcgagacaaaatgaggctaaacgattgagaagtaatggattaacgcaacaggaaatagcagatagactaggcgtatctcaaaagactatcagcaatgacttaaagtag

SEQ ID NO: 309182 - DNA, 447 bp, Proteus mirabilis
atgagcgtgtggcatgatgccctggagatcggtctgcttcctctggaagagagcggcctctactgtgatggcatgacgtatgtgatcagctacctgcttcggaaaggcggcattccccaccggagctacataggctatgtaaaagacgagaaacatggcgacctggtagtgccgcactgctgggtaaaactggagggcgatggtgattgggttatcgatctccgactacgcacttggctgggagatgatgacgaggtacctcatggtgtgtttcaaactaccaagtggtcacggttcacctataagggagagcctatggtagacatcaagttggacgaagagatagttgctgccatgaccgatggaaaactttcacatgtgaaagttcctgaacgcaacgattacttgaggacacgcctcctctggatagccggattcaatcggtag

SEQ ID NO: 309183 - DNA, 573 bp, Proteus mirabilis
atggagcgagacagcgtatttggctggcttccggaaacaaaagcaggtaatgccagagaagcctgggaactgatgtcgagtactctgctcgatggtatagagaagaccttacggcaagcgaatgtcaaatatgttgtcgataacaggaacctgcatcaggactttcctctaatgtcggagtacattttttcctcggtgcgaattgtcgatcccgaacatggttgccctgactgggaaagtgccaatcgagactatgaccaatcctgctacgtggccacgaccgtgtatgcccccacggaagagccacgaaaagtgcctgatttcctgatggccgggcaaaatggctatggcttctacgcaaatgatgaagcggattactcccgtataaaggtgaacatccccaaaggttccaacctggacaagaaccagttgcttgcaggcatcagccgtgagcttccggcctgggcactcatcttcgttgcatcgcaaaagctggatactgacggctacactgcaccggtgatcctgacaacagggaaggcggaactattcatcacgccggatcaaggatga

SEQ ID NO: 309184 - DNA, 357 bp, Proteus mirabilis
atgaatacggcactggtccaactgaaacttcgggaacgccagcttcaggacgaattggaacaggtatgggcaggtatagatagcttgttggaggctcataaagtttgcggtcctattactccgatcttggtcatcaatacgctgaaactgatgatgctggaagaatacggggattggcttgtaactccagtggagcgaactggtgatgccctggtgaccagcgctgaagccttaaaggtcgccagtagggaaacaggtatttgtcagcatttattgagaggatggcttagtcgagcccagcgccaccctgcactggcttgcagggatggcaaactaattcttcgagttgaaggttaa

SEQ ID NO: 309185 - DNA, 2352 bp, Proteus mirabilis
atgagcattagttctacttcagaagcacaatacgaagctcagattagagctgcaataatatctgcatttccatggctcccttctgatggcataactcaccaagattccttcagtttcaaatttggtcattcaaacattactatagatggcaagccaaaaagttctgctagagcgcgctcggatattcttgtcaaatacaaaaatactcctttagctatttttgaactaaagaaacccgatgtaaaaataacgaatgatgatattgagcaagggttgtcgtatgcgcgtgttcatcatcctagaccaccacttgttgtggtgagcaactcaaaagacgtccgcattctggaaactgaaacaggagaatgttggtgtccaaccgaaaagtcagaagctgcagttttctcactactagagcagagctctaggctagcgaaagatgacctaaagaatgcagttaatgtactcctaggtagatctcaaaatgtatgggcgcaagttgtaaagcaaattaccaatcaaaatataaatgaactttctggtaattgtgaagatgcattgatgccattcgtaaaccagttcctaatccctcgtgaattaactttagaagcgcttaattgtttaaaaaaaggtaaccgattaataacagttgagggtgagccattatctgggaaaagtaatgtgctaagagagatcgtagagttaggctctaaagaagaaaacgctgagttcttatacatcaatgcagatacagatatcagcctatttagtacactttctaatattcttactaattatctagattggtacatatctaccaatgatgccagcaattggttaatgaaattatctaaaaccaccgagaaaaatctcgtgttactaatagataatatcaatgttggttcggataccatacgcaaagaagttgaagaattaactagtaagcaatatggaaaaggcttacaaatcatcatggctatagatgatactgtagcagataagctatgtttgtcgcgtaataaaagatcagtatctgcaataggaaacagggcaaataggcttaaactatctcctttaaatgataaggagttcagcagcgctaaaaattattttttcaacatgaggattctatttccaaaaggttgtgaaatcagtgatgaactacggcaaccatggattcttaaaaaaattgttaccaacgtgatggcctcagggaaatacaaagaaggaggattgttcgcatcaatatcacctgtagttagcttagagcttttacacttttcacgtaggcagttcgactcttcgcagaaaccattttgtctatacagagagctagctaagggagtgttggaagaactgcaagactcagatagagcttaccaattacagctcgaactattaaatgtgttcattatcagaagagataccgctctaaaatatatatcctcacaagaactcgctgaaatgtcatttgatggcttgattcgagaaaaaagatccgagtcaggagaaaactgttatattattcgcttgcctgagctaatggcgtgcgagctttcaagactgatcgcatcagatttagctaaatacaaatccagcgagtcagttaagtggctagttaatgtatcttctcatattcccctaggtaacattattgcagctgatgcaatcagctacttgggacaaaaaggtgaacttagcctagatttcattaaagagttactaaaattattacctactaagcagactattccccctggaacaaaatttgctgcaagttggaacaacataggtgtagtcgattttactgttattgatgaaagacatatatcaattgagaaagatggacatcgagagatagttcaagttgatcctgatgatattcctgctgtatacgataacatctcaccctatatgattctttcatacctttcaggtcaaacaatcgtcattgagaacgataagcaaaatagttatcaacgtattgacccgataattttagcacaagttggctcagcgactgttcctctattcaaaatgagtaccaccttagataaaaattcttttaaccaccatgagttagatgatggaactttcatgctgtgcgcttcaaatggaatcgttgagcctattacatggtcgttaatgtcattttttattaaagaatatagagggttagcaaatgagtttattgaaaaatcaatgaacgatagaaatacagctcttatatcacgaatttacacggctctgactgaaagtttagattcggcagatgaagagtactcaacttgggctaaaaataagttagcactaagtgtaaagcccgcattgtccgtatgccttaatttctag

SEQ ID NO: 309186 - DNA, 2244 bp, Proteus mirabilis
atggacctcattgctgatgggtttggagattgctctgccgaaacaaccatcagccataacgctatcaatactcatgttcctgagtatgagcgatgccagcgcgttgttgaccaaagcgctgattgcgaagtggttcatgattacgatgcctctgtagtgaagcactatgacggtccatacaacctcaagtcttgtggcgaaggatgtacagagctctggattggtaaagtcggggatgactattgggcaggtaactgcaaaatctatgaggaatacacccgtgtccaggtaagcaacccggacgccatcgtttccgcgacgcttgaatatgtgaagtgggacgactatatgcaggtttgggtcggtaaatccggccaagaggctaaggtgtggtccggcccgaatggaaacttccctcctgaaactgctggtaaatgtgagctttccacgagctgggagcggaacccaaatgttgatgtcacaccctatttcaagaatgtgaaagatggtgatgtcgttacattcaagatccgggtttcagtaaccggggaaggtgaaggctatggccgcattaagctccgttatgacccatccaaagccattaccaaggatgaatggtctccgcagagctgtatggattcggccaagggcgtagccgacggatttgctcaaggggaaattacctgcattgataacccgaccgatactactggctgcactgttatcaatggcatcaaggtttgtgaatcacaactcaagccgtcacccctgccaggcattccaaagctctgcaaaaaggtgcgggtcaaagctgactacgacttctacaaagggcaaatggactgctggaccgatccccagggggaaactcattgcccggtcaactcgggcggtaatctcaatagctgtactgaattcgagaataacccgcagtgcggttttatcagctctaagtgcgtggatggggccgagggcgcatccggcacctgctatgtgcatgaagatacctacgattgcggctccgatgtggctgtgccaacgcttgagaaggagaccgagtaccagtgtggagggcctatccgctgcatgggggatgattgcctcgatgtgtcaaagacccaaagcactgactttgcccgtgccacagctcttctcaatgcggctcagtttatgacccaggatatgagctgtactggacaagatggggacaagaatccaactggtgatgagaacgtcgtatgttcagcattcgcaggggaggctggtgaatgcaaaatagctgtaggaggtgtatctgattgctgcgagaagccatctaacatttcgctagccgactaccttaacctgatcatggcagtaccaaagctggacggtgcagtgatgggcctacagaacggtaattcaatcaaaggcgcttaccagatcctgcgtgagcccgtcttacaaggctggaccgaaataaccaaacctttcaccagctatatcgagaatatctccggcgcagttgattccttctatcaaccggtagagcaggttattgatgaattgatggaccaactgaccgagcaggttaaagaggtcatggcggacatcatgaaaggacttgggcaggatgctgccactcaggaggcggctgccggaggcgctggtaagatggctcaggaaggaatgatggaaagcgctgccacttggctgagcacagcgatgacaatctatacggtctatgtcgtggcgatggtcatgatccagatggtttacaaatgcgaggaggatgagttcaccatgaacgccaagagggctctcaagaactgctcctatgtcggctcgtactgcaagtcgaaagttcttggtgcttgtgtcgagaagcgagaggcatactgctgcttcaactcgcccttgtctcgtatcatccaagagcaagttcggcctaaactgggtcagtcctttggtgatccgaagaaccctcagtgtggtggcatcccgttagacaaaatagcagagatcgactggagcaaggtgaacctagatgagtggcttggcatcctgcaacagaacggcaagtttccggacccgagttcgctaaacctcgacagccttaccggcaacggtagcgacttcaacattgacggtagtcgtaagaataccaaagagagaacactggaacgattgaacggcatcgacgtcgataaggcacggcgcgacttggcatccgagatctttccagactgggatggtaagcagtag

SEQ ID NO: 309187 - DNA, 3300 bp, Proteus mirabilis
gtgagtaaatcagaatacatttatctaattaaatgtacttcttggctaactaaatttctgacccaccgaggattgaaaataacagatagccgaccgttatttgaataccatgcaacctgtgatgagtatgaagaattaaagcggttactctgcggtgtcggactggttgacggatttaaaaacgataaaagttacgcagcatgctttacattattttgcgcagaatggtatcgaagggaatacgaacgaattcatggctggagttgggagcctatctataaagctcttggtttatctctatcctcttcggaactgagtcatattgtaccaaaaggccttgaagactactggggacgccctgttcgcttctatgattcagaacggcgtaactttttaggatctctatttagtgaaggtggcctacccttcaagctcttgaaagaatcagatagccgtttccactctgtgttttctcaaattcttaatcagtacggccaatcttattcatcaggatattcatctttatctttagtgcaggtagttgtcgataagtcacagcttccaactgctttcaaggaagacacctcagttgaactcattaattgtatggctgagcagcttatctctcttgttcagacttacgaactcagtaatcactcagagcccgtcaaagaacttgaccgtgttcatcctaaatggcgggatagtttcccaatgcctctagatgatgaaactggcaccagctttcttaatggtcttttgcgcaccgccactgttgaaactaagcctcgattacaaaaaaataaaacaactagctgtaatttcgtttggtcagaacaacaccctgatgagattcatgcacatattttccttcctaatgagttaatgtttgctatttcaagtgagccatcaacgactcgttttgaactctctgtttatgaagatgatgaagaagtagccagtctggggcccgcatatgctagcctagaaaaaatgcaggcgacagtgaggcttcgcaagagcgaaattcattttgtcagacagcaaccaacttccagcttatcattagtagctcgagccggaggcatcattgtcggcaagatcaagttggatggaggtgaaattgcagttggagatattcctttaacattcgtatgtgataaaagtggctggttattacaaggtcaagcttcctgtagtgtacgtaaaagtgacgtgctcatcattcttcctacagaaggtcatctagcttcgaatcatgatgattgtttttctaatactcaagcgctgggatatcctactttgtctataaaaggacgtcaggacgtcattttcgaaggtaatgaaacgtaccgaattcaaaccggtcgagaacaggctaaacattcctatttaactttacagggtaatcagttcgcttggccatgcagtccctatgaaacatttgttggtatccctaaagtcattcacaaatttgccgtagcacagagtagtcgttatgaacgtttcctaagtggaaaaaatattgacgaatgtgatttacatgaaacgatgggggcgcattatatttcgattcgaaatgaaaataatgaaaccctattacgccgaaagataggggttttgccttcagattttcaactagaaattaaaagcagagaacagacaaacgagggtgtaataattatttctacccaacactcttgttggtatagattaaaagataaagagctcgaagttggacgcaaaaaatcagtaaataaaacggaaataatgattaaagcagagggggttccgccaacctctttagtattacaggttacgcctaatcttgctggcaatcccattgaaattattctacctttcccgactaagggctgcctagttctagatgttaatggccaactcctacctaaaaatataactattaatgacctgttgggaaccagagcattcctctttggacgaaatggcgaaccagcaagattccgccttgaactacgcttaatctccagagcgagacagcaagcgttgcatgagtggtgttataccgcaggcgaacgtccagttgaactcaatttgtatagtctaagagagcatattgagaacttactatctctggaaactggcattgaccaagttgtggaaatgcgtatagatggctctggaagtatacatacctggcaaattcggcgatataaatacagccttaactacgattatgaaaggcaggttctttttagcaactcaatgacaactcgctctgagcagatcccatcaccagtcatcatgctgctaagtgaacctgaaagaaaacctgtttctctcacttcacgaatgagcgaaggtgtacctgttggtgaatttgagctgagttcggtaatacagaagaatgggccttggttggtaattcctagaaaaggcgaagaaactgcatttcgaccatgttttattcgcggcgagcctcctttacaaactgaagttaacgccatccaatctatgcaaaaagcgacacagctttttaaccctcgttcagacgtgaatacaatcacgttggttctcgatcaaatggctagtagccctgcgcattcaggctggcagtttctacgaagtttatatgaacagtacggatatttacctctggctaccttcgaaatatggagagcgcttgttcaacatcctcaagcgttagcaatgtcgttgtttaaatttgaaatgtctgttgaatatctcaaccgcattgaaaatgaatttcctattttctgggaatttttacccattcttgagattaaaagcgcagcaaaaagatttctggccttcctagcccataaaggggcaccggaaaaaatgcagaaaaaattgctgaataaaatgtatcagcaattgggtactatttttcctacctatgccaatgaagtgcaggagtggttaagtttaggtaaacaaccacgttcaatacctcattcgatgatgagagaaattgttcagagttggtatcaggatcttctgcgtgagcatagtgaatcacgctggcctgaatatggtggttctcgtctttacaactggatcctgtcacaaacagacttcgcaattgatgtttctcccgaaacagaataccgctattccgttgcctggttacccgtattttctgctgctgtcgctagtggcaaaacaacatttgaaagtgtttttggcaatgatccaagtgccgtttttttcttaagacaagtcagagattttgattcgcgttggtttaacgccatttttcaatacagcttattgcgtaatattgccgaaaaataa

SEQ ID NO: 309188 - DNA, 6321 bp, Proteus mirabilis
atgactacacgctatttttcttcactcattgaacaatcactctctcgctcaacagaagcaacgcttagcatcatgggagttacaaatcctcaactccgggatcatcttgcccagcagatgggggctgattgtggtacagctggttctttccttgcatctccagtatttgaacaaacatttggctgggaagaatcaacctacaccatgagaacgctagctacagagaaatcattgctaagcaaaaaggttgttgactctctggatagtgaaaaaaatgggcgatatcgttttggcgctaattggaaaccttttactcatcagttggctagttgggaatcattacttgagaaaaaacattcggttgttgtcaccagtgggacaggctccggtaaaacagaatgctttatggtgccagttctagaggacctttatcgtgagttacgcaatcgcggcaatcaaccgctagtaggggtaagagcgctattcctctatccactaaatgctctgatcaattcgcaacgagaacgtctagacgcatggaccagtggatttggttcagggattcgatactgcctatataacggtaacacagaagaattgcatgcctcggtaaaaagcgagcaggcaaacaagcctaatgaagttttatcacgagagaaaatgcgcgaagagccagcaccaatactagtaacaaacggtaccatgctggaatacatgatggttcgtcaggttgatgctccaataattcagcaatcaaaagcagaaaaatcgctacgctggataattttagatgaagcgcatacctatgtagggtctcaagccgccgagcttgccctacaacttcgtcgtgtaatgactgcgttcggtgttacgcctgatgatgttcgttttattgcaacgtcagccactattgcaggaagcgattcagaaaagcagttaaaaaaattcttatcagaactttcaggaataccacaagaacgtatagatgtttttggaggtaatcgcgttattcctgaacttgatgcatgcaaaaattgtccagtcacacttgatgagcttgagcaaataccagactccgataacgaaggaattagccttgagcgttatagtgcattaacacattccccagaagctcgctatatacgcgagatgctagttagccaacctcgcccagtgaaactggatgtaatgacaaaacgcttaaatgagctaacaaagaatcattacacgcaacaagaaattttacgctggatagacctctgtacgggcacaagccctagcgggcaagagcctgcttttctcaaagtaagagcacatatttttcaacgtaatacccagggtatatgggcctgtgcagataaacattgttcagcaaaacataacactgcactggaagaaaactggccttttggctacgtgtatgtgaaccaacgacaaagctgccagtgtggtagccctgtttttgagcttgcgttctgtaatgagtgtaacgaaccacatctgttggcgaaggataaaaaaggtaagcttgtacagtgggataataaaggtggcgatgaattctcacttcatgatgatttcccagatgactttgaaacatcgggagagaaagttcaaaaagaacatgtatttcaggctccgcaaattattgcgccggaatgcaatactgaggccggatatataattcagcgactcgatcgtaatacccggagcattggcgttgttcacaaagacagtcttcctttagcaatgaacgaaaatgaacaaatttgtagcgccagcaattgtggctataaaggagggaaaggtcagtccccctttagacgcgctttgctaggaggtcctttttatgtcacgaatattgtgccaacagtgttggaatactgccaagattttgccagcgatgacggtaaaaagggagttggcccattatcattgccaggacgaggacgacgactaattacctttaccgatagccgccaaggaacggcaaggatggcagtaagaatgcagcaagaagctgaacgtagtcgtttgcgtggtagtgtggtggagatactttcctggcatcagagaaaacaggctgtaaatactcctaacgatcaggctgatgtaacaaaactggaagagatggcaatacaggccagagatgaagccaaaaaacttcgtgactgggggatgcctgaagaggcaattctctctgaagaaaaagcggaacgcattgaacaagctataaaaaaagcaacaggcgaaatagttaataccattttaacttcgctgacttggcaggagatgattaatgagcttaaagataaggcagacatcaaaggctcgattctgcaatacaaccactatcttaaacctgagatttttactgagaacagtggaccgctgaagctttcagagatgcttctatttcgtgagtttatgcgccgtccaaaacgaaccaacagccttgaaacacaagggcttgtgcagattagttatcaagggttggaaaagctacataccccccctattcactggcatgaacaggggctaacgctggatgactggcgtgattttctgaaagtcgcactggatttttatgtcagagaaaacaacttcattcaactggatttagaactgaagaactggattggtagccgtttctctgcaaaatttgtacgcaatcctgaatcaaaagatcctgacgataaccaagtcaaacgttggccccaaatccgtcacggtaatattacccatcgtttggttaagttactaatacttggagcaaaattcagtaccataaatacaattactatcgatatagttaacgcatggttgaaagaggcctggctccaattaaccggcccgctagctgtgttaaaacctgatggtaaccgtttttacttaccgaaagagcacctaacattctccttgatccaaaaggcaagtatttgccctgttaccaataaattattggataccacttttaaaggactcactccttacctacctagacacatccagtttgaacacctaacaaatgcacaatatagcacctatatgacacaggaagtgacactacctgaagtctggaaacacgatcattcacagttggattatgccgaagggttagcacaagttcgagaatgggtagcgcaagatccacttgtagatcatctacgctcaaaaaacatctggacggacattaacgaccgcgtggtagagggcggcttttactaccgtactgctgagcattcagcacagcaatcagctgatcgcctacaaagttacgaaaagatgtttaaaaacggccagcttaacgtccttaactgttccaccactatggaaatgggtgtggatattggtggtatttccgcggtagtgatgaataacgtccctccccatccggcaaactatttacaacgtgcgggacgagcaggacgtagtaaagaatcccgcgcaatctcctatacgctgtgtaaagggaaccctcacgaccaacaggttttcgctaatccactctggccgtttgagactgtgatccccgcaccgatggtagcaatgaactcagaacgtttagtacaacgccacgttaattccctattactgtcagaatatttatgtcatgtagtgggagaaactgagaaagaaaaaaccagtctgaatagcgaatggttctttggtgaagagtttgagcaatctgtatgtaacagttttaaaatttggcttgagcgccctacccttaaaattgatgatgcgcttgagcgtctagtaaacggtaccgcgctacatggtgcacgagcagaattattgcgagaaaacactttccatgcaattacaggattacaaaagcgttggctagaaatttaccacgatctagagaaacagaaaaaggaatcacagccaaatactccatatcgtaagcgcttggagcttgagaaaaaacggcattgtgatgaatacctgttgcgcgacctggcagcgcgaaccttcctacctggctatggtttcccaacagatgttgtgaactttgataacttcactatggaagactatatccgcgaaaaaacacataaaagtcgtaacaagggtgaccgtgaagataacgtttcacgttataaaggactaccttcacgcaacttgtctgttgctattcgtgaatatgcgccaggagcagaaatcattctggatggacgagtgttccgttctgctggtgtgtcactgcactggcacaatatcaatgctgatactaatgaaacccaacgactagaccgtgcctggcggtgccagaaatgcggtacgttaggctatgaagaaggtattggtagctctatagaattattctgcactaatgacgactgcggagagcgaatcactcgtgacaatactcgtcaagtactgcagcccgcagggtttgtcacagatgcttatgattcggtaacgaacaacatcgaaacgatgaagtttatcccagtagttccggcctgggtatttgttaaggcagagcgtttgccgctaccaaacccagagatgggttttatggcttcaggcgctaacgggcatgtattccagcagagtatgggcgaaggcgggcatggttatgcactgtgcctgagctgcggtcgtgctgaatcaatgataaacgaaaaagatgtgccaaaatcaatggaagcgcattacccgccgcgcccaggaaaaaccgatcgtgacagtcagaatcagagggttatttgtcctggttcttctgcattaaatacaaacgtcacattaggtgcattagctcatactgatgtatttgaactgattttacgtcgcccgcaggacggtgggtatattccagatggctcagaggaaggacgtattgttgctatgacgctggctgttgcgctgcgtcgggcactcgcaggtgcactgggtatttctgcagctgagttgggctatacggtgcgtcctgtcaggttagagagcgagggagcagtactggccgttcagctttacgacgtcattagtggcggtgcggggttcgcttccagtgcaccattacatatcgaagcgatactgcagggaatggtcaaacagctaaaatgcacccactgcgataccgcctgtagcgattgtttactcgattcacaaacgcgccacgatcatgaccttctggatcgcaaagctgcactagcctggctgggggataattttagccactatattggtttgccagacgaggaaaaattctcgctacccgatgcacagtattgtcctggtaccatcgaagatgctgtacgccgtgcaattaacgaaggtgctgataaacttacgctgtggatgaatgggtcaattaatgagtgggatttatatgcccgccagttccgctcggcaattctgaactatcggctaaaagacaatgtcgcggttgagattgtcatttcaaaggatattgatgatcaggaagtgttgcacgaactggcgcagtttgctgctattggggtgaggttgtaccatgcagaacaggaagtgtcattccccattgtggcgcagatcgctttcactgagcgtgtcataacactagtatcacgcagtcagcatgcaacgatacctggtccacactggcatcagagtggtgaactggtggttcgcagtcaatgctataaccctgccgaactacgtgagtttatactgccagaacttacagcaaacttcagtgagttggtgaaagaccttcaaattcataaagagctgaatagcccattttcacagtttggccaacgtttctgggatatgctttctaacaaccatgaaaaagcacaaaacctgatgaaaataaatcaaattacacatattcactataccgaccgctatctgcaaaacccggttgcactggcgttgctgagctctttacttaagccgttgaaaaaattaatgaccaaagatgcaacagtagcgattgataccttattcaaaaacaaagatcgccctggaaatcgaccgttccacgactggatgagtgaagctgattttcaggattttgctgatcagtggtttgctgcatcaatgggtaagacggctgatataacggtgttcgactactcgcgagatattccacatcatcgtaaattggtggtgaattttgacaatggccaggttctaaaaatccgatttgatcagggaatgggctactggcgtatcgacttcccatatgcctggcgcagctttgacttcaatgatgatgttacttctcagctccacaaaatggcgaaagcttgtatggaaggaaaagtggttaacggagaggaaaactggtcaacggacgtggtagttgaagtgatggaatcttaa

SEQ ID NO: 309189 - DNA, 1347 bp, Proteus mirabilis
atgagtacggaaaaattgccagaggggtgggtgcagtgtgaattatccatgttaggtaatatagttacagggaaaacccccagtactaaagaactatcctattttggtggagacattccttttattaaaccaggtgatcttgagtttggtggtaacataaatacaaccgctgatactttaacggataaaggactaacggttgtaccatcactaccacctagctctcttgttgtaacctgtatcggaaatctagggaaggtaggtataacaactaagcgctcagcaacaaaccaacaaataaactcattaatacccaacccgagattgtgtgttaagtttatctattatcagatgttaacattaaagccgtggctagaatcgcaatcagttgcgacaacaattgcaattgttaacaaggggaaattttctcaagctccaattaaggttcctgcagtagcagaacaaaaaatcatcgctgaaaaactcgataccctgctggcgcaggtagacaccaccaaagcacgtcttgagcaagttccgcaaatactgaaacgttttcgtcaggcggtgttggctgcggcagttggagggaaattgactgaagagtggcgtggtacagctaccctaaatgattggaaaaaaggaatactcaaaaattttataaagaaaccatcttacggtacttctgcaaagtctcaaaaagaaggtttaatccctgtgttaagaatggggaatcttcagagtggtaaattagactggtcagatttagtttacacatcagatagaaatgaaattgaaaaatataagctaatagctggcgacatattatttaatcgaacaaatagccccgaattagtaggtaagacctctattttcagaggagagagagaagctatttatgcaggatatctgattaaaattcaatgtttagatgggctaaattcagagtaccttaattatcatctcaatagccatatcgcgaagcaatactgctatgaggttaaatccgacggcgtaagtcaatcaaatattaatgctcaaaaattggcagcgtacccgctggaagtaccaccgattgaagaacaagccgaaatcgtccgccgtgttgagcaactcttcgtctacgccgacaccatcgaaaaacaggttaacaacgctttgagccgcgtcaacaacctcacccaatcgatcctagcgaaggcattccgtggtgaactgaccgcccaatggcgtgtagaaaacccagatctgatcagtggtgaaaatagcgccgctgccttactggagaaaattaaggctgaacgcgctgccagcggtaataaaaaagcctcgcgtaaaaagaaataa

SEQ ID NO: 309190 - DNA, 1590 bp, Proteus mirabilis
atgaataataacgatctggttgctaagttatggaaactttgtgacaacttgcgagatggcggcgtttcttatcaaaactatgttaatgagctcgcctcgctgctgtttttgaaaatgtgtaaagagaccggtcaggaagacgattatctgccgaaaggctatcgttgggatgatctgaaattgcgtattggtcaggagcaattacagttctaccgtaacctgctggtccacttgggcgcagatgaacagaagctagtgcaagcggtgttccagaacgtgaataccactatcacccaacctaaacagctgacagagctggtcagcaatatggattcgcttgactggtataacggcagtgatggcaaatctcgcgatgacttcggtgatatgtacgaagggctgttgcagaaaaatgccaacgaaaccaaatccggtgcaggtcagtactttactccgcgtcctttgattaaaactatcattcatctgttgaagccgcagccgcgtgaaattgtccaggatccggcggcgggtacggcaggctttttgattgaagctgaccgctacgtaaaatcacaaactaacgatctggacgatcttgacggtgacacacaggatttccagatccaccgtgcctttatcggccttgagctggtgccgggtactcgacgtctggcgctgatgaactgtctgttacacgatattgaaggtaatctcgaacacggcggtgctattcgcttgggtaacacgctaggtagtgacggcgaaaatctgccaaaagcgcacattgtcgccaccaaccccccatttggtagtgcagcgggcactaatattacccgcacttttgttcacccaaccagcaacaagcagctgtgctttatgcagcacattatcgaaacattgcatcccggcggccgggcagcagtggttgtgccagataacgtgttgtttgaaggcggtaagggtaccgatatccgtcgtgacctgatggaaaagtgccatttgcatacgattctgcgtctaccgacaggtattttttatgctcagggtgtaaaaaccaacgtgttgttctttactaaaggaacagtggcaaatcctaaccaggataagaattgtactgacgatgtttgggtgtatgacctgcgtaccaatatgccaagctttggcaagcgcacgccatttaccgagcagcatctacaaccgtttgaaaccgtctacggtgatgacccgcacggcttaagcccgcgtaccgagggtgagtggagctttaatgccgaagagagtgatatcgccgatagcgaagagaacaaagacaccgaccagcacctagccaccagccgctggcgcaagttcagccgcgaatggatccgtagcgccaagtctgactcgctggatatttcttggctaaaggataaggaccgtatcgatgcagacagcctacctgagccggatgtgctagctgcagaagcaatgaccgagctagtacaagcgatgggagagctggatgcgctgatgcgtgaattaggcgcagacgatgcagctgatgctcagcgccaattgctgaaagaagcgtttggtgaggtgaaggaatga

SEQ ID NO: 309191 - DNA, 3519 bp, Proteus mirabilis
atgaataaatccaacttcgatttcctgaaaggcgttaatgacttcatttatactattgcctgcgcagcagaaaataactacccagatgaccccaatactacacttataaaaatgcgcatgtttggcgaagctacagccaaacatctaggtatgttattggatataactccttgcgataaccagcacgacctgctgcgagaactgggtaagatccccttcgttgatgacagcatactctcgatttttcataagctacgccgcatcggtaaccaagctgtccatgaatatcataatgatcttgatgatgcgcagatgtgcctgcggcttggttttcgtttgagtgtttggtactaccgtctggtaactaaagattatgacttcgcgcttccagtattttttctgcctgaaaggggggagagtctctatcatcaggaagttttggtactcaagcagcaactggagcaacaggcaaaagaaaaagtacaaagccaggccgagataaatgctcagcagcaaaaaatgattgcgctgaatggctatattgccattctcgaaggcaaacagcatgaaacagaagagcagtccaaagcgcgtgtttctgccttagaagcacaactagcggcaaaaaatgcagagctggcgaagcagactgagcaggaacggaaggcttatcataaagagataaccaaccaggcaataaaacgcacgctagatctgagtgaagaggaaagtcgtttcctgatcgacgctcaactgcgtaaagctaaatggcaagctgacagtaaaacattacgcttttctaaaggtgctcgccctgagactggtgtcaataaggcgattgctgagtggccaaccagtaaagatgaaaatggtaatcaaggctttgcagattatgtattgtttgtcggactcaaacctgttgccgtcattgaagccaaacgtaaaaataccgatgtttctggcaaacttcctgaatcatatcgctatagtaaatactttgataatgcctacctgcgtgaagtactacttgagaacaattcacttgatgaggctcacgaagcagttccagagtatgaagttagttggaaggacagcagcggtagtcagcgattcaaaatacccttctgctattcgaccaatgggcgtgaataccgagctgcaatgaaaacaaaaagtggtatttggtatcgtgatgttcgtcatcaaaccaatatgccaaaagccctaccagagtggcatcagccggaagaacttatggctatgttgggctgcgatcctcagaagcaaaatcaatggtttgctgataatccgagtatgagtgaattagggcttcgctactatcaagaagatgctgttcgcgcggtagagaacgcgattgttgcagggcaacaagaaattcttctggcaatggcaactggtactgggaaaactcgtactgcgatcgcactaatgtttcgcctgatccagtcccagcgctttaaacgagtgttgtttcttgttgaccgccgctcactcggtgaacaggctctaggggcatttgaagatacacgcatcaacggggacacttttaacagtattttcgacatcaaaggtctgacggataaattccctgaagacagcactaaaattcatgttgctacagtccaatcactggttaaacggactctacagtcagacgaaccgatgccggtgggtcgttatgattgcatcgtggtggacgaagcgcatcgtggctatattctcgataaagagcaaaccgaaggcgagttacagttccgcagccagctagattatgtatctgcctaccgtcgtatcctcgatcatttcgatgcggtaaaaattgcccttaccgccactccagccatacatacagtcgatatcttcggcgaacctgtttatcgctatacctatcgtactgctgtgatcgatggttatcttatcgatcaggatccaccgatcaaaattactacccgcaatgcccaagatggtgtgtatttggcgaaaggtgaacaagtggagcgcctggatccgcaaggtgaagtgattaacgacacgctcgcagacgatcaggattttgaagttgcagattttaaccggggtttggttatccctgcttttaaccgtgcagtttgctgtgagctgactaaatatttggacccgacgggtcaacaaaaaacattgatcttctgtgtcaccaatagccatgcagatatggtagtagaagaactacgtatagcatttaaaaaacagtacccgcagttggaacatgatgcaatcatcaagatcaccggcgacgctgacaaagatccgaagaaagtgcaaacgatgatcacacgcttcaataaagagcgtttgccaaatattgttgtcacggttgatttgctgagcactggcgtagatattccgtcgatctgcaacatcgtgttcctgcgcaaggtaaaaagtcgcatcctctacgagcaaatgaaaggccgtgctactcgtctttgcccggcggtgggtaaaaccagcttcaagattttcgactgtgtggacatctatagcacgctggaaagtgtagacacgatgcgtccggtggtgatccgcccgaaggtggaactgaaaacgctggtcaacgaaatcactgactccgaaacatacaaaattaccgaagcggacggtcgcagctacgccgagcacagccatgaacagttgatcgccaaactgcagcgtattatcagtctggcaatgtataaccgtgaccgaagtgaatcagtggataagcagatccaccgactggatgaactctgtctggatgccgctggagtcggtttcggtagcctgggaatgcgcttgcgtgaaaaagggccacagtggagtgcagaagtatttaataagctaccgggatttatctctcggttggaaaaattgaaggctgatattaatgctctgcgcgatgcgcctatcttcctcgatattgatgacgaggtgatcagtgtgaaatccttgtacggtgattatgacacaccgcaggactttctggacgcgtttgatgaactggtggaacgagccaaactagcccctaatgctcagcctgcgcttcaggctgtcatcaatcacccaagggatctcacccgcaaaggacttgttgaactacaagaatggtttgaccgccagcacttcgaagaatcgtcactacgtagcgcatggaaagagatacgcaatgaggatatcgccgcaaggcttattggtcatattcgtcgtgcagctatcggtgatgtgttaaagccgtttgatgaacgagtcgatcatgctttggagcgaattaaaagtgaaaacgactggagcagcgagcagaaggcctggttagaccgtttagctgctgcattgaaagagaaaattgtgcttgatgatgatgtgttcaaaaccggtaatttccaccgtcgtggcggtaaggtgaggctgcaacgcgcctttgatgatgacctcgacagtgtgctggacaaattcagcgattatatttgggaccagctggcctga

SEQ ID NO: 309192 - DNA, 1128 bp, Proteus mirabilis
atgtacacactgacaaaattaatacaatcattaatttccttgggaaatgataacgctagaagtaaggagttggagcaagaaaatgagaacagcaaaaaagaaataacgtccataagattgaaacctcagactagaagttatttacaagcacagagtgaagtattaggaatttcagtttctcaagtcataaatttaattattgatggagttgtggaaattgaatcacaacctcaaaaaaacaaaataaactcaatttatgaaagaataacaactgtatttgaaagccacaacataactccattagatatgagtcgtatgttaaaaaaatatggtgttaccttatctaagttaaaatctgaagatgctattcttgatctgatcactcctgaaatgctcaacgatatcgcttcatggtttggtgtaaacataaaatggctagatggtacacatgcagatatttattatcataggaatttaacgtggtataaaaatccagaaggactggctacgactattttatccagaagaataactcatggtagtatcaatatctttattatcaaacgacatggactagactttcatgttgctgaacaaaacgatgacaataaaaatcaattagatattggttttatccttagttatccacaagaaattgatggaatatcatttgataagtatgaagtatgcgaattccaacgttggaattatgataagtgtcgtgatgacttaaaattgatatttaaatttttacatgacttaagtgaggcaacatctagagttagttttactggtataagtcttgacgataatttaatagaaaaattacgctcaggcagagtacttcctgcacaaattagaaaaactttatatcgtggaggtatttggtatcctgaagatatgacatcaggtattgaaagccgttatgaaaataaggatttcaataagtatattgaagcatatactaactctccttataaaagattcgaatacacacctgactcacaagatggaagaatttggaattttactgttaataataagggagaaaaacaaaaaggcttttcgtccttacacaatgcattactagaagcatataatctgtatcatctatctaatcgcgactaa

SEQ ID NO: 309193 - DNA, 276 bp, Proteus mirabilis
gtgcaacacaatagtaaacttgaagaattaagccaagcacaaaaagaacgactcgctcatattgatttcactttattattcaaaggtgaagctgggcgtagttatttaaccgagcgctttagcgtagcgccgtctgtggcaacacaagattttgcgcggtacaaagagttggctcctaacaacgttatgtatgacgaaaagcgcagagtgcacttgaagacgagtgcattccagccgttgtttgattatgacgttgttcgaactcttggacgataa

SEQ ID NO: 309194 - DNA, 1170 bp, Proteus mirabilis
atgattaaaagaatcagcgttaacacattcaagtctttagttgattttgagttaaaccttgactcaaagtttaattgcattattggtttaaacggcgcagggaaaagttcggttttacaattatttagttatgtatctgctcttatagatggaaaaattgaccgttggctaactgaaagaggttgggaagaaaaagatgttgcttctcatttcttccccacacgaaaaacgtttgatcttgcactcgatatagagctttcagataagcaattgcgttgggaagccacttacaactggaaaagaggcttatgtacaagtgagaccctaactgatttaatcaatggtcagcaactgttacgtctatatcagggaagactcaaaactaagcgtcacagttttcctgatctgattttcaaatattcaggttccatattgtctgctgtggatgattcagctttaccgcaagaagccatcatttttcgaaattttatgagtaatattgacagtcatgaccttttatcgcctaaggtcatgcgttcaggtcgttttgcttcagcaggaaaaattggtggtgcaggagagtatctaattagttatatccataaccttgataagaattcccaaaatattttattaaaaaacctatatggctattttcctcaagtagtgaaaattgaaactaaaactgagttaaatggcacattaagtcttttgttaacagagcggttttataatgaggatgggtctcacatcgatgttgtaaccaatgccaagcacatcaacgatggcatgttgcgtattttaatcatactggcaagtcaaagatctagttcgagattccagcaatttgatgaagttgagaatggtgttaactctgaaataaccgaaaaactggtcgaggcattcataaactcacctcagcaagtcttgattacaacgcatagtccaatggtattgaattatatagaagatgaattagcgaaaagttctataatacttgtttataaaaataaacaaggacataccaaggcaaccaaattatttgccttaccatctctgactaagaaacttaattcgctggctcctggtgatgccatgcttgacgtgtacctaaaagatactgccgaagaagctgaacttctggcaaattcgtcagagttgagtcggtag

SEQ ID NO: 309195 - DNA, 738 bp, Proteus mirabilis
atgattacaagcattttggttacaggtgaaggtagctcggatatgggaggttcaaataatgggcaatcaatatcaacaggtgagttttacaatcttggtcctatggcattgttagcggttcgcctattgcagaaaattatccctgattggaatgaagataatatagattttcaatcccccaataattggatgacttgtatttcaggcaacgagttggcacgccaagctaagagggttcgtaaacatcgaccaagtaaaaaattaaaaaaaggcttcgttgagcatgcaaatagagccacaacaatggctggctatgcaaaagacaatggacaccagttggctttctattttcatgataccgataggtgtgattttgatgatttacatcaatctatcatgctcggctttaatggaattgaaggtgtgcatggaataccgatgatacccaaaccaacctcagaagcttggttgatatgtggtcaaaagcaggatccatatgctcattgtacagctttagaaaccgaactgtcagggaatgattctgcatcagatgaaaatgcccctaagaaaattttagctcaattgttagggcaagaagcgacaacagaacagcaatatgaactggtaaatgggattgatgtcacacgcatagacatgcctagttacaaccagtttaaagcagatttgatcacagccatcgaagatgtttgtggtcacggaacagcgagaacattatga

SEQ ID NO: 309196 - DNA, 3630 bp, Proteus mirabilis
atgaatactgcgaaactaaaaaagtatgcccctcaagcaagacgtgaatttatcaccgcagtttcaaaacaactaaatcaactaggtatatacagcggcacacagatatcagagtcaaaacaagaaggctcagtattactaattgaaggcaaaacctttgagtctagcgtaaaaacagccagagagcgattggtcaaaaaggttcagacaatgggctataaccaactggtggaacaagtagcctatacctggttcaaccgtctgtgtgctattcgctatatggaaatccatgactatctaggccacggttttcgtgttttgtcgcacccagacaaccctaaaggatttgaaattatcgaccatgcgcaagatgctgcggatgaactcggattagatagagctcgcattgttgaactcaagcttgcgggcaacaaagacgaagagctttatcgtgaactgctgttgggccagtgccacaagctacatgaagcgatgccattcttatttgacgcattggacaatgaaactgagcttctgctaccagataacctaacacgtaccgactcaattctacgtggattggtagatggcatccctgaagaggactggcaacaagtcgaagtgattggctggctttaccagttctacatttctgaaaagaaagatcaggtaatgggtaaggtagtcaaaagtgaagatattcctgctgctacccagctatttacacctaactggattgtaaagtacctggtacaaaactcagtcggtcgtcaatggctgcaaacctacccagattctgccattaaaacgcagatggaatactacattgagcctgctgaacaatctgacgaagttaaccaacagctaaaggctattacgccagaatctattgaacctgaaaccatcaaagtactcgatcccgcttgtggttcgggccacatattgattgaagcctataacgtgctaaaagccatctacgaagaacgtggtttccgctctcgtgacattccaaagatgattctggagaacaacctctacggcctagacatagatgatcgtgcagcacagttatctggttttgcgctgatgatgatggccagagatgacgataagcgtatttttacccgtaacgtgcgacttaatgtactgtcattgcaggaaagtaaccatattgacctgccgaccttatggaaagcactcaatctatcgggaagttggcaaagcggcacatcacaaggcttgttctcagatgatgatcaagatttaagctcgttcaatgcagacaaccgctaccaactgctgaagcgaacgttggcaagattcactcaggccaaaacctttggttctttgattgatgttccaagcgatgagcatgagcaattaaaagagctactgaacactcttgtagagcttcaagagtcaggcgattcaatgcaaaagccagcagcgaagcaattgattgaaattgttcatcaggctttggttttatctattcgttacgatgctgttattgctaatcctccctatatgggagcaaaaggaatgaacgcagatctcaaagattttgcaaagaaaaactatcttaatagtaagtctgatttatttgcgatttttatggagcgagcgttttctttgctttcaatatacggttttaatgctcaaataaacatgcaatcttggatgttcttatcgagttatgagcaactaagaagcaatttattggaagaccatacatttattactatggcgcacttaggtgctcgtgcttttggtcaaatcagtggtgaggttgtacaaactacagcatggattattcgaaatcagcatattaatagataccagcctactttttataggctgattgatggcaatgaagaagaaaagcaaaaagcgttgctcaatagagagaatgaatttgcagcgacagctcaggatgatttcaaaaagattcctgggaatccgattgcttattgggttagtagaaacgtaattgggttatattctgatggcaaattgataggtgctcgtgcaaaaaaaggcctgactaccggtgataatgataaatttattagattctggtgggaagttaaatggcctagtgtcagcctctctggagggaagaaatggtttcctacgcaaaaaggcggtgaatttcgtcgatggtatgggaattttgaacatgtgcttaattggttggacgacggtaaagaaataaaggactttaagtttgacaatggtaagttacgttcagtaattcgaaatgaaagcttctttgggaagtcaggtgtcacctggacagatgtctcaagtggaaaattaagcatgcgatttgttcctgctggatttgtttttaatgcctctggacccactgttttttccgagaataatcttggtattcttggtcttatgaatagtaatgtagcaggaaaggttgcagagttcatatctccaacattacactttgaagttggacaaattcaaaactatccacttttaaagacatccgaaaaagttcagataaatactggggaattaattcatttttctaaaaaagattgggactcttttgaaacttcatgggatttcaccggcctactgcttttaaattcccaataccatacatcgactcttttagcttcctatcagaaactccgaaaagactgggatgatatgacgctagaaatgcaaaagctggaggaggaaaacaattctattataacggagaattacgatttaaataatgaattgacttccgaagtaccaattaacgagatctctttgacctgtaatccatattatcgttatggcaaaggaaaaagcgctaaggagttggaggatttgcttctagccgatacgatatgcgagctagtagcatattcgataggctgtattatgggccgttattccttagaccgagaaggcttgatttacgcccattcaggcaatgaaggcttcgataatctggctgccgagggagctttcaaaaccttccctgccgacgaagatggcatcattccattaacagaccaagaatggtttaaagacgatgctaccaaccggttccgtgagtttgttcaagtcgtttggggagatgatcacctgcaagaaaacttggatttcgttgccgaatcactttgcttaaatgccataaagccgaagaagtcggaatcagctcttgagacgatccgccgctatttatcgactcagttctataaagatcatctgaagacttataaaaaacgccctatttattggctgtttagctcaggcaaacaaaaggcatttgagtgtttggtttacctgcatcgttataacgagggtacgcttcctcgtatgcgtactgagtatgtcaccccgctactaggcaaatacgatgcttatgcagagcaacttgagaagcagattgaaacggccgactcaaccagtgacgcgaaccgtttcaaaaaagagttggatgctttaatcaaaaaacaggtcgaactacgcgagtttgatgacaagctaaaacactacgctgatatgcgtatttcactggatctggatgatggcgtgaaagtgaattacggcaagtttggtgatctgttggctgatgttaaggccattaccggttcggccccggaggttaactaa

SEQ ID NO: 309197 - DNA, 330 bp, Proteus mirabilis
atgacaacttatattcaaccgttaaaaacgtcacccaagaaagcaggtgaacgtaaacaagtagaagttaagcatgtaaacagtaattcatataaagcgcgtcaatacgctagatatgcatctttcagagctaacaaactgaaagaagaagagattgctaaagctaactcagtgaaagagaagaaagaacgccctgttctctctctcaaaacaacaaagcattatccaagtggagataactgttgcttgccaaattctagtatttactcagctaaatatagaaaatctggtacgctgttagaatctggtgaagtaactgcgagggtttaa

SEQ ID NO: 309198 - DNA, 156 bp, Proteus mirabilis
atgaatcttacgcttaaagcccggctaaagctgtgctatgaaatcctaacagtgcgaagtgggcataaacacccggcacaagagaaagatctttctacatttcagcgaggttatatggctggaatgaaagactgtcagttgggtagcaaaaagtaa

SEQ ID NO: 309199 - DNA, 543 bp, Proteus mirabilis
atgcaatatccaaaagttattgttaatggcgtatcggttagagttgatagcgctgggcgttatagtttaaatgacttgcattcagcagcagtattgaaaggcgaggcaaacgaatcgcaaaaaccaagtaagtttattcgcagtgcttctgtgaagcgatttgtttctgctcttgatgccagaggacaaaaaagtcctttgaaagaaaatcaatcacttaaagtcattaagggtggtaatgaacaaggcgtgtgggcagcagagcttttagctgttcgttatgccgcttggattaagccagagtttgaaattagtgtgtatgaaacattccgagaggcaacgcttaacgggatatcaaatatgacaacactaaatcgcttggacttacttattgccaccgaaaaacaagaaataagtcactgcgctcgcaagatgaatagttggggtgtaggaggacgtaaaaagtcactagctgatgctcgagctaatattattgctcaaatggatcctgatatggtttcaatcatggaaggttatcaatga

SEQ ID NO: 309200 - DNA, 810 bp, Proteus mirabilis
atgactattaacaatagcaatcctggtaagttaatttggcatgtatcctgtgatgagtcaggaattgatggccaaagatattatggttttggtagcttatggatgaagtaccagcgtcgaggtgacttcgttagattaattagggaattaagacaaaagcatgatttttttaatgaaatcaaatggcagaaagctcacgctaaaaaaaatgccgcatttcatgctgagctaatcgattttttctttaaacatccatggttagcattccattgtatcattattgaaaaatcaatagttaacaaagctctccatggtggagattacgacttagctatgagaaagcactttggaacacttatatacgcaaaaataaacaatgttatctctgcacacccagatagggattgtgaatttagaatagaggtagatccactcccttctcgatataaaaaagcagatgaggcttttcatgttatatgtaataacagattagccaaaaggcacgggataaaaaatattatatctactgttgttaccaaagactcaaagtcatcagaacacatacaaatcgccgacttcttacttggatctgtaatgtgtgcatatcaagggaaagcatcctcagaggcaaaattagctgtatccaataacgtagctagttaccttgggtgggacactatgtttcatgacacatggagtagtgaaagaaaattcaatatttggacattccacgatccaactagagggtctcgaagagtggaaacaaaagctgtcaacctaaaatacaaacttccagatagaaaaaaataa

SEQ ID NO: 309201 - DNA, 333 bp, Proteus mirabilis
atggcaaaaaaagatgttcaattaaatataagaatgacaagagagcttaaagaaagaattgaagcgtccgccagattaaacaacaggaccaccaatacagaagcgataactctcctagagaaagcattagaatcgccaatgaaatttatggttgactctattagcttaatgtcgatagagaaaagcaatggcttagttaatgagaatatagaaaaaatagtaagcgaagcttatttctcggctttaaatgaatatatatctaaaaataaattagattttatggattatgttagtgataaaattcaagagatcctaattaaaaacaagtcttaa

SEQ ID NO: 309202 - DNA, 171 bp, Proteus mirabilis
atgaaaaaggaaataacaaagcaaaagttactcagaacgccagaaagtttactctggaaaataaaggaagccgcagctcgtagtaaaagaaccgagaatcaagagatgctattgagattagaaatgtcttttgatgatcgagtagaaaaggtaatgagagaatgtttataa

SEQ ID NO: 309203 - DNA, 210 bp, Proteus mirabilis
atgcaatttaaactgactagtgttcgctctgtgaatcggagcgatgaatcaaataagctcgaagttggactaataggctctgatggatcagttcataactttgacattgataccgctggtaaaaatgtcatgaatctaaccttaagagacattgaaaaattagcaattcaatatgcaaaaaatagttttgctaactgtactaacggctaa

SEQ ID NO: 309204 - DNA, 198 bp, Proteus mirabilis
atgagaaaaagctctactttacttgataatatcatttatcaagcaggctcgaataattttgaatatttaaatcaagcttgtgactcttttttatgtaatggagacactgaagctacggaaaaaagagaaataaataatgagcctcaacatggatttgaacatatatataatcttattatagaagaaaacctgccctag

SEQ ID NO: 309205 - DNA, 207 bp, Proteus mirabilis
atgaataaagatgctaaaaaatactatgtgatcttaagtgcgttgctatttttcttcttttttacatggtcttcatcgttttcattaatctctatttggttacatcaatatgttggacttaaagcaacagatactggtttgatattctcggctatatcattgattgctttatgtgcccagccactctatggctttattcaaggataa

SEQ ID NO: 309206 - DNA, 174 bp, Proteus mirabilis
atggagttattcgctccaacaaaattaattacttcatatttttctttatttgttggttttaattttaaacaacctccatttagccattctatatatgaattaggttttagtttaattgctgatgaatcattatcaacattaacaatatattcatcatcaatatatacagggtga

SEQ ID NO: 309207 - DNA, 672 bp, Proteus mirabilis
atgagttttcacgctgttgattggtttacagttggtggtagtttatcttctgcttgcgcagtgtttgtggccgtggggatttatttatttcaaaggcattctgataaaaaagaaaaaaaagatattaaaaaattgaaaattgatgccataaatcggttattggcacatagatccacaccgctgtgtcagagagctaattttttagctgaatgttgtgttcttgtattaaccacaaaattagattgggtaaattttgataatagacgaaacacaatatcatttggtataaatgctaggaatataagtaatgacgacggtactattgctaggtttaatgtaccggaaggttattattatctaaacgaatcaactttgttaacttgtgctgaattatctgataggaaaaatgagttattacaaacttcaatcagaataaatataggaggacagagttttaaagaactaattgatattattatccgtcatgcagaaaataatagtgttaataatattaaggctattttctctaaaaatgagcaaagtaaatacaaattaatagatcatttatatgaagtttttttatctttggaaaagctagaacctgaaatagagtgctataaaatttacgtagaaactaaaaataaaattaacacgttaaaaaaacaattctaa

SEQ ID NO: 309208 - DNA, 177 bp, Proteus mirabilis
atgaaaattaaaacctcaaaactaaaaggattagcgcttgattgggcggtaggtaaagccattggcgttgatgttcgtatttataaagagtttattgttgatgctaataactgtgtatatagcccatctagcgactggttaaagtgtggtgagtttattgagacttacgctatctaa

SEQ ID NO: 309209 - DNA, 837 bp, Proteus mirabilis
gtgcctgtaaatgtagcatatgctgaatacaaacattgtctgaataactgttcaatgaagtataaacatagtattcaattcgatattgcatcatattttaatagtttatatcaccatgacttatcttactggtttgtacataaacaattatcagacgtcgatagtagtgccgctagtcaattttttcgagaaataaattcaggtagaagtattgattttttaccacaaggaatatatccgtgcaaaatgattggaaatgaatttcttaagttcattgacctgtcaggaacattaaaatcatcacaatttgtcagatttatggatgattttactctttttgatgatgatccaaatgtattacgcgaagattttattagaatacaaaaattgttaggtacatatggattaaatataaatccatctaaaactttctatgatacgaaaattggtaatttacaaggtcagctaagcgaaattcgccaatcattaagagagatagttacgtggtttgaagagttcgatacagcatcaggggtggatatccaagagattgaaatcatagaagaaaataggctaaattcttcacaggttgagctgttaatgtctttcttgatggatgactccatagaggaatctgatgctgatttaatattaagttttttaaggagtcatagtgagaatttgttagaaataatgccagttctattatctagatttcctaatttgataaagcatgtacactctgtttgtagtgatgtaaaagataaaaacacgttggctagggttatttatgataggattatttacaagggcaagagttatatggagaatgtttga

SEQ ID NO: 309210 - DNA, 252 bp, Proteus mirabilis
atgataatattggagttatcagtagaatataaaatatctaaagctaaaattttagaaataccagagctaggtttcggtttaaaagaaataagagatgagtatttaaaaacaggacaatcagattggctatcgtggtcttcagctattggctctcgcactttaccttctgcagaacgtaattacatccttaaatacttcgcaaagtgttcccctatgaatttgttgatttcagaatgtattaataagatataa

SEQ ID NO: 309211 - DNA, 915 bp, Proteus mirabilis
atgtttatatcactaaacattaaatcattacaacacattaataatgttttattagatttcgatttttccaataggaatttaatttgtataactggccggaatggaatagggaaaacatctatagtaaaatcattatgcttattaaaagatataagtgtcttaaataagacatcttcaattttcagtataaataaagaaactaatataacaatatctataaataaaaacaattatcattattattgtaataacggagaaattgattcaaaagatattattgatgaaagttttttaaatgttgaactccctattccttatggaaaacgtttctctaattttcctgttttaggtaatattgataaagaattaagagagagttatattaagggagagtttaataaaaatatagaaataatttattttttgagccaaatctatataggagagagattctcatcactcaaagaggtaataataagaggtaataagtattattttcttcctcttgatggatatagatatattagagaggattattttagctctggagagtactttgtaataaatctatataagacagtaacttctgattgtaaattaattgttgtagatgaaattgatatttctcttgatgcctctgctcaagttagattaatacaagccctcaataatttgtgtgataaatataagaaaaaaataatatttacaacacattctcttcctattatgagagtgttatatcaacaggttggtgagtctatattttatttagagaatattaattccaggctaattatgagagaagtctcatatagttatattgtgggtgagctttttggttttaaagattatgataaatatattctaacagaagatatcacactgcatatcgtcggcagcgtcagatgtgtataa

SEQ ID NO: 309212 - DNA, 1206 bp, Proteus mirabilis
atgagtgagtggaaggaatatcaattaaaagaattaacctctaaaattggaagtggatccactcctaaagggggaggaaattcatataaagatgaaggtatttctctaatacgaagtcaaaatatacttgattacaaatttagcattaatggattagcatatattgatgaagtacaagctaatgtattaaaaaatgtttctgttgaagaacatgatattttattaaatattacgggtgatagtgtagctaggtgctgtaacgcaccaaaggaattcttaccagcaagagttaatcaacatgtcgccattattcgttctaatattaaattgcttgataataattttttaaaatattctttaattgactctaaagaggaattattatccctttcggaaattggtggtacaagaaatgccttaactaaggggatgttggaaaattttgttataaaactaccatctttaccagaacaaaaagccatagcctctgttctctctgcattagataacaaaatcgacttactccatcgtcaaaataaaaccttagaatcaatggccgagacactttttcgtcagtggtttgtagaggaagcgcaggacgattgggaagaggttaaagttagtcattttgtaacattaaataaaagctcgataactaaaaaatatgatcatcaaaatattctatatttagatacaagctctctaactaaaggctatattagtgagttgaaaccattaattttatcggaggcacctagtcgagctaaaagattagtccaacatcttgatatattaatttcaactgtaagacctgaccagtgtcattatggtttttgctttaaacctgaagcaaatctagtggtatcaacggggttttgtacgataacttgtgacactattacaccatattttatctattatttattaacatccgaagatatgaccgaatatttgcattctatagctgaaggttctacatcgacttatccatcattgaaacctgaagatattggaaatgtgttatttgcattacctccaaaagaaaaattgattgattatcataatgttgtgggagcaatgtggaataaaattaatcaaaatcaaaagcaaatccaaactttagaaaactttcgcgacacgttactccctaaattaatgagtggagaagtgcgtgttaactatacaccagaagaaataaaacaataa

SEQ ID NO: 309213 - DNA, 1176 bp, Proteus mirabilis
atgaaaatttgtattaaacatattaaggaagaaaatgtgttaaaattagcgatttcaaaaaatgaaattgctaaatgctgtgtatgtaatactacaaatatatgtatagacagtgagtgttcagactttcatgatatgttgagagctataataagatatttctatgatgaacataaatataatggtcatttaggcggagatgagactcctagttccataattcaaagcagtgattttatatttaaagatgaagtattttcagacaaagagcgagtttatgatctagacagtgaattctatgatataggatcttattttgatgatgataaaggggtgtctttatacgcaggttattttaacggtatgcaaaatatgccattagagtcaataagtaatgatgaagatataagaattacttcccttcaaaagaaattagaggttagcaactattatgagcatgaagatttcatcaaggactctatatctcagtatgttggaagattcgactatatattaaaagaagaagatgaactttatagagccagagttggttatatggacagcaaagttgcttataaagatggattttctagagctggagtaaagttctattcaccattttgtggggataaaataagcgcagtgccgccacttaatgcaaatgaaggtagagctaatagggcgggagtgtctttcttatattgcgcgactaatgaatatactacaattgcagaagttagacctcatccaagtgatatagtttctatagcaaagttcaaagttaactcagatttaaaattatttgaccttagctatcctcatctaattcattactatcattgtgaaacatccatgaaagaactcagaacttatgcaacaatagcaaaaatattcaatattgctactcctccaagcctaaaagggagatatttagttactcaattaattgccaatgcaattaggcaactggggtatgatgggatcatcttttcaagtacagttggtgacggtaagaacattgttatattcactccagaaaatgcatccatagtcgaaaattctgagtatgttgtgaatataaatagtgttatttacacgtttgtaaaatcaggtgttattggtagagatgatgaaaatgtaacttataaagatgatataagaactggcatcttgtaa

SEQ ID NO: 309214 - DNA, 654 bp, Proteus mirabilis
atggcaaaacctatactttttgaagatcattattttaaaactaaaactttagctattaaagaaatacaaaataaaataaaaccttatagtgcaggagataaactaaataaagaagatgaaattttttttcttaagctatttaaactgcatgatgaatatgaaaaaaaaattggttgtggagtatctcatattacgatagaaaaagattttcataataacaaatgcctttacattcaccgagccgatggaaagagtgaagatattagttggcgtcattgcattcgaccaatgtctcaaaaagaggtagtttcttatgcatttcgtagagctgtaaaagaaacagttatagaatttaaaaaaattcacttacaagacaatacacattgtccaatactacatatacctttagatttttataatagtgatacttcttacataacccattcattcgatgaattatttttaaattttttgaaagaacatggcctaactattgattctatagagttaaaaaatccagaacaaaacgatcctgatcaaagaggtattattcaagatttatcactaagaaatgcttggattgaataccatagagctaattcacaattaaaactcataagcagaaaagcaaattctcgcaaaaaaaatatataa

SEQ ID NO: 309215 - DNA, 447 bp, Proteus mirabilis
atgaaaatctatgtatatgctagtaaaaccacaccttcctattgggaattcattcaccgaggtattcgaattagaagtgaaaatttccaaaatcgaccagaagccattgataatttggaagaaactcttttgactttagactctctttccgtagaacataaaaatgattcagcattattattctttgaatttaaaagcaatggtaataattggtcatggtcagccttatctaaaatctcaggtgaatgcattgaactagaaacacaaaataatatccgttcgcatgaacaagcattaatcaccgctggttggtttaaagataacgtcatacatgctcccattgttgattcaaatggcattgaattatcatccctatgttttagcagaatgttttccgaacgatttggtataggtgatattcatccaatgtctaaattaattaaataa

SEQ ID NO: 309216 - DNA, 318 bp, Proteus mirabilis
atgaaaagtaatataactgttataaccaataataaatgtgaaaatatctttattcgtattaaaaataaatatacatctgttgaagattttacttttagattaggtgaattaacctatttttatcctgctgataataatggagaaactgttgttattatgctaaaaacaatgaatttttgcccaacaataagatattcagattttagtgacttttttacttttataataaaaaaaatagccacagtaaataatgagatgcagctattcgaattaattgtgaatacggatttaagttgtgaatggtatcaggtgacttaa

SEQ ID NO: 309217 - DNA, 432 bp, Proteus mirabilis
atgacaattaagaaactcgaaaatggtcaatatgaagtggacattagaccggctggccgtcacggaaaacggatcagacgacgctttgaaaagaagcaagaagctattttatttgaacgttattcactggctaatcagcaaacaaaagattgggtagaaacatcaaccgatattcgccctcttagtgatttaattgatatttggtgggaagtgttcggcaaaaatacaccttatggaagaatgacacacctaagggtgagacgtattgctgaatcactgaataatccccctgtttgccaattaaccgataagcaattggtactctatcgtgagcttagactcgcttctggcgtaaaagcctcaacgataaatagggatatttcagcactcggcggtatgtttactgcgcttaaaaaacggatttctttttaa

SEQ ID NO: 309218 - DNA, 2130 bp, Proteus mirabilis
atgtctgactatatttcaacccaccgtgaatgtgtcgatattctacatactgatttttctgatgttgccgtgattattatttcacttgatgacattcagaatggaaagcttaatttaattgaacaaaatagctttgaacagcctatttttgccgttattaataaagatgaagttatccctgctaatattattaatcgattaactggtgtaattgatttaaataaaaaaaatagtgagttatataataaacaactagaaactgcagcgttaaaatatgaagagagtctattacctccttttttcggcagcttaaaaaaatacgttgaacaaggaaattcagcttttgattgtcctgggcatcaaggaggtgaatttttccgccgtcatcctctaggtaaccaatttgtcgagtattttggtgaaaacttattccgctctgatttatgtaatgccgatgtttctatgggtgatctgctgatccacgaaggtgccccatgtgccgcacaacaacatgcagcaaaagtctttaatgccgataaaacttatttcgttcttaatggtacatcttcctccaataaagtcgttcttaatgccttattggcaccagatgacctagtattatttgatcgtaataatcataaatcaaaccatcacggagcattaattcaagcaggagcaacgcctgtttatcttgaggctgcacgtaacccatttgggtttatcggtgggattgatgctcactgttttgaagaaaaatatcttcgtgaactcatcaaagaagtcgcccctactcgtgcaaatgaaaagcgccctttccgcctagccgttatccaattaggtacctatgacggaacaatatataacgcacgtcaggtagtcgataaaatcggacatttatgtgactacattttatttgactccgcgtgggtgggctatgaacagtttattccaatgatgaaagattgttctccacttctacttgaactgaatgaaaacgatccggggatcttagttacacaatctgtacataaacaacaagcgggattctctcaaacctcacagatccacaagaaagatcgccatattaaaggtcaaaaacgctatgtaaatcataaacgtctcaataacgcctttatgatgcatgcctctactagtccattctatccattatttgcagctttggatgtgaatgcaaaaatgcatgaaggtgagtcaggtaaacgtttatggatgaattgcgtaaaaacagggattgaaacccgtaaattactcctgaaatcctgtaaacatattcgcccgtttattccagaaactatcgatggccgtgcatgggaagattttgataccgatgaaattgccaatgatctccgattctttaattttgttccgggagagcgctggcactcatttgagggatatgaagaaaatcaatactttgttgatccatgtaaattactactaaccaccccaggtattaatgccaaaacaggaaaatatgaatcatttggtgttcctgccaccattttggcgaactacctacgtgaaaataacattattcctgaaaaatgcgatcttaactccatattattcctgctaacgcctgcagaaagcatggcgaaaatgcagcatctggtcgcacaaattgctcgctttgaacaattactggaacaagatgccccactgaaagaggtacttccatccgtatatcatgccaaccaaacacgttatcaaggatacaccatccgtcaattgtgccaagaaatgcatgatatgtatgtgaaatttaatgtaaaacaactgcaaaaagagatgttccgtaaatcacatttcccacaagtcagtatgttacctcaagaagccaatatcgcttttgtgcgtggcgaggtggagttagttgccgtggaaaaaattgaaggccgtatcgccgccgaaggtgctctaccttatccaccaggagtactgtgtgtagtgccaggggaaatttggggtggctctgtacagcaatattttctagcgctagaagaaggaattaatctattcccgggattctcaccggaattacaaggtgtatatatccgcaatgatgaggacggtcgtctgcgggcatatggctatgtaattaagcactga

SEQ ID NO: 309219 - DNA, 1200 bp, Proteus mirabilis
atgatatataaatctttttatcagttagctgatgattttttgagaaataataaagaattaagtaaaaaatataataaacatagagctacgaatttggaaaaaaaagcaatcgatcttttaaaaagtgtaatggtagattcagaagtttatcaggaaatatattatgattcggttgatactggtttacaatgtgaagtagatggtttattaaaatatagagatatcttattcattattgaagctaaggctcataaagtttcagagcaagctgtcggtggtagtactcaaagagtaaaaaaacatgttgaacaaattataaaagaagcttatgaacaatgcataaggactaaacgatcactattttctgaagagcatgatccaaaacttagatataaaaataaaaaaagagtcaacctcgatttatcaggggttcaccatgttgtactaatgcctattagtcaagaaagatttgatgagtttacaagtaatcctcattttgtatctgaaactaatttatttaataataatgaattaccatgggctattaatattttcgatctttatgtaataactgatattttagataatccaattgatttaattgattacatatataggagagtaagttattcaggaagaaacaatacatatatccatgatgagcttgattggcttggctattacatggaggataggcttcgaggtgtaagagaaaatatcgataacactgaatttaatatgataatgtttgaacctaattcaactaaatttgatgattattatatcaaaggcttggaaaagccaagattttattttaatctgtttctcaaaggcataatagataacatgttgaaatatgatactggttataaagcgataaagggtttttacttcttcaataagaaagagcaagatgatttatctaaaatgataataaataaggaagttgattgcaaaaaaaacaataagcatgggacagtagtatcatataactcagaacaaaaaatcattaatttattttatttctataatttttataatatagacaataacgataatgctttttttaaagaaagagctatatcagcacttaaaaaatcaccttattctgatttaataggttataaagtgtatttaataagaatacctattaatactgattttaatattacaggagttgattttatttgtgatttgtag

SEQ ID NO: 309220 - DNA, 1755 bp, Proteus mirabilis
atgactatgacagaaacatttgataaccgaaaaaaagcaatgcacctgtattttgccggttaccgcattgctcgcatagcggaatcgctaggcgaaaaggcgtccactattcacagttggaaacgccgcgataattgggatgaaatcagccctaccgaacgcgcagagttaaccgttgaggcgcgttattgcaatctaattttaaaagagagcaaagaaggcaaagattttaaagaaatcgacttgttagggcgtcaactcgaacgcatggcgcggatcagaaaatatcaaaacggcggtaatgaaacggaccttaatcctaagattgccaaccgcaacaaaggcgaacgccgtcagccagagaaaaacttcttttcagaagaacaaattgaaaaactggaagatatctttcgtgatacgttgtttgaatatcaaaaagtgtggtatcgcgccggtcatcaccgcattcgtaatattttaaaatcccgtcaaatcggcgcaacattctactttgcccgagaagcctttattgatgccctgaccaccggacgtaatcaggttttcctctccgccagtaaagcgcaagcctatatgttccgtgaatacattatcaaaatggcattggaggttgatgttgaattaaaaggcgatccattgatgttaagcaacggtgcaacgctctatttccttggcactaatgcccgcacggcacaaagttatcatggtaatttatatctggatgaaaccttttggatcccgaaatttcaggagttacgcaaagtgacttcgggtatggcgatacaaaaacattggcgacaaacctacttttcaacaccgtcaaccatgagccatgaagcgtacccgttttggtcgggcaagctgtataaccgcggacgcaaaaaagaagatcgcgttgatattgatatctcacatgaagccttagtcaatggacgtttatgtgaagatgggcaatggcgacaaatcgtcaatattgaagatgcactacgaggcggttgtgatttattcgatttagagcaactcaaaaaagagtatagcccggacgaatataacaacctgttaatgtgtcactttatggatgatatcgaatccctattcaactttaacatgatgcaaaactgcatggtggacagttgggaagtgtgggacgacattcaaccgttagcgctgcgcccttatggttatgatccggtttgggtaggttacgaccccagcaaaggcggtgaaaatggtgatagtgccggttgtgtggttatcgcgccgccgaaagtacccggaggaaaattccgcatattagaacgccatcaatggcgtggtatggattttcgcgcacaagctgacgccattaaaaaaatcaccgaacgtttctatgtggaatatatgggcattgataccaccggcttaggacatggggtttatcagaatgtcatccagttttttcctgctgcgcgtgagtttatttataacccgaatgtcaaaaatgccttagtgattaaagcctatgacgtgattagtcacggacgtttagagttcgatgcacagtgcgttgatatcattcaatcttttacttccattcgccgtacgaccacaggaagtggtaaccgacctacttatgaagcctcacgcagtgaagaaagcggacacgctgaccttgcatgggcaacgatgcatgcccttttcaacgaaccattaaccggcaccaccgagaacagtaataacattgtggagatttattga

SEQ ID NO: 309221 - DNA, 810 bp, Proteus mirabilis
atgtcgaagaaatcaaaaccggttcgtctttgtgttgaaggggcgacaacggacgggcgtcgagttgatcgcgaatggttaacccaaatcgcgaaaaactttgatcccacggtttatggtgcgcgagtcaatatcgatcactataactattcatgggcaccacgctttggtgatgtggagtcggtgtataccgaggaaattaaagaaggggcactggcgggtaagttggcactgtatggtgtgatcaatccgacgcctgatttaattgaactcaataaaaaacgtcaaaaagtctatacctctgttgaaattgacccgagtttttcagataccggcgaagcgtatttagttgggctggcggtcaccgataatcccgcgagtttaggcactgaaatgctgcaatttagtgctaatgcacaaagtagcccgctttcagagcgcaaacaaagcaaagataacgtttttactgctgcagaagaaaatcactttgaatttattgatgaaaacccgcagagcgagaagccagggctttttagcattattaaagagatgttttctaaaaaacaacacagtgatgatgcgcgatttaccgatgtgcatcaggcggtggagctgtgcgcccaagaagtacaaaccctttctgcagaaattaccgcattaaaaaacgccgaccaaagcgaagcggtaaaagcacttacgcaacaactcacggaattaaaaagccaatttgaaaatactgacgcctcgttctcacatcgtccgccggccacgggtggcgaaaataatagcgaagtgctgacggattgctaa

SEQ ID NO: 309222 - DNA, 2562 bp, Proteus mirabilis
atgaatagtagacgccgtcgggttgtaataaccggaatgggggttttatcatctttagctaaagatgtgcctcaatttaaacaggttctttttaatagacaatgtaatattaagccaagccaacgctatttaaaatggtttaaaaatgccaatgcatctgagattgagatggcattagattattcagatataccgcagcatatcgctcgatcactagacaatgcggcattatgggcatatcgagtctgcaatgaggcattacaacaagcaaacttaatagataatcagtctattttagataataccgcgatgatcgtgggcgtctcttcagcaggaacggaagcctttctgccattatttgaacaacatattgatgatttttcgataaaaaaagccattttatccggtggattttcatcatgctgttcgagtgtatcaagtctacttggcttacgtggtggtcttgaattagtggcgacggcctgtaccgcaagccctaacgcgataggtatggggtatgattatatccaaaatggcaaaaatcctgttgtgctagcggtcggaacagaacccatttatcttcctacctttgcgggtttttatgcccttaatgtgatgaaaacaacaccaacttccccattttcaggtactcctggtatgtctattggtgaaggtgcaggagcgttagtattagaagattatcaacatgcggttgaacgtggtgcgacaatatatggtgaaattgtctcttacgcgacatcttgtgatgcttaccatgaaactagccctgatcctcgaggaaatggtgcagtgcaagttatgtataaagcactggataatgcgggtattactcctaatgatattgattatataaatgtgcatggtacaggtactgaagcaaatgatcgcattgaaaccatgtcgatgaaaaaagtgtttcctaatatttatcatatcccattaagttcaacaaaatcttatgttggtcataatattggtgctgcgggtattgttgaaatcatcgcgtgttttatttgtttagcagaagacaaacttccccctacattaaatttcactcagccaaggcatagctgtgatttaaattatgtaccgaatttctttcaagataaaaaagtaaaattttttatgaagaataattatgcttttggaggaaataactgctctattatcgcaagcccttatattacagataaaacaccgacggaatataaagctaaaaaagtggttattaccggagtgggggcgattacatctattggcaataatgtaatggagataataacagcgatttcggcaggagataaaacaggtacattaaaacctatcgtatttgcgtgtgatgtgcagaaagatatcgacaacttgatgtctgttgtcataaaagataatgattttgagcaatcgttaggacatccttattttgatctcgacattgatcatcgcttaaaaaataacgcctgttatcatgctatcactgacgttaatccgaaaaaaacattacgttattatgatccaagaaaagctattcctagcgggacttatgccttattcgctttaaatgaagcacttgctaatgctggacgcaaaattaaacgtgatggtgataacttaggttttattgttggaatgtcaaaagggccacaaagtaccgttaatcgttatttacaaagtttaattcctgatccgcaaaaagtaagaacatcagaatttcctggtactttaatgaatgcagtaccgacattttgtgccatcacagagggaataaaaggttataccacgacattggcaacaggggttaatgctgcattaggagcgttaacttatggttatgaaattatcaggcaagatctacaatctcaggtaattgtcggaggggctgatgagcacttcagctctatttcactctattttcaagcgatgagtaagaaagttaatctgaccaagaatgcgacagattatcaggtttattctgatgcaagtgccggctatatccccggagaaggggcagggatgttatttcttgaagataaagagtatgccaagcaacgaggcgctaaaatttatgctgaaattattggctacggtaaagcgaatgataatacttttttagtagacgaaaatattattgatagagtggccgccttatgtaaggctatccaacaagcattatctgaggcgcaactcagttgccaagatattgatattatctgtggtaccagtgatggtaataaagagaatgatgaagttgaaatccgtgcgattcggcaactattttatcaagcggcaaatcatgtaccagtagttaattacaatgccttttttggtttagttgaatcatgcgctgggatattggcgatctctttagtgattcatatgatgcaaagcaacacgataatacctattccttatacaaaaagttttatagctgatgatattcattttgttacccaaccgattaataagcagatagaaactgctttagttcttggttcatcagaaggatgtaaccactatgcaattatcatcaggaagccgttatga

SEQ ID NO: 309223 - DNA, 1026 bp, Proteus mirabilis
atgacagacttttctcattatggcatggttaaaatttctggtgaagatgcttggcggttactcaattatcttatttctgcagacatttcatctattcgtgatgaacaactactttatacattgttgctagataaagaagggaaaataataagtgatgcctatgtactatgtgataatgaacactattttttaatctcagagtggatgaatagtgatgccatatgccagcagataaaaaaagtattagataagcaagatgaacggggtgaatgctaccaaattgatgctatcgcttctcttactccagattggcgtatgatctgtctggaaggcccctatgcttgggaaattttatctgaaatcgtcggtatggatattattggattaccttttcatgagtttatgtatgttgatgaagatgtcattactatgcgtgttggtaaacacggtgaatattgttatcacattatgggagatgaagagaaattaatgtctatttggcgacatttatgcactttatctgagaaatttgatttaaagattggcggggttgatgatttaaaaaatatacgactagaaaatccttgttgggagcctcaagtgattaatccttttactcgctgtcctattgagttacagatgcaatgggcgatcagttacgataaagatgtatttattggtcaagatgcaataaaacaacgtgctgataatggggtagatcagaaaatagtgggcgcaagaataattaatatgcctcagaatgctgcaattttacaaggcgatgcaatctattaccaaaatgaacaaataggcgtagttattcaagtgggatactcttttatattaaaagaacatattgctagaatattattaaaacgagaatttgcttatgttgatattgatgactataaaataaaaacggcttatggtgatattgattttatcacaacgagtattccctttgttaataatttaagtttaataattaatccaaccgaagatagttatcttgaaagacatcaataa

SEQ ID NO: 309224 - DNA, 705 bp, Proteus mirabilis
atgttaaacgaacaaaatcgtgctgagtttctgcaaactattgctcaaaaattaggacgtgaggtgacgcatacgccaaaaccacaagatccccctattaataatttagctaaaacacgcttaacaaatttaacccaagatgaattatgcaaagaatttactgattttgcacaaacccagcaagtaagatgcgttatcactaaaccagaacaagtgataaatagcttaatagcgctttgtgaaagctatgattgtcaaggctcagtgataataagtggtgatgagcgcttaaatgcacttggtgtaacacaagctattagtgaaaaatatgaaacttatatttgggatcctaaactcggtcatgaaaatattattcatgctgagcgatctcaaatagggattgtctttgcggaagcgggattaacagaatctggcgggattgtgctgttttcttctccggaaaaagggcgttctgtcagcctgttacctgaaacctcgattgttattttacgcaaaagtgacattttaccgcgagtggctcaacttgcagagcgtttacacaaaatggcacaagatgggatcagaatgccttcatgtatcaatttaattggtggtgcaagttcaacggctgatattgaattaatcaaagtatggggagttcatggccctgttcatgccgcttatcttattattgaagattgttag

SEQ ID NO: 309225 - DNA, 522 bp, Proteus mirabilis
atgggcattaaagcacaaagctcagtacatacaaagtggctgtgtaaataccatattgtctttttgccgaaatatagacggaaagtgatttttaataaaattcgttcaagtataggagagatccttcgagacctttgtaagtataaaggagtagaaataatcgaagggcatctaatgccagatcatgttcatatgttagtgagtattccaccaaagatatgcgtatcaagttttatgggatatttgaaaggtaaaagttcgttgatgatctttgatagacatgccaatctcaaatataaatttggcaacagaaagttttgggcggaagggttctatgtcacaacagttggactcaatgaagccacaattcaaaagtatatcagagagcaagaaaagtcggatttaatctcggataaattgagtagtaaagaatatgaaaacctcttcaagggggaagccaaagtagcaaagacactaagcttgaacgaagagaaagcagcgtcatttaggcgcagtcggtaa

SEQ ID NO: 309226 - DNA, 993 bp, Proteus mirabilis
atgttagagcctttgaaaatgaatgtaaatataaatgatatataccaatataaattaaaaagtttttttaattcacgagctttatcaattaatgaagaaaaatttatatttatagattctggaaaaaataaagagaaggttttatctctttatataaaaaataatgattttctttttttatctgagtggtgtaatttatttgattttgaaaaaatatataatctgctatctagtagaactaagtctaattattttttctttttccctttcttgaagatgtttttttcattgtttataattaatacaactgaatgttatagaaataaaaatttatttgtttcttattttattaatcaattaaagaatggacttgattttaaagataatcctgatgattgtaaatctgagttattcaattatttaatatatgaaatgggaatagggtctcgttatgataaatattttcaagtgataaataataaactattttttaatataaaaaatagttcttatgttgaagtgaaaaaactaataaacttaatacactcttttgcgaaaagaacagcaagaaatagtaataggaaatatttagaagtaataagggagtttcagttgtcgacaatagattttttattagatagtactgacaattactcgcttccgtatagtgatatatatataaaatatacttatccagatatattttataataattatttagaaaataaaaataatatttttagagtattgactgattgtgtaaaggaaggacaatcaaaatgtaatttttttgtttccgaaatgatttttatgaattatatatattatattctacgagaagaaccatctaacatattagccttggaagaattttgcaaagaaaataaagaagattttttaaaaataataagtagaattattaaccgtaaattttatcttaatattaatagttttaaaggccttaatcttgggcgttacttatcaaagatatga

SEQ ID NO: 309227 - DNA, 564 bp, Proteus mirabilis
atgatcaataaaatatatgatttccagtcggatgtgactattttttgttcatttatacaggaatattctgaaggggaagaaagcattattgggagagcaatgaggcaaagatgggatgcattcgataatagctacaaagaggcatcattggagctaagatctaatgaacagggtaaaaaaaattatcaatttgattttagtagtgctttgtcgccatttatggtttttagtgaagatgcattattgtctttatctgatattttgagttcaagaggacaagtattacccgttaagacagagagcaaacggaagaaatttgttggttattatccaactaattcactttcaggatgttttgacagaaaaaattctgtttatcgggaatatcccaatggattaatgattgagaagccagttcttataaaaaataacattactgatgagtatctatttactattgatgaggatattagccgaatctttgttacggataaatttaaacaaagagtagaagatgcaggtttaatggctttcgatttttcagtggaaatagaattatcgtaa

SEQ ID NO: 309228 - DNA, 204 bp, Proteus mirabilis
atgaaagtctatatttcgctttaccattatcagacaatgaacctgagtggcgagtggttgagcactagcttaaagacggtaaacgctgttttagagcataccgaactgacgtatgatttagcccaacgaaccgttattacagcaaaacgaggtgcgaaaaaccttccgttatgtcaatgcattgaattaaacttgattttttga

SEQ ID NO: 309229 - DNA, 375 bp, Proteus mirabilis
  misc_feature (351)..(360): n is a, c, g, or t
atgaaaagtaagcggagtagtatattaaaacttcaattatcaatgataatactcttatcatcaggaatggcaattggggcttcaaataagacagtagaatttttattgacagagcaggaaagtggttcttctaatgcaatagccgaacttaatttacttgcgaagcaacaaaacccacatgcattgagtactctaggttttatttatgaacatggggttaatacacctaaggatgtgttaaaagcgataggttattatcagcaagcttgtgaacttggtggagactatggttgtggcaatgcctggtatttttatcagtatggtataggtgttgaacaaaatagcaaaaannnnnnnnnnatgatattccattag

SEQ ID NO: 309230 - DNA, 909 bp, Proteus mirabilis
atgcaaaatgtgttgttaacgttatggcctttatttgcgttaattgcgctaggcgctattttaagaagaaataaagcatttgaacctgcattttgggtaggagctgaaaaattaaattattttttactctttcctgcattacttctcaatagcttggctaatgctcctttatctgatcctcaattacctcaccttgctggggctattttctcagtagtcatcattaccactattttgtgtgttatttttaaaaaaataaccggctggtctgctggccgttttggtgcgatcgttcaaggcaatattcggtttaacacttatttaggtttagctattgtcgctgatttatttggcgttgaaggtttaggaatagctgctttgatattagcaaccttggttcctctatcaaatgtgacttcagtgctttgtttaaccgcagggcaaaatgtaacttttcgtcaattaatcttcccaatcattaaaaatccattaattatctcttgcgtaatagggattgttatcaatttatcaggaatagggcttccttttggtagcgatcagtttctaaaattgttagctgcgactagtttacctttagggcttatctgtattggtgcggcattacatttatcaacactaaaagcagaaagtaaaatgattagtattaacacagtgactcggttgcttattgtaccgataattgcatatagtgttgctaattttttaggtttgtctccattagttatgatgcttttagtcattttcttttctatccctacagccccaacttcttatattttaactcgacagctaggaggggattctgagctaatggcggggatcattacatcacaaaccatgcttgcagcagttaccttgccgatcgtattaagttttttaattccataa

SEQ ID NO: 309231 - DNA, 513 bp, Proteus mirabilis
atgcaacgacctaatttatttggtaaatcaatcgcactcaatggggataaaacatccactggtgcaacttgcatcgctacaattcaacaagtgacatgttatggccacagtgtccttagagttggagatccaacaacaacatgtcctcaatgcggaaaaccagggatcattattacaggtgaagatagaatcaataatcatggaaaaattcaggctgtccataattcggttgtacaatgtggatgtcctcttggttccaattttgttatcgcagttacatctaaaaagtcttctgatcatatttcaaattctctagtcaaccttatacctgccttatttagccaaaaatttattttaaaagatgctaatgattccatagcttatggtattaaaactgcttctagttttattgaaggaatgtcaaagcaaaatggagaattagaattagtcgaaacgccacaggaagaaaatattgagattgtttatttatttcaaacaaaagtaggaatttaa

SEQ ID NO: 309232 - DNA, 1254 bp, Proteus mirabilis
atgaacattgttgatcggtttatttcttacaccaaggtgaatactacaacaaatagagaaaatggcgcagcggggattatgccttcatcggaaggtcagcgagtcctcgctttacaattagtcgaagagttaaaggcgttaggtgttgaagatatcaaaattcgcgataccgccattgttaccgcgacactaccttctaaccttgattatgaggttcctaccgtggctttctttggtcacttagataccagtgcagaacaaactaatgatactaaagcacaaattttaccttataaaggtggcgacctttgcttaaacaaagaacttgagatttttttacgtcaaagtgaattccctgaattagaaaactatattggtgacgatatcatcgtaacagatggtactagcttattaggcgctgacgacaaagcggctatcgcctctattatggatatgttgcaatattttaaacaacatccagaagtcaaacacggtacagttaaaattggttttgtacccgatgaagagcaaggtttacgtggtgcaaaagcctttgatgtaacagaattcggcgcagactttgcttataccttagattgttgtggtattggtgaacttgtatatgaaaattggaatgccggtgatgttgaaataacctttatcggaacctcagcacacccgatgtcagcaaaaggtaaattaaaaaattcactgttaatggctcataaatttattgcgatgttaccgggtggtgaagcaccggaatataccgaaggtcgtgaaggttattattgggtaaaacaactggcgggtaatagcgcacgtactgtattaaaaatggatgtgcgtgatttcacagaagcaggctacgcccatcgtatggcatttttaaaacaactttcagagcaatgtgaagcgttatggggtgaagggactgttgtttgtaagcaagccgatcgttatgcaaatgtctttaatagtctacaaggtgaaaatcgatatcctatcgatattgctattgatgcttataaagccaatggtattacccctcgtccaatccctatgcggggtggctatgatggagcagcattatcgcaaaaaggattaccttgccctaatatctttactggggcgcacaatttccactctatttatgaatatcttcccgttaaatcgctttatgctgccagcgatgtattgaaatctgtcgttaagatcaccgcagaacgttttgcacccggagctaaagcatga

SEQ ID NO: 309233 - DNA, 990 bp, Proteus mirabilis
atgagaattagttcaatttacacacaatctgtaggaccattagctgatggtgttattaagttagaagatgattggtctaatgagattgaagctcaagttttatttaccggtaataatggttgtggtaaatcgactttattacggggcatagctattttatgggaagcattaggtatttggctaagtactgaacaaccgttagctacagcgagcaatacacgaaaatggttagaacgttggggagggatcgctattatttggataggtgaaatttcaaataataaaaagaaaaataaattatattttccatctagtgaaaataaacataatgataatttgattgagacctataaatatttagggaaaagacgtattcaatcactttataatgaattggatccagaattatctattcctaatattgtctatttagatgcagaagcgcgtaaatgggtaaatccaacagcaacgagaaaatcattatacccagacgatcttaaccaagcatggctcgcgacttatacggtgactaatgattggaatgggcaaatagaaacttcactgtttaatttaaaagcgacactgcctaatgaataccctaacatgataaagagtttaaattactttttttcagataaaagaattgatagtgaaattcttccaggtacgcgtcaacagattattttatcaaatggaaggcaacatacgtttgatgagttaagttctggcgaacatcaaatacttattatgttatttacaatccaacgttggctaaaacaaggaggaattgtattaatagatgaacctgatctacatctacatccttctgttatcgcacctctcttagcggctatcgaaaatattgtggctaataagaaagggcagttaattttaacgtcacactcaacagaagtttggcaacgctatgaaaattttggttcacgtattgatcttactttgctaaaaggatcggtgaatgtcgaaaattga

SEQ ID NO: 309234 - DNA, 1200 bp, Proteus mirabilis
ttggaacaatggaagaataaggtagcagaaactgctaaatatagtccttatattatgcttggcttatgttcagcttttgctggcatgtgtatttattttacagagatagaatctggtggaaaacatatttatggtggtagttcttcggggaaaagtacagtgttaaagtcagcagcttctgtatttggggattcctcatacattcttgattggaatatcactgaagctgcatttgagcagcaagcggagtctcgtaatcatggattgctattgactgacgaacttattttaatagattccaatcgtcaaactgccgcccaaaaaatgcaaaaatttgtgtatatgcttggttctggtactggaaagtcaagaagtaatatctatcaagaacgttcggcaagttggcaattagtcgctttaagcaacggagaagaagctttaagccaacatgctagtattggcctaatgagtcgtaagaatggtgaactagctcggttcatagatgttcctgttgattgtgataatgatatgggtatttttagttcattacctgaaggtgtatcgtcatctgctgaatatgcagagagtttgaaagaaaattgcaataattattatggtacagctggagatgcgttcttacagaagatactgacacaggttagcaaaaaatctccagagtatattactaataagctcgacgactatattactaaattcttggagaagaatttagtaggttctaatggattagataaacgtatagctactcgttttgctttagcatacgcaagtgggatactcggtattaaaactaaggttctcccctttactgagaaggaggtttttgatggaattacacattgttatctgaaagctatagatcaaaatcctattaaaaaggttgtttttaatcaaaagctattagatacattgaaaaatccctgcaaaccgaaaaatagtctcgtagataaggacaaactaaacaatttaaatgccattgttgttcaaatcaaagagatacagtgtgtcgcagtaaaatcatcattttttaaagagaatatcattggagaccctaagtttatcattaatcaattgatctcagaagggaagctgcttactgatgctaaaggtagaagcactcggcagtgtaagattaatggtgtgacattgagccgtcgttactgcttgaaggttggataa

SEQ ID NO: 309235 - DNA, 147 bp, Proteus mirabilis
atgccaactccttgctatatttccattgaagggaaaacacaaggtaacatcacggcagatcctgtcagtaatatattacccacattatttatgccagaaggcataacgacgatgaaaaggttcaaatatgctaatggcaatgattaa

SEQ ID NO: 309236 - DNA, 147 bp, Proteus mirabilis
atgccaactccttgctatatttccattgaagggaaaacacaaggtaacatcacggcagatcctgtcagtaatatattacccacattatttatgccagaaggcataacgacgatgaaaaggttcaaatatgctaatgacaatgattaa

SEQ ID NO: 309237 - DNA, 195 bp, Proteus mirabilis
atgaatattgagaataaagtaatcataattacaatggatgaagtcttgaaattaatggggctgaaatctagaaactctatatactctcttgaaaaaactcagcaatttcctcgtcgcatccgtataggggtgagacgagtgggttatgacttagtttcagtcgagaaatggttagaatctaggacaatgaaataa

SEQ ID NO: 309238 - DNA, 444 bp, Proteus mirabilis
atgaagaataaacttctcaatttaaatgaaatatttgaaataataaaaaaaggatatatttcaatgtttccatacgagtttgaaggaagtacacgtatggttatagctgtattagataactattgtaaaaacactctaaaaatgccgctaaatgtaagtttatcaaatagttacaatgagcaaaacaaccctgttttagctgaacatattaaaatatcaaggataaaagaagaaacttcaaaattatcatcacaaaaacaagatgatattgctaatatgcaatctaccttagaatataacattgtcgatatagtaaaggatttagaggcactgcatgagtggttagtaaaggaacaattaataaggaaaaaagtagtacaatatgatccctcaaaatattcgataactaaacaacttttagaacttgaaaaactacctatttga

SEQ ID NO: 309239 - DNA, 528 bp, Proteus mirabilis
atggcaatttgtatgctgattgaaacattacgcttacgtgattttaaatcagtgtgtgcaggcttccaacattttctaaagggtatgggttctgcatttagtaatgttgttgggctattagtcgcagcgggtgtttttgctcatggtattaaagtcagtggtgcaatagacagcctgatcgttatggcggaatctgttggtctaccaccatttgcaatggcattagtgttcgctatcgtgacattggctgccgcaattattatgggctcaggtaatgcacctttccttgcattcgttgaacttattccacaaattgcccatagcatgggggttaatcccattgcaatgattttacctatgcaacaggcatcacatatgggacgcggcatgtctcctgtggcaggcgtgatcattgcggtttccagtggagctaaattgcaaccctttgatgtggtaaaaagaaccgctattcctcttatggttggttttgttttccactgcgccattattgctatattttattattaa

SEQ ID NO: 309240 - DNA, 402 bp, Proteus mirabilis
atgcatggtaatttacttacggctccaccctgtaaagtaaacaatggtaatgttattgatgttggttttggtccaatttcgactaaaagtattaaaggatatgatcagaaaagagaactgaattataaaattacttgtgaaagtaattcaaataatttaaaaacatatttatggattaatggtgataaaagcaattttgatatcaatgggttgaaaaccaatatagacgatttagcaattaagtttatgatggggggggatattatagaattaaataaaaaatataccgtggatattaatcatccagaacagatatgggctgtattagttaaaaaagaaaatagtgtattaaaaacgggtgatttctcttcttctggtactttatttgtggagtatcaataa

SEQ ID NO: 309241 - DNA, 201 bp, Proteus mirabilis
atgaaagagggaaattatggagatgttgagccgataggtgatggatattcagagttaagaattcatcagggcaagggttacagagtttattttgccaaccgaaacaatgaaattattttattgctttgtggtggtgataaaacaacacaacaagcagacataaaaaaagcaaaacagatagcgaaaaaatgggggttctga

SEQ ID NO: 309242 - DNA, 1143 bp, Proteus mirabilis
atgaaagaaaatagtgttgcacatgaagggctgtatattcttgattggggaaaattagaggttggcgatattattttagaacatggctatgagttacattcatctataatctgcaaagcaacgggaagccattattctcatgcgatgatttacgtaggaaacacgatcattgaagcaacccaaaaaggtagagtatttagtaaaattcctaatcgctttacagtaaaaaacattaacgatttaaaagtattgcgattaaaaacccctataccctcagtaaaaatgaacaaaattactgaacatgcaaggcttcttgttggaacagaatatggtttaaaagaagctattttttctgctagacctagtaaaaatctgaagccaacagaagcgcagttttgttctagattggttgcacaatcttatgcatcagtaggaataaatttagttgcgaatacaaatttttgctctcctgctgatatagaacgttcagagttattatgtgaagtgcctgatacagtcagagaaggaactagacaagaaattgaacatgctcacgctaactctttgcataatgaacatagagactctgctgctgatttctgtaagaacgcactagaagtattatctttatacaaaataaaaactattacaataaacaataaacccaaaaaaatagccactttgaatgatattttccgagcagtcaatgagcgggggaaaaaaataaaaacattagatttgaaaatagccgaattaatgcaaacaaccggttatatggatggcccatttcatgacaaacaacaaaacccttatagatatgatatagatttatttacacaaagattaaatacttttgatgaaaaaattagaattgatattctacgaggcgaaatagagaaagaccttgatcacatagaacatagaattagaaattttctatcaagtaagaataacaaaaaaacaaaattaaaagtttttattaatgattatgagataaataaaaacatgttagaaaccatgcttcaaagaaccctaattactctttcttactgttcaaatcaaaattcagataataatatttatgaatcacacattagtgatctaaacgaaatgaaaaacaagttagaaagttacttaaaataa

SEQ ID NO: 309243 - DNA, 207 bp, Proteus mirabilis
atgaaaaatactggtgctaaaatattcaaccataaaatcttacctatttctcactatttatctaaagatgatttatgcaggcattttcgtattagccgcacaacactgaatcgatggataagacttaataaaattccaccaccaacaaattggggttctgttacgattggttggtcaccagaggaaattaaaaacatgattcgataa

SEQ ID NO: 309244 - DNA, 2079 bp, Proteus mirabilis
atgtctacaattccaacacaaaatccagttccaagtgaagcaccgcgcgacctgaaatataactcaggcaaagttgacgagttcgttacgtcaatgaaaaacaaatatatagatagattcgggcaagagcattttacaatcgaagggttgcgttggattgctcagcaagcgatatctcaatttggttacattacattagactcattccaaaaaggtgcagaaataacactgccaaatcaagttttacgcgatgaagccacaggtgaatactaccgttgggatggtgcgttaccaaaatctattcctgttaattcaacccctgataattctggtggtgttggttttggcaagtggcttagcattggtgatgcatcagtaagaagtgaattaaataatacttggaaaactatttcacttgattattttgtcaatgaagatggaaactttttacagaaagcatctgattggtgtaaagaaaatggatacgcattggtaattcctaaaggtaaaacatatcaatacagtgagagggtaatatttgaagacatcactttactctgggagggaactttagaattaattcagccaattgattgtgggattgtgtttcgtagaaatgtaacaatgccaacgtatggttatttaaaaacatctaaaacaatagtgttgccagatgactattatatggttggattttatagttggaagtctcctgatggttcactaggttgtcaagacaatattatttctggtcgattagatattagaaacgggcatatcgattatgatggatgggatcaaggtaatgttgatgattattccaacctaacaggtggtggtgtattaatgttgggaggctcttggttgcgcccatcactaggtgtagatgaatcatcttgggagaacgttcatagaaatgacttaaaattttatgtggatggttttagttatgcgcttacgctacaaggtatttacgattccgagagtgtgaatgagatatttggctgggtgaatggaaacactatcgacattagggctaggagagctagaaaaaatttacaattattacaatcaaacactaatggaatgactaatggtggtgaagtaagtgcaaatattattatatgtgagtttcaatcagataaaaaactaattgacaagtttatatattgtgaaggtaatagtaataaatttatagtaaagggatgggatattaaatcaactgatggtgatatattaatccatttcagtagaggtaataaacctgataatgggactcaggagtcaattaataatatcattgaaatgatgggggcaacacttaatgatggtgaaggggtatttagtaaatttataaaggaggataagccaggtttaaataaaataaacaatacttcatttgcttttagagatttgttcctagaacatactccttatgctttaaattctaggttatcttcgcagggatatattagacatatagataacttttttggtaattttgctttaagaccaaaatataatatttctgtgtatagaaatggtagtgagtttactgttagtaaaaatattttaaataaagcgtttgatggaaatttatcaacatttgttgagcttcctgtgataagcgacgataaatatgaaatagttctaacaatgcaaagttcttatcatcattttgcgctaataggatctgccatttatcatattgaaaatttaaacggctactgttctattgaagcgttagatgtaaatgatagggtaatatataagtatcattctgaactacagtgtataaatacaacgggaactagaaatttagagaggacatttaaagttaagtatactttttctaagctaaatggaagcaatcatttacgtatatgctctttattttctaggactcatagtcacgataatagacatggtatggttggtagttcagggggagatatttctggtcatttaagattcttaacaaaagaagcttccccggttattaccgatcaaaagacaggtcagttatgggaaatacaagcagtagatggagttataaaactagtcgcttattatccataa

SEQ ID NO: 309245 - DNA, 2469 bp, Proteus mirabilis
atgccaacaattgaaattcagcgtgtcgctggagtgccgaaagagagagtcgagataaaagccggctctcttttttttgattggttaaaagagcaaaactttcatcatgacgttgatatctatgttaacggcgtaaaacttaacgatgatgatcgccttgattttattgttagtgaatttcatcacattcaaatattcgaccaaccgaaggggattattggcgacattcttaatccagtatttaagtttgtttccaagatattttcattcttagcgcccaaagcaccatcatttagcgctgctgatgtaaatgcaaaggaaagccctaacaaccgtttaactggtcaaactaatatagcaagaacatatcaggctagacctgaaattcacggacaagttagagcctttccagatctcattcagcaatcaatgtttgaatacatcgacaataaaaagatggttactgaatggatgaactttggcatcggttactacacgattgagaatgtgaaatattcagagtctgagctgatcgcccttgatggtgccagttatcagatattccaaccaggtgaagtgatccctcaaatatttgaggggttcgaattccctgatgttgacggacaagagataccagggccgaatgaaagtgacgaaattccacaatatgaagccactgctaataatgttatttctggtgaaattaaaggtggtgaagcggccataaagatagagaaacaagatgattttcgatattttatggatatcgtaaagcctcgatcagtaagccttgttgttaatgtgacttatgatactccgcagggttcggttacaaaggatattaaggttgacgcttatttatctgatgcgaaagaaagtgatgatggcgctattatctcaccaaaatattactacgaattctttttcaccaatttaactggtggcgacctagccactctaccgcctaatgcaattgttaacacatcaaagtttgttctttatgacaaccaattcctgacagtagggcctttcttttcaccgcttgatggtggtgagttatgggtgcatttaaacgctcaactcggtgatggcgattatgctaatgcaagaattgaattttggaaggttgatgagaataacaatgaaataactggaacaagagagtcattcaatagaggattcccatctgcaccaaaaacaaaaacatactatcttacggagaagttcaagccgttagctggatatggaagatacgcacttcaactaactcgattagaaaacagtaatgatcacagcattcttaagctagaggaagtctttattgttagagagagaattaacgaagtacatgaagaagatgcacttgttaaggtaacagtgagggcaacagaggcaccaacgggaacaagagagcgtaaatacaacgcactggctacacgtcatgttattagttacgacatgaatagtcgtagcgttgattatacattaagaccatcacgatcatttgctgatgcggtcgctcacacttggctagttaccgcaggacagccagaaagcaccatagatttatatggtttgtattcaatctatgaatcacttccagataagcgcttaggatattttgattacacgtttgatgatgaagatgtatcgctgggtcagcgtatagaaacaatatgcaacgttgctcgtgttatttcattttgggataacggcgtacttacatttactcgtgaggaggaaaagcaatatccatctggcatcttcaatagagctaacacaacaggaaatggtttttctctttcttatgatatgacaatgccgagcggtaatgatggtgttgaaatcgaatatgtaaaccctaaaaccaacaaaaagacctaccttaaatatcgtattgaaaataacaaaatagttaacaagccagctaaaaaccctaacaaaataaccattcacggttgtcgtaatgagtatcaggcgacagatagggcactattagaaatggataggttaatacatcagcgcatgagtatcagtgtgcaaactctcgcagatggtgattatgtttatccgggagacttaattattgttgctgacacatacgataagaatcaacaggcgggttatatagtagagaggatcggtaatcagttttcaacaaatgaaaaagttgtctttgatggtgagatgttcgtttgcatcactgatcacctaggaaatacaacggaaagatttaaagccacaccgagaagagatacagcctacggatttatcgctgatatacctgatatccagctaaacatatatgacggcacgaatattcaatctccgtcacgttacgttatatccaatatcgttgaaatggactcaatgagatggattgtaagcgacaaaaagcctaatgcagacggaactttcagcatcacagcaagtgagtatttttctgcaaagaaagattacaacgtttaa

SEQ ID NO: 309246 - DNA, 639 bp, Proteus mirabilis
gtgaggaaggttataactttaatattgatttcttcagtctcttttggagtcatggctgaaatcagccaagaagctaaagatgctgtcacgcgtaatttaaaagatccaggttctgttcaatttcgcgataccactacaataaaaaactcaaaaaatgaacaatcttactgtggtgaatttaatgctaagaactcttacggtggttatgtagggtttaaacggttttcatactccagcggtattcttactgttgttgataatggtaataatactttgggtgatttgattgattacgctgcgtcaggatgtggtggagagcagaaagaagtaattgccagaaacccaaaaataacattagatagttgtttattgagttggcagcagatagaagatgttgcgataaacaataaaagtaaagatgaggctataaattccgcaattgaagtaatgaaaagtaaaaataatgatatctcagactctcaagtaactttattaaagaatcaattttctagtgcaatagatcagactttaaatttccctggcacagtacaagctataaaggagaatccaaagtcttttaaggaaaactttgttgaaagatgtgattctgacacaagaagatatttactatcgaattaa

SEQ ID NO: 309247 - DNA, 453 bp, Proteus mirabilis
atgagtaaattaacatcgtgggttccaatagttttctttagcacgatgctagcttcatactttgttactaaatcagtaatagagctaaagaaagaaaaccgatcgctcactgagcaactctcacaacaagtcgaaatcaacaaagactatcaagcccgtatcactcgattaaaccaactcgatattcgtcactcacaggagttagccagtgcaaagaatgaaatcaacactcttcgtgatgctgttagctctggcaataagcgggtgcacatcaaagccgagtgtccaacagtcaccaaaaattccaccgaaagcggaagcaatgaaacctccgcacgacttaacaaagcagttgaacaagattatctacgtctcagagaaatgatagtcgagaacgaacagcagattttgtatttgcaggattacattaacactgaatgcctcgctcaatag

SEQ ID NO: 309248 - DNA, 171 bp, Proteus mirabilis
atgataggaacaaaagtaatttatgacacaggaaataattggaattgctgggctgtaatagtgtttagttatggtagttatattgaatgttaccttccatcaaaaccaacaaaaaagcaattaagaaagataaaaaaagatttcattaggattatgaaacttgatgattag

SEQ ID NO: 309249 - DNA, 225 bp, Proteus mirabilis
atggaatcaccacttgcacgaatgattaagcaacaggtgttcgatgccaacgtcgacaggcttgtagtgctcaatgatgagcagtgggatttcatactgaatgaccaagataaatgcgcattcgctggcggtcattactacggtcatgattaccatgagtgggaaatttttatagctcacgatattaaatacgttcaaacaggattgagagaggcgttgatatga

SEQ ID NO: 309250 - DNA, 726 bp, Proteus mirabilis
atgacagcagcggcaacactggcgcgattaaaacgcatgatgccagaacacatcaagccaaagttctcaacagccgaggaacttatggcatggcaacgagagcaaggcgaaattgattctaaacggatagctgatgaaaaccgcgtggctcgattgaataaaattatggggcgctctggtatcagcccattacaccaagaatgcacatttgataattaccaagccaaaagcgctgaacagcaaaaagcacttaacaaagcgaaaaagtatgccgaggaattcgggcagtcattcggtggttttattttcagtggaaacccaggaacaggtaaaaatcacctagcttcagcaattggtaattacatcattcaaaacggcaaaagcattctgatagcaacactgccagacttaatgatgaaagtgcgtgacacctaccagaaagacgcaaaaacaacagagtcaaaattgattgatgatctgtgcgaggttgatttactcgttcttgatgatgttggtgttcagcgtgaaaacaaaaacgaggagttaattattttccaagtggttgatcgccgtttagctaacaaaaaaccagttggaatattaacaaaccttaaatttgatgagctgggtcgcgttcttggtgagcgagtaattgatcgcctgagaatgggaaaaccaacaacaatcaatttcacatggcagagtcatcgccgtctagttaaataa

SEQ ID NO: 309251 - DNA, 822 bp, Proteus mirabilis
atgtcagtagtcaagaatattgattttgttaacaagcaactgataccagacaaaccagaggttaaagtggctgatcttgataacggctacttacgggtagctaatgaaattcaagatgctttatgcgaactccagttagcaggtagagagtggcaggttcttaatgccattattcggcttacttgggggtggcaaaagaaagaagaccgcattcaaaacatcttgattgaagagaaaacaaaattaggacgcaatcctgtatctgaagcggttggctctcttgagtcgcggagaataattaacgttagaagaatagggcaaaacagatacatttctatcaataaaaacatctcagaatgggtatacacgaaaacaaggaaaactatccccgaaaacgaggataaccatccacgaaaacgtgtagcggtatccccgaaaaagaggatcaccaaagacactataccaaatacagtaaaagatattaaaacccctatatcccctaaacaaaaatctacgcctaaaaaacaaagtttcgatccgcttagcgtagatatacccagctggttaaatcctgacacttggagaaattgggttgggtaccgaaaggaaattaaacaaccgataaaatctaagcgaactctcgatgggcaaataaaacttcttactgagtgttatgagctgggtttttcacctgaagaaataatcaataactcggttactaacggctggcagggattgtttaagcctaaaacaccataccaacagccgaatagaatcatccaacctagtcaaactcaagaattcataccggagaacttctga

SEQ ID NO: 309252 - DNA, 234 bp, Proteus mirabilis
atggcaaatgataataacggttggattcgttgtgatgagcaattaccagaacttggtgatttccaagtgcaagtttattggagtcatggcggaatggatatggttcacgtagaggactatttcggcgacataacaagcgggatagatgaaaatggaaatcaaacatatacaaaattatatttgagtgaaaaagtcacgcactggcaaccagcgccagaaccaccaatcaaataa

SEQ ID NO: 309253 - DNA, 510 bp, Proteus mirabilis
atggaaatcataagtaaagaatcactagcaattaccaaggatcaggaaattgctttttggtcaaaagttgccgttacgaatgataatcatgagtgctgggaatggaatggagcaaaaaagacaaaagggtacggaaacgtaagaataaataaaaaatacctcacctctcaccgagtggcatttattttagcaaatggaccaataattagtaattacatcgtttgtcatacttgcgataacccttcatgctgtaatccaaatcatctaatgctaggaacaattaaagggaatacaagtgacatgctaatgaaaggtaggcaaaaaaagaaaatctatgcagcaagaggtgaaaataacggcaactcaaaactcagttcaatgcaagttatagaaataagaaatgcatatgagagaaaattgctaaatcaatacgaactagccgcaaaatacaaagtttcgcaacttgcgataagttcaattattagaagaaaaacatggagtcacatttaa

SEQ ID NO: 309254 - DNA, 339 bp, Proteus mirabilis
atgacagataaactcaaagaagaaattaacgcacttcaaggtagagcagcaatggcaaatattgatgtatgcatcatggtcaggctctccttaactattcaaattgcatcttttttaatagaaaaaggtaaatcaattgaagctaaggactggttacttggcgcgttagagtggggaactgatgcaaacatctttgatgacctggatgatagtgacgggaattcagaagatattcaatcttggttcgataagcgaatggaaggcgaaattagtttagatgaggcttttaaattaattcgctcgcgttaccctgaaatcgaaaagatacggacagcttaa

SEQ ID NO: 309255 - DNA, 351 bp, Proteus mirabilis
atggataagtcaagacagcagtttgaagcgtggttagtacgaaaccatggtgatacctgtaataatattaattttgagattaacagcaaaggtgattaccgatatttcagcacgcgcctcgcgtggggagtatggcaagcatcacgcgaaagtttggaaaaagaacgtaacgaagcaattaagcatttaattctagtcttccagcaatacgcaaataatgaccatttatttatgtcggctggtgaagatgcttgcgagtttttagatgatttaggctacggaattgatactggtcgaaatctcgaattaaccgataaaggtaagcaattaattaaagaggcgtgggaatga

SEQ ID NO: 309256 - DNA, 336 bp, Proteus mirabilis
atgaataaatacactgaactatctgactttgagattaatttattagtagctcaatctgttttacctgaaacgcaatacgatgtaattaaacaaacaatggatattatccaattccttgttgatggctcgtttggttatcgctttttcgacccatgcaataaccctactgacgcaatgccgattattaacgaatatggcattagccttatatatcaagatagaaaattccaatttgcaactaatgacgggaatatagagtgctgtgttgccaacccattaaaagcagcaatgattattttcttgtgtatgaaggatgcggagaatgaaaaagtatga

SEQ ID NO: 309257 - DNA, 219 bp, Proteus mirabilis
atgaatgaatccgataatataaaagtcctttttggacaaagagttaaacaactcagattagaagctggtatgtcacaagaagcatttgctgataggtgtgggcttgatcgtacctatattagcggaattgaacgtggggtaaggaatcctactcttgaggtgattgggagaattgctgaggggttggaaagggaaattgtagatttatttaataattga

SEQ ID NO: 309258 - DNA, 213 bp, Proteus mirabilis
atggaaaaaaatgactggcataaggctgatattattgcagcactcaagaaaaaagggactactttagctgcattatcaagaaaatctgggctatcttcatcaacattagcaaatactttatacagaccttggcctaaaggtgaaagattaattgcacaagctttaggtgttgttcccagtgagatatggccctcacgatataaagatagttaa

SEQ ID NO: 309259 - DNA, 1218 bp, Proteus mirabilis
atggcgatttcagatacaaaactaagaaaattgttagcaaaagagaagccctaccaagtagctgatggtggtgggctatatattgaaatattaccttctgggcgtaaagtatggcgtttgcgctatcgattaaagggtgtacaagaaaaagcgactctaggtgaatacccttcttttagcctattagaagcaagaaaatggcgggaagagtgtaaatcaatggttgcgcatggtattagcccagcacagaagaaacaacaagataagttgaaacaaaaggagccgacaacggtagcagcattctctcaacgctggatgactgacattgttgaaaaaagtaatcagcaccctagaaatattatccgtgtcttaaaaaaagatattattccctatattggtaagcaggaaataaaggatttaactccggttcatattcaggttgttgttgataagattaaggttagaggttccgatcatgtcgctctccttgcccgtaatatattaaaaaggatgctggcttatgccatttcaaggggacttatctttaataaccctgcggtagcaatagaagctaaatatattgctcaggcttcaagtagagaagttgctttaacgccaactgaggtcggtattttattaagggcaatttacacatcaagtatgaatcgtcgctataagctggcactgcatttactcatattatgtatggttagaaagagtgaacttactaatgcaacatgggacgagattaattttgataaggctgaatggcatattccagcatcaagaatgaagatggataagccacatatagtacctttatcactacaagcattagccatgtttgaggagcttaaagctctagctatggattctcaatatgttttccccagtcgtaatacaccaaatcaacctgtatcaaaaacaacgctaaacagtgccgttcgtaccttagatttacagattcgtgattttgttatccatgattttcgccgaacagccagtacgatcctccatgagcagggttacaactctgactggattgaaacatctttagctcacaaaattggtggcatacgaggtgtttataatcgtgcacaatatttagaacaacgtcgtgaaatgttgcaaacatgggctgattttgttgattctcaaatagatgatggtaaacgggttattattggacgatttggtaaagcatataaagctgggtga

SEQ ID NO: 309260 - DNA, 465 bp, Proteus mirabilis
atgaaaatacatcaaagcatagtatctaatgagcttattaaacaatttcccactgatttcccaatagaacttagcttaacgaactttgtagctaattgtgttggattagaggcagttcttgcctgctccgcattattctgccctgaaattatagaaatagatggtgttatttacaggagtgaaaataatgaccaaaaagtatatccaaatgattcatatggaacagataaaaaaacactagaaatggcaagtaatgtttttccaattagccagttttttttgatggaagatgatagagctagtgatgattatatgctgataactgtattcagcgaagttattaaatatttttggaatattagattaaaaagtctttacccaaataaaaaatttgaatttattatcacggacgatggtctatatggtgaagaagggttttgcatgacattttacgaagttgagtaa

SEQ ID NO: 309261 - DNA, 5061 bp, Proteus mirabilis
atggctgataaacatgttggtgacggtgaaaaccaattcaaagttgttgcaaccacccctgatgtttgtcaggtagggtgttctgctattccttttgatagttttcaaagcttagatgcacaaaagcaatatgccttgagtgttaaagcacgtggatattgtaccctgaatgttgggtcaataatcaaaggaacgcaaagtaacacgggggccggtgtattatctggaacctcattaggcggtggagattgccaaattattacaggaagcccttcggtccgtattgaaggtcaaccagctgcacaagatggttcattagtcgcaatgaacaataacaatacattagggactttaatcactaatgttgccccccctgcggagccgattgaaagcaataaaatcccctgtaataacccgcccgtgacatcagaattgttagaatcgctgcaagagatgcaacgagaagaacaagaaagttttattgggcgactccgtcaacaaaaacagcaagcggataaaaaaagagatgattctctaaatgatattgacaaacaattaactgaatacattgataatattcgaattgaacacattaatacagattattcatggtggaacagtttatataatacttcaatggatggaataactggcctgactcgtggtggtcttggttttgttgaaagtacaacaaagtcagctgtggaagcttattattacataaatccaaccgatctagttcaaaacgtggctctaaatgcgagcaaaaaaaccatcgagggacttatcgaagcagaaaactggaggttggggaataactgtattgaaggtgttaaggaagacgctaaagccaaatatcgtgcattaggtaaacttatcgatgaagaaaaagaaaaattagagaataaatggaaaaaaagtgatagcgataaagtcgaaatagtaacaagaggtgggcttgaaatagcgactattgccgctgcttttttaaaagtggggaaagtcgctgaaggtgctaatgctattaataaagtagcagaaggaactaaaataactgaaatatctgaaggcacttctgcggtaaataaagctactgacgtaataaaagcgacagagaccagtaatatatccaaaggaagtgaggcaatcaaaggggcagaaatctccgccacagagaaaggaagtaatgccgctaaaggtactgaggtgatccaaagtccagaaacaccgaaaataacctcatcagataatggcattaaaattgaaggaaaaacggaaagcgtatctacagaaacgccacctaataaagttaataatagccaaacggagaataaatcgacatccagtagcaaagagtccgatggaaacagtacttctagtgcaacctgtaaaggtgaacctgttaatgtggctactggtgattttatccaacagtggccaattattcagataccgggcttgttgccgttatcgttacaccgtacatataaatccacatcaaatgcaaagggactttttggaccgaagtgggcagacgaatggtcacgctgtttacatatacttgatggaaacatcatctatcaagacagtgatggtgctaattttacatttataactcccacagaggagatccgtgcaagaaatgcccatgctccccattttttactcaccggacaacgtgatggcgatttaaccctttttgatagtacgcaacaacagtttctacattttaatcacagacaaggaaaatatcgtcgattaagtgcaatcactgatttaaatcagcatcgtattgattttatatataacgagcaaagtcagcttgtcagtgtgaagcgtcatgatggcatagcgttaatactcgaatatcaacaggataaattagttcgcatttgctctgaaagcacaacctcatctcctcgagattttgtacgttgcgaatacgatactcatggttatcttagtcaatgtcatgcctatcaacaaaaccacttatggcatcgttattctcctgagggactcatggtcgcttggggggatactgacagcacagaactgacgattgattatgatgaacaaggacgtgttgttgctacacattcaccgtctggtttttggaacgatcgctttatctatgatgattatcagcgcatgacaacctacattgacgctgagggtggattttcacgttattattataacgatgataatctggtgactcgcactatcgatccattatggcgtgaaacgtatacggagtgggaacagcggaaaaagatagcagaaatcaatgagattggtgagcgcacagagtatggttatcactataatggactgcttgcctatatctatttacctgatggtaaagccatttactatgattataatgactatggtcaacttacccatttcacatcggcctttggcgatgaatggcagctaagctatgatgaaaatggcaatttaaccatagtgacagatccgcaagggcgtcagcaggtctatgaatatagccaacatggtgagttgctcaaagccattacgcccaatggtgcgcaatggcaataccactataaccctgcacatcaactgattaaaaccaccaatccttatcaacacagcacagaatatcatagtgatgaattggggcgtttactgcactacactgatgcgttaaatcacaccacacgctatcaatacagcactgagcatgccagtaccaacggcagtctcagcaagattttattacccgatggggtcgagcaacagatagactatgacagtgaacgccgagttatcgcggtgacggatggtgaaggaaaaaccacccgttatcgttatgggccttttgatgtcttactggcaatgatacgccctgacggcagtgaaattcgctttgaatatgattcactgacacgacttaaaaaagtggtgaatgcgaacggcgaggtttatctttacgaacgggataaagcgggacaaatcattcgtgaagttgattttacggggcgtgagatttgttatcgctatgaccgactaggacgtcgcattgccactcgctatccggataaccatgaactgcgttggcgctataatgaaagtggcttagtggttgaacaaagcgaatggtttgaagatgagcaagaaagccgctgtttatcgacgactcaatatagctataacgcacgtcaacaattgataaaagcgactaatcctgactcggtggttgaatttgagtatgatgaccaaggtcgtttatgcagtgaacgtattaatggacaagagattattcatcaatggaatgaagctgataatacgctggcattgactcgttttggtgagcgggagttgcattatgcttttggggcgttgggggagttaacttctctgcaagtcaatcagcatgcaccacttcaatttagctacaacgcggtaggacaagagtatttacgccgtagtcacgctggatttgtcaattctagtcactatacggctaccggtttactggctcatcaacgagcagggcgaggcaccgaacagtttttacaatcgatacaagcccatccccaacaaccgccattttgtacggatgtgcaccgcagttatcaatatgatcgcgcttataatgtggtgggtattgaagatgatcgctggcgacagacacgttatcactataatgccaatgaccaaatcactaagacacaatacagtccacaatggggtaatcaggacgaaaaattccagtatgataacaacctcaatatcacggagcacttaacaacgccgtcctcgtcgatggtgccttcagaagcacaaggggcgatgctacagctatttcagcaacagcaagcaggacgggtgactcgccgttacacagcgaagggatatcaagattaccattatgatgttaatgggcgattagccaagaaaattgtccatacacgcggttttcgtcccagagaatggcgctatttatggaacacacaaaatcagctgaccgcatgctttacgcctaaaggggattgttggcactatacttatgatgcttttggtcgacgtttgagtaaaaccaaaaccgttgacagtgacttagcccatatagacccattatttccgcagattaagcctaaaatcaccacgtggcgctatttatggtcgggagaccaactgatagaagaaacgccgatatatgccgatggcactcttgctaatgcgcaacaagttcaatggctgtatcaacccggagaaataacgcccaccgcgcgttatcaacagggcaaactgcactatgtggtcaccgaccaccaaggaaccccgcgagagatattcagtgaaggcgggcaagccagttgggcaggacgattgaatacgtggggccaaatgcagttttggcgttaccgcgacggtaaagctgagaatgatcctaattataccgaatgtccttttcgctttgcggggcaatatgaagatgaagaaagtggcttgtattataatcgctttcgctattatgatagggaaacagggcagtatctttccccagatccgatagggttattgggtgggctgaatccctatggatatgtgcattgcccgacggggtgggttgatccgtttgggttgcaagttgtaaatgcttcattatcaggaaatagtcactctacaagctcagcacaaggagctctgcttaaacaatattacagcaccgcagaaagtgctaatgatgttgtaaatagtttaaaagcgacaggaaaattaccagataactatgtaacaaaagcacaggcagaggctgctgggtggtctagaggaaaagcgttaggaaattatgttccgggaggtcaaataggaggggatatttttgctaatagcacgaagatcttacctgatgcccctggaagggtatggtatgaagctgatatcggactgaataatagcatgtctagagcgaagcaaccaggtaccagacttttgtattctaatgacgggttaacttacgtaacttcaaatcattacgatactgccgaggcattaggcatttggaactgttgtaaaggaggttaa

SEQ ID NO: 309262 - DNA, 954 bp, Proteus mirabilis
atgataatagacattcctaccaagaatgatttttatacaatggctgatcatatcgtaaatgaagcttgggaaaaaattgctgatttagcttataactataatgaattcgatatatggaataattttcataaagaatctgaatattcttcagaatcagatgtaaaaaatatagaccattattggtcgtttgctagacctaagttaatcactgcttttaatttgatacttcaatccatcgaatttcgattgaaagggctaattgttgaaatatcaccttacctccttattactaatgcaactcgtaatatgccaaaggctgacagtgatggtaatatttcattttcggaatttcatactttagattctcaagatttaattaaggtgcataatacattcgcttctaaagcattacccgaccaattcactaattggtttaacgatctacgtcgcttaagaaatcgttttatgcattctattgacaacaaaacagacatcatgccccatctgatatttacctcgataatacaagcgcacaactatcttaaccccgaatcgacacactggatatggcatagatataaatataaagcagatcatgcttccggcggtgttaatatgggtattgaagaggatgaggaattttcaggtattgtatggtccatgcttcaaactcattatgagtttactgccgccatatctgcttgttcaaaagagtcagtgagagaattatttggatatacgaaaaatgatgataaagataataattcaaaggaaagtttttactgtaagaagtgtgtttcagttatggagaaaggatggaattttgatagtaaacatctagattgggctttgaaaacagttcagtaccaccgaagtaaaaaaatgtatatttgcgcattctgtttagatgaacaaaaaactaagccgcgtgaaatatgggaggaagatgattaa

SEQ ID NO: 309263 - DNA, 222 bp, Proteus mirabilis
atgagacctaaaattacaattgctatacctgagccttacttacctttagatgaatactgtcgccgtacaggtacaactaaggttactgcccgtcgtttaattgagtatggaaagttacccattaaacctaaaggtgatcaaaaaaaaggtttggttgaagtcaatatggttgctttgactgttatggctttaagtgggtatgaagtttcactagaagcgtag

SEQ ID NO: 309264 - DNA, 588 bp, Proteus mirabilis
atgggaacgtttaaatttcagccagaagatgacaatacagcggttttagatcgcataatcgaagcttatggattttcttcaaaagcaatgttagctattcattttgagatggcagcaagtagtttatcagggcgttatagaagacctggctttcctgcggatatggttgtgagatgtttagcagaaacaggtgtttctcttgaatggctagttacaggtaaaggttctaaattcgaagggcaatcttctgatatcttaagattagataattataaaattattgatggtgaacttattcatgctgatagtttactgattgataaagtaattttctttggtaataccccactaccatccaatccaattagtgtattcatcaataaatgctattacgttatagataaaaaattcgatgatatttttgatggtaattggttcataaaaattgatggcaaatatagcgtgcgaaaattgacaagaatgccaatgaaaaaagttcgcatatctaatcaagatacctcatttgactgtgaactgtctgacatagaaattattggtcgtgttgttgcagaaataaaggttagttga

SEQ ID NO: 309265 - DNA, 486 bp, Proteus mirabilis
atgacatctatactctattttgtttatttcagtgctagagaaattctatcagtacaagctattactaatatttctcaaaatgaagattacttacaagggattagtgttctctatgatgataaaggttcactaaaaacatttagaaaagatagagtcgttgaatatttagactctcttgaagaagctaaagaatttctactgggctgttctctaagtgattttacagtaagaaaacctaagccagaaacatttgatattcatttcacaggtttcaagaaggctgataaggaagaattagaacgcatcgcaactgaagcaaatatggaagttagaaagtctgtcacaaagaatttgaatcttctctgttatggctataacgcaagtcagataaaaatggataaagcccgttctatgggaattatcattcttaatgaatcccaatttcgaagtttcttagaaacaggtgactttactgatagcaaataa

SEQ ID NO: 309266 - DNA, 1032 bp, Proteus mirabilis
atgaccgttagaaaattaccatctggcgaatggattgccgacttttatccagaaaatagagaaaacggcaaaaaaggtaagcgggtgcgtaaaaagtttgccactaaaggtgaagcccttaactatgaacgttatgagatggataaagttgagggaaagccatggatagaagataaaaaagaagataagcgtcgcatgaccgagctagttaatgcttggtatagctcccatggtgtgatgttaaaagacggcaaaaataggctcgatgttatgctatgggcttgtgataaattaggcaacccacttgctactgagtttacagcccaattgttttctagatatcgagaacaacgtttatctggaaaattattcagaacagaaagggtaaaaaaagtttcacctcgcacaataaatcttgagctatcttattttcgtgctgtatttaatgagttagaaagattaggtgaatggcaaacagaaaaccctattaaacatgtccgccctttccgcactgacgaatccgaaatggcatttctttcacagcaacaaatagaatcgctattaaagtcttgtcgccagagtatggctaaagatttggaattaattgtaaaaattgcactatcaacaggagcaagatggtctgaggctgaaagtttaacagagcgacaaattacaccttataaaatcacgtttactaaaacaaaaggcaaacgcaatagaacagtgcctataagtaaagctttgtacgatgaaatccctaaaaagcgtggtgctttatttaccccttgttattccgctttcagaatggcaatgaaaagaacaggtatagagttacctcaccgccaatcatcacacgtattaagacatacatttgcatcacattttatgatgaacggcggtaatattcttgtgttacaaagaattctcggtcatacggatatcaaaatgactatgagatattcccatttctctccagagcatttagaagatgctgttaaatttaatcctttgagtaataattatgaaaaatag

SEQ ID NO: 309267 - DNA, 1437 bp, Proteus mirabilis
atggggagtgagtggaaaacaactaaattacttgaacattatgagattcgttctggtttatctaaacctgcaaaggattttgggagtggatatccatttttgacgttcaaagatgttttttataattatttcactcctgataaactcggtgatctagtacagtctaatgataaagaacgtgaaaattgctcagttaaacgtggtgatgtatttttaacgcgaactagcgaaacaatgcatgaactagggatgagctcagtagctcttaaagactatgaaaacgcaacgttcaatggtttttgtaaacgtcttcgtccaactcagcaaagtgaattattaccagaatatgtaggatattacctgcgtagttctatatttagacaagcgatgttagcattttcaacgatgtcaacacgcgcaagcctcaataatgaaatgatcggtaggcttgaaatatcttacccacccaaaatggaacaggtaaagatcgctaccattttgaaaaatatagatgacaagatcactctcaaccgccaaatcaaccaaaccctagagcaaatggctcagaccctatttaaatcatggtttgtggattttgatcctgtggttgataacgcactagatgcgggtttttttgaacaggatttagctttctctgatgaattactgcgtcgggttgaagtgcgcaaagcagtgcgtgaaagtgataattttaaaccgttatcagaggatattcggcggttatttcctaatgcttttgaagaatgtgtagagtctgcgttagggcttgggggatgggtgccgaaggggtgggtgtataaggctgcggaaaacattgcaaatgtatcgataggaaaaacaccaccacgtaaagaaagtgaatggtttagtgaacaaaaagaaagtaatattacgtgggtttctatcagggatatgggggaatttggtacttatacaggaagtagtcgcgagtatttaactgcaaatgcagtaaaaaaattcaatataaaactagtaccaaaaggttctattttactgagctttaaattaactctaggtagagtagctattgcaagtgaagaacttacaactaatgaagcgatagctcattttgttgaacctaagcatgatattagtgcttcatatttatattgttacctgactagctttgatttcaattcattgggaagcacatcttcgatcgcaactgctgtcaattcaaaaattattaaaaatatgccaatactagtgccgacaaaaagtattttgaattgtttcaaaacaaaggtcgagccactatttagaaaaatgaaattaatagatgatgaaattgttacactaaccaaactccgcgacacgcttctccccaagctgatatccggcgaattatctcttagtgatataaaaacagacattacagaagaaatcttaatctaa

SEQ ID NO: 309268 - DNA, 2001 bp, Proteus mirabilis
gtgaatggttttattcttgattatagtttgactggttcattaactcgtcgaaattcaggttcaaaagaatcttatctttctgcaaacgggacgacaggtgtcaatattggtgtatggagattacgcgctgattatcaagcaaactatcgaagatcaacaggtaattataatcaccaatatagtgatactagattaagtcgtatatttgcctatagatctttaaaaaagatagcctcagtcctaacgcttggtgaaaattatttctattcatctatttttgattcttggcaatatttaggtttatctatagaaaacgatgaaacaatgatgccacctaaattaacaggttatgcacctgaaatcattggtatagccaaaacaaatgccaccgttattgtcaaaagccatgaacggatagtacttgaaacaacagtccccccagggccttttcgtattcaaacgttagatagttccattcgaggaacattaaaagtcaccatacgagaagaaaacggtgaagagcaacaatttgatataacaacagctgcattgccttatttaactagacctggacagtatcgttataagctagctataggtaagcctcgggttaatggacgggaattacagggagatttaactgcatcaggtgaaatgtcatatggcctaaataatatttggtctatctatggtggtttaattctttctaaaaactatcaaacactatcaacaggttttggtcgtgacctattcactttaggcagcatttcttttgatgttactcagtcaagagcccaaatgttaaataaagtattaacaggccgtagttaccgacttagttattcaaagtcctttgatgaagcaagaacagatataacttttgctggctatcgcttttcagatgaaacatatcgcacactacaacaaactttagatgaacgccgtactggtatagagacgcaatcacataaggaaagttatcaggttaacatcaataaatattttgatagcttttcccttggtgctaactaccaatacaacacatattggaacagtaacaccgaagaacagcataatatttatctcagcactgcatttaattggaataaattaggcttaaaaaacattaatttaacagcatcagcaacccgttccatacgtactggttatcaagatgattcgttgaatttacaactctctgtaccattaactcaaagtagtagcattagcttctctgaagggtattctcgcgataagaatggccaacgtagcacaacacataatatagggtatagcaaatatagcgatcagcgtagttataacttaaatgtgggatatcaaaacaatcaaaatcaagggagtcaaacaagctttagtggttatttaaatcaaaatttagcttatgcctctgtttctggtaacgcgagttatatgcctagtgaatatcatagtatcgggggagcaattaatggtggcattacagtgataaaagaaggtgttgcaatgcatcaagccgcatacggtggaacccgattagttatagatactcctaatgccgcaaatattccattaaatggtggggtttatcagacaaatatatttggattagcggtaatacctaatgtcagtaattatagaaaaacgatggcatcaattaatactagtaaactaccttcaaatattgaagcattagaaacagtggtagatgcaactttgactagaggtgctattggttatcgttcgttaaatgttattcaaggcgaaaaaatattttcacgtataaaactggcagataatacatatcctccatttggagccagtattcgtaatcaaaagaatattgaactaggtattgtgggtgaacaaggtatgtcatggattgtaggtgttcatccacaaggatcattaaatctttattggggtaataaacagcaatgcacgataacaataccagatattattaattcacaagcaagctactcaacactaatttgtcgttag

SEQ ID NO: 309269 - DNA, 420 bp, Proteus mirabilis
atgtgtataagagacagattaaattcagttaatgatgacttaagtaatgatattgagtggggaataaaagagtttgattttagtttaaaatataaaatttttgttgatggtttttcccatcatgaagatataagctcattattaaatgaactttgcaattatcatatatcgataaattatcttaaaattaactcaactgaaaactctaatcatgtaatttacaaattaataccttgtgaagtaatagtgttacttagaatgagagagttaaataaattacctattaataatattgatcatcaactaataaatagatttaagatgtttttaaataaagatatacctttaagtaaatttaatcgttcattaagaaaatctattttacataaagcatcacataaaattagtcagaatcactga

SEQ ID NO: 309270 - DNA, 273 bp, Proteus mirabilis
ttgggatatacagaaaaagctattgagagattagaaaaaattgatactaaacttatagaaagatgtttaattgattccaaggatattgatatttctttattctataatatatcttatctcctagatgctgtaatagagcaaagagaaataataaaagataaaattttaaaagatcctaaagatacttcagattatgagcatgttattaagattcattgctatagtgcaaaaaaagaaatagatatgctttatcaaattataatggattgttaa

SEQ ID NO: 309271 - DNA, 1173 bp, Proteus mirabilis
atgaaaaaagttaatggagttgaagctaaattaaggcataaagaagttcaatatattcgattgaatgaattgtttttagatgtcgaaaacccccgttttggggaagatgcgtcttctggttcaactcaagttgacgtgttaaacaatatcgtaaaaaattatggtgtaaatgatgtaattagttctttagcagtgaacggttacttttcagctgaacctatggttgtaaaaaaaaatgggaaaaacaactatatagtgatggagggaaatcggaggttagcagcttgtcttattttgaagaatgatgatagggcaagagatcagatcagtattcataagcagtatatagataaatatatctcacataatagtcctaatcttaatgaaattcctgtaattgtttttgatgatgatgatggcatagataaaaagtcacttatatcgtatctaggtgttagacatattgtgtctactaaagattgggattcatatgcaaaagctgcgtggattgcaaggacgataaaagatggaaatatgagtgtcgatgatatatctactatgataggagacagaaatagcacaattaaaaggctattatcaggttataattttatcaaacagttagagtcagcgggtaagtacaataaagatgatagtgttaagaaaggacgtgggagcaatacgagctatcctttttcttgggtgtatacagctttaggctataaaagtattcaagactttgttgggttatcagaagatgctacaaatgagaacccaatagatacgaaaaagatagataatgccaaactattaatgacggctatgtttggtaataaaaccaaaggtcagaattctcaagttaaagactctaggaatcttggcgttctagctgaggttgttgcctcgtcagaaaaagtagcactactaaaattaggtcaagatgtcgaacaaattgcggatcttactcagcctataggtgagagacttactaatttaatgttagaaatacgaggaaaactagatgagtgtatatcacgactaggtagagatcatttaccaaaagatgatgctcttgagttactcggctatttagagcaaaccagtaagcaatttagaacttttaaaaatggtcttactcaagctattagtggtgataatactgaggatttttaa

SEQ ID NO: 309272 - DNA, 960 bp, Proteus mirabilis
gtgaattatggtatccgagctaagaaacaaaattacgcaactgacgcagatcaggctgaattaaatgctttacttgatttaaccgcctcaattgattctggaatagatgacgataaaattgctggcacactttacgatgaaattgatgaaattgatgatgggtcatctgaagaagattggatgaaagaagatcaaggtaaagacctcatcgttggtgaaattgctgaacatattgaatggcgtattgatacattacaagatatgtatcctttcgaatataaagaaaaccatttaatgctaaaggaatcaccatcgccagtatatttgttctgtttgtgtgtttcaatgattcaaaatgtatctcgtggagaaaatagaaaattagctagtttttttgaaattttatctggtaaattatttactaaattttttagtgcacatgctaaacatatgcatacaggatggcctagatcagatcagaatcctacgaattataaagaattatctattaagctgaaaaataatatttcgtcaaagacaaaagaatggtcgtggcaaattgaaaatgggttagaagaaaatgatgctaaatggataaaggattgtggtgttgattttgttacatgggttgattttcttgataatagagatggacggctttttgctttggggcagtgtgcttgtggtaatgattggccaacaaaatttaatgatataaaaataacaaaacttgcacagtggtttcatcccttgacatacattgagtgtattaaagttttttcaacgccttatgttttagttgatgaaatgctaaaggaagcgagtaatgatgctggagttgtgtttgatagaattagattaacgatagcttttgagcgttttaaagatcattttaatgatgttacgccacaactaaatgaatttattgaattttgcaaaaatcaaaaaagagccctttaa

SEQ ID NO: 309273 - DNA, 495 bp, Proteus mirabilis
atgcgcaggacgattgcagaactttatgatctctttaacgatcttggtcgtcgaataagcttttttgataaagaaattgatgctgtgtgcaggcaatcagaagcctgccagcgcattgccaaagttaaaggcattgaccctaaaacagcaacagctattgttgccgcgattggcaaaggaactgagtttaaaaatggtcgtcattttgccgcatggcttggtctggttccacgacagcactcaagtggcgacaggcaagtactgatgaatataacgaaaaaaggcgacaagcatttgcgaaccttatttattcacggaacctgggctgtcgtcagagtggctgcaaataataatgagggttacttaaatcaatgggttaatcagctaaaagagcggcgaggatttaacaaaacgaccgttgcagccgccaataaaaatgccagaattatttggtcaattcctcacaatgaaactgagtacagaccagcagtgtaa

SEQ ID NO: 309274 - DNA, 345 bp, Proteus mirabilis
atgcaaaaaagcccttacccgacgcaaaaaatccaacgaaaacagcgccgtcaaaacactaaagtaagtaccactgaccctgaaagtggttttatgcatcgggacaataaacccaaaggcttcttttatcttgaccatcgtactgtggatggaaaacacggtatcattatggatacgcacgtcaccgcgggtaatgtgcacgatagccaaccttatattggtcgtttacaacgccaaatgactcgcttcaatcccaatacggatggtagagggtgtggatgcaggttactttactgccccggtttgtcaccttgcaaaagaaatgagtatcgcgcttgttcctga

SEQ ID NO: 309275 - DNA, 417 bp, Proteus mirabilis
ttggtatcacatcagagcgaaaactggttaaaactggttaaagaaatccaagtcaatatggcttatcgttggtttttacgcatggggttaacggagaaagtgcctgatgcctcaacattgagccaaaatcgtattcgccgatttaatgacagtgatatttaccaacagatttttgaccatgttgttgaacaagccatcagtggtggcatggcgaatgggcgcgttctttataccgacagtacccacttgaaagccaacgcgaatccacacaaagccattaatgaagagcatcccatcgccccaagtgaatatatcgaacaactcaatgtcgctgtcgaaagagaccggaaaaatcatgcaaaaaagcccttacccgacgcaaaaaatccaacgaaaacagcgccgtcaaaacactaa

SEQ ID NO: 309276 - DNA, 981 bp, Proteus mirabilis
atgccaaaagcagtttccttattttcaggctgtggtggctctgatgcagggctaacaaaagctggatttgaagtagtaatggcgaatgatattttgccttatgcaaaagaagtctatttagctaatcaacctgaaacagactacataatagaagatatacgtaaaattaataagttccctaaagcagatcttcttgttggttgttatccttgccaaggatttagtcaaggtggtgccagattagcagatagaagtattaattttttatacaaagaatttgcaagggcactaaatgaaatacaaccaaaagcatttgtggttgaaaacgtatcaggtatgagaaatagcacttttaagcatatattagcagatcaaattgagagattttctaatgctagctcaaaaggttataatgttgtgtgggatgttcttaaagcgcatcattttggtgttcctcaagaacgtaaaagattaattattgttggtattagaaaagattttgatctgaattataaatttcctgaacctactcatggtgataatgggttgccttttttaactatcaaaaatgcactcaatgggcttccagattggcccacaggtgaattctgtgatgacccattccactggtattatctttctagaaataggcgtcggggatgggatgaagtaagtaaaacaatagtaagcaatcttcgtcatatacctcttcatccaataagtcctgaactaagaaagatagagaatgataaatgggaatttgttacagataaaccagctagacgcttttcttatagagaagcagcgatactgcaaggttttagtaaagattacacatcacacggtaaaaatttaatatttcctgatatgcctaattttggacctgctaggcttcttaaagaaagatataaagtagttggtaatgctgttccccctccactttttgaagcggtagttagaaacattccagacatctggtaa

SEQ ID NO: 309277 - DNA, 594 bp, Proteus mirabilis
atgaaaagctatccaagttatttaacagaattccctaaaaaatcacttttctataaaatagaggaatattttaataaagatgattcaatagttatttgtgatgatatgggagatgaatgggctgatcatataataatggatacaaattcaaatcccccctctctaatatttattcatgaaaagttcacaaaaaaagaaactttaggagccagtgcatttcatgaagtaatatctcaggcattaaaaaatattggccgactacatgagtccgaatcatcttataaggaaaaatacgataaaaaatggaaaaataattatgaaaacacaaaaataaaaagaataaaaaatggaaaaaactggagtgaaataaaaaatagcctaaaaaaaataaatagctctcctgatgccataagaaaaataattatagctgctccattttttaaaaaatccacgcttcaagatgaatttaacaaatttaaagaagagccatcatataaactaaaaccatatcacattcaattaatatggttgttaagtacatttatatctacttgtcaagataatggaattaggccacaaatactttgcaaataa

SEQ ID NO: 309278 - DNA, 312 bp, Proteus mirabilis
atgcgaattattcaaatgagaacatggtgtttattgggaatattaataacaccattagcttatgcctctgaatcagatgaacttgctttagttataaaacaactcgattaccttgatgcgagattaacctccgctcatgttgaagctcttaagcgtgaaaaaaacacgcgtttctatttgaattaccaacaaatcaaacaggatattgaagtaatacgccaaggacttaaacactatctttatccctctcgcgctcagccaagcgttttaatccctttctcagtacagtatcagcaagagcatcatcaatga

SEQ ID NO: 309279 - DNA, 450 bp, Proteus mirabilis
atgttattaaaaacaatattaccaggggatattttattaatagatgatatccatttttcttttaatgttggtgataaaaaatatttttatttttcatgggatgagggtaattgtgtgacattagatgctatcgttgaaaatagtgaagaaaatgaagaggatgagcaaaacgatgccataatagaagatagcattgatttagctcaatcacttgatttaaattcaattggtgctattccgattacaataacttttcttttagccaataaaacattatcaattgatcaacttgaagaattagcaccagggaagaaatttattttacctgataatgccattcgtcatattaatattttagcaaatggtaaagctattgcccaaggagaattaataaaaattaaagatatgttagcggtagaaattaataaattatctataaaatgcgaataa

SEQ ID NO: 309280 - DNA, 150 bp, Proteus mirabilis
atgtctcaagaaacatttgctgataaatgtgggcttgatcgtacctatattagcggtattgagcgtggggtgagaaatcctacgctggaagtaattgaggtgattgctaggggattggatattgaattaactcatttgtttgatttttaa

SEQ ID NO: 309281 - DNA, 882 bp, Proteus mirabilis
atgagcaaactcaaagattgcttgtgttcgcttgccagtaaagcagacggcagttttaaaaccgtccatgaccggataaagatagtcagccgttttgagcgtcatttacgtgatttaaatattcaaattcgttcaatggataacattaagacaaaacatattgaaggttatgtcagccatcgtttagcgcagggaataaccccacgcacgattcagaatgagatggcagcattacgagcagtattacatctgtcaggacgggataaattaatcagttcagaacgattaaccaaccgtagtttaggtatcggtaatgccagtcgtgccggaactaaacaggctattccggcagagaaatttaaacaggtattacaggtagctcaaacacgagataaaggctttgccgctgcgttacaacttgcacgtgtactggggttacgttcacaggaggcggtacaaagtgcccagtcattaaaaacatggcaaaccgccttggataaaggggcaaccaaactcactgttgtttttggtacgaaaggtggacgtccaagagaaacaactattcttaatcgtgaacaggtcagacaggctgtcactcaggcattaaccattgcagaacaacgcaatggcagactgatagataagcctgacttaaaaacagccatgaatagctggcgcacccagactattgctgttggtttaaccggaaaacattcaccgcatagcttgcgttatgcctgggcgcaagaggcattaaagcattatcaggcacagggttttagtcgtgaggaagcccgtgccttaacggctatggatttagggcatggtgacggcagggggcgctatgttgaacgggtatatagtaattcgggagaagaataa

SEQ ID NO: 309282 - DNA, 183 bp, Proteus mirabilis
atgaccaagagactactgcgtttacctgacgttatcaaaaaagtcgggtttaaaaaatcatggatttaccagcatatcaatcagggaacattccccagacaaataaaacttggcgatcggtctgtggtttggttagagagtgagattgatgattggattgaacaacatctgcttcaacgctaa

SEQ ID NO: 309283 - DNA, 1254 bp, Proteus mirabilis
atgagtagatttcagaaagttgatttagcttataaatttcttgtcgaaaaagaaaaagcaggtgaatcttttacgattgatcaacttgctaagtttactggttggaaagaacaaagctgccgaacatacccatcaaaaaattggcacaactacgttaataaagatggaaaccaatattcaacctcaggaataacttttttaagtagagatgagttccgaaaagttcatagtcaaaagtcacaactgtttaatggcttttctatgaaggctatcctattaaaaaaagctagagagtttgcattattagccgtttcaacttataacaatccttttacagatttcaaaacctacggctttatcgttaatatagttattgcttatacagccttgtttcatgctatttttgaaaagcgtggggatgattatttttatttagataatgaaggtaatcctaagttggttgatggtgataaaaaagcttgggaattaacggaatgttataataattattggggtaataatgaaaatgcagagaaagcaaatttaaaatttttgattgaactaagaaataaaattgaacatagaagcctacccgctattgatttattaactgctggtgagtgccaatcagcattaaataattttgaaaatttaattgttaaagagtttggcgatgagtatgctctaataactaatttagctatggctatgcaattaaccgagatttcagcccaagctcaaattgatgctttaaaacagttacaaacagataattaccgtgtagtaagagaatatatggaaacttatcgtaatggtttaagtaatgaaatccgtcaaagtcaaaaatatcgacttcgagcctatttgataccaaaactaggaaatcatgcatcgacgtctgatttagcaattgagtttataaacactaataacttatctgaagaagcactagaagattacgaaaaagccgtagcatttatacgagaaatagaattcccatttaagttgaaaccaaataaagtagttaaaatactggaaagaaaaattctaggatttaacatgacccttcatacaaaatgctggaaatattatcaagccagacctagagaaatacaattgaaatttagaagtgagtttgctgcatacgatgagggcgctgagtgttatttatattctcaaaaatgggttaaatatcttgaagaaaaacttttagatattgatgaattaaatttagttaaaaaacaacctatatag

SEQ ID NO: 309284 - DNA, 1140 bp, Proteus mirabilis
atgatgactttcaaaatcgatctgaacgacctacacgacaagaacataaactatttgattggtgcaggtgcatcagcaggtctgttccctactctagcgttgaacatgcaaagtgaggggaaatgggaaacgattgaaactttggcaactaagttcgattctatagatgcagaacacctcaagaccttgttgttcatgtattactacgaggaatgtatcaaacctgttagcactgttgatttcacaaacttagaaggcgacaagcaaaacgtaatagataattataaaaagttcatgaaattgaacctagaaatacttcgtcgaaagcgaggttatgacagaaagattaattttttcaccacgaactacgattcatgccttgcttatgcaaccgatgaactttacgaagaaaagtctattcgatttaacatcaacgatggctctcgtggtttccataagaaaatcattgaagctcgtaacttcgattgcatgactactgaattaggtatttttgataaaaacaaagaagtccaacgacaaatcaatctcatccatcttcatggttcggctttttggcgtaagcacaatgattctatcctcgttgattattcttctgcggatcaaatcgtttctgaatcatcaatcgacagtatgtactacggtggttttaaagagatgcttgaaagtggctctcacactgttgatcaattgtgtctaatggcaatagatgagggtaataaagctgtatttaaaagcatacaagataaattttacagtgaatacaacaagttacctattgtgaatcctacaaaatggaagttccatgaaacggtatttgaagaacactattaccagatgttacgccaccttagttatgagttagaaaaacccaatagcgtattgattaccttcggtttttcttttgcagatgaacatatcaggaacttgattaagcgttccctaacaaatccaactctgcaggtatacatctgttgctacaaaaaaacaatgatccctgaattgcagaagtatttttctgacttcaataacatcaagtatattgtccataaagaaggtgaagcattagatttcacttacctcaactctcatgtattaacacttggtgaggatgacgtatga

SEQ ID NO: 309285 - DNA, 1803 bp, Proteus mirabilis
atgagcatctgtattggagaggttacagcagtcaatggtattcaaattacgttgactgttgatgaaacatcaaataaagacactattttttatgaggggcaacgatacaaaggtatctctatcagagagtacgtttcaattcagcgtggttttcgtgacattgtatgtatcgttgaaggggaatacttagatgaaagacgttttcaagagaacactaataaaattgcatatattcgaaaagttcatattcgtcctattggctacattgaaaatagaaagttctttgaaggtatcaaattcttaccattaatccgtgatcccgcattcctgttacctgagcaagccctaaaaacagtttactcatctagtgctgaatcagatttttgtattggatcattgttaaaagaagggattgaaatatctttaccttggcagaaattatttaatacacatattgggatatttggcaacactggtagcggtaaatcgaatacattgacaaaaatgtttacgacattatttgatcaaaaatatgagcaaattaaagctgtcagtaagttcgtattacttgatttcaatggcgagtacatcaaagatcaaatcgtctcgttggataagaaaaacactatcgatctgaatacgtatataacagcggatcaattcccattagcagaagatgaattctggaacgcagaaactctttcaattctttttcaagccactccgaacactcaaaagccttttataaatagtgtattgagggggcgtgaaaaatatagagattctccgaatagtttattacgctatatcaaagagacgattaaattctgttttgtatcaacatcccagaagccagaaactctcgatttgctaaaacgagtggttggtgcggttagtgctgaagatgtattaataaggctagaaaacattatctggcattcaagacaaaacaaatttaaatacgaacctatatataatgctttcttcgatagtcaagaacggtattccgagatatttgaaccatacgtatccaatatcactcttgacgaattatctccgtttgtagaattcacactacgctgtgagttaaaactcatttgggatgttatgtatggctccgttcaatttgaacacattcaaccgcttctaaaacgtgcggaatcatctctaaacggattatccaaagtaattaagattaaatctcatgatgatgagggtggagatgaagatcaggctataacagtcatttcactgcgtaattgcaaccaagatgtgaagaaaatcattcctcttcttgtcacgaagcactattataactctcacaagaaactggttaagaaaagcccgccagaaaagactctgcacctaattattgatgaagcacataacatcctttctcaacaatcagtacgtgaacaagctagctggaaagactatcgtttagagttgtttgaagagttgattaaggaaggtcgtaaattcggtattttccttacattatcgagccaacgacctgcggatatatcagctacaatcatgtctcagttgcacaatttctttattcaccgtttagttaatgaccgtgacttgttcttattggataacaccatcagtacattagactctgtttctcgctcattgattcctaatctatcaagaggctcttgtattatcactggtacttcgtttgatttgcctatgcttatccaagtagatgagttaagcgacaacagcaaaccagacagtaatgacgttatattggagaacctttggtcagttaagatcgaggaagagcctacttaa

SEQ ID NO: 309286 - DNA, 507 bp, Proteus mirabilis
atgtcaaaatacagtcgtgatttaaaaatcatcattgccaaccaatatttagtcggtgaagcatctcgaaagctggctaaaatatattctatttcttctcgccaaattcgatattgggctcaagtcgttgccattcatcacaataacgcgttcttaccaaccccccatttacgttgtgcaaaagctcgatttcaagcactaaaacttatgtggacaaatgattggtctctcggtcacactagcgccatacttaatttaactactcccgatatcctatctatttggcttgatagatataataaacatggatacaaagggcttgaatgtgagcccagaggaagaccgccaatgaagttaccccgtacaacacccgttcgttctgatgatgaaaaaacactcgaagaacttaaagaagagcttgcatatctacgggcggaaaatgccgtcctaaaaaagttggaagagctgaaacagataaaacgacgacaagcaaagaaaaaacgttag

SEQ ID NO: 309287 - DNA, 525 bp, Proteus mirabilis
atgagacagctcaatttaaaatcgacagtcagacctaaaaaatatcgttcataccgtggtgatgtgggcaaaacagtgcctgactatctcaaacgaaattttacagccagcaaaccaaatgaaaagtggagcacggatgtaactgaatttaaagtgaatgaacaaaaagtttatctgtcacccataattgacttatataatcaagaggttgtcgcgtataaggtcgctaaaaatacacgcttaacgttggtcatggagatggtaaaaagaggattatctcgattaaccaaaaatcaaaaaccattattacacagcgatcaaggttggcaataccgaaatcctagctatcagaaacagttagttgataatggaattaaacaaagtatgtctagaaaaggaaactgcttagataatgctgttgcagagaacttttttggtctattaaaatcagaaatgtatcatggtcatcgttttcaagatgctgatgagctgattgataaaattgacgaatatattaggaggtag

SEQ ID NO: 309288 - DNA, 558 bp, Proteus mirabilis
atgttgataaataaaaatcaaggttgctctgtaattgccggaggtaaaggcaacgatactctaattgttgagggcggacagcatattttatttgccaatgaaggggatgataagctctatggtggtaaagggaatgatgttcttatttcagagagtggtaatgattatctggaaggtggagagggggatgatatctacctaattaacaaacatcatggtgagatcacgattaacgatcatgtagggaaaaatgttatttttattactggcttggataaagatgaagtgatgttatcttcccgtgataatgatgatgaagttcttctttctcaggataaaagttttactgtgagaataaaaaataaatataaagaggagctgcagagcacttatcagattgaacaaagggaggaggtgctgagtgatgaagcattagtctctattgtgcatgaaatggctcagtttaatcaaactcagttgtcttctatgcaaggaacctttttgcctgaagctaaagaatggactttaatgccaatcatcactaagcatttaggttaa

SEQ ID NO: 309289 - DNA, 345 bp, Proteus mirabilis
atgaaaattgacgtttccgagctaatcggtcatacagcagtttcaagagaaagtggtctcaaattgaaaaatattcttgatgatgcaatcaagaatagtgtaacagttattcttgattttggttctgttaaaatatacgcttctccattttttaacacctcgattgcgccttatttaggggaaatgacgattgatgaattgaaaattaaaatgaaatttgaaaacctttccactgtagggaaaagcttattgaatcaggtaattcataatgcaattgagttttacgctaaggaagaaaaagagcagataaaccttgaggataaagtaataaaaggagttgagtaa

SEQ ID NO: 309290 - DNA, 777 bp, Proteus mirabilis
atgacgtcaatattaggagcttttgttttttttgtaagaaaaaatttatcagagaatggcactatcctaagaattgaaacaaaaacaatgaatctatcagtatacaaaaagttaaaagatatggggcttttagaacagttggataagtatgataaaaaaggatttattaatcaaagtgatgagttaattaggtaccaagaatttcccgcttcagtgcaagaagatgaagttatttcttatttaaagaatgaatggttaggtaaaaataggcttaatttttcggatgaagtaaaaaacgcagttttaagttctctgtgggaagtatatgccaatgcaatagaacatagcggaacaaaaaaagtacaaagttgtggatcttatgataaaaagaataaaacactttctttacttgttggcgatcttggtggaggtatcgttgggtctgttaaaagctacttaaaatgtgagaaaactccaaaagaagctattgaatgggccctgattaaagggaactctacatatactgttaatctaagggatgaaggggaaaaacaacctagggggttgggtttatacttattaactcaattgattgatattaatggtggtagtatggaaatttatacggattcagtcttctactctagagaattaggtcaatgtacatatattgaggatttgagtactataaaaggaacttgggtcagattaacattaaagtgtttacctaatgagcggtatttttttaaaagcgaaaatatccctgaatatttctaa

SEQ ID NO: 309291 - DNA, 222 bp, Proteus mirabilis
atggaaaatattattatattcatctcaatatttattttgatagtattactttctagttcattatcttggttttatatcaaatacacattagggtcgaaatttatgttttatcgttttactctgtgtcgccatctcgattttggagggtttttatcatcacctcacgctactgctcaaagagcaagtagcatattccaatttagggcatatcgaaatttataa

SEQ ID NO: 309292 - DNA, 1005 bp, Proteus mirabilis
atgagttcagcactaactagatatgttgtaggtggtaatggaggatatctaataaacttagcttccatgggggctgctattaatgaagttccatccataggtagtgatggtaataagtattatcttattggtccaaacaagcaaaaaataacggttacacaagaaacggcgctttcttatggaatagcaaagtgctttggaaattatttatccggtaattattcttctggtctttcagcgggcttagcttaccatcgagttatttcttatgcgccaaaagctaatttctctataaatggactagatgtttacataataaacactaatacttttttcacattgaattctgataatggaattacaaaaggatggcaaaatattccagcttatatctgttcagatcaaggccttggcaataaaaacccatcagctgatctattttccgtacactttccttttgacattactttttatgttaaaaatattccattagatggaaaaattattgttccatcatcaataattgcaggatatacacgagtgtttcaagatgatggattaccgaactattatattcctatagataaagcaacaattaaattagaattatctaattctgtcatttcatatccaacttcatgtaactctaatattgataatctaaatatagatcataaaacattggattctacagctttcgataatattgccacaagagttgtaagttataattgtaatcctccattatttgaaataccggtaaagtttacattagattatgttacagatgcggatccattaaaaagagtacctttaaaatcaggaactcaaactatttattcagaaatgaaaatttatgatgaacaaaccggacaaagcggaaaatcaatagaaacaacaattagtaatatgaaaaatattagagttgagagtcatatttctggcactgatgtagagccaggggtatattcagggaatgcatggctaatagctacttatttataa

SEQ ID NO: 309293 - DNA, 687 bp, Proteus mirabilis
atgaagaaaaaatttctctatttggccttactgaccatcgtatcatcatcaagttttgcggcgataccttcagttaagttaaaaattaatggagatatcaagccaccaacatgcgccatcaatgggggtaatcaggagatcctttttgattatggaaatatatctccatcaattattcctgaaaatgctaaatatgctttaggctctcaacgtagagatattaaaataatctgcgatgtagatacttttttaacatttacagtttcagatttatttacagcaaataaagccggcacatggaaaagcggtacttttgggttagtgaatgcaaaaaataatcaacaagaagttgggggctttttaattagggcctataatattgaaattgatggtaaaaaagctttcttcggaagagtaaaggaacaagaaaaatggaagtctaacattatcgttaaagatgctataatgggttggacaaatgcaacacaatttgtcattcataaagattatttagacctagcgtcaggaaaagtttttagtacaactttagagacaggaggaacagaaagcaatccagattatggatatattttgtctaaacaagaacttgctaaagaagatatcgatatttctgaaggtttagattatataggtcaagctactattacatttaattttggcgtttaa

SEQ ID NO: 309294 - DNA, 525 bp, Proteus mirabilis
atgaataagattatattattattaggtgatagtctttctatttccaagagaataactgtaattagattcgatcttcacttacaacaatacagtgataaaaatgaatcaataacaaatttctctaaaaaattactctctgaatttaagcgtaaatataaaaaatcttttattaagttattttgggttagagaacaaaataatagtcagtcacaacattatcattgcgcattatttgttgatggtaatgttattcaccactcagcatcattgcagaacatggtaggctcttgctggaaagagaccaataatggtactcatagcattcctaaaaactgttattatctatgccagcaaagtgatatgtcaacgcttgccaatatcatataccgtttaagctatttagctaaaaatgttaccaaagaaagaaaaaaaccacatacaaagcgttatgtttcaagtagcttaatattaataaaaaaagaaagtaaacctctgcatacgattctttctgagtatatcaaataa

SEQ ID NO: 309295 - DNA, 420 bp, Proteus mirabilis; identical to SEQ ID NO: 309269

SEQ ID NO: 309296 - DNA, 267 bp, Proteus mirabilis
atggaatatattgcctatcaggggtatattctggatgaatcccgctttttcagccaattgattgcactgtcaccggagtataaaacgatgctgacaacgattgcagaacaacttgagcaaaaaggtatcgaaaaaggtatcgaaaaaggtattggcctgggtgttgaaaaagtcgcccgctcattattacaacagggggttgatctgaacattattatgcaatgtaccggactgacccgggaaaagattgagtcattaaaacattaa

SEQ ID NO: 309297 - DNA, 993 bp, Proteus mirabilis
atgacaactaagccaatgagtcacttatatgaaaaggttaaaaatgcgggatttacgcttccttatataaaaaaattattacctgattggtgggatgatgatttagctaaatcaccttctggtaagcagttcgctagtctgtttttatctaaacggtttagcatttgtcacgatagttttaaagatgatgctactcaagttgtatttaatttaggtggtaatcataagtttaagcatagagtcaatgttggtgaagatgacctgaaccaagcaacggctattgcctattcagcagctagaattgcagctgaaaattttaaagttccttatgatgaaactattaacttagactggaaaatagttagaggaaaaattctcgaaaaaaatcaatgggtttctttgcctgctttggttgattattgtcattcagtgggtattcctgttgtttttttgaaaaatttcccgcctaaatgtacaaaaatggcaggaatagctttgagagtattagatcgtccagtcattgttcttacacagagtagaaaatacggatatatgttatttgatttagctcatgagttaggtcatatagcaaaaggtcatgtgaatgatgataatggtgatgtgtttgtagatagaaaaatagactctcaggcaacagatatttttgaggcagaggctaatgcttatgcttttggtattttgagcggaaaagaaaatttacaaattggttcaaattttaaattgaatgctacggagttagcatcagcatctcaaaaatatggatatgaaaaccaaatagatcccacacatataatcctcaattacggttatatgatgaatctttggccagtttcatcaattgcattaaaaatagtgagtaataacggacaggctgaccaagatgtagtaagagaatcatttatgaaatcaattgattacgatgtgattaatgatgatgatttagatctcatagaaaaactatgtggggaatag

SEQ ID NO: 309298 - DNA, 642 bp, Proteus mirabilis
gtgattgttctttcagataatgatgttattttaaaattagcccaatgtgatttgattcaatatctacctgaaattcttgatgaaaatccaaatgatatatatgttagcccaactgctaagttccaattacttcctaaaaacccagaaaaagctatacgaaggtgtggaactaaagagatatatgagagagtggcaaggtttctaaatgatgttcgtattattgatgaaatcaagaatgaacaattacttagtgaattaggcgaaattccacatattgatattggcgaacaacaattactagcttcttgtgttgaaaaaccggactctttatttatgactggtgataaaagatgcttgaaagcagtaatggagcaccaaaaaatagtagcaacggtacatgctagattaataaattctgttgttacatttgagagtgctttgcttttatctgttaaattattaggtttttcgaatttttttacacaaatcaaacataatccgaagatggatgggatgcttagcttagctatgcgttctacggaatgtgatcaagtatgtggatgcttattttcattcactagagagttttatgattatttagcgtttaaagaaaggttgccacctcagaatgcttatagttaa

SEQ ID NO: 309299 - DNA, 822 bp, Proteus mirabilis
atgatcaaacttggcatttatggatatgacattaaatatgaaaattcatttttttttggacggatgattccatataaaaacatggatattaatgacaaaaaaacaaattgttatctttctgcttttttagaaatagaacatgatgaaaatacaaatagaaatataaaaatattagaagcaatactttgttttattgaacaaaaagaagtgtatataaaaaacccattaaaagctcatgaagattattctaatctagacaatgattaccctaattctctaggcgatagaagatattctcccgctataatattagaagaaaaatataaaaaagattctcgaaaattatttatagaaaaagcttttgacaaattaaattcagaggaagatgcattttcaataatgttttttaaaaaagaactatctataaaaatgataccatcctatgttgatgttacttactttttattattttccggcttagaagcatttgctagggattattatcaaatatatcatcctactgcagttaataatgtatttgataaaattttcaaagaatttaatatcgaaataaaatcaaatgaatctgaaacaaaaagaaacaccttagtttacactaagttaagaaatactatttttcacaatggaaaatatacaactaaattagataattcaaccactgggaaagaaataaatctagctgattattttgattactttaaaaatatattcaatattgttatatttaaacatattgattttgatgataaatttatcaatatagatccattctcaagaagtgggtttattaaaagaaattag

SEQ ID NO: 309300 - DNA, 339 bp, Proteus mirabilis; identical to SEQ ID NO: 298509

SEQ ID NO: 309301 - DNA, 909 bp, Proteus mirabilis
atgccaacgattaacttaagccaattaacaccgcccgatgtgattgagtcgttagatgcagaacaactcttgcgtgaacgcaaaacggcgttgattgctgcgatgccagtccatttacgtgatgcggtggctaacacgttatcattagagtctgaaccgctaactaagctgttagaagaaaacgtctatcgtgagttgctattacgccaacgtattaatgagtctgcccgtgcagtgatggtggcgtatgcgaaaggggcagatttagatcagttagccgcgaattataatttatcgcgcttagtgttacgcccggcaaataacaaaactattccgcccacgccagcgattttagaatctgacgatgatttgcgtttacgcattcccgccgcgtttgaggggctaagtgttgcggggcctgtgggcagttatgaatttcatgctcgcagtgccgatggtcgggtgtccgatgtgtccgcgatcagtccaacaccggcaaatgtcactatttccgtgttatctcgtgagggtgacggcaccgcatcggaagaattactgcgcattgttgagcacgcgttaaacgatgaagatgtgcgaccggttgctgaccgcatcaaagtgcaatccgccaaaattatcccttatcaaattgatgcaacgttatttctttttccggggccagagtcggagccgatacgcaaagaagcgaatcaacgactgacacaatacatgacagaacaacaccgattaggacgtgatattcgcttgtcggcgatttatgccgcgttgcatgtggaaggcgtacaacgtgtggaattaaaacaacccactaaagacgtggtactggataaaacgcaagcctcgtattgcacccaaagtacattaaccattggtggctcggatgaatag

SEQ ID NO: 309302 - DNA, 612 bp, Proteus mirabilis
atgaatagcttattaccgtcaggcagtagcccattagaaaaggcaaccgccattgcctgccaatccttgcaaaccttgcccgtgcctttacgccaattatggaatgccagcacatgccccgttgatttattgccataccttgcatgggcctggtcagtggatcgatgggatgaaaactggtcggagcctgttaagcgtcaagtggtacgggattcgatgtttattcaccggcacaagggcaccattggcgcacttaagcgtgtagtcgagccgttaggttacatcatcaaagtcaccgaatggtggcaaaccgacgacccgccgggcacatttcgccttgatgtgggcgtgcaagaaaacggtattacccaagaaatctatgacgaattagaacgcttgatcgctgatgcacgccccgtcagtcgacacctcttgggattatctatcaaccttgattcgcaagatgagttttatctttctgccgcgacttttagcggtgataagttaaccgtttacccgtattttgcagaagaaattaccgtgtctggtgcgccattaacggcggtcggagtacacattattgataaagttgaggtcgcacatgagcgctaa

SEQ ID NO: 309303 - DNA, 1656 bp, Proteus mirabilis
atgagcgctaaatttttcgccttattaacggtgattggtgccaataaattggcaaaagccaccgcattaggcaccaccttaaaaatcacccaaatggccgtgggtgacggtggcggtacattaccggcacctgatacacaacaaactaaactcgtaggtgagaaacgccgtgcgggattaaataccttatttgttgatccgaaaaacgacagtcagataattgctgaacaagtgatccctgaaaatgagggcggttactggatacgtgagattggtttatttgatgatgaaggcagtttaattgctgtaggtaattgccctgaaacttataagccacaactgcaagagggaagcgggcgaacacagactattcgcatgatattaaccgttagtcataccgagtcagttgagttaaaggttgatccctcggtgatattggcgacccgtgaatttgtcaatgatgcgattgaaagtgcctcaaaacagacattggatgaagttgctaagctttatgccaccaaagctgaattaagtacgggtttaagtaaggtacaaaaatcagcggatgacgctaacactaatgccaatagtcgcgtacctagtacccgtaaagttaataataaaccactgagtaccgatattaccttaacggcgagtgatgtgggtgcagcaacaccggcgcaagtgaatgaagccaagaccgccgcatccaatgcacagaccacagcaaacagtggggtgagcaaagcggatgccgcacagaaaaccgctaacgatgctgtaaacaaagccaacgcagcacaaacagccgcaaataatgctaacactaatgccaatgggcgagtacctaatacccgtaaggtgaacaacaaaccactaagtgctgacattaatttaacggcgggtgatgtgggtgctgcaacaccggctcaagtgaatgaagccaagaccgctgcatctaatgcacaggccacagcaaacagtggtgtgagtaaagcagatgccgcacagaaaacggctaatgatgccgtaagtaaagccaatgctgcgcaaactgccgcaaataatgcgaataccaatgctaatggtcgagtgcctaacacgcgtaaagtgaatggcaaaccactaagtgctgatattagtttaacggcgggtgatgtaggtgctgcaacacccgcacaagtgaatgaagcaaaaacggctgcatctaatgcacagacggccgcaaataatgccaacactaatgccaatgggcgggtgcctaacactcgcaaagtgaatggtaaaccactaagtgctgacattagtttgaatgctggtgatgtaggcgctgcaacacccgcgcaagttaatgaggtgaaaaattcagggtttggatttaatcaaaattggtcagatgttacaacgcaaagacaagcgaatgtgacgtacaccaatacatacaataaacccattatgattagcatttacgtggaactatctggcaataatgctccgggtgtaaagctatatataaatagtttattggttgcgtattctcatgttcggtatgaccaaaatttgaaagttgcttttgtaacgtcggttattccagtgggtgctaagtattcttatcaattagatgagggcaaagcaaaagtcatggagtttaaataa

SEQ ID NO: 309304 - DNA, 354 bp, Proteus mirabilis
atgaattattatcgagataaattgacagggatcgtttttgcttatgatgactttcaagtcaaagagggttgggttgaaaaaggattaatcgcaatgtctgatgaagaaattaagttacatttaaatccgccattaactcaagagcaattaactgcacaagctttagagctgaagcgacgactcatggaagaagttcgtacagaaaccagcttgttacagtcaaaattattattgggaagaataagtgaagatgaaaaaatatcacttaatcagtggttagattacttagatgaattagaagctattgatattagtttagcccctgatattgaatggccacaaaaaccagaataa

SEQ ID NO: 309305 - DNA, 210 bp, Proteus mirabilis
atgtatcgttattatgttcacacatccactgacaaccatggagattatgaagtgcataaagaaggttgtagtcatttacctactatattaaatagagagtatttaggattattttctaattgcacacaggctgttgctcaagcaaaggctaaaggttataaaactgcggatggttgttattggtgctgtcaggcatgccatagatcataa

SEQ ID NO: 309306 - DNA, 483 bp, Proteus mirabilis
atgaatagtaaaaaaatgacaccagatgaaatcatcgaatatttaaaagaaaaaggtttcccagcctctttattagataaagaagctatgaagtcaaatcgtaaattaacaccagaagaacaagagatatttgttaagcacattgtagataatttaagaacaattgtagcaaataaatacttaacctcttgcctagtacgatttggaccagggatcaccagcacctatgcatttcgtcatgagaatcacgttattgcaattgatgaaaaaattattgaaacgctcctgattcatcaaattgaaaatatgatcttagagaagcgtcctaatgatggctactcggctatatggaagttctataccagtaatgaccaacatgaaaaagatactggtgaaaaatggatgcagaacttcattgatgaagtatttatcaaaggcactcagtttttaagcactactgtctcaaataatctaattcattaa

SEQ ID NO: 309307 - DNA, 252 bp, Proteus mirabilis
atggtcaagcagaatggtgctaagtatgaagttaacgaatatgacgaccctcttattaaggcaattcatcattttgatgatggttgctgttacgtcaaactttaccttcatgacttaaattttaggcggtttatccatgacggggtatataaacgccgccctacccctaaacaagttactgagccaaagttaacaccgactattaaaaagaaaaaacgcaaatcgaaaggagttcaccatgctgaagtttga

SEQ ID NO: 309308 - DNA, 261 bp, Proteus mirabilis
  misc_feature (233)..(242): n is a, c, g, or t
atgcttcaagaaaatgtagttaaagatatcattgtttggatcgagcaaaacttagattcacgtttatcattagatattattgctgaaaaatcaggctataccaagtggcacttccagcgcttatttaaagcatatacaggaatatctttaggcaaatatgtcctagcacgccgtttatcttgtggcgcttatgcgttgaggatcactcgtagtagccttttagatatttcttnnnnnnnnnnactcgtagtagcattttag

SEQ ID NO: 309309 - DNA, 507 bp, Proteus mirabilis
atgaccttaccttctaaagagttgataggtatggctcatcaatacaataaaaatatttcagcatggaattatgataagaaaaaatttagaaaagaattctggaagaagtttttaaaagaaatacataccatccctacagaaatgtatgccacacatcgtgcttctgcaggctcgctagatgatacgacttatatttatacaacagcagtaagtaaagaacaattaacaagctctgctaatatttccactatgtctaaagtagaattacccaatgggaaatatttagttattacttttgagatggataatattttagattccctcaccgggtatgatgatattatttatactgtctataccaaagtattaccaaagatgaatttgctacgtcgatctggtccagatattgagcgctataccttaaaacaatcggttagctatgataagttaatcggccatagtgagcagcatctacaagaaattagttactatattcctgttctttag

SEQ ID NO: 309310 - DNA, 258 bp, Proteus mirabilis
atgagtatggcttttttgctgagtgaaaaacagctattattcaggttgtttttatttattgaggaagaacgaatgccatcttttgatatcgtatctgaagttgacttgcatgaagtgcgcaatgcggtagagaacgcacaacgtgaactgactactcgttgggattttcgtaatgttgaagcaagttttgaattaaacgaaaaaactgagtcagtaaaaacaactagtgtatctgaatttcaggtgcagcagtattag

SEQ ID NO: 309311 - DNA, 153 bp, Proteus mirabilis
atgttacgcgagcaattaatagatgcagttaacaatgcacaaaataatggtttatgtgtagaccttattcatgatgaattaaaatcttttgcgcatgaatttattattgtctgcgaaaatttagaaattgattgtgacgaaataccgttttaa

SEQ ID NO: 309312 - DNA, 453 bp, Proteus mirabilis
atgttaaatggcgatggcattacctataaaaatgaagaactgacaaatgatgaattttggcctgatttaaatttaggtgattttcaaaaaagtcgcgctattcccgccaatatcgatgctgattttattgctgatgcattattaaccacggtcacagaaattaattctgaattaaaagacgtaaaaagttattggctatcaaaaggtgttaatcaggcaaaagacgccccaggcgcaaaaataaaaggggtgaatgccctttgtgcgcaatataaaaaagcggtgtatgccagggcaaaagcggatttattgggtgaatatttgtcgattgtcagtcgagcgcccaatccacagcaagaaagcgacgaattacggtcacggttattagcagaatcaacttttgttattcgcaatatgaaacagttgcctcgcattacggtaaaaatgatatga

SEQ ID NO: 309313 - DNA, 312 bp, Proteus mirabilis
atgaataaattagttttaactttttttgtattctcttattccgccttttttttacaaccatcttatgcagaggataattttgatttcgccaacacagctaaattggtatgtgaatatggggaaaaccaaaaaagaaaaagtgtttgcaaggatatggtaaaccaatcgatagtagcagcggttgaaattggtagagcaagtgctttctgcgaaatagcaaaaaataatggtgaaaaaattaataataacttaaaagtagagtgtgaaagaaaaatgaaaatggttgaagaaatccgtaatcttgaaaattaa

SEQ ID NO: 309314 - DNA, 378 bp, Proteus mirabilis
atgtttatatattctgatctaaagaataagaatgtgattgttacaggagctaatggtgatataggtattgcaatttgccagaaataccttgaacagcagtgtcatgtttatgcattatatcaccaaaatagaaataacttagataagctaaaaaaagagagtgaatattgtcaccgcttacatatattacaatgtgatatcaataatgataaatcaattcatgactttttagataaactaaaggcatatgctaatgctattcatatattaatcaataacgcaggtgtaattaaagatgaattattttctgctataaatataagtgaatttgaatatgttattaaagtcaatttactaaacagttattgcttttattaa

SEQ ID NO: 309315 - DNA, 726 bp, Proteus mirabilis
atgttaaagttcattcttattttcttgactctgtttgtatccacagtggctcaagccagtgtggttattatggggacccgcgttgtttatcccgcaacgcaaaaaagcattaatgttcaattaaataataacgatgaatcccccgcattaattcagtcctggttagataccggaaacgcagctgcagcaccagattcaattcacgttccttttatcattactcctcccatatttcgtatggagccgaaatcagggcaaaccatccggattgtctataccggtgaatcattaccacaagatagagagtctcttttctatttaaatgtcttagacattccggcaaaacctaaattggaagaaaattcggaaaactcagagggaaataacaattacttacaattagccgttcgtagtcgcattaagtttttctttcgccctgataatctcaacgtaacgcctgatgatgcttaccaaaaagtgacttggcatcaggaaggagcactacgcattaaagcgattaacccaacaccttattacatcacttacaacaaaatctcagtgggtcaggataaacagctaacgcctgttgaacaaagtgggatgatagctcctttttcttcaaaaatattttcacttaaagagaagccaatattaacaaataaagtcacttgggttgttgttaatgattatggtggataccaacaaggtgaatctactttggaataa

SEQ ID NO: 309316 - DNA, 630 bp, Proteus mirabilis
atgaacagcgtaatacaaaaacgaacatcacaacaattatcggtagagagagtggctgttctagaaagaatgactgttcttacaaaagaattggttaatgaattagcagagaagaaaagtttagcaagtgctttaaaaatgagtgataacgaattggctcagttaatttttgaaactcaactgatacgttcgtctgcaatttcaccaagagaacaaagtaaaatagcccgtttaaacgaaggcgctattaagttttctgaacggctaaaagagcttggaggcacatgtagagctagccaagctgcagctattttgggagtaaaacgtcaaacgattaataatcggttaaaggctaataaactattagcggttaaagtgggaggagaatatcgattacctatttttcaatttgatggtaatcgattagtggatggattagatgagatcttaattttattggatagtttaagctcaacaacaaaagtatcatttttaacgagtatgtatttttttgaggatgaacaagatattaatgttattgatgcgcttaaaaaatatggacgcatgagtgaacaaatgcaagaaattattcatcaagcgaaactttttggaaaacatatttcaaactaa

SEQ ID NO: 309317 - DNA, 621 bp, Proteus mirabilis
  misc_feature (29)..(38): n is a, c, g, or t
gtgatattacgggggggtacagttatagnnnnnnnnnncagttatagcaaagataatcataatctttactatggtgtgagcggtagcgtcgttgctcattctcagggagttgtttttggacagcaactgggagaaaccgcggcaatcgtagatattcctaatgcgggtgatattacgatattaaatcaagcgggagttaggactaataactcagggtatgcattagttccttatgtcacaccatatcgtaaaaatactgtcgagatcgatacattaagattgccagagaaggctgaaatggaacttaccagtcagacggttttaccgagtcgaggggctttagtaaaagcgaatttttcagcaaatgtaggctatcgtgtattaatgacgataaatttggaaaacaaaaagccagtaccatttggcgctcaagctatttttaaagacaatagtcagttaaatagtattgtaggtaatgatggagaagtttatttatcagggctaaaacagaaaggaaactttactattaaatacaacaatgaaagctgtcaggtaaattatgatctatctgatattccagattatttagggctctataaaactactgtaacttgctattaa

SEQ ID NO: 309318 - DNA, 1185 bp, Proteus mirabilis
  misc_feature (1167)..(1176): n is a, c, g, or t
atgcaattatcaacagatgatgagatgtatccagaaagtttaagaggctatgcgcctatcattagagggattgcaaaaagtaactcgcaaataactatcaaacaaaatggatatactatttatcaaactgaagtggcagctggcccttttgaaattaatgatttatatccatcaggtagtagtggggatttatacgttacgattaagggtgctaatggtagtgagcaacatcaaatcgtacctttcgcctctttacctgtattacagcgtgaaggtcatttcacttatagcgtaacgggcggtgaatatcgtgcttatgataataatgtagataaaacgaagtttggtcagtttacattagtttatggtttaccttatggcactactgcttatgggggaagtcagttgagtcaaaattatcaatcttactccctaggtgttgggaaaaatttaggctcatttggtgctgtttctgttgatgttacacaggctaagtcaacttttaatgatggaaggaagcaacaaggtcagtcttatcggtttagatataataagaatttgaacaatataggaaccaatattgctttagcaggttatcgctattcaacgagtggcttttatagtttatctgaagtgtttgatagttttcgtcgtactcattatagccctgaaattgagcaacgccgtcatcgtgcggagataacacttaatcaaaatttaggtgataaatatggctctttagctatcggatatatacaagaggattattggaacagcaaaagcaaaaaacaatcagcaacacttggttataataatagctggcaaggtatcagctatggaataaattatacctacaataaaaatacagttaatcattcttatatttctgatcagaaaagacaaaatgatgatgaacatttgttggctttttcggtgaatgtgccctttagcgtatttgataatactttttattataattttaatgcgaatagtaacaataatagttcaagtacaggaagtgtaggtatatcggcatctcagttaaataatcgactaaattggagtgtgcaacaagcatttaccaatcaagatcaaggatcttctggaaatatcaatgcatcctacaaaggccaactaggtgatattacgggggggtacagttatagnnnnnnnnnncagttatag

SEQ ID NO: 309319 - DNA, 1032 bp, Proteus mirabilis
gtgactaatgaaaatttaaaattacaaaatattgataacttatcgcaatacattgtttcatttttacaaaaaataacgacagcgatacttttatgtctaggtgcttttgaagtcatttcacttgcaatgacaataggtcaactcattgcttttaatatgctattaaaccactgtctacaacctttaagttctgctatagaagtttggggaaagtatatccgagccaaaacggctatttataatttacaagacattcttaatctcccaatagagcaagaaaaagccaataagaaaatggcattacaaggtgaagtgagttttgagaatgtcagttttagttatcaacatgatgccccccctgttgtaaagcaaatttcatttagaataaataaatatgaaactattggtatcgtcgggacgtctggatcagggaaaagtacattagcacgcatcatcgcagggctttatatcccacaattaggtcaagttaagcttgatggcattccggtttgtgaaattccccccgcagtattacgtcaacaaatagggtttgtcttacaagagaattttttatttcatttaaccgtgctcgacaatatccgtttaacgcaaccatcagcctcattagatgaggttattcatgtagctaaattagcaggtgctcatgagtttattttaaaacttcctttagggtacgacacactcattgctgaaaatggcagatctttatctgggggacaatgccaacgtattgcaattgctagagccttactctcatcccctaaaattttaatttttgatgaagctaccagcgcattggatggtgagtctcaagccatcatcgaaaaaaatcttccccttattacccaagataagaccgtcattatgattgctcatcgcctttccacaataaaaaactgtgaccgcattattgtattagaaaaaggccagataattgaagaaggcaaacataatgaattgattagaaaagatggcgcttataagaaactttggcaacatcaacaaggataa

SEQ ID NO: 309320 - DNA, 213 bp, Proteus mirabilis
atggcttatttgtcattaaagttaacattaatctttcttgccaccatcccactctattttatcttagctaaattaattgcccctaaaatagaaaaaaccgtacaacagctttatcaatattcagcaacaaatagtgcttttttaacagaaaccctaggaggtatagaaacaataaaaagcctttcattagaaccacgttttacacaacagtga

SEQ ID NO: 309321 - DNA, 270 bp, Proteus mirabilis; identical to SEQ ID NO: 306950

SEQ ID NO: 309322 - DNA, 642 bp, Proteus mirabilis
atgaccattgaaactataatttctgttttaaaagagtacctagcaaaactaaatgatgaacaaaaaattgaagctctcaataaaataaaaatatcgcttcatcaaataagcccatttaaaaatgaacctactgactgtgttctttggataaagcgacagcagattatcgctaatgactataatcccaatgtcatgtctccgacagaaaagagattactagaaacgtctctggtaaaagacggttatactcaacctgttgttgtattacctattcaacagtccaaaaataaaccatcacaatggcaagttgttgatggctatcatcgttatttactgagtaaaaaaaatagcttaaacaagcgaattaacggctatttacctattactatacttgatgttgaaagtcatactatggctgaccaaatggctgctactattcgccataatcgggctagagggcaacatcaagtggcggcaatgtcagatatagtcagagatttatcaaggctaggctggaatgatcaaaagattggtgatgaattaggtatgtcacaagatgaggtattacgtttaaaacagattagtggcttagctgaattattttcagagcacgacttctcagaagcttggactattaaataa

SEQ ID NO: 309323 - DNA, 291 bp, Proteus mirabilis
atgagttttactgatgccgctctatctacgtcaattcttcattgtaaagataaagttgatctaaaattaattattaatgcaaggcattataaagatgctatttttaaaacaaatattccaggagttggctttaagatatcagcgaataaaacaccttttaacttagtaggcgatgaatttaatgtaacacctgaatatgcaaatgtctgtaatgctcaaactagaaaagaaggatataaaaatatatattgtactgatagttggccaagactatatatttgttatggatga

SEQ ID NO: 309324 - DNA, 699 bp, Proteus mirabilis
ttggttcccataaacagctcaagtatatatattgatcctgttgccgccaatacaaatccaaatgcttataatggtgcaactggaagttttggtgctcgtttatatgttgcttttgtcgcaacaggacgattacctaatgggtatgtaacgataccaaccaaacaactgggccatattttattggaatctaatcgggcaagtttgaataataaaagattaacagctcctgttatgttaaatggagggcgcatccaagtgcaaagccaaacatgctcgatgaatcaaaagaattatgttgttccattaaatactgtctatcaatcccagttcacgtctttgtataaagaagtgcaaggaggggaagttaatatacaacttcaatgccaagacggtattgatgtttatgctacattaaatgatgcgacccaacatgggaatcgttctgatatattaacattagcaacggattctacggcaaaaggcgttgggctaagattatataaaaataatgaagtaactgcgattagttatggttcagacactcctaacaaaggaaatcaaaatcaatggcatttttcgaattatagaggagagataaatccacgtataaaattaaaagctaattatataaaaacggcaaacactattacgccgggaagtgtaaaagcagtagcaacgattactttttcatatcaataa

SEQ ID NO: 309325 - DNA, 426 bp, Proteus mirabilis; identical to SEQ ID NO: 302854

SEQ ID NO: 309326 - DNA, 189 bp, Proteus mirabilis
atgtcacgcagtacgcaaattaacggagtaagtttccctggtgaagtgaaaccgccaaaagagggtgatgtagttattacatggaaaaacaaaaataacgttgaagtgtatatcacggtgcgaacctatgaatgcccgaaagggatcaccattggcatcctgttagacacgtcattggagaatgaataa

SEQ ID NO: 309327 - DNA, 1134 bp, Proteus mirabilis
atgaagtatgcgagagaattatcaaaaattattgaaggtggagtgcttggaaagatcaatcaggtaaaagcttatacagaatttcttgcagacaaattagaaagtgatggagagcataagattgccaaacgattaagaacttccatgtccgatagtcttctggcttctggctataacttagcatcggcacagccagcaaggcagttgagagctccagttgataaagatagccatatggcgttagctgatattacctatccagggtctaatcattctggcatggcagttcttgatgcaacaactaaagctcaagttgatgaatttatttcctttgttttaaaagcagaaaaattagctgatgcaggcctaagtagtgccccatcgctattgttgtatggtcctcctggttgcggtaaaacactacttgctcacaatgtagccgcacaacttgaactaccgttgttcactgctcgttgcgattctttggtatcgtcgcttcttggctcaacatctaagaatataagatcactttttgactttgcatcgcagcagccatgcgttttgtttttagatgagtttgatgctttagctaaagcaagagacgatcaacatgagttgggagagttaaaacgtgtggtagtcagtctgcttcaaaacattgatgcacttcctaaagatacaataatcattgccgcaacaaatcacgaacaattgttggatcctgctgtttggagacgcttcgagcttcgaattaaactaaatgcgccagattctgttacaagagaacagatttaccgtaatgagttagcagagttttctccatctaagctacagaaaacagttgagcattcagttggactatcgggagcaattattgctcaaatatgcgttgcagcaaaaagaaaagcgattttgaatgatgaaaatcagactactgagcaagagttattgtatcggattgcaatggttcgatattcaaatgtaattgagtctgaaaaagaagccacggacaaactagtagagttgaaaaatctaaactcagaactttttacagtgcgactgctttcaaaaatatttggaatgtctacaggaaaaatatcaaacttgctaaatagggatgaaaatgagcaataa

SEQ ID NO: 309328 - DNA, 1764 bp, Proteus mirabilis
atgtatcaagcgggtggaacaataagatcattactcgacaaggttgctgagcaggaatacctgttacctgccatccaacgagagtttgtatggcgaccagaacagatctgtcgtctatttgatagcctgttgcaaggttacccgtttgggacctttctattctggaagataaaaccagagaaccgggatagctatcagttttatcagttcatgcagcattaccatgagcgagataactaccattgtgaaaatgtcactaagttaccggagcgtgagttcattgccgtcctagatggacagcagcggattactgctttgaacatcggcctacgcggctcatttgcgtggaagctgacaggtaaatggtggagcaatgatgacgccttcccagtgcgcaggcttcacttaaatctgttaagccagcccgacctagaaactgggtctatgtatgactttgagttcctaaccgacgataaagcctctttggatgcatctgaacaatattggtttcgtgtaggccggatcatggaagaggaagaagatgcacttatcgatgaagttgctgatgatgcccggttgagctcggagcaacgcaaagaggctcgctcaactcttcgtcacttgtatcgaaccatccatgacaaagacaagatttcgttttatgaagaaagtgatcagagccttgaacgtgttctgaatatctttatccgcatgaatagcggcggtactaccttgtcctactcagacttactactttcaatagcagtagcgcagtggagctcgttagatgcccgtgaagaaattcatgcattagtggatgagatgaaccgtgttggtgatggattcaacgtatcaaaagatctcgtgttaaaagcaggcttaatgctctctgacatcggtagcgtgggctttaaggttgagaactttaacaaggaaaacatggcgattctggaaaagaactggacgccaattcgtgatgcgttattgctctcaatgcagttacttgcaagttttggttttaatgcacaaaacctcagagcaacaagtgccatcctcccgttggcctattacctgcaccaccgaaagttaacggcaagctacctttctagggttgaatatgcagtcgatagagaatgcatcagaaactggcttattaggtcgttgttgaaagcgtcaggcatctggggaagtggtttggataccctgcttactatgcttcgctcagacatcaaacaatcgggtgatactagtttcccgctagctaaaattgaagcgaccatgcagcaacgtggaaaatcgttgcgctttgacccagaggaaattagtgaactagcccagttggattatggtaatccgcgtacctttgccttgttgactttgttgttccctggattcgatttttcacgacactttcatgtggaccatatttaccccaaaggtttgtttacacgtaacaagcttgcaaaagttggcgtccctgctgaacagctagatgagctcatcgaggcatctaacaagctgccaaaccttcaactgttggaagagacaatcaacaatcagaagcggcaaaaaatgccccatgaatggtatgcgcagcagtggcctgatgtgaatgcaagacaagcacatctgcaatcgcaagccataacatcattacctgaacaactaaaccagtttatggatttttaccgcgagcgtcaggaaacactgcttgcccgcattagaactgcattacaacccgcaagcagcgtagagacagaataa

SEQ ID NO: 309329 - DNA, 3660 bp, Proteus mirabilis
atgaatacgaacaacattaaaaaatacgcaccaaaagcgcgccgcgaatttatggatgcggtagctaaacgattaaatacctttggtatcaccgcgaataaaaagggcgagctacaaattgcagaagcgaatctacaaggttctgtgcttcaaatcgccggtaacagttttgacggtaaactggccgagcccagaaaacgcatagtggccagaagccagaagctggggtatgcacaacttattgaacaagtagcttatacctggttcaaccgtctgtgtgctattcgctatatggaaatccatgactatctaggtcatggttttcgtgttttgtcgcacccagacaaccctaaaggatttgaaattatcgaccatgcgcaagatgctgcggatgaactcgggttagatagagctcgcattattgaactcaagcttgcgggcaacaaagacgaagagctttatcgtgaattgttgttaggccagtgccataagctacatgaagctatgccttttttatttgacgcattggacgatgaaacagaacttctgctaccagataacctaacacgtaccgactcaatactgcgtggattggtagacagcattcctgaagaggactggcaacaggtagaagttatcggttggctttaccagttctacatttctgaaaagaaagatcaggtaatgggtaaggtggtcaagagtgaagacatccctgccgccacccagctatttacacccaactggattgtaaagtacctggtacaaaactcagtaggtcgtcaatggctgcaaacctacccagattctgccattaaaacgcagatggaatactatattgagcctgctgaacaatctgacgaagttaaccagcagctaaaggctattacgccagaatctattgaacctgaaaccatcaaagtactcgatccggcttgtggctcgggccacatattgattgaagcctataacgtgctaaaagccatctacgaagaacgtggtttccgctctcgtgacattccaaagatgattctggagaacaacctctacggcctagacatagatgatcgtgcagcacagctatctggctttgcgttgatgatgatggctagagatgacgataagcgtatttttacccgtaatgtgcgactcaatgtactgtcattgcaggaaagtaaccatattgacctgccgaccttatggaaagcactcaatctatcgggaagttggcaaagcggcacatcacaaggcttgttctcagatgatgagcaagatttaagctcgttcaatgcagacaaccgctaccaactgctgacgcgaacattggcaagattttctcaagctaagacctttggttctttgattgatgttccaagcgatgagcatgaccagctaaaagagttgttgagcacgcttgtcgagcttcaagagtcaggtgactcaatgcaaaagcctgcggcaaagcaattgattgaaattgttcatcaggctttggttttatctattcgttacgatgctgtgattgccaatcctccctatatgggagcaaaaggtatgattgatgatttaaaacagtttcttaaaagcaactataaatgcagtaaagcagatctatttgctgtatttatggaaagagcatttaagctgttaaatcctactggttacaatgctcaagttaatatgcaagcatggatgtttattactaggtttgaagagcttaggaagaaaattataaacgagttcaatgtaataacgcttgctcatttaggtgcacgtgcttttggacagatctctggtgaggttgtccagacgaccgcttgggttatgtcaaaaaacaaggttaagtcatttcagcctgtgtttttcgatttaactgaaggagatgagtcatcaaaaagaaatgcattacgtaaaaatttgaatagataccaagaaacagaccaagatagcttttcttttataccgggctctccattagcgtattgggtctcaaacgaagtttttgactcctttaagtcatcgccgagtatgtctgatttttttgaacctagagaaggtttagcaactggaaataatgacaaatatgtaaggtactggcatgaagttggtatcgataatgtttttgagaactccacaagtagagaggaatcaaaagattctaggttgcgttggtttccttataataaaggcggtgaattaaagcgttggtttgggaatgacttctttgtagttgattggttgaatgatggccatgaacttcaaaacacgcttcatccttcaggtactagagtttgggcacataactttaacttggattacatttttagaccaatgatgagttggtctgatataacttctaaaggtttgagcgcaagattctttgataaaggatatatctttgatgcgacagggttaagtgcatttgaaaaatcagatgataaagagcttctttttgtagggttagcaatatgtaatagtggtgtaggtgaatatcttgcaaagttattaaatccaactttgcattttaaatcaggtgattttggaaggatgtcatttcctagaaactcaatattggaagacaagttgattggtcttgcaaaagttgctattaaaatttctatggaagactttaacttatttgagttttcaaggggatttaaatcatcaccattgatttctgatgatccttcactaagcggttcttacgaaaggtatcaatcaaaatcattggaaatgatagagacgatgattgaaattgaacaaactgttaacaaaatagtggctgatatttatggttttgaatttttacctgaaaaagaaataacgcctactttatatgttaacccaaagttcagatttcaaagttcggatgaaatgagttgttttagatcagagtcaatttctgagttgttgtcgtacgccttgggctgtgctatgggtagatattcacttgattatgaggggcttatttttggacacaacaatcaagatgatttcgacaaggataaatatcttacgtataaggtagatgatgatggaataattccttttactgatcaagagtggttcaaagatgatgccaccaaccgtttccgagagtttattcaagttgtttggggtgaagagcatctacaagcgaacctagattttgttgccgaatcactatgcctaaacgccattaaaccgaaaaaatctgaatcagctctggagacgatccgccgttatttatcgactcagttctataaagaccacctgaagacttacaaaaagcgccctatttattggctgtttagctcaggcaaacagaaggcttttgagtgcctggtttacctgcaccgttacaacgagggcacgctttctcgtatgcgtaccgagtatgtcaccccgttactaggtaaatacgatgcttatgcagagcagcttgagaagcagattgaaacggcagactcgaccagtgaagcaaaccgcttcaagaaagagttggatgccttaatcaagaaacaggtcgaactacgagagtttgatgacaagctaaaacactatgccgatatgcgtatttcactggatctggatgatggcgtgaaagtgaattacggcaagtttggtgatctgttggctgatgttaaggccattaccggttcggccccggaggttaactaa

SEQ ID NO: 309330 - DNA, 1815 bp, Proteus mirabilis
atgaatgcaggtgagattggcgcagcagctggacgaatttttaactataaagcgccgcttaattggattattagaagtcaagaagatcaggatgatcatggtattgattgtgaaattgagctgaaagattcaaatggtagagctcttggtcaagaaagcgtgtttaaaattcagcttaaaggccaagagaactgttcatttattgaggatggacagaagctgtctttctcggtttctcgcgcacgtcttcagtattatctcaagttcaatattccagtgatattggtagttgttgaagtgtctagcgaagatatttactgggtttctgttactggcaatcaagagatcttggagaaagtaagagactcatctacagatactttgactgtccatttgcccgttgagaaaaagctagaaaaaaccgataccgcaacattcgataaattgttggtggctgttcaagaatgttgggactttctgtctttaagagatcttaagcttgcggttaacaactgtaaaacactgcaaccagaagctttgaatacatgtatcgaacaagtaggtgacgctttgttcaaggcttaccatatcaagttagaccaacttctacttactagatcatttaatgatctttatcagcaagccagtgacattattcaatcgcgcattgtgccacctaaagataggttcttggctacactttacttcgattatgcttttaaggtcgctccttataaacaagtaaaaaacgaacaagttgaagagcaatttaagttatgcgaatacttaattatttttgccagagagcaaaaagagtcagcttatcgtcttacagctatagcaaaagcaagaagctcactgtttaactttaaagttgaacaacttcatgcgcaccatcattcaaatgaaaacttcaaatcggatagttttgaatacttgtttatgaaccgagaaatacataagcaataccatgatgcttgtgcccagttgcagaagataataaacatgtgccataggctgattaacctcggtcagtttaatatcttggctgatttaatgtgtgatgtggcattatctataggtatgtttaaaaccattcataatgcacgtggttcaaatgaagctattgcattcctagatgagtggcttgaaaagatgctgcacacagtattgatgtactcgtcaattgttagtgaaatgagaaaaattgagcagctgtatcttatggtcaatttgcagtccgaactcaaaactattgttaagttcgacgttagatctttaattatcgagcattgtccgagttctgaagagttattggatgcacttgacaatgtaatggcgagtaaggatcaacccaaaccactttttgaaaccagcattgaagagcaaaagcaattctttgcttacatggctaaaaaccttggtatggacccagacgatcctacttcgagagaaggtcagttcatagcaataggtttagccaactatgaccctacaaatattattggtcattgtgagcatatgtttgttgattaccgaccgagagggatgatagcccaacagctaggaatgcactctctaagtatgccgatcatgacttgcttaaagcataagcacacagttggaacggggaacttgttaatcaaagcattcgataactctgatggaccagagtttgcgttaggatttaagcaacgtcattgtgataagtgctctgattgttcaccaagagcagatgattgggtttggagtttgaaatggcagcaagaagaacgaacaaaacatgtcgagtggcttgataagatagacttttaa

SEQ ID NO: 309331 - DNA, 5730 bp, Proteus mirabilis
gtgacatcttcaaaaatcaaaccatcacaactaacacgtgttgggtatacataccaagaccttatgtgtattcgcatgttgataaattggtttcatgaccccgagaaataccaatggatgatcatagagggcaatcacgggcttagtcacgttaaaagccttgatgatgtgatttgttatacagccgaaggagaatatgaactttaccaagtcaaattcacaattgattctgaacgtgatgatttacgtttggattttgattggctactaaaaaaaaagagtaggggcacatctcttatcgaaaaatggtcagctgacgttgagaagttcggatcttccaacgggatatccatagccaagctaattacaaatagaatacctgaccaagttttatcaaattgcctaaaagacaaaaaaattgaatacagcctaattccagatgatattaagttaaaggtttctgatcagcttggcagtgaagaaaaagctataaattttttctcaacccttatttttgaacatagccaaagagaaattgacgatttagagttgcaattacatgattcacttgttccagatcacgctaataacgaaagctggcttcagttattaaagactgttgagcgctgggctacacgaaaaagtgaaccggcacctgatggtcgaatatatcttaagcatatacatgatattttatcgatcttcgcaaagaaaacaatttcccagttttttgaagtgccaggcggctatagaccaccaacagaggagttttattatgaagttataaaaaaagtcaccaacccaggctgccatgttatatctggattgccaggaatggggaaaagtacctttctatcgtttttaaccgaccaattaatagaagcaaaaacgccagtcattcgacatcattactatttatctcctcaatttattggcgatagaattgccttcaataatgcggctcagtcattgcaaagtcagatcaaaaccttttatcctaatgacttcgatagcgacaaacttgaaccacagaatttcgagacgtggattagcaaagcagcagataaggccgaggaaagtaataagaagctcgtaatcataattgatggattagatcatgtttatcgtgaaagatcggatataagccaacttgaacacttagttaatcgaattattccctttaaaaataagatttgtttgctgtttgggacgcagccaataagcgataattatcttcccaattctctgttacgatctgcgccaagagaatctgcctggatcgatattccccctatgggtcttgatgccataaagtcgagactagacttcattgtatcgagggaagaaatcaaagtagtgggcgatgatgagcaccagcgtagagaaatagtagaaatttcagaaactctactcgatatttcacatggatatccccttcatattatttactctttaaatagtttgcagttagcaaatcagaatattagcaagtatgatgtagagcggctccctacatgtcctgatggcgatattcacgaatattacgagaatttatgggtatcactatctgaaggagcaaaagaaattctctttctgattgcaaatgcggatttttcatggccggacaaaacgcacattagctattgtcttgatgatagtctcaccttccaaagctgcttttcagaaattcaacacctgatagaacaaagactaagtgggatatattcattccatggaagtctgttcgtgtacataagacgtaaagacaccttctctcagtcaagagataggctaaataggatatctcaaacgtggataaatgcacatgctccagagtattggaggtggggttggggatggattattgaagctaatctcgggaacaccaatccgctatttcaaggaataaataaggaatggcttgttaaatctctttgcaatggttatccattagagcatatagaacatattttcagcgttgccgaacatatagcatttgaccaaaatcggtatccagagttattaaggctacgaattttaaaaacaagattgttaaatggtccggagtttcaaatacagaaatacagcgattttctagactgttcactgagtatttcaaatgatagcttcggccttctttggcgcgcggacaatctgagaattatcccagacaatgaaattgccattgttgcaaagcattttcaaggaagagacgaaagaatcgtcgatgcatgtgctgacgaaatctatcgaagaattcgcttttatgctcagttagatgactctaatcagtaccaaacattaaatagtcttgtagatgactatcttcatactctcgctagttatagcaatcctgatttagatattataaataatttctatgaaaggcttaatgacaaagcttcgtcttttacaaaaattgtcgaactgctcatccaatatggccatagacatctcttagttgatctatcccgatttgaaattccagatgatatagcttcggcagtctgcgacgaagttgttttagccgcaaacgttgaaggtataacacttgatgcgaagaaccccttatttagcagtgctgattcaaacatatatttgctttatcagttattagcaggaaaagtcatccagatcgaacaacttgacgacattgagtgccctgttgaatatgaggatgctcactatcttcctttttatgaatatttttttagaacacttatatcagaattctggataccagatgaaattgatactccaaagctgtccgatcctaaaaatattcaggagttcctcaaaaacgcttggctaaccttccagtttgcttcctcaaaaattgcaaaaatctttaaggaaggaggtagattcgagacattagatttgtatgactcatttaccattctcaaacaacctgacaaatttttgatggggtataaaattgattctgtcttatacaatattcggaaatctatagccaaaataaccatccatctaaatattttatacaactcgattgatgcgttttcagaaattgataaagaagccctagattttatttcaaataacacttggtgggattcaagaatattttttgatgttgcttctcataatgcaattctaaatttccctaaggagtctattgctcaagagttcatcaagattttcgaatctgaaatactacgtagagatgataccgcaacgctcgcaaacgatagccttgatctagcaaaattagcagtcaattttggccttcataacgaagctaggaagtttcttgaacgtaccgcactcaatatagtcggatatggatatagaaaagatattaccctacatgaggtttttgaagccatacaggaatgctctgacaagaactcacccaaagtacctgactggctaaaacgagtagccacttttacaagtgatgtctttgatttttctgagcgagaaattcaacatattcctggatggttcactaaattattggcaaaacacattcccgaacgtcttgtagatgaatttgactaccatctatcggaagaaaattggcatagaacgcaccttatcctagaaaatttcgtaaagtcatttccactgtctatgcagccagagcattccttattgaggtgcatgacaacatctaatgcgatgagcgcattagatgaaagaagcaaagataatgatatcctgagaagtatttacgaggatcagtgtaaagttcttggaggtatcgccccacaaccaaaagagcgcctctccagtacggatgatgtaaatacagactgccctgacgtatccactctgcatccctccaacctcactgatttgagagaagccttactttcgatttcatatcagattcgtaaaaaatttatttcggattggatttcctactgggataatcaaggtgaagcgagattcattctcacatcttttagcgactattatgatcaaaatgattcagacaacgaactagatagatatttacataacgttttcttgttaagcaaaaaaaaagaaggtaagacagcagcttataaatgggctgtaaggaatattaagctaaacaattgctggaatcgatatttctcctctggatcagaagctgccataaaggagtacggtgatacatacagtaatcaatgggaaaaccttctccgcgatactatggcttcaggatcttcaagcttacagagtgatgagaacataattgtaccttctactcagcttgtaacttatttagtatcagccggacaggtcgccttggcgactgagattactgaaattatggtcaccagcctggaaagtgatatagcgcaccttcctttgaccaaactttactggtatgacattcctgtttcattccaaagtatcccactgcacttaattcttttacatttcaagtggcccgaccgatacgccagactcctaacagcaaaacagatagcaatcctcttacaggacgaatccaatattgaattccgctcgctatacctagattttctggcaaaacaaccatacgagattgatatcgttgattatctatcggttctgttgcttgtcgactctatcccctttgtcgaagaaaatattaccaaatgtattcactacccttcacttatttccgatgaacttctgctcttcttgggttttggaagtgaagaacggcaggatttttcaacgctatattctgaattttcagatgactcgataccgaataagcgaaaatatgataagtatgccaatggtcttgcattgaggtttatagatgttatcaaggggttagaaaatgagtatcaaatccaactggaaagacattttcttcttgaatgggaaaaaatccatgaaaggcattattgttatacttttaaacctcagagcttttctagtgaccagttttatgctcaagacaatatttcctgtagtttttcatggcgagcagaagcatctattttatctgcctatgtcagaacattagcttatgctatgagctataactcaattccgtcagaggtttgcttgttacatgctcaagaggtattaccatttggctctattgccgtaaaaataaacccttctgatccgccatgtggttggcccgtattgggcgatcttaacaaacaagaccctgtgccaggtcagaaagatcttgagcaatatttagcaaatgttgcagcttctactgatgaaatattgttacgtgccgacggcccggtgttaagaaatcattcaggtgtatgtcttgatctagaagtcattctagtttctcttcaagactctgaaattgacgaccctagaataatgtttgattctttaaatcatgcacggaatgccgaggagggtatatttcctttagcaaaatggactttacctcattcgtttggccgttgggaaattgactggttatcaagaggctattttagacctgcgtatgctgtaggagattttccaattaactccgtaagtcaaagtgattcttgtgtggagtatttcggcggcaatataagcaatggcgtttggagatactgggtcaaccagtggtaccctgttcaccatagaggcgtgggtaattctttcggaacttactttacagtttccaaagatttttttgaaaaattcaaagcgcacactgggtgtaactactatctaatcgccgaaatgacttgtgttgatagacgtgatttcgtacggaatgtggagccgataaaaacgtttgccattttgccagtatag

SEQ ID NO: 309332 - DNA, 561 bp, Proteus mirabilis; identical to SEQ ID NO: 298949

SEQ ID NO: 309333 - DNA, 678 bp, Proteus mirabilis
atgaaaaagatatttgcttttattatttttttattcccacttattgcttattctaatggtgtttcattaggtgctacgcgtattatttataattctaatattaaacaaattaatcttgttgtaactaattcagataaagagaatagttttctaattcaatcatgggtatctgataatcaaggtaataaaaataatgattttattgttacccctcctttatatattcttgacgctaataaagagaatgctttaagaattatgtatacaggtgaacctttacctgcagatcgcgaaagtttattttggatgaatgtcaaagctattccttctttagatgaaaagcttgctaatgaaaatacactacaaattgccatccagagtcggataaagcttttctaccgtcctagtggattgtccgcttatactgaaaaatatgccaatgaagtgactttttcctataaaaatggggagttaattgcccataatccaacaccttatcatattactatggtcaatttagctgcagccgacagtcaacttccttcaagtattatgattaacccattttcacaattaacattaggaaaagttaatcagaatgctaataccatttcattccaaaccattaatgattatggcgcacagactcctgttttaaaaaaagaaatcgttcattaa

SEQ ID NO: 309334 - DNA, 2532 bp, Proteus mirabilis
atggttaataagaatactaataaagatatcgtttattttctctttccaagtgtcattgcattgtcattgacgctgtccttttcatcatatagcgcaaaccgatttaatcctgcatttttggctgactctcctgatgccgtcaccgatttaagttattttgaagcaggcaaccgcattaaacccggtgattatcttcttgatattgtttttaatcatgagtatctgcgtagtgaaaatattcattttattagtcaagataaccatgttattccttgtttaaatcgagattattatcaatcactcgggatcaatattaaactatttgctgattttgaaaaattctcggcaaatgaatgtattgatattgaaaaaatcattccagattctgttgttaattatgatattgagaaacaagctttaaatattcaagtccctcaagccgcgttagatctgaaagcgcgcggttatattccaccagaaaaatgggataacggtataacagcaggtattttaaattacacctttagtggcactaatagctggggaaattctcataataatagctactatttaaatctacgtagtgggatcaatattggtgcttggcgattacgcgattattccacttggaattcgtcaaacgggaaaaaccaatggaaccatatcaatacctatctgcaacgcaatattgtgtcattaagaagccaattacaaattggtgatagttatacctcatcaacactttttgacagtgttaattttcgaggtatttcattagaaagtgacgacactatgttacctgatagccaaagaggatttgcacctgtggtcagaggtattgctaaaggcaatgctaaagtggtgatccgccaaaacggttatgtgatttatcaaacctttgtttctccgggtgcttttgaaatccgtgatctctatccaacgtcaaatagtggcgacctctatgtcaccattgaagaaaatgatggtagcaaacacagctatgttgtgccttattctgctgtacctattttacagcgagaaggccaaaaacagtttgtcatccaagccggtgaaatacgccaaaataaccaacataaaaaacctcgatttatacaaggtcatcttatttatggcttaccctatgacaccactgtctatggcggtgcattagcaacaaaagattaccaatcttatgccctaggagcaggtaaaaatatgggtaccctaggtgccttctctaccgatatcacctttgctcatagccaattgccaaataactcaacatcagatggttattctttacgttttctttatgccaagtcgttaaaccaatttggcacaaactttcaattgctcggttatcgttactctacttcgggtttttacacattagatgagacattaaatacacgtatgtccggttatctgtatgaagataatcaaaaaaaaccgttgagttattttaatttgcataatcgcaagaaagggagcctacaaattaatttatcacaacaactgggggattatggctctatttttatgatgaccaactggcaaaattattggggaactaatgagaaaaatgtcctagtacaaaccggctacaatggcaatattaaagggctctcttataacgtcatttatagttataacagaatgatgaatagtggtcagcgtgaccaaacattgtctgtgggtctttctatcccattacaattgctaatgccgacaagttatcaatccatcaatagcacctatctcacatataattacagccacaataataacggttactcgacacataatgcggggattgctggtacattattggaagacaatacccttaattacagtgttcaacaaggttatagcaatcaaggtggaaactataccggtagtgcggcgttgggttatcaaagtcgctatggcaatttaaatgctagctataactatcatcaagatgctcaacaaattaactatagcctcgctggaggtatgctactccatagtggcggattaaccttaagccaacccttaagcgctaatgccattttagtagatgctcgtaatactgcggatgtaccgattgataatgcgacaggggtttatactgactggcgagggtttgccgttattccctatgctaccgcttatcgacaaaatcgagtggcattagacacaaccgcattacccgataatgttgaaattgagcaaaacattaagcaagtgatcccaacacaaggcgccgtcattaaagttcagtttgatgctaaaaaagggtatcgcttattactgacgctacaacaccaaggtcgcccactcccttttggggcaatagcaactgataaacaaaatcatctgtccggtattgttggcgatgatggcttactctacttatcgggtgtccctgattcaggaaaattagagatccgctgggggcataatgcctctcaatactgtcaagtgaactatcaattacccgcctctcaacttgatgaaccttttgtgaaaatgacacaggagtgccaataa

SEQ ID NO: 309335 - DNA, 519 bp, Proteus mirabilis; identical to SEQ ID NO: 307021

SEQ ID NO: 309336 - DNA, 1074 bp, Proteus mirabilis; identical to SEQ ID NO: 295977

SEQ ID NO: 309337 - DNA, 318 bp, Proteus mirabilis; identical to SEQ ID NO: 307023

SEQ ID NO: 309338 - DNA, 1044 bp, Proteus mirabilis
atgaaaaagtggtcctctgtacttgctgccagtgtaatggcattaagtattggtacagcatcggctgatgatggtaagacaatctatttctataactggacggaatatgtaccgccaggattgctggaacagtttacaaaagaaactgggattaaggtgatttactccacctatgaatctaacgaaagcatgtataccaaattaaaaacctataaagatggtgcttatgatttggtggttccttcaacttattttatttctaaaatgagtcatgaggggatgctacagaagattgataaatcgaagctcagtaattttgataatcttgacccaagtttattacataaatcattcgatcctcaaaatgactactcaatcccttatatttggggagcgactgcgatagggattaatagtgatgaagttgatgtaagtagcattacttcatgggctgatttatggaaaccggaatataaagatagtttactgttaacggatgatgcacgtgaagtattccaaatggctttattaaaattaggctattcaggtaataccacagatccaaaacagattgaagaagcctataaagagttacaaaagctgatgcctaatgtactggcttttaattcggataatcctgccaatccttatatgcaaggagaagtgaatctagggatgatctggaatggctctgcatttattgcgcgagaagccggtgctcctattgagttggtatggccaaaagagggcggtatcttctggatggacagcttagctattcctgcaaatgcaaaaaatgttgaaggtgcgcataagcttatcgacttcttattacgccctgaagttgctgcaaaagtggctgaaaatatcggctatccaacacctaatttagcggcacaaaaattattgccaaaagctatcacaaaagatagctcactttaccctagtgaagagattatcagtaaaggcgaatggcaaaatgatgtgggtgaagcgacggttttatacgaaagttattaccaaaaactgaaagcgggtcgttaa

SEQ ID NO: 309339 - DNA, 780 bp, Proteus mirabilis
atgataggacggttattgcggggtggatttatgtccatcatttacgcgtatctttatatcccgattatcattctgatagttaactcttttaactcatcacgtttcgggatcaactggaaaggctttaccactgactggtataccattttattaaataatgacagcctgctacaagctgcagggcattcattaacgatggcagtcacctcagcaacctttgcgacgttgattggttcattggctgcggtggcgctttatcgttatcgttttcgtggtaaaaagtttgttggtggtatgctgtttgtggtgatgatgtcgccagatattgtgatggcgatttcattattggttttatttatgctattaggcatttccttagggttttggtcattactggtgtcgcatattaccttttgtctgccttttgtggtggtcacggtctattcgcgactcagtggttttgatgtcaaaatgcttgaagccgctaaggatctaggggcgggtgaatttactattttacgtaaaatcattatgccattagcgatgccagcagtagcctcggggtggttattaagctttacgttatcgatggatgacgtggttgtctcctcttttgtgactggaccaagctatgaaattttaccattaaaaatttactcaatggtaaaagtgggtgtttcaccggaagtgaatgcactggcaaccatccttttagggctatcattagtattagtattaattagtcagttgatcttacgagatagaactggcaaagcgtaa

SEQ ID NO: 309340 - DNA, 861 bp, Proteus mirabilis
atgaagaaaacacgtaaactatttcaaaacatcgttattactggtgttgtgggttggttaatggtgttcgtcttcttaccgaatatcatgatcatcgccaccagttttttaacccgtgatgatgcgaatttagtcgagatggtttttacgctcgataactattatcgcttatttgatccaatgtatgcagaagtattactgcactctattaatatggcattggtagcgaccttagcttgtttaatattaggttatccttttgctttttttctggcaaaaatgcctaagaaaatacaaccattactgctgtttttattaatagttcccttttggactaactcacttattcgtatttatgggttaaagatttttctcagtacgaaaggctattttaatgagtttctattgtggatagggcttatcgataaaccgctaaggatcatttataccccagaggcggtagtattagggttggtttatattttattaccttttatggttctgccactctattccagcattgaaaaactggataaaccctgtttggaagcggctcgagatctcggtgcgaataaattacagacctttattcgtattattatcccattaactatgccggggatcatcgcaggttgtttattggtaatgttacctgcgatgggcttattctttgtggcggacttaatggggggcgcgaaaaacctacttattggtaacgtaataaagagccaattcttaaatattcgcgactggccatttggggcagctaccagtatctgtttaacactggtgatggggttaatgctatttgtgtattaccgagccgtaaaactactgcataagaaggtagaaatagaatga

SEQ ID NO: 309341 - DNA, 1116 bp, Proteus mirabilis
atgactgagaaaacatctctgacaccactagtcgaattaaaatccttaagtaaaggtttcgacggaaaacaaatcatttcccgcctcgatctgactatcaaccatggcgagtttttaaccatactcggcccttcaggctgtggtaagacgacggtattacgtttaattgcgggcttagaagacgcggatgatggacaaattatcctagatggacaggatattacccatattccagcagaacagcgttttgtaaataccgttttccaaagttatgccctgtttccccatatgaccgtatttgaaaatgtggcttttggtctacgtatgcagaaaacacctgctgcagagatcaatagtcgcgttatggaagcgttacgtatggtgcaactggaggactttgcccaacgccgtcctgctcacctttctggtggtcaacagcaacgcgtcgcgattgcacgggcggtggtcaataagccgaaggtattgttgttagacgaatcattgtctgctctggattacaaattacgtaagcagatgcaaaatgagctaaaagccttacaacgaaaactggggatcacctttattttcgtcacccacgatcaggaagaagcactgactatgtcagataggatcgtggtcatgaaagaagggcgtattgagcaagacggtacgcctcgagaaatttatgaagagccaactaacttattcgttgcgcaatttataggtgaaatcaatatctttgatgcacgtgtcctacatcgtattgatgagacacgtattagagcggatgttgaagggcacgaatgcgatatttatacgcaattacctgttactcaaaatcagcaactgaaagtgttactcagaccagaagatctgcgcgttgaagagatacacgatcttgaaaaccttccgggacttatcggttatgttcgtgaacgtaactataaaggcatgacgctagattctgttgttgaaatggaaaatggcaagatggtgatggtgagtgaattctttaatgaagatgatccggatgttgatcactcgttagaccaaaagatagcggtaacttgggttgagagctgggaggtcgtgctggctgatgaagaaaacacgtaa

SEQ ID NO: 309342 - DNA, 1275 bp, Proteus mirabilis
atgaatattgaaaggaaaatactagtcaaactaaaaaatatacattcacttgatcaaaataaaaaactattacgctctggttaccataatcaatataatacatttttatctaatatttcttttgttccagtattatcatcatcacaattaccacctaaaaatcatctttctcttacatcaaatcatttaaatgattactattatttaaatttacctaatgataacacatatacattagatgaaattattaaaatattaaaacaacatcctgatatagaatatgtgcaaaaaattccaaaattacctgtacagccacctaatattacgccggatttaactcgccatcagcattatttaaaaaccccaaaaataaaatcaaatgaaataactgggttaggtattatagacgcttggaataaaaatgcttatggacaaggtatacaggtggccgatattgagtgggattttgatttatcacatcccgatttgttagctaataatatcacgccactttttcctttaactgaaaaaaccgatcaagccgaccatggtacggcagtggcggggttaattatggggaaaaaagacggtaaaggtattactgggcttgcttataaattagatatgttttatgccatatcagaattaagcagtggtcgtattgaagcaattattgccagtaaacagaaattacacgcgggtgatattgttttatatgagatgcagacagtttgtgaacatcatgcttatgttcctgctgattatgaaatgcatatctgggaggcaactcgtacattaacagaagcggggattattgtgatcatggctgccggcaatgggggggttgatctcgatttacctttttatgatagctatcgtcaacgtagcgataaccactctatacgtgtcggtgcgggctcgccttatacgctaaatcgtttacctttctcaacgcatggctcccccattcatgtgcaagcatggggagaagatgtgactactgccggatatggtgatctttttcatggtgatgggaataacaaatatacggctaattttagtggaacatcatcagcctgtgcattagtcgcgggggcggctgcagttattcaatcttggtataaagataaaaccaacacggtattaacgccaatagagatgcgagagctactgattaaaacaggaacctatccatcattaaatgaaaagattggccctttgcctaatgtgaataatgccatcttacatttaaaaaatttaatccaatataattaa

SEQ ID NO: 309343 - DNA, 1065 bp, Proteus mirabilis
atgcctgtaaaatcaataattaagacgctatctaactctcgactctctacttacaaacaaccacacttatgcgatgtaagcgatgaacaaagcttagggttatatgtgtggaataaacagttatcaggtctcttttatccagtacttcaagtattagaagtctctttgcgtaatgctatcaataatgcttacatcgaataccatgagcagctagtcgaagcaaattatcaaccacaagattgggctaaagagaaagccaaaatagaccagttttggtttagtaattcttatacaaatcaaaataatagtaaggggtttcaacagatagttaaagctaagaaggatttagttagagagggtaaagctattactcctgataatctaattgcgaaactaacatttggtttttgggttcacttaacagacaagaatcatcgttcaagccaatcccttgctaatcctcctattatcgagctttggccaaagcttaataattttgtttttccatatgctaaggacttaaatggtacctctttgagtattaaccatattagctcaaatttatttgaaataaatagacttagaaatcgtattgcgcaccatgaacctatctggaaagcaatagatttgtttgattctgatgacagcataaatatggttatttcacattacgaacgatgcttaaaagtcattcattggattaaccctaacaatttaaagttattatctgtcatagacaacgacaaattgatgggaatagcttgcactcaacatacgctatggcgaagtaaaatgttagcatcgggactttattctgttccagatatcattaaatggaaagaaagacatgaaatcaacaccagacgcaaaggtgaagtcgttagtgtgacagcaaattatgcgattatacgctgtaaaaagtcacatcagatattttacaccaaccaatcaatgcagaagagacgcaaagcttggcctttaacggttggtattgatgttactttcattccaaaaccagcctcagctcaaggcaaccatcccaatgcgactcaagtaaaacaatga

SEQ ID NO: 309344 - DNA, 1035 bp, Proteus mirabilis
atgcacgaaaatacaccaaccgataaaacactagaaaacaagcaaacacagggcactcaagggaattacccacttaaccgcttctctgttgcacctatgctcgattggactgatcgccattgccgttatttctttcgccagcttaccaaaaatactttgctgtatactgaaatggtcacaacaggtgccattattcatggcaaaggtgattatttaaaatatagcaacgaagagcacccgatctcattacagcttggcggcagtgatccacaagcgttagcgcaatgtgcaaaattggcacaagagcgtggatatgatgaaattaatttaaatgtaggttgcccttctgatcgggtacaaaatggacgctttggtgcttgtttaatgggtgaagcacaactcgttgcagattgcgtgaaagctatgcgtgatgtggtcgatattcctgtgacggtaaaaacacgtattggcatcgacaaccaagatagctatcaatttctatgtgattttattgataccgtcagccgtgataataactgcgatacctttattattcatgctcgcaaagcttggttatcgggattaagccccaaagaaaaccgcgaagtgcctcctttagattatcctcgtgtttatcaattaaaacgtgatttctcgcatctcactatggcaattaatgggggaattaagtcactagaagaggcgcaggagcacttaaaatatatggatggtgttatggtaggtcgcgaagcttatcaaaatccatcaatattggctcatgtggatcacgtgctttttgataatcagttacctgttactaatgccgtcgctgccgtaaaagccatgtatccttatattgaaaaagagctctcacaaggcacttatttaggtcatatcacccgccatatgttgggaattttccaaggtattcctggggcgagacaatggcgtcgtcatttaagtgaaaatgcccacaaacaaggtgctgatttaaccgtgctagagaatgcgctcaagtttgtgaccgaaaaatag

SEQ ID NO: 309345 - DNA, 984 bp, Proteus mirabilis
atggctaaacgcattcagtttgcagctcatggtaatgccgatgtactcgagctaacttcatttacccccgcccctctaggcgataacgaagtacaggttgccaataaagccattggcattaattatattgatacttatgtgcgtagcggattatatccagtagagcatttcccaagtggcttaggaactgaagctgccggtgttgtgattaaaacaggcgctcatgttacttcacttaaagaaggggatagagttgtatatgcacaatctccattaggcgcctacagcgatacgcataatgtaccagaaaataaagtagctcgcctgcctgataatatctcttttgaacaagccgccgcctcttttttgaaaggattaacggtttattatctattcaatgaaacatacaaattacgtgcaggggaaacctttttattccatgcagcggctggtggcgtcggactaattgccagccaatgggcgaaagcgattggcgctaaaatgatcggtaccgcaggcagtgatgagaaagtggctaaagctaaggccgcaggtgcatggaaagtgattaactatcaaactgaatctattgttgaacgtgtccttgcgctcaccaataaccaaaaagtacccgttgtgtatgattctgttggcaaagcaacttggttggattcgttgcactgtttgcaacgccgaggcttaatggtcagttttggtaacgcttctggtgcggtaacaggggttgatttaggtattcttaataaattgggttcactttatgttactcgtccttctatttccggctacattacgacgcgcgaagagttagatgcagcaagtgaagcactatttacgttaattggtcgtggtaaaattgatgtcagtgtgccagataatcagaaatttgcattagctgatgctaaagccgcacaccgttatcttgaaagtcgtcaatctcaaggttcaagtctattgatcccatag

SEQ ID NO: 309346 - DNA, 1380 bp, Proteus mirabilis
atgtctgagataaaagatcgccaaatggaagggttgaagcttcccccccattcgctagaagccgaacaatcggtgttaggcggtctaatgatagataacgagcgttgggataatgtctccgagcgtgtcactgccgatgatttttatagccgacctcatcgcactatttttgcgcaaatgcagcgtttacttgaactgggtaaacctattgatctgataaccttatcagaagcactagaacaaaacgcagaattagaaagcgttggaggctttgcttatttagcagaactatccaaaaatacgccaagtgcagccaatattaacgcttatgccgacattgttcgtgagcgtgctgtcgttcgcgatatgatcaaagtcgccaatgaaattgctgatgctggatttgatccccaaggacgcaccagcgaagatctgctcgattttgctgaatctcgcgtctttcaaattgccgaaacccgcgccaataaagatgaagggccaaaagcaattgatgccattttagaagaaaccgttgaaaaaatagagcaactctaccaaaaacctcatgatggtgtgacgggggtatccagtggctatcaagatctggataaaaaaaccgccggactgcaaaaatcagatttaattattgtcgcagcacgtccttctatgggtaaaactaccttcgcgatgaacttatgcgaaaatgcggcaatgacggaagaaaaacctgtacttatctttagcttagagatgccaggtaaccaaatcatgatgcgtatgctcgcttcattgtctcgcgtggatcaaacccgtattcgtactgggcaacttgacgatgaagattgggcgcgtatttcaagtaccatgggtattttgcttgaaaaacgtaatatgtatattgatgattcctctggtttaacccccaccgaggtgcgctctcgtgcccgaagaatttatcgtgaacatggcggtttaagcctaatcatgattgactacttgcagttaatgagagtaccttcattatctgagaaccgaactttagaaattgctgaaatttcacgctctttgaaagcattagctaaagaattacaggttcctgttgtcgctctgtcacagttaaaccgtagtttggaacaacgtgctgataagcgcccagttaactctgacttacgtgaatcgggctctattgagcaagatgccgacttgattatgtttatctatcgtgacgaagtttatcacgaaaatagcgacctaaaaggggtggcagaaattatcattggtaaacagcgtaatggccctatcggtacggtaagattgacctttaatggtcaatggtctcgctttgataactacgcaggccctgcttacgacgacgaataa

SEQ ID NO: 309347 - DNA, 1092 bp, Proteus mirabilis
atgaaagcggcaaccgcagtaatagatcgccgcgctctgcgtcacaattttcagcatgtgagagactatgcaccacatagccacctgatagctgtcgtgaaagcaaacgcttatggtcatgggttattagaaacagcatatactttaatggatgatgctgattgttttggcgtagcacgtatcggtgaagctttaacattacgtagtggggggattgtgaaacccatcctactacttgaaggcttctttgatgctgttgatttacccattttggtggttaaccatattgagactgttgttcatagtgaagagcaactcgaagcgttagaaaatgccgatttagaagaacccgtaaaagtctggatgaagctcgatactggaatgcatcgtttaggcgtccgtcctgaagaagctgaggctttttatcaacgactttgtgcttgtaaaaatgtccaacaacccgtcaatttggtcagtcattttagtcgcgcggatgagcctgatattcctgaagtcacacaaaatcaaattcagctatttcaagcctttatccaagataaagcgggtgataaatctatctctgcttctgcgggaattttattttggccacaagtccattatcaatgggttcgccctgggatcatcacatacggtatctcaccaacaggtgataacagaacaggtaaagactttggtttaaccccggcaatgacactaaaaacgagccttattgcggttcgtaaacataaagcaggtgaacccgttggttatggtggtacatgggtaagtgaaaaagatacttatctgggtgttattgctatcggttatggtgatggttacccacgtagtgcaccttctggtactcctgtttggatcaacggtcgaaaagtgccgattgttggacgcgtttccatggatatgatcagcgtcgatttgggatctgagctaattgatcgtgttggtgatgaagctattttatggggagatgtgctacccgtagaagaaattgccaaatatagtggtattagcgcgtacgaattaattaccaaattaacttcgcgcgtcattatggaatacctagacgaacaatag

SEQ ID NO: 309348 - DNA, 1194 bp, Proteus mirabilis
gtgtttcaacaggttgaagcgtttgcgggagatccgattctctcattaatggatgtctataataaagatccacgtcaagataaaattaacctaagtattggtctttattatgatgaagaaggcaaaacccccattctaggcactgtgtctgtggcgcgtcagcagcttaatgcgatgacacctaccgcaacactgtatttgccaatggaaggactcgccccttatcgccacgaagtacagactctcctttttggtgctgataacccgcttattgcagacaaaaagattgctaccatacaaacattaggtggctccggagcgctaaaagtcggcgcagattttctacatcgctattttccaagctctgaagtttggatcagtgatcccacttgggacaatcatgcgtctatttttgcgggctccggttttaaagtaaattattatccttattttgatcccgaaaccaaaggggtcaaattcgatgcattaatagattgctttaaaaaacttcctgaaaaaagcatcgtactgatgcacccatgttgccataatccaacaggatccgatctcaccaaaggacaatgggatcaggtcattgagatcctaaaagcgcgtcaagcaatccctttccttgatattgcttatcagggatttgctgaaagtttagatgatgatgcttatgcggttcgcgctatggcaaaagcagggttacctgtattagtcagtaactcattctctaaaatcttcgggatttatggggaacgggcgggtggcttatcgattgtatgtgataacgcgaaagagtgtgagcatgtattagggcaattaaaagcgggcgcacgtcgtatctattcaagtcctgctaactatggcgcacaactggttaatcaagttttatcagatcatgtattaaccgcacaatggcaaaaagaagtggctcatatgcgtgaccgcatcaaagagatgcgtgtaactttagttaatgccttaaaagaagcattacctgagaaaaactttgatcatttattaacacaacgcggtatgttcagttataccggcttttcaccagagcaagtagatagattacgtgaagagtttggtatttacctgattggtacaggtcgtgtttgtatggcgggtgtcaataacaataatgtgcagcgcattgcacaagcctttgcagccgtcagttaa

SEQ ID NO: 309349 - DNA, 1350 bp, Proteus mirabilis
atgagccagaacaataattctcatttatggtcgcagtttattcgtcaattacgtgaaggtgttaagccagcagtaggttgcactgagccgatttcattggcattagctgcggcaaaagcaaccgcattattagctgagcctgttgttggtattgaagcgtgggtttcgcctaatttaatgaaaaacggaatgggcgtaacagtaccaggaacgggaatggcgggattgcccatcgcggctgcattaggggcgacagggggcaatccggatgctggccttgaagtattacttacagcatcaccacaagctatcgctcaggctaagacattggttgctgaaggaaaagtgacggttggcgtgaaaacgccatgtagtgatgtactctactccgaagcaaaagtatatggtcagtcaggttatgccattgtcagtattgctaaagagcatacccatgttgtgcgctgtgagtgtaatggcaaagttgtttttgaggatgataaaacgagtttgactcatgccggggatagcgtagaagaaaagccttttgcgacggtttgtgctgaagatatttatcgctttgcactcaatgtacctatagatcaagtcgcctttatgcttgatgcggcttatctaaatggtgctttatcagaagaaggactaaaaaatagttatgggttggcgatagggcggacgctggtttcacagcaagagaatggcttattaggtaaggatttactgagtgaaatcatgataagaacgtctgccgcttcagatgcacgtatggggggcgctgtattacctgctatgagtaactcaggctccggtaatcaaggcattgctgcaacattgccggtaatggtagttgctgaatttattcaagcagatgacgaaactttattacgggcattagttttatcgcacttaatggcgatttatgttcatagccatttcccacctctgtctgcattgtgtgcggcaaccactgcatcaatgggggcggctgcgggtatggcatggctactgactaaagatttcaccactgtaagtatgtcaatcaacagtatgattggtgatattagtggcattatctgtgatggcgcctcgaatagctgtgcaatgaaagtatcaagtagtgcggcgagtgcgtataaagccgttttaatggcgatgcaaaatcaaagtgtagcgggcactgacgggattgtcagtgatgatgttgatagttcaattgcgaatctctgcgcattagccagtcgtgcaatgcaacatacagatattcaaattattgagatcatggaagaaaaagcacgccgtaatgccggggaaaagcagcaagctgtcaatgcataa

SEQ ID NO: 309350 - DNA, 1332 bp, Proteus mirabilis
atggaaacggcttcctcaaaaacagagacaacaagctatcccgcaactagtgctggcgctcgccgagcaggtatgacagaagaacaatggcgtgcagcaattaaatttgacggcaatgatgtgggctgggttatcatgagtatcggtatggctatcggtgcagggattgtttttttacctgtacaggttggcttaatgggattgtgggttttcttactttcctccgtgattggttaccccgcaatgtaccttttccaacgcctatttattaatacgttggctgaatctcctgagtgtaaagactacccaagcgttatcaccggttatctcggtaaaaactggggtattttattaggtgcactctattttgtgatgttagtgatttggatgtttgtctattccacagctatcacgaatgacagtgcttcttatctacaaacttttggtgtgactgacggtttattatcagaaaatccgttctatggtctgattttaatctgtgcgttagtggctatttcttctcgtggtgaacaattactgtttaagctatcaagctttatggtaatgacaaaactactggttgttgcggcattaggtctttcaatgattggtatgtggcatctgtataatgttggcgcattaccccctgccggacgtttaattaaagaagccattatcacactaccttttacattaacttctattttgtttatccaaacattaagcccaatggttatctcttatcgtagtcgtaaccaaaatcgtgaagtagcgcgtcataaagcattacgtgcaatgaatatcgctttcggtgtgttgttctgtacggtgtttttctatgcgatctccttcacattagcaatgggacatgatgaagcagtaaaagcttatgagcaaaatatctctgcattagcgattgcggcaaaattcttccctggtggttgggtaaccgtagtgagtgtgatgctgaatattttcgcagtaatgaccgcattctttggtgtctatctcggtttccgtgaagcaacacaagggattgtgatgaatattctgcaacgcatgatgcccgttgaaaaaatcaatgaaaaatgggtacaaaacggcattatgatctttgctgtgctgttagcttggggcgccattattctcaatgcaccagtactgagctttacctcaatttgtagtcctatctttggtatggtcggttgtcttatccctgcatacctagtgtacaaagtaccgatgttacataaatacaaaggcgcatcactttatctgattatctttacgggtctgctactttgtgtttctccgttcttggcattctcatag

SEQ ID NO: 309351 - DNA, 2835 bp, Proteus mirabilis
atggataaaatcgaagtacggggcgctcgcacccataacctaaaaaatatcaatttggtcattccccgcgataaacttattgttattacgggactttctggctcaggtaaatcctctttagcctttgatacgctttatgcggaaggccaacggcgttacgttgaatcgctttcagcttatgctcgtcagttcctttccttaatggaaaagcctgatgttgatcatattgaagggttatcgcccgctatttcgattgagcagaaatcgacatcacataacccgcgctcaacggtcggcaccattaccgagatccacgattacctacgtctattatttgcacgtgtaggtgaaccgcgctgtcctgatcacgatatccctttagcggctcaaacggtaagccaaatggtggataatgttttagcgcaaccagaaggtaaacgcttaatgttattggcgccaatcgtaaaagagcgcaaaggtgagcatgtaaaattactcaataatcttgccgcacaaggttatattcgtgctcgtatcgatggtgaagtgtgtgatttatcagatccccctaccttggagttacagaaaaagcacaccattgaagtggtcattgatcgctttaaagttcgtgacgatctggctcaacgtttagcagaatcttttgaaacggcgcttgaattatcaggaggcacggcagttatctctgatatggacgatagcagtgctgaagatattgttttttctgcaaactttgcctgtcctatttgtggttatagcatgagtgaactagagccacggttattctcttttaataaccccgcaggtgcgtgtcctacttgtgatggtttaggggttcaacaatttttcgatcctgatttggtgatccaaaatcgagaaatttctctggccggtggtgcgattaaagggtgggatcggcgcaatttttactatttccaaatgttgcgctcattaggcgagcactatcattttgatgttgaagctccctttgactcattacccgacaagatccagaaagtgattttatccggttcaggtaaagaaaatattgaatttaaatacaccaatgatcgaggggatgttgtggtccgccatcatccttttgaaggggtattaaataatatggagcgtcgctatcgtgaaactgaatcgagtgcggtgcgtgaagagttagctaaatatattagcaatcgtccttgtgcctcttgtggtggtactcgcttacgtcgcgaagctcgccatgtgtatgttgaaaataccacgttacctgaaattgcggattacagtattggtcatgcgatgagctttttccaaaatctaaaactcagtggtcagcgagcgaagattgccgaaaaagtattaaaagagattggtgacagattaaaattcttggtcaatgtgggattaaattacctcactctttctcgttcagcggagacattatcaggcggcgaagcgcagcgtattcgcctagcaagccaaattggtgctggattagttggggtaatgtatgtacttgatgagccttcaattggtttgcatcaacgcgataacgatcgcctactggaaacgttgatccacttgcgtgatttaggtaacacggtgatcgtcgttgagcatgatgaagacgctatccgtgccgctgatcatattattgatattgggccgggtgctggcgttcatggtggtgagatagtcgctcagggtacactggaagatattgttaataatcccaactcattaaccggtaaattcttaagtggcgaacgccgtattgctatccctgaaaagcgtgttcctgttgatcgcgaaaaaatgctcactattttaggggcgaaaggtaataacctaaaaaacgttaatttaaaaatacctgttggtttatttacttgtattaccggtgtatctggctcgggtaaatcaaccttaattaatgatacgttattccccattgctcaacgtcaattaaatggcgccactaatagcgtgccagcaccttatttagacgttgagggattagagcactttgataaagtgattgatattaaccaaagtcctatcggtcgtacgccacgttccaaccctgcgacttataccggagtatttaccccgatccgtgaactttttgctggtgtaccagaatcacgaactcgcggttatacgccggggcgctttagttttaatgtgaagggggggcgttgcgaagcttgccaaggcgatggtgtattaaaagttgaaatgcactttttacctgatgtgtatgtgccttgtgatcagtgtaaagggcaacgttataatcgtgaaacccttgagattaaatataaagggaaaaatattcacgaagcgctagatatgacaatcgaagaagcaagagagttttttgatgcggtgcctgcattagcgcgtaagctacaaacattgattgatgtgggactctcttatattcgtttaggacaatctgccactacgttatcgggtggtgaagcacaacgggttaaattagccaaagagttgtcaaaacggggtacaggccaaaccctctatattttggatgaaccgaccacgggtttacactttgccgatattgagttacttcttgatgtgctccatcagttgcgtgatcagggtaatacgattgtggtgattgagcataacctcgatgtgatcaaaaccgctgactggatcgttgatttagggcctgaagggggcagtggtggtggtcagatcttgatatccggtacgccagagcaagttgctgactttgaaggctcccacacggcaaggtttttgaaaccaattttagagcgcggttattaa

SEQ ID NO: 309352 - DNA, 525 bp, Proteus mirabilis
atggcgagcagaggcgttaacaaagttattcttatcggtaatttagggcaggatccagaaatccgttatatgccaagtggtggtgcagtggcaaatctgacactagcaacttcagaaagctggcgcgacaaacaaaccggtgaaatgaaagagaaaaccgaatggcaccgtgtggtcattttcggcaaactagcagaaattgctggcgagtatctgcgtaaaggttcacaagtttatattgaaggtcaattacaaacacgtaaatggcaagatcaaagtggccaagatcgctacagcactgaagttgtggtgaatatcggtggcacaatgcagatgttaggtggccgtggtggtcaagataatgcaccttcacaaggccaaggcggttggggtcaacctcagcaaccacaagcatcacaacagtttagtggtggcgcaccatctcgcccagcacaacaaccagcagcggcaccagcgccaagtaatgaaccaccaatggactttgatgacgatattccgttctga

SEQ ID NO: 309353 - DNA, 531 bp, Proteus mirabilis
atgaatgaagagaaattgctcgctcaggcagaaaagatctgccagaaacgaggtgttcgcctgacttcacaacgtctggcagtattgcgtctgatcatgcaacaacctaccgcaatcagcgcttatgatttattagatttattacgccaagtagagcctcaagctaaaccacctaccgtatatcgtggattggaatttctacttgaacaaggttttattcacaaaatagaatccaccaatagctatgtgctttgtcatcattttgatgatgctgagcatacatcggtgatgttaatttgtgatcgttgcttatcagtcacagaaaaaagtagccataaaattgaaggggcgatcaccacactcgctaaagataatggctttcatttacgccatagtgtgattgaaattcatgggctgtgcgctcagtgccatgaagcccaagcctgtacacatccagaaggttgtcaccatgatcatagtatggatgataatcttaagcagaaaaaaaccggtgactataaacctcgataa

SEQ ID NO: 309354 - DNA, 612 bp, Proteus mirabilis
atgaaagcattaactgcaaggcagcagcaggtttacgatttggttcgtgatcacatttcgcaaacgggtatgccaccaacacgggcggaaatcgcttcccaacttggttttcgctcacctaatgcggcagaagagcatttaaaagcacttgctcgcaaaggcgtgatagaaattgtctctggtgcatctagaggtatccgtttgctacttgaagaagagcctgaaggcttaccattaattggacgagttgcagccggcgaaccacttttagcgcaagagcatatcgaaagccattatcaagttgatcctatgctttttaaaccgagcgcagattttttactgcgtgttaatggtatgtcgatgaaagatatcggtattatggatggcgatctacttgctgtgcataaaacacaagatgtccataatggccaagtgattgtcgcacgtattgaagatgaagtaactgtaaaacgatttaagaaagtcggtagtaagatagaactgcacgcagaaaatccagagttttcacctattatcgttgatttacgtgagcagagctttactgtggaaggattagcagtaggggttatccgtaacggcgaatggctgtaa

SEQ ID NO: 309355 - DNA, 372 bp, Proteus mirabilis
atggctaatcaaaataaaggtcttacccgaatcattaaagctggtggctattcatatcagggcttacgcgccgcttggatcaatgaagccgcttttagacaagaagctattgtgaccttaatagcaattatccttgcattttttatcgatgtcagtgttctagagcgcattttattgattggttcagtcgtccttgtcgtcattttagaactggtcaatagtgctatagaagctgtcgtcgatcgcattggtacagaacgtcatgaattatcaggacgagcaaaggatatgggatcagctgccgttctcgtcgctattatattgggattatttacttggggaaccattctttggcatcatttttttgcataa

SEQ ID NO: 309356 - DNA, 2484 bp, Proteus mirabilis
atgtcagcttggcgtaaactatattataacacattgaatttaccactgaaattgttggtaaaaagtaaacgagttccgactgatcctatcactgagttaggcttagatacgtcgcgatctttcctttatgttctgccttatcactctaaagcagacttactgacattacgtcagcaatgtttatctcttggcttgccagatcctctgcaacccatagaaattaacggaaccaaactgccagcctacgtctttattgacgatggtcctagagtattccgttactactctcccgatccgcgtaaagattcagtgaaaacattccatgcttatcttgatgctcatcgtaacaatccgcatcttgatattgaaatgttacctgcttcagtgatgttcggtcgctcaccgggtcgagaaggtcataatggcgtcccccatttgcgcttattaaatgggatccaaaaatttattgccatcctctggctaggtcgagatagttttgtccgtttctcgccgaccgtatccatgcgccaaatggcgaatgaacatggaaccgataccagcattgctcgaaaacttgcgcgtgtggcacgtattcatttttcacgtcagcgtttagcagcagttggcccaaaactgcctgcacgccaagatctcttcaataaactattggcatccaaagccattgaaaaagccattgaagatgaagcaaaagcgaaaaaaattacgcttgataaagcacgtaaaaatgccactgatatcatggaagagatcgccgctaatttctcttatgaagcggtacgaatgactgatcgtgtattaagctggacatggaataagctctatcaaggtatcaacgtttttaatgcagaacgtgtgcgccaacttgcgcaagatggacatgaaattgtctacgtaccttgtcaccgtagtcatatggactacttattgctttcctatgtactttatcatcaaggattggttcccccacatattgctgcgggtattaaccttaatttctggccagcaggaccgattttccgtcatttaggggctttctttattcgtcgaacctttaaaggaaataaactttattcaaccatcttccgggaatatttaggtgaattattctctcgaggctactctattgaatattttgttgaaggtggacgctcccgtacaggtcgactgttagatcctaaaacagggacgctgtcaatgaccgtgcaagccatgttacgtggtgagacacgccctatttccatcgttcccatttatattggctatgagcatgtcatggaagttgccacttatgccaaagagttgcgtggtgcgacaaaagagaaagaaggttttatgcagatgatcagaggattgcgtaaactacgtaaccttggtcaaggctatgtcaattttggtgaacctatttcgctatcacaataccttaatcaggcagtgcctgactggcgcgatgatattgatcccattgagccacaacgtccaagctggttaaatcctgcagttagtgcgttagcggataatattatggtcaatattaataatgccgcttcgattaatgcgattaaccttgtctctacggcgttgctagcgtcccgtcagcgagcactaactaaagaacaattattagagcaaatagattgttatctacagttactgcgtaatgtgccttactcatcagatatggttgtccccgataaaagctcagagacattattagcacacgccttgcaaacagataaattccaagttgagcaggatagtcttggcgatattattatattgcctcgtgaaagtgccgtattgatgacttattatcgcaataacaccattcacttaatggttacaccatcattaattgcgagcattgtcttgcatcacgagcgtatacaccgtgatgacttaatgaaacaggtagaattaattttccctcttatcaaagctgagttgtttattcgctatgaaaaagaggagttacctgatgtggttaatacactgattagtgaactttgtcgccagcgtctaatttgctgtgctgatgatggcatattacggatcaatccagcacgtattcgcccattacagcttttagcagcaagtgttagagaaacgctacagcgttatggtattacgctctctctactcaattttgctcctgaaattagccgtgcactattagaaagagaaagccgcattttggcgcaacgactttctgtattgcatggtattaacgcacctgagttctttgataaagcggttttctccactttagtttctacactgcgtgaagaaggttatctcaaagataatgaagatatcctcaaagcagatgcctctgcactttaccaagttattgcgaaattaatgtcaccagaaattcgtttaaccattgagagtgtaggcgttactgaagataacaattcagcacaagcgattgaggaaaaccctgagtccagcatggataagtag

SEQ ID NO: 309357 - DNA, 855 bp, Proteus mirabilis
atgacgcacaataaatggcaggcgtatagccgtttaatgcgtatagataagcctattggagcgctattattactttggccaacgtattgggcattatggatcgccgctaaaggctttcctgactggcatatcctaattgtatttactctaggtgtgttttccatgcgtgccgctgggtgtgtaataaatgactttgctgacagaaaaattgatggcaacgttgaacgaactaaaaatagaccattacctagtggtgctgtaacggagaaagagagcaagattatctttattgtcttggtgctgttttcgtttggattagtgcttacgttaaataccatgaccatttggttatctattgccgcacttgcacttgcatggttttatccttttgtaaaacgttttagtaatttgcctcaattaattttaggtatggcctttggttggtctatccctatgggatttgctgcagtttctgaaacactacctttagtatgttggttactctttttggtcaatattatctggtctgttgtgtatgacactcaatatgccatggtcgatcgcaatgatgatttaaaaataggggtgaaatcgacagccattctgtttggtcgttacgataaaatcattattggtattttacagttagtgatgttggcattattagtggcgattggcgttttgctgaatatgaaagggatctattattggtcattgttactcgtgacagccctgtttatttatcaacagaaattaattgctgaacgggaaagagccccttgttttcaagcgtttatgaataataattatgtcggttttgttttatttgcaggtattttatttaattatttctaa

SEQ ID NO: 309358 - DNA, 510 bp, Proteus mirabilis; identical to SEQ ID NO: 294223

SEQ ID NO: 309359 - DNA, 1647 bp, Proteus mirabilis
atgaaaaatgtaaacccaactcataccttagcttggaaggcattagaagaccattttgccgtgatgaaagatacagaaatgaaaacactgttctctcaagatccatcacgctttaacaccttttcaagaacgttttcagaccaaattctagtcgatttttcaaaaaaccgtatcacccaagaaacattagataaattacaggctctggctaaagagtgtgatgttgctggtgcgataaacagcatgtttagcggtgaaaaaatcaactgtacggaagatcgtgcggtactccacaccgcattacgcaaccgtagcaatacaccggttatggtcgatggcaaagatgtgatgccagaagtcaatgctgtattgcataaaatgaaagtatttagtgagcgtgtgattagtggtgaatggaaaggttacacaggtaaagcgattactgatgtggtcaatatcggtattggtggctctgatttaggcccgtatatggtgacagaagcactgcgcccttataaaaaccacttgaccatgcattttgtttctaatgttgatggtacacatattgctgaaaccttgaaaaaatgcgatccagaaacaacgctattcttgattgcttcaaaaacctttaccacacaagaaaccatgactaatgcacactctgcaagagattggttcttatctgcggctaaagagagtgcttttgtcgcgaaacactttgttgcgttatcaactaatagtgctgaagtagaaaaatttggtattgataccgcaaatatgtttgagttttgggattgggttggtggccgctactcattatggtcagcaattggtttatccattgtattatctattggttatgacaactttgagcagttactgtctggtgctcatgctatggataatcactttagaaccactgaagctgaaaataatattccgatgatattggcgcttattggcatttggtataacaatttttttggtaccgaaactgaagcgattctgccatacgatcaatatatgcaccgttttgctgcttacttccaacaaggcaatatggaatccaatggtaaatatatcgaccgtgatggaaacaaagtcagttaccaaaccggacctattatttggggagagccggggactaatggtcagcatgcgttttatcaattaattcatcaaggaaccaaactgatcccttgtgattttattgcaccagcgatcagccataatccattatctgatcatcatgcaaaactaatgtcgaacttctttgcacaaaccgaagcattggcatttggtaaaactcgtgagcaagtcgatgcagagtttgcctcagcaggaaaagatcccgcaaccatggggtatgtggcaccatttaaagtgtttgaagggaatcgtcccaccaactccattcttttaaaagagatcactccctattcattaggcgcgttaattgcgatgtatgaacataaaatctttgtacaaggtgtaattttcaatatcttcacctttgaccaatggggcgttgagttgggcaaacaattagctaatcgcatattgccagagttaaaaggtaaggaaagtgttaacagtcatgatagttcaacaaataatttaattaatcgttacaaagcatggcgttaa

SEQ ID NO: 309360 - DNA, 1371 bp, Proteus mirabilis
atgaaagataatactgcaacaccttcatcaccttttactatcgccaaatttggtggcactagcgtggcaaattttgcggcgatggaaaagtgtgcagatattatcttaaaacagaaatcagtccgtgtggtggttctttctgcttcagcggggatcaccaatttgcttatcgaacttgcgacaggtgttgaagcaacacaaagagccgctttattggctcaagttcgtgatattgaatacgccatcatcaatcaactatcacaagcagaaattatttctcaagaaataaaccgcttattggacaatattgaaatgctgtcagaagcggcagccttggcaacttctgatgcgttaaccgatgagttagtcagccacggtgaattgatgtcaacgttattgtttgttgaactgttacgtgaaaaaggaataagtgcagattggtttgatgtcagaaaagtgatgaaaaccaacgatctgttttgtcatgctgagccagatatggcgcaattaactgagttaacacaaagtttaattcagccccgcttaacagaaaccatgattgttacccaaggttttatcggacaagagcctaaaggaaaaaccaccaccttagggcgtggcggaagtgattatactgcggcactgattggtgaagcattagggatgtcacgtgtcgatatttggactgatgtgcctggtatttatagcactgatccaagaatagtcccgcaagcacatcgtattgatcatattgcctttgatgaagcggctgaaatggcaacctttggtgctaaaattctccatcccgcaacgttattacctgcagtgcgtagtggtattcctgtgtttgtcggctcaagcaaagcaccagaagaaggtggcacattggtttgtgcacaaactgataatcctcctgtgtttcgtgccattgcactacgtagaaaccagacactacttaccctgcatagtttgaaaatgcttcatgcccgtggctttttggcagaaatatttaccattttatcacgccaccatatttcggttgatgtgataaccacatcagaagtcagtattgctttaacattagataccacaggtaccactagctcatcaggcagtctgttaactaatgctttattaaccgaattatccgcattatgtcgcgttgaagtagaagaagatctggcattggtcgctatcattggtaattcactatcgcaagtcaatggcttaggaagccaaatttttggcactttagaggattataatattagaatgataagtcatggtgcgagtacccataacttatgcttattagtggatggcaaagatgcagataatattgtcagaaaactacacgacaccttattttaa

SEQ ID NO: 309361 - DNA, 1170 bp, Proteus mirabilis
atgaaaatcagcatacataaacgagatccagataagaatggccaacgtgctatcaggcttgtgtactattacggttcaaagacctcggaagacggctcaagagctcagaaacgctcatatgagacgttaaacctgttcctctacgccaagcccaaaaacgcagttgagcgcgagcacaataaaactacattgcaaaaagctgaggccattcgagccaagcgtctactggaaatggaatcagccaaacacggcttagatgaccgcacaaaactcaatgccagcttctttgactacttcgaccaaattacagcgagtaaagcatccggtagcaaatccaactactcaatctgggtttctgcgggcatccatctccaccgttatcaccgccacgcagaactcacttttgaacaggtagataaatactttttggaagggttccgtcattacctacagcatgaggcaataacaaaatcagataccggcctctccaggaataccgcctgtagctacttcaataaaatccgggcagcactcaaccaagcgcaacgcgaccgaatcatcagagataaccctgttgaacaagtcaaatccatcaaagcagagaggacacagcgcacttatctcactctggatgaggtaaaggcccttaccaaggcagaatgccgttacgatgtactacggagagcatttctgttctcctgcactacgggtctacgctggtcagacattcataaactggtgtggagtgaaattgaactatttgctcaagggcactaccgaataatcttttcccagataaagctcaaaaactcaggcaatggcctgcaatatctcgacttaccggattcagcagtacgtttgctcaacttggaaaacaggggaaaaccgacagaacgggtttttaagggattgcgttacgacagctatagcaacgtcgcgctagtgcagtgggctgtacgtgccgggatcaccaaacacgtgacctttcatgcaggccgccacacctttgcagtaaaccaacttgcccgagggctagacatctattccctttccagattgcttggccatagcgaactcagaacaacagaaatctacgcagatattctggaaacccgtcgcacagaggccatgcggacctttccggatatcttcgatgagtcatcagactaa

SEQ ID NO: 309362 - DNA, 345 bp, Proteus mirabilis
atgactgaaaaagagatgcttcagcgcatgctgatggatatgtcattgcttaaaaaactgattaccgatcatatcaaaaacgagcaacgtcctgacacgacaaaggaaatcctcaccgttgaggaatgtgctgagctgacggggctaaagaaaagtactttgtaccggttgactcacgaacgcaagatcccattcttcaaacccaatggtaatcgggtgttcttcaggcgagcagatatcttggcttggttgcagagtaatcgtgtggcgtcttctgatgagattgataaagccgctgctgatcatctcgttgctaaccgaaaattgtatggccggagatattag

SEQ ID NO: 309363 - DNA, 1671 bp, Proteus mirabilis
atgcagcttgaactacgtaataatggtttattccgcatacaggatggtgaagaacggaaaatttccgatccaatttgcgtgctttttagagtgcgtagtgatgaccgaattcggagtagtggcgtgttgtgcgagtggctcaatctggatggctattccgtccaggaggtatttttaatgaagatattgaatggtagccagtccatgttaatccgagaacggttattagacagtggtttttggatagaaactggcatcgatacgtggaaactgattcaacaatatttagttcaagaatcgcgcaaagcgagtactgcaaccatagtggaaaggactggttggcatcgtgaggtatttgttacgcccagttggatttctggtaggagtgatgaaccgtatctatatctatctccgcgtgttgccccaaattttcagcaaaaaggatctttggacgattggcgacaagaagtcgggcgtttttgtcgtggtaacccatatttaattttcgctattggctgtgcccttacaggaccactgttaaaacccgccggtttggagaatggcggtattcatattgtttccaattctgctgatggtaaaaccgcacttctccaagtgtgtgcaagtgtctgtggtggttctgacttcatgaaaagttggagtggcactgccaatggtattgctgctgtcgcaagtgaacatcacgacctagttttaccgcttgatgaaattggcatggccaaagcggaagatatcgatacctgtttgtatcaaatttttaatggtgctgggaaattgcgggcagataaaaccggcaagcttgctgaatctgagcattggcgtgtgctggtattaagttcaggtgaaaagtggctctcagagatatttgaaagtttgggtcgtagcccgatggccggacaagaagttcgtttgattgaacttccggtaattggtcagcatggggtgctgaatgatcttcacagcttttccacacctcaaaaggccattgatcatctgaagtctgcaagtgcgagaacgtacggagcattgctgagatcattcatcgaattgatcacgactgatgtagtggatcttaatcaatacgtgccaaaggaattacaacgcattgttgatagctggctactgccggattcatcctcacaggtgcagcgagtcacccggcgttttgcgctgattttagtggccttgcagcttgcctctcgtaactttctggttaattggagtgaggacgaatcagagcaagcagtgcacagcttatatcgggtttggttgggaagtcgcggtcatttaatgaatcttgaggaatatagcttactacaaaagattggcggtgttctcgctaagtgggacaaacgacttgctaaagaaggcgatgtatataggccaacaagcataggatatcgacggtttatcgatggtgaggagctttggctcatccacaaagatgaatttttgaaaggcttaaatttgccaactcattatatgcgtgatgttgagctgctcttccgccgtcaatgtcttgaaagtaatgaacgcagccgtggtacctataagctaaagatgagcggtcgctactatcgtttttttgccctttggcctgacagggtgaggcaagcaatgctgaagatggagcaagtcgatgatgaataa

SEQ ID NO: 309364 - DNA, 198 bp, Proteus mirabilis
atgaatcaagttacacccaccactgacgaaagactactcacatatcgagaggtgtgttctctcactcaaatatcaccagcaacactgcgacgttatgtccaaagtggaaaatttccttcaccaatcaaactcaatgctcatggccgatcagtccgtttccgacacagcgaggtattggcttggatgcaatgtttgtag

SEQ ID NO: 309365 - DNA, 678 bp, Proteus mirabilis
atgaccaaaaattattcatttttagaacaacaaattgttgcatttagtgcctcactaaatgggggaaatcaacctcaatctgagtacataaaagccttctcaaaatcattaaaagcactagaaacacagattagtatctgggaaacctttattgccaatagcacaaatgttaatcaagacgacgcaatgcttttttccttaaccatatcagagcaatatctacactacacccataaatcaaccgaaatagaacagctccgctacttctacatagcacaaaaaattgcagacttgttctggcagaacaacgttgcacatagaggtaaaaactcaccaggttatccgggtcattttggttgtcgtgtaaggctaagaaacaaaaaactcgaaattttttgggtttataaccagtttaagcctaaaaaaaatgctgatggattccaagtgatcagccattatcttccgcgagatgggcatttccgataccccaaaactacgtttacccaagcacaatactgggaaaaacctgtgattaacgtagtagaggaagcttttgccatcatccgtagagccaatgccaatctgatgagaattcgccagctatgtaggtggaatgacaccaatctattcaaaatgacaggcgatatcgacgattttaagatggataatcctttatag

SEQ ID NO: 309366 - DNA, 1035 bp, Proteus mirabilis
atgacagataatatcccccaagctcctcatggtgagtttgttcttttcaccagtgctgacggtcaaacccgcgttgagtgtcgttttgagtcggacaccttgtggctttctcaggctgcaatggctgagctttatgataaagacgttcgcacaatcaatgagcatctaatcaatatctacaacgaaggtgagcttgtacaaaacgcaaccatccggaaattccggatagttcgattggaaggtactcgccaagtatctcgcaagatcgaccactacaatctcgatgccattctgtctgttggctacagagttcgttcgcaacgtggaacacagttccgccaatgggcaacgaaaatcctgaaagaatacctgatcaagggatttgccatggatgacgagcgcctcaaaaatccacccgttggtcactctgcggtgcctgactactttgacgagatgcttgaacgcattcgcgatatccgagccagtgagcgtcgtgtttatctgcgagttaaagaaatctttaccatggcagccgattacgagccatctaaccaagagaccaaccgcttctttcaaaccattcagaacaagctgcattatgcctgtacgcacatgacggctgctgagctgattgctagccgtgtggatgccagtaagccagatatggggctaaccagctataaaggcgatgaagtgcgtaagaccgatgtcaccatcgccaaaaactatctgcgtgaagacgaaatcaaagagcttaaccgcatcgtcaatatgtggctcgactttgctgaagaccaagcgcttcgccgcaaacaggtatttctaaaggactgggccgataagctagaccagtttttaagttttaatgatcgggacgtattaagcggagcggggaaaattaccaagaaagacgcagatgataaggcgaaattagagtttgatcgctttgcccagcaacgccgccgtttgaaagaagctgaaggttcacgggccaatattgcagcactcaaggctatactcaaaaaagataaatag

SEQ ID NO: 309367 - DNA, 2019 bp, Proteus mirabilis
atgagtttacaaaccaatctcaaagggcgcttacgcaacacttctctacccaagagccacggcctgatgcctgtttttgaggcggtggtaaactctattcactcgattgaagaaaaagggaatagcgataacggtaaggttattcttcggatcaaccgtgctactcaggagagtctagatttcgatgccaaatcgctgcctcctatagtaggtttcaccatcactgataatggttgtggttttaatgaaaccaactttaagtcatttgaaacactggattccgaccacaaaattgacaaaggctgccgaggtgtcggtcgcttgatgtggttgaaggtgtttgacttagtcgaagtagaaagccattttgtcgatggggatggtcagctaaaaaagcgtgtatttcgctttaacgataaatcaggcgtccacagtgaaaatcttcaggtagctaccgaacaacagtcaggaactcaaatcaaactgttgggatttgatgaaagttatcgaaagcaggtaccaaccaagggactaactgtagctaatcagctacttgagcatgtgctctggtactttgttcgtcaaggcagtgctcccaatatacaagtcgaagacgctggtgagattttcgaactggattccttgctcgaagagcatatgcactccagtgcatttctcgaaacgataaaaatacgcgattattcgtttgatctaactcatatcaagtttcgtgcatcggtaaataaaaagcatcagttagccttgtgtgccgctaatcgtttggttaaagaggaatccattcaaggaaaaattcctggcttgtacggcaaaatatctgacgaatcgggggaatttacctatacctgttacgtgtcttcaggctacctagatgagcgtgtacgcagcgagcgcacctcttttgatattgccgaaaatgtagaggacatgctcaacgaagtaagctttaaagatattcgcgatgcagtgctcgcacgcacgaaagaatatctgcaagatgttttggcagaaaatgtctcagccggtcgtaaacgcgtagatgattttattaatagccatgcaccccgataccggcctattgctcactatgttgcagaagaacagctcattgttgacccagaaaagtcggacaaagacttagagttacatctacatgctcagtggtatgaggtcgagagacaattagtcagtgagggtcatgacatcatgcaacctcaaaatgaggagcatatagagcagtacaaggaacgactgagcgagtatctgcaaaaagctgaagaccttaaacaatcagatctcgctaattacgtatcccatcgaaaggtcattattgatctgctgcaaaaatccatcgagcgactggatgatggcaagtatgctcgtgaggatatgattcatgagttaatcatgcctatgcgtaaagattccagtgaggttttactggattcttgcaacctttggttgatcgatgaacgtttggcatttcacaactatttggcttccgacaaaacgctgaatgcaatgccgattactggtaatgattcgacaaaagagcccgatttgctcagcctgagggtatttgataacccactactggttaatgatcaaaccagctttcccttagcatctatcaccgttgtcgaaatcaaacggccaatgcgcaatgacatgcgcgaaggtgaagataaagacccaatagctcaagccctcggttatgtagagagaattcgtgatgggcaagcgaaaacaaaatcaggactacttatccctagaaatcatgatatccccgcatactgctatattgtgtgcgacctgacctcaacaatggtaacgcgctgcaaaaactttagtttaaccatgactgcggatggcatgggattcttcgggtacaaccccaattacaaagcttatatcgaggtcataagttttaatcagcttgtgagggccgcaaaggaacgtaaccgtgcattctttgacaagcttggacttccctctatgtaa

SEQ ID NO: 309368 - DNA, 1218 bp, Proteus mirabilis
atgatctccagctttgaaaagtgcccagataattggagcatgctgagaattgatgaaatcgcaatcatacaaagtggaactggctttcctcctgatgctcaaggatcgtcaaacggttcgattccatttttgaaagttagtgatatgaatttaccgaagaactctcgatttattgaagagtggaataattcaattacagaagaacaggtttcaaaactcaaagcaaaacttttacccaaaggcgctgttatattcccaaagattggtggggctattgctaccaacaaaaagcgagtgctaacgatacccagctgtttcgataacaacgttatgggactgaaagctaaacaaggggttttagacgaatatctatattggttactacaatcaatagatttgactgcttggagctcttcatcttcgcttccttcaatgaaggcttcgactgtaaaagagtttttggtaccagtaccatcgatggcggaacaaaaacgcatcgtcgcaaaactcgatgcactgctcaaccgcatcgacaccgccatcgagcatttgcaggaaagcgtcacattggctgatgcgctgtcaaaaaacgggctgtcagaaatattcgagagcctaaaagatcgttatgaggtcgtacccctatcatttgtcgtaaaaattaatagtggcattgcgttaccgaaactttttaaaaacggtttcagcgatggtgacattccatttttcaaagtggcacaaatgaacaaccaccatgaaactatggttgcgccagagataacatttaatgaaaccgttgccaaagaacacaaaataaagctatttcctaagggcagcacgctgattcccaaaagaggtggggcaatcctaaccaataaaaagagaatgctgcttgaggatgcgtcatatgacagcaacatcatggggttaaaagctgacgaatctaaaatttccgacgagtaccttttcgccttcatgcggacaatagatttagcaaatttcgtcgacgcaagtacgatcccgcaagttaacaacaaacacattgatcagatgcaaatccctttggcaagtatcgaggaacaggctggcgtggttagccgcgtaaacttgttggttaaaaaagtcgaaacaatgaattcagaaattcaaagacaactggatgatttgcaagctttgaaaagttcaattctcgattccgcctttaaaggtgagctctaa

SEQ ID NO: 309369 - DNA, 1485 bp, Proteus mirabilis
atgtcattacaacaaaagattgaccgaattaccgacatactgcgccgcgacgatggcattagtggtgctatgcactataccgagcaaacctcgtgggtactgttcttaaagtttttggatgattatgaatctgaaaaagaagatgaagcagtactatcaggtaaagattatcaaccggtgttggatgaagaacatcgctggtcaaattgggcctgcccgaaaaatgctgagggcaagctagatattaacaaagttcgcacgggtgatgacttaaccgattatgtgaataacgagttgtttccgtacttaaagagctttgccaacgccgccgttaccggttcagacccaaaatccttcgcctataaaattggtgccatcttccagtatttagacaacaaggtagcgtctggccataccttgcgtgaagtgctggatattgtggatagcctgaacttccaatctgagtctgatctgtttgaactctcgttggtgtatgaaggcctattgcaaaacatgggcgatgccgggggctatgcgggcgagttttataccccacgcccagtggtacgtgccatgattaaggccattgacccgcaagctgggcaaaccatttacgatgcagcggcaggctcgtgcggatttttagtggaagcctttgagcatctaaagggcaaaaagaaccaactatctaccgagcagtgggattttattcaacgcgacaccttcttcggttacgagaaaacctcactggcgtacgtgatgggtatgatgaacatgattttgcatggcatcgagtcaccaaacctgttccgtggtaatacactgacccaagatatccgaaatattcaagagaaagaccgttatgacatcatccttgctaatccgccttttggtggaaaagagaaagaccagatccaactgaactttcccattaaagcgaatgccaccgaattgctgttcatgcagcactttatgaaaactctgaaaagtggcggcaaggcagccatcgtcgtaccagaaggtgtgctgttccaaaccaacaatcagtttaaacaagtcaaacaagatctgctcgaaaactttaacctgcacactattttaagcttgccagccggagtttttttaccgtactcaggcgttaaaacaaacgttttgttttttgagcgtagcggcggcaccagtgatgtgtggtattacgaatgtgagcccgagcaaaaactcaccaaaaacaagcccatcaccgatgagcacctaaaagagtttgtcgagctgtacagcagccgcgaaaccacagagcactcttggacggtatccgccagcaaactggctgaagagtatgacctatccgccaaaaacccagccaaacaaaaagatgccgagcatttagcgccaagcgatatcctcaagcagatccgcaccaaggaaaaactggtgtcaagcctcttggatgaaattgaagagctattactggagggtcgcagatga

SEQ ID NO: 309370 - DNA, 1980 bp, Proteus mirabilis
atggaattaacactcgcacctaacccgctgtacgaccagccacaaaccttaaatatcaataaggttgctactttaattggtgaaaatggcagcggtaaatccagtatcttgcagtcagtatttgaagagcggttaaacaagcgcgcacatcaccacctaaatgtggtgtgcttctcttcagggcagaatgaaaactactctgaaaagtttggtatttacttaaaacgtgaacgtaaagcaggtagaggtttggggttagagtgcctttactttgacaagccctggtcaaaattactcattttcctcgcaacggcgactaaacgtagtggcaaagttcgttcatttttgcgcgaacgaggctatgttactgaatcaacacttcaaggtgatgaccaaactacgtgcttaaaatgcgcattcaaaattgataaaaactacgtcaatcgagttcaggatgccctgaagcgcgaagaaaatggcgaagttgatacattacgaaatacgccttacttccgttcgttagacagcttcatcagcacctttcactctagagactatgagtttgagcaaccgctacgtaagcgaacaattgaaataccagcaatccgactgatcgatgtttcgttcgattacccaagacaaccacaagcaggtgaagagggtatagaggctggtgaagccaataatcaagctcaaaatacagcgtttgatcctgaagtgagcttttttacccaagcggcagacaatgattacttcattgataaaaaaggctataagctcgtatttaaaggtgggatagaacttgaccaactgagcgatggtgaataccagctgctctttctatatgcgttgattgatctttttgattcaccgaataccctgtttttgttggatgaagcagactcacatctgcatttcaaaaatgttgagcggttatgggaaatacttaaaaaaattaatggttatgtacttacaacatcacacctgttggattcaatatctcagctagaaataaatgatattaatgtggtaagtaaaagcgttgtttctccagcagcaaataacatcgaacttaatgatcgcctaaaggctttgagtagcataagccaaataaaattcaaagaatgttcattgtataaaatagtcgttcttgtcgatcatgaaaatgattgggatattttcaaattacttgttcttcgtaagctatcgactaacgcatttgatcgtgaacagataattgatagttttaaaagtatactacccgtacgattgaactctggatggaatagtcactcggagtcatttgcagaaaagaagatgaaatgggtatcgacttatgcaacatttgtagctaaccaacctgtccaaacaaccaatgttatccttatttgtgatcgagatagtctgccatatcaagatattggtactgataaatgctctcttgctgttcaaggtatagatcctaataaatatcagatcaacaattcagcatttgacacaactgtcttggcttggcaacgcagagagattaaacactacttgttgtcttactctgctatgaacaagtctgatgttgatatgttaaataccatttattttggagaagcgtcttgccttagagacgggcaaaatggcgactataaaatcaccatggaggatggtttgtgctctcttttaagtgaaaaagaactaagtaaatcagaacaaaaacaaatgaatcctaaacttctttatgagtttaagaaagtctatggcgatgacgtaaagcccttcaagttagttccttcatttaatgagtctttagccacgttagattcatcattggtcaagaaactcgtgtctagttacatcgaaaatacagaagcacccaaagggtttaacctagtgctagcaactcaatatattgaaaaaatgaagcccgcagaaatcagcgaagacatcaccaagatgtaccagtttattaaagagaaattacgataa

SEQ ID NO: 309371 - DNA, 2316 bp, Proteus mirabilis
atgtcgtcagaagcagataccagagcaaactacatcgacccagcgttaaaagccgcacattggcaaccgggcaacatcattcgggaacattactttaccgatggccgtaagcttgctggcggtgtccgtggccgtcgttgtttcgtcgattatctgctccacaaagacaatcgttaccttgcagttgttgaagcaaaaaaagaatctgaacatccaaccaaaggccttcaacaagccatcgactatgccaagaagctactcgttcgctttgtctattcaagcaacggcaaacaaacctatgagttcgacttagaaactggtaaaggcgactacatcgagttttacccaacaccacaagagcttgaaagccgctacgcgggtgttaattcggatctaggccagcagcttcgtaatgtgccttttcatttagaaggcgcaatgcagccgcgttattaccaagaattagcggtacatgccgccacagatgctattggtaaaggtaagccacgagtgttgttaacgctggctactggtacaggtaaaacatttattgcctttcaaatcgtccataaactgttccagtcccgttggaacaaagaatctccgggtacacgtaggcctcgaatcttgtttttagctgatcgcaatattttggccgaccaagccattaatactttcaatccatacgaaaaagatctcataaaaataaacggtgaggaggtgcgcaagcggggtggagtcgtgccaactaatgcgcatatcttttttgctatctaccaagccattgctgagcgtgaaaatattgaaggctactacaaatcgtatccaagtgatttctttgaccttgtaatgattgacgagtgtcaccgtggcagtgccaatgaggctggttcatggcgagccatactcgatcattttggcagtgcggtacatgtcggcctaacagctacaccaaaacgtgaagccaacgtggatacctatgattactttggaacaccagcatttgaatactcattaaaagacggcatcaacgatggtttcttaacgccatatcgagttaagcgggtacgtactaacttagatgaactggtgctaaccaaagatgaccaagtaattgaaggagagtctgggcaagacgtctatcaggttgaagattacgacaaaaaaatcatcgtggatgatcgtaccgaactggtcgccaaagccattttggacaatatcaatccactagaaaaaaccatcgtcttttgcgaaaaccaaaatcatgctctcaccatgcgcgacatgatcaataaacataaaaaagttaaagacccacactactgcgttcgtgtaaccagtgacgaaggtaaagttggccgcgagctactagaaaaattccaagataacgacaaagatatccccaccattattacctcatcgcaaatgttaaccacgggggtagatgcccgtaacgtgcgtaacgtagtgctggatagaaccgttggctccatggtggagtttaaacaaattgtcggtcgcggaacccgtgtttttgatggcaaagactatttcaccattgtcgattttcgcggtgcaaccaataagttttacgacaaagattgggatggcgaacctgaagcaccggagcccggtggcactggggagccaacaccaccaccttacacaccagagcctcccggaggaacagatggcccagagcctgaaccgagagagccaaaacctcggctaaaagtaaagttaggcaaacaccgtgaactgaaagtcattgacgttgaaacccgttatatcgatgaaaacggtaaacctctcacggtgcaagaatttgttgagcgcttgatcacccaattaccagggttgtttagatcggttgaggaattgcggcagatatggtcagacccagacgagcgcgaaaccttgctcggtaaactcgtacaagcaggttttgataaagagcaactcgccacactacgacgcatgtttgaagcagaagagtgcgatatcttcgatctgctggcttttttagcctttgaacagcccatggcaacccgtaaagctcgtgccgatcaagtacgtactaacagcaccttctttaatcagtaccaacaagaaaaggcacagcagtttttacactttgtgcttaaccggtatgagcaaaccggcagcacggagttatcacgcgagcgcttgccagcgcttatcgagctatcagggttgggtactgtcaaagatgcctcaacagcattcggtggaaaaccagcctatttgctggcggcttttaaacaattacaacaacagctttatcacgtgaactga

SEQ ID NO: 309372 - DNA, 216 bp, Proteus mirabilis
atgattcgctgccacttagcccgtttaatgggcgagagaaaaatgcgcattagcgacgtgatgcgagaaaccggcctaagccgtaccaccgtcacgctactttacaaagaaaccgcgctcaaggtggacttagaagcgctcgataagctatgcgatttatttaactgcccattgagcgacatattggaaaaaataccaagcgatagacagtgctaa

SEQ ID NO: 309373 - DNA, 627 bp, Proteus mirabilis
atgttcattcgagcttaccttcgcgcatcaaccaaagaacaaaatgcagaacgggcacgcgaatcactcattcagtttgctgctcagcatggccagcgaattgctgccttttatatagagaatgtttctggggccacgttgcataggcctgagttgatgcgtttgattgccgagtcaggtgagggtgacattgtgctggttgaacaaatcgaccgtctggcgcggctcaagcaaagtgattgggatacgttgaaacaaaagctggccagcaaacgtctagccattgtttcaccggaacttcctaccagttggctggctttgcaacaacatagcgaaactgactttaccggcgctattttacaggcggtcaatgccatgatgttggacatgctcgctgccgttgctcgtaaagattatgatgaccggcgacgtcgtcaatcacagggaatcgcaaaagcgaaatccgatggtaaatacaacgggcgtcagcctgaccttaaacggcatcagcacatagccagtctattgaagactggccatagctatagtgacattcaggacatgctgggatgttcgcggcacctgattgcaactatctcgaagaatatcggtagttcagagcagtaa

SEQ ID NO: 309374 - DNA, 1218 bp, Proteus mirabilis; identical to SEQ ID NO: 195812

SEQ ID NO: 309375 - DNA, 609 bp, Proteus mirabilis
atgcgggtatcgaaggcggacggatcccagtccaccaatttgcaacgcgatgcgctcatcgccgctggtgtgagccttgcgcacctttacgaggatctggcctcgggcaggcgcgatgatcgcccagggttggctgcttgcctgaaggcgcttcgtgaaggggacacgctgatcgtgtggaagctcgatcggcttggccgtgatctgcgccacctgatcaacaccgtgcacgacctaactgcgcgtagcgtgggcctgaaggtcctgaccggtcacggtgcggcggtcgacacgacgactgccgccggcaagcttgtgttcggtatttttgccgcgctggccgagttcgagcgtgagttgatttccgagcgaacagtcgctggacttatctcggcgcgcgctcgcggcaggaaaggggggcgccccttcaagatgaccgccgccaagctacgcctggcgatggccagcatggggcaaccggaaaccaaggtgggcgatctctgcgaagaactcgggattacccggcagacgctctaccggcacgtgtcgcccaagggcgaactgcggccagacggcgtaaagctgctctccctcggttcagccgcataa

SEQ ID NO: 309376 - DNA, 333 bp, Proteus mirabilis
atgaaaggctggctttttcttgctatcgcaatagttggcgaagtaatcgcaacatccgcattaaaatctagcgagggctttactaagcttgccccttccgccgttgtcataatcggttatggcatcgcattttattttctttctctggttatgaaatccatccctgtcggtgttgcttatgcagtctggtcgggactcggcgtcgtcataattacagccattgcctggttgcttcatgggcaaaagcttgatgcgtggggctttgtaggtatggggctcatagttagtggtgtagtagttttaaacttgctttccaaagcaagtgcccactaa

SEQ ID NO: 309377 - DNA, 840 bp, Proteus mirabilis
atgaaagaaaaggtagttgttgataaagcgatttcactctataccgaatcattcggcgacccggcccatgaacccattattctgatcatgggggcaatgtcgtctgcggtgtggtggcctgatgagttttgttcccaacttgccaaaatgggtcgctatgtgatccggtacgaccaccgtgataccgggaaatcaacaagctatgagccaggtcaggctccatattccgttgaagaattagcagatgatgtggttcgcgtcattgatggttatggtctggaagctgctcatttagtcggcatgtctttggggggatttctttcccagcttgtagctctcaagtatccgaaacgtgtgaagagcttgacgctgattgcttcagaacggcttgcagatgcagatccggatatgcccgcttttgatcctgccatcattgagtatcaccaacgggcggaatcgctggattggtctgatagagatgctgtcgtcgcgtatcaggtcggagcgtggcgaatcaactcaggtactgcgcatgcttttgacgctgagaagatacaaaacatcgctgagttaaattttgatcgcactccgaatatcctgacaacattcaaccacactactttaggtggtggcgagagatggctcgggagattaaatgagatagctgtaccaaccttgatcattcacggcacggaggatcctgtacttccttatgtgcatgggttggcactgaaagatgcgattcgtggttcaaaaatgctgacactcgaaggtacggggcatgagttgcatcatgaagactggctgaggattacccaggcgattaaggggcaaacgtaa

SEQ ID NO: 309378 - DNA, 1005 bp, Proteus mirabilis; identical to SEQ ID NO: 31749

SEQ ID NO: 309379 - DNA, 2967 bp, Proteus mirabilis; identical to SEQ ID NO: 5007

SEQ ID NO: 309380 - DNA, 339 bp, Proteus mirabilis; identical to SEQ ID NO: 103768

SEQ ID NO: 309381 - DNA, 450 bp, Proteus mirabilis
atgagtcaaaatctcaaaaatgatttagtaaatataatgttgcttggtgttctgctattcggattgatgctggctcaagactctggatggggattcttgcttgcaggtttgccattagctatttggtgttttaaagctttcgcatttatccaacgcaaatggtggctagccgttccattttggtgtgcacttacttatttgtgttggcaaatatctttagcgctttggattggatatatagtggttgcaatttttaaatatccaattgatttaaatagtaattacccaataaagaatcgtaaaaaggtgaaaagtcgtaagcacgattcagagttctatggtgattacacctcaatagatatagataaacgcgggcatttaggtactggtattggcattcctgatagctttgattacgactaccgaaaccatattgggtttgatgattga

SEQ ID NO: 309382 - DNA, 162 bp, Proteus mirabilis
atgactgcatttgagtggggaatgcttgggctattcctattttttagtttggtcaccttctggtgtctttacagctatagggccaaccagaaattgtcaggccaaggcaaacctcaagctgaagagtgggagggaaaacatgagtcaaaatctcaaaaatga

SEQ ID NO: 309383 - DNA, 432 bp, Proteus mirabilis; identical to SEQ ID NO: 290873

SEQ ID NO: 309384 - DNA, 843 bp, Proteus mirabilis
atgaaaaaatacccatctttatcattaatagctttatgtgtgtccttgtcaggttgtgcagccggacctcgtcattatgctcaaggcgaatctcgggctttgaatttggcgcgagccgggggcatctacgatttggatttgagagattcccacgatggtactcactcttatagcaagggtatgttggttccattgcttgatctcgccaggctaactacttcatttgatgatccgcttcggcgtctttctggtacgcagacgttcgcgtttaacgctaccgatataatgatgacaccggacaatccctcggctagaccaagtctaatgggatggatgcccgcatctgctgctacttcagaatctcaggcttatgagaaatatgtgcatcttgtcgatcaggcaatccagcatgtggccgatgatatggcattgaatgtcattaaactgagtaatgtagaaacgccagaaattgatggtcatcccatgattctttggtctgttgaaagcgccgagcatggatgcggtattggtcaatgtgtggttgcttacaacattacgactccttatctctggaagagcccgctctacattaaagatggtgagtccgaaagctataacatcgccgctaatcacctgaagaactattctcgctttgtgttccgccagtcaggcccaaaaaactttccagttgatgagttttatagagccgtcagtgctgcattgccatcgtggatagtgatctattttccaccaaagcatgtggtgaagaatggccaatctctcccatatccagtgttgtatgagcaaggggaacaactgctgtttaaggagcctgcattatga

SEQ ID NO: 309385 - DNA, 2535 bp, Proteus mirabilis; identical to SEQ ID NO: 300680

SEQ ID NO: 309386 - DNA, 507 bp, Proteus mirabilis
atggaatacattgaagggaaacaagagcatcttgatagtattcagtctaaatttagagcattagttagacggttctacacacatcaagggggatcaattcgaataactaaaaatgagggtgttgcaaagtacctttacgatataactatacatattcagaaagattcatctcaaggtgtaggtgaagtcaaaatattttgttatgacatattgctatatcaattaaatatgaatttgctaggttttcttgctcatgatagtgctctattttctggaatagatattaggcagataaaaacaatgttcaaaatatctcttgaaatgtgtgaagaaagcgggcttcagtattttgtaaatcttaataaagatatctatgatgagataacatcaagcaagaaagacgatattttaagtgacaaagataaagatgaattaaagaaaggtacagtgctaaggttatttgatgacaaaccagagaacactttatttggagagtattttggttga

SEQ ID NO: 309387 - DNA, 798 bp, Proteus mirabilis
gtgtatgttgaatcatcagaaaatgatggggataatgatcgtgtcatcgatctagatgacaatgataatttagacagaaaaatagcaagtggtacaaaaatcaccattaataataatagttataattggtgttttattccatttaatgtagaaaatactgccagaaatgaacttcttgaaatagaattgggtaaagcgggatttgatgttgaaaagcttaaaaaagaacctaaatatacaaaaagcaatattttaactaaggatgaaaagaacaaattaaaaaaagtttatgaatcattagagggtggaataaacgagaattctttagttatttattcaggaccaaacattgaatgcgagatatgtcatggacttagacactctaaacattttaagcactttaaaaattttagatatatttataattacagagaatatattggattagattttctaggtacaatagataaaattggttgtatatacacaggtgatagcaatttaaatagttttgatataacaaagatatataaaaaacactgggatatggttggaactgtacaaattccacatcatggttcgattaaaaactttaattctagctttttaacttctaaatatttaatttgtcctatatcttttggtactaataatagttacggtcacccatcttataaggtagttaatgatattatttgttgtgattcatatgttattaacgttacagaagaaatagattctggttatattcaagtatttagctataattgtacttgtgattttcaggataatgcataa

SEQ ID NO: 309388 - DNA, 918 bp, Proteus mirabilis; identical to SEQ ID NO: 299964

SEQ ID NO: 309389 - DNA, 435 bp, Proteus mirabilis
  misc_feature (421)..(430): n is a, c, g, or t
ttggttgatctggctgaagtggaaattaaatatggttttcctcttttctcaaaaccttcctctgtagttaatctagggaaaaatgaaaagattgtaatatcagatatttgggcgttctgggactatgttataaaaaaaacgagtaatgatcgtaaaggagaggattttttaaggtcacttctcgaacaggcaaaacacttttatataacagcggaaactagcccagtaaaaagccagcctctcctttattattattcatttctaaatttatcaaaaataataataaatcttactggtcaacatggttccaagaaaatgtatatgcacggaatgaatgaaaatcataataataaattttcacagtcaacaataacaaaacaaaaacaaaaacaaaaaattgttcaagttgcacatgaaatcnnnnnnnnnncatga

SEQ ID NO: 309390 - DNA, 645 bp, Proteus mirabilis
  misc_feature (9)..(18): n is a, c, g, or t
atgaaatcnnnnnnnnnncatgaaatcgtttccatatttgaccctaatatagctaaaacagatgttcttttaaacgtgaaagagctcctaaaccactgtgtgggagtccatagagcctactctgaaatttataatcaaactgaagtcttttataagatagcgaattataaactattcaagaaaggaaaagagctaattttcaaggcagaacttcaatgttcggatattgacatggcaagtctcacagcttgtggatactcgataacacaagatgataatggaatattttattacactaccaaaataactatgtctacatataagccaacacgaaaagattatgctgaactaagccagaaaatacaaaataaaggaatttggtactttataggcaacactggttatacaatgtatctttcaaactcatctataggtcgttatagtcaagagtctattatttacatggtgatgttttaccttggttctataacacgttaccatccatacatgtttgatgaaatattttctgacaaagagcaatggttaatgagtgagtttctaaacacacaacctaaacaattcttatatttggcgactgccagaattcttggtcaaagtgttctgaaagcttacgctagtttttag

SEQ ID NO: 309391 - DNA, 678 bp, Proteus mirabilis
ttgaaaacgataactattaaaatcagtctttttgttttgtcactgtttttccctctcctaacaaaagcacttgttattccagataatggaacggggtatataggtgaattaacacctcctcaatcatatatgtcacttcgtagtagtggtaattactatggagcggctgtaggtgttaataatgttgtagattattgtagtaaaaacagtgcgcaatggcagaattttttattcccattcccaggaagtcaagagggggagtacggattaaaattatataataaaaatgcaagtgaagcggaaaatagggaaaattatttagttgcagctatcaatggaatagtatctatcgatgcgttgtattatcagaatggattaccttccccgacaagaattaccctgcgtcgaggaaaagaaatttctagaacagaggaatattctaatcaatttgtctatcgtcacccaatgtgctggtatggtaatttatcacgtgtaagtaatactagcttgagaataagctcatattctatttatgcagtaggccatgttaaacccggtatttacgattttgtagctccgatatattttactacagctcaaactgcaacccaggtgatgctcctccagatctatcttcagttcctttttcatttggtaatggtcctattcacgtcttaa

SEQ ID NO: 309392 - DNA, 327 bp, Proteus mirabilis; identical to SEQ ID NO: 301246

SEQ ID NO: 309393 - DNA, 162 bp, Proteus mirabilis
atgaataagatggtgaaatttctagggcttatttctttaacaatatgtaattggcagtctcaagcattagcggccaataatttagatgttgaatttagcggtgagttaatcagtgttgcatgccaagtcgcttcagaatcaataaataaaaaagttatgtga

SEQ ID NO: 309394 - DNA, 552 bp, Proteus mirabilis
atgatttatccagagacaagtggcaagagtggtgagtatttaagattacgcacattagaaagtacatggatccgggggcgattaaaaatgtggggttgttgggctgcatttagtaaatcaccacaagccgctggtatttttcagcgattattatcagacccaaaaatcacaaagaaagctctcaaagatgctatgcgaagaatgaaaaaatcagggctatcagaagaaacattgcaactctttttggaagaatatcaatacaagaaaactctgagcaatatgtggttctgctcagacattgagggtggaaagatagataaagttatctgtgcaaccatggttgatgatgaggggttgaaaaatattttaaaagaacattatgtttataaaaaatctagacataaaattgcattagagttgtacaaaagagaaggtcattattgtttaagaacatatcaagatagagttaatgcatggcttaatgttgctgaatttatgttatatcgccctatgtgtgatgagttcgataagaaatatcattatagtgaataa

SEQ ID NO: 309395 - DNA, 1407 bp, Proteus mirabilis
atggctattggttcattatcgcgtagcgaatttgttgagcgtctttataaagttgtgagaccatcgtcaccgattgatacacctgagtttctcttcggcagaaatcaacaaatatcttcgataactgatgcccttatggctcctgggcgacattcttttatctacggaagtagaggggtgggaaagtcgtcgttagcacattctgtagcttttcagcttcaagatgaaactaatccaattttgcttagttgttctccatcatctacattagaatctatagtatctgaagctcttaaaagagcgagtagtgaattagagagtaaaagtgattggacggccagtgtgtcgattggtatcgctggaaatggttttaagtttgagcgaaaaagtacaaaagaaacaaaacatattgaaatttatgatgtttcctccgcagtattcgcattacaacatttagaaaaaatacattctaaaattccttatattgtaatagatgaatttgatcgaatagacagttcagaagagcgagaaaagtttggaacacttttaaaacaacttggagatatgcgttgcaaggtaaaaataatttttacaggtatagctgattcttttcaagaaattttatgtggacatgcttctagtgcacgtcaaattcatgagctaaagcttgagccattgccatgggatgggcgagcaagaataattgaacgagcttttgaagaatttaatatttttgtccctgaggatattaaatttaggatttcaggattgagtgatggtttccctcattatgtacatataatatgtgagaaaatactgtatgcattatatgacaaagaaaatgatattaaagaagtagattatccgttgtttattcaagggttagatgatgcagtaaaatcagtagagcagagtttgaaagtgtcatataatcatgcgactgaggctagggatgctcagtatgcctatgtcctgtggtctgttgctgattctgcagatctacaaagaaagaaagcagatattttacagtcatatcaagacgtatgtgaacaattaaaaattactccactgaatgatacatctttcagccgaatcttatctcttttaaagaaaaatgaatatggagaggttgtggttcctgcattccctgggaaacgtagcggatggtataaattcaatgaaaatatgcttagaggttatgtaaggatgcatgctgaagttagaggaatacagcttgacttccagaaaaactttacaagtaatgagccaacagccaattcaagagtaaaaaataggtttaataagacgatctctcaagttgaaagagaagttgattatgaaagaagacgtaatcaggaaactttgaaagaactttctagagagtatgctaggcgaaataaaccttaa

SEQ ID NO: 309396 - DNA, 1014 bp, Proteus mirabilis
atgaatattaatcaactgaaaagctttgttgaagtagtgcgaaatgactttaacattacgaatgcggcagagaaactctatacttcacaaccaacgattagtaagcaacttaagatattagaagacgaactcagtgtttctttattcgtccgtaaaaataataatttattagcacttagtcctatggggaaagaggtccataaaatagctagcgatattcttgggcaggttgataaaattaaaagtattgtggcagaagaagatcgtaataaaaaagtagatttgcacattgccacaacacatacgcaaatacgttactccttacccaacgtcattgatcattttcgccgctattaccctaatatttcactccattttcaccaaggtgctcctgctcagttagcagaaatggtaaaaaatggcgatgtcgattttgccattgccacagaatcgatgcatttatatgaagatttaattactttgccttgctatcgctggactcgcagtttattagtaccttatgatcaccctcttgcatcattacctgatgatcaacaggttaccattgaacaacttggccaatatccccttattacctatgtgtttggtttcactcgaggctctaaactcgataaagtgttttataaaaaccatcttaaacctcaagtggcattgacggcgacagataccgaaattattaaatattatgtcaagcgccaccttgggattggtgtgattgccacggttgcttatgatgaaatagaagatagccaagcattaaagtgcatcaatatcgatcacttagtacagcccagttatacacatatatgtctaagtaaacatacgcatatgaaagattatatgcatgagtttatttcactttatgctccgcatattgatagaaatattattcagatgccagagcagtgggaaacccagtggcatagcaaagaagtgtatcaggggttacctgatctgatttcggtaaatagcaaagagaaaataatagaataa

SEQ ID NO: 309397 - DNA, 552 bp, Proteus mirabilis
atgaataatttaatgttagacctagaaacaatgggtaatacacctaactcgccagtaatttcaattggcgctgtattttttgacccaaaaactggtgatttaggtgcaagtactgaaattaacatttccctagaatcatcaatgcaatatggctcgatacctgatgcaagcacaatcatgtggtggatgaagcaaagtgatgacgctcgcttgtccgtatcagacgcaacgaaaacactagaaagtgcacttagagagttccatctattcgtcagtgagaaagtgaataccaattatgttcaagtttggggtaatggcgcatctttcgattgtgtaattcttcgtaactcatatcagttggcaggtttaattccaccttggcagtggtggaatgatagggatgttagaacggttgttgaaatgggtaaagttatcggaatggatccgaagcgcgatatgccatttgatggagttagacacacagcagtagctgatgcaattcatcaagcaaaatatgtttcagcaatctatcaagcgttaacttcaaaataa

SEQ ID NO: 309398 - DNA, 261 bp, Proteus mirabilis; identical to SEQ ID NO: 294452

SEQ ID NO: 309399 - DNA, 924 bp, Proteus mirabilis
atggataaattatcggtatttggatcacagggtaaattagatcttcgccctgttgttgaagttgaagataacggaattcagatgggtgtcttgagtgatggaacaccttatttgacattatatggattggctaaattatgcggaatagacccagcgccattacatgtattcacttccaattgggaaactgaaaaaaacaagaaaagaggtagcatcgtcctcaaagatctagagaggaaaggccataaaggtgtgacacacctgtacacaaaggtaataaataagcatggaattgaaactcacgcttaccctgattatgtttgtatggccatactgcgttactacgtatttgatgcagctagatttgataatacgatagcaagagaaaattatgacattctggctgaatacactctaaaaagaatgatatatgaaaaggccaattataaacccaatcaagacgtcataaataaatcatgggatgtatttaaacaaaggataatggctaatgatgaaataccagttggttacttttccatattcagagaaatggctgatttaactgtaaaattaataaatagcgagtttaaactagacccattttctatcccagatataagtgttggacaacgttgggccaaacattggaaagatgccgagttagcgaagatccatggtgacaggatgttgcacccacataattaccctgatgacttccctcaaagtagaggcactcaaaaagaagcatatatatatccaagttcagcgttaggtgagtttagagtttggctagatactacctatgttaatattcacttagctacctacttaagcaataaggtaaaagccaaggctataccagaaaaacaagccgcacaaatcttattagctgttagaaaaccagaactaccaaacaaacactag

SEQ ID NO: 309400 - DNA, 249 bp, Proteus mirabilis
atgttgttaccaaaggacattcatcctaaagagagcttatactataatggtgggttcattatagacgcgctgaaacgtttcgatgaaattgaactaatggatctattttacgaaaccaagaaaaaagttgagatatctatatcaatttttgttttatctcttgactggttatacttagcaggaatagttgaattaaatccaaatggaaatttagaatatgttcataaaatctctccagatatccaataa

SEQ ID NO: 309401 - DNA, 1746 bp, Proteus mirabilis
atgttcataaaatctctccagatatccaataaagatgggattatacgattaataaaattccatgcaggtttgaatttgatcgtggacgagacgccagttgatgagacaccagcagaatcaaccaaagcaactggcaataatgttggtaaaacaacggtgctaatgttagtcgatttttgtttgggtgcagatgctaaagccatttatactgacccagaaacgaaaaaaggcgagtatacgcttgttaaaaactttttaattgaaactgatgttttaataacactaacacttgttgaagacttagatgatcctctatctcatacagttgtgattgaacgaaactttctctctcgtaaaaaatgtatcagaagaattgatgggcaacagaaaacaattgatgaatttgaagaaacattaacaaatatattaattcctgaccattatggcaataagcctactttttctcaaatcatatctaacaatataagatataaagagctaagcatcacgaacacgctgagaacacttagttctttcactcgtgatgatgaatatgagacgcttcatttatttcttcttggatgtgattttagaaaaggtgctcttaagcaaaatttgttagctagcatccggatggaaacaaccttcaagaataggttagaatctacacaaactcgtacagcatatgaaacgtcattagcattgttgatctcagaaattaatgaattggacctgagaaaatccactttctatataaatcctaactttgaacacgacctcaataccttagataatattaagtatcaattaagtactgtagcttcaaaattaagtaaattaaaattacgaaaagagctcatagttgaagcggtaaaagatatagaaagtggcaagatggaaattgatactaatcaattgaaagatttatatattgaagcgaataacaacataagcaacatacaagtcaaatttgaatcattacttaattttcataacaagatggttgaggaaaaagttaaattcatatcaaaagagcttcctataataacagatgaaattaacaatactcaagagagcttgaatacgcttcttacgaaagaaaaagagtcagttgaaaatattaataaaagcggttcactcgatgaattagagggattagtcttagaattgaatgagaaacatcggagaaagggtgagttcgaggctattataaaccagattgaaaaaactgaaaaaagtatcgaaaatctaaactctcaagttagtactattaacaatgatttattttctgatgacttcgaagtcgaagttcaatctcaggtaaataagttcaataaatacttttcatctatctcccaagagttatatggcgaacaatatgctttaaaatatgatatcgttaccgcagctaaaacaggtcaaaaaatatacaaattcagttcctttaataccaactttagttcaggaaaaaaacaaggggaaattatttgttttgatattgcatacattttatttgcagatgaagaaaatatcccgtgcttccattttttgttaaacgataaaaaagaactaatgcatggaaatcaacttgttaaaatatctaatcttgttgagcgttacaaatcacaaattcagtatgttgcatctattttgaaagataaacttccaaaagaactaagcaatgaaaaaaatttcattttaaaactttctcaagaagagaaattattcagaattgaaaataattaa

SEQ ID NO: 309402 - DNA, 174 bp, Proteus mirabilis
atgtacagatcttacaggaatggtggattggttcaagttatgttgagattagttgagatgtttagctcattttctcattcagaaaatacacttgatactatccgtttggcaggttacctagataatttggttatgccgcgcagtaactcaatttttgcatcgaaggaatcttaa

SEQ ID NO: 309403 - DNA, 828 bp, Proteus mirabilis
atgagtgtaatttatcactattgtgatcttaatgcattattgagtattataaataataagaaactttgggtttcatcggctggaaacttaaatgattacactgaaataaattatgtcagaaacattttcgttgactcattgaattcaaagagaaacccatctagtgataatgttattaatgaattcataacttgttttcaaggtacatttcctcacccttatatttgtagtttttcaaaaaataaagatcttttaagtcaatggcgtgcctatgctggtgatggctgtggagtttctattggttttaatacagaagcctttggtttttctgacacagcaccaattttgagtatgtctaatgttcattccattggtatcaatgaagttttttacgatgatgttgaggttatttgtgagtttgctgatcgcatgtctgaagctgtaactgcattatctattcataatgaatcggatagatggttgggctacaatcaaatagcaagtgaagtcagaacaaaatgtttgtttactaaaaataaatttttcgaggaggaacaagaggtgagaattgtacatcttcctttcgttacaggaaatgatcgaggcgaatttaacgttttacattcaatttcagatctaaagcaaagggtcacaggcaataaaataacttcgtattttgaatatgatttttcttcaaaagataaccttatatttgatgttgttcttggccctaaatgtgaaataaacgaatatgaaattgagatgttgctagcatcgaatggctatctaaatataccagtatctagatctggcgcgagttacagataa

SEQ ID NO: 309404 - DNA, 234 bp, Proteus mirabilis
atgactacagttgttaaagacctaagctcaatgtcttcaagtttagcgttgaatgatgcacaaaaaacggtatctgataacatgaaatttatttctggtgaaatagattcattttttggaaaaggattcgcaaaagcaaatccatctttagtagctgagctcaccaaagcaatatctattgaattcaatacaactattcaggcaagcgtgaagactcaattaaatgatttataa

SEQ ID NO: 309405 - DNA, 402 bp, Proteus mirabilis
atgagcatcgaaaattcagattttttatcttttgcagaagaaattttgaagccaaattgtgacgaggtttttataaggtctgctgctagcagagcctattactgcatttttcatcaaatatcctctattgttgggaatataccgaaacttgatagtgatggaaataaaattaatgcaggtgttcacttatgtttgattaaatatttagaaggtaatgcttaccaagatctttctttagataaaaaaacgttgtgtaaattagctcgctcaatgaagtggactaagcaagttagagaggattcggactattatctaaataaagatattaccctactaaaagcaaaacaggtaataacagaagctcacaatgtgataaatttagttaatggattaaaaaaataa

SEQ ID NO: 309406 - DNA, 741 bp, Proteus mirabilis
atgattgctccgcaaacaaaatccactgaaattttagatgaacttcgtgagtccatagagagtggagaagttcttttggatgagtttactcttcggaagctactaaaaacagccgaatcaatacctacgcctgatgaacgcttgagtattacagggctaattaaaatactgatgggcagaattaaagaaggatgtagtttgtgtgaaagagctatacgcataaaccctactcaattcgcaaattggactaattacaatagcctattgagctcattcagtatgttttcgacactcaaaaaattagtatatgaaggtattaataacgttcatttatgtccttctcttttccctatgatcgtcaattacacatcagtttgtttagatgatgaaattcttaacttattaattgacaaggcagaaaagatgaatatagaacttgactcagtatcaactcaacatgaccaacgtgcattttattttattttaaatgatcccccaaaagcctctcgaattaaagagttagcttttaacactttgctatttatagaaagcaaaaaaatcaaaaatatagcaacaaagtttgaagttgatatggatggtatttggggttttaactgtctcctcagaaatataaccattgatgaattatctcaattgaatgatgagctattcgactatttatatgataaaaatatagatatgacggattgttattcaattttagagcttatggaagaataa

SEQ ID NO: 309407 - DNA, 711 bp, Proteus mirabilis
atgaaattagagaaaaaactgacgacagaacagcttgaagactgctataggttgaaagctttgtatgagttaaagaaaaaagagcttaatctaactcagcagcaaatagctgatgaactagatattagtcaaggagccgttggccattatcttaatgggcgaaatgctcttaacttacaaattgcctctgtttttgctaaaaaactacaagtatcaatatctgagtttagcccatccttagctaaagaaataacagagttatcacaaggagttgatgcaaatgttagcaacccaagaccttatcgaccagcccccaaataccccgttattagctttgttcaagcagggaattggaatgaggcttgcgagccatatacactagatcaaatagatgaatggtatgaatcagaggtcaaagtgcatggctctgcattctggctacgagtggagggagattccatgacggctccgattggggttagtattcctgaaggttcacttgtgcttgtcgatacgggcagagaaccaataaatggaagcttagtgattgccaagctaactgacaccaatgaggctacttttaaaaaattagtaatagatgggaatagtcattttcttaaggggctaaatccggcgtggccaatgatatcgattaatggtaattgtaaaattatcggcgttgtggttcagatgatgatgcgattcgtatga

SEQ ID NO: 309408 - DNA, 225 bp, Proteus mirabilis
atgcaaaaagaacttttatccgagtttgttagaaaaaatgggcaaggaagaactgcagagctacttggcgtacatcaaactgcaattagccaagctttacgaaaagggcgaattatttacatttccactaatggtttaggagggtatgaagctgaagaaataaagccatttccaaacaaaatcaaggagcaattaggtgcaccaaatcaacatgccgatgcctga

SEQ ID NO: 309409 - DNA, 1044 bp, Proteus mirabilis
gtgaaaaccaactggcttgcttctcctcctttagtcgtggcttatgcgctatctggtaatatgaatattgatttgaccaaagagccattaggtgaagataagcagggcaatccggtctatttaaaagatatttggcctgatagtaaagccattgccgatgcggtggaaaaagtaaaaacgcagatgttccataaagagtattctgcggtatttgatggtgatgaaacttggcaatcactaaaaatacaagataccccggtgtatgcttggcaacctgattctacctatattcgccatcctcctttttttgaaggtatgacaaaaacacctgaggcgattaaagatattcaccaagccagtattttagccatattaggtgactcggtgaccaccgatcatatttcacctgcagggaatattaaagctgatagtcctgcagggcgttatcttcgagagcatggtgttgaaccaaaagactttaactcttacggttcaagacgtggtaatcacgaagttatgatgcgaggaacttttgcaaatatccgtattcgtaatgaaatggtgccggggatcgaagggggctttacaaaacatattccaacgggagaaacgttagccatttatgatgcggcgatgcgttatcagcaagaaaatacgcctttagccattattgccggtaatgaatatggatcaggctctagccgtgactgggccgccaaaggtacacgattattaggtgtgcgagtggtgatagccggatcgtttgaacgtattcaccgttctaatttgattggtatgggagtattacctttagaatttcctaacggtgtatcacgccagactttagggctcaaaggtgatgaaaaaattgagataacggggcttaattcgctaacaccgggtcaagatgtcgctgtcaatattacttttgcagatggtcgccaagaaactattatggctcgttgtcgtattgatacgcaaactgagctggcttattttgaacatggcgggatcttgcattatgttattcgtaatatgttgtaa

SEQ ID NO: 309410 - DNA, 1548 bp, Proteus mirabilis
atgtcgttacgtctgaaaaaggagagtctttctacgctctctgtaggtactcatcaatatgagtattaccgtctttctgaagttgctcgtcaattaggggatatcactcgtctccctaaatcgttaaaggttctgctagaaaatttagtccgctatcttgatgatgatacggttgttgaagatgatattaaggcattggtggattggcaaaaaaatgcccacgcctcccgtgaaattgcctatcgcccagcaagagtattaatgcaagattttacgggtgtacctgccgttgttgatttagccgctatgcgtgaagccgtaaaatctttggggggaaatgtagaaaaagttaatccactttctcctgttgacttggttatcgaccattcggtgatggttgataaatatgccagtgatgatgcttttgagaaaaacgttgaaattgaaatgcagcgtaactatgagcgttatctctttttacgttgggggcaacagtcgtttgaacgttttcgtgtagtacctcctggaacgggcatttgccatcaggttaacttagaatatttaggtaaagcgatatggtctgaacaacaaaatggccgacatattgcttaccctgatactttggttggaaccgattcacatactactatgatcaatggtctgggcgtgttgggttggggcgttggtggcattgaggcggaagctgcgatgttaggccaaccgatctcaatgctgatccctgatgtggtaggttttaagttaacgggtaaactacgtgaggggatcacagcgactgacctagtattaaccgtaacgcaaatgttacgtcaacatggtgtggtagggaaatttgttgagttttatggtgatggactagcttctttgcctcttgctgaccgagcgacgattgccaatatgtcacctgaatatggtgcaacctgtggcttctttcctattgacgaaattacactagattatttacgtcttaccgggcgtgaagagcaagaaattgcattagttgaagcctatagtaaagagcaaggcttatggcgtcatgctggtgatgaacccattttcacctcaaccttatcgttagatatgggtactgtggaagcaagtcttgctggccctaaacgtccacaagatagagttaacttgctgaatgtaccaaaagcatttaaagctgctgtagagcttgaaacaaataaaaaacctcttgctcaatatcctcaggtcactattgataatcagcctccttttaccttaacggatggtgcggtagtaattgcagcgatcacctcatgtaccaatacctctaaccctaatgtcttaatggccgcaggtctactggctaaaaatgcggtagaaaaaggcctacagcgtaagccatgggtcaaatcgtcattagcccccggctctaaagtggtgacagactacttagcactggcaggattaacaccttatttagataaacttggttttaatttggttggttatggttgtaccacatgtattggtaactcagggcctttattagcccccgattga

SEQ ID NO: 309411 - DNA, 159 bp, Proteus mirabilis
atgactgcccttggtatacgcattgattattattttccgtatcagactcagcagcagttgcagtcagagcagaaaggccaaatattatcaaacacgttaattttgctatttgcatacttattggggtctgacgctcagtggaacgaaaactcacgttaa

SEQ ID NO: 309412 - DNA, 258 bp, Proteus mirabilis
atgttgacgaccttttttaccagcagagaatttaaccaagagataggcaaggccaagaaagccgcttgtcagggggctgtgttcattacggacagaggtaaggctacacatgttttgctgtctattgatgagtatgaacagatagcagggctgaacgatgagaatattgttgacgcattatctgtccccggtctgtcagaaattgaatttgatacttcacggttaagcatttttccgcctgacagggacattttctga

SEQ ID NO: 309413 - DNA, 927 bp, Proteus mirabilis
atgtgctctttctgcgcaatatatgcgcagaatacagtgaccgatagtcataatcaggcacaagaacagcgttcacgcggtattgagtggcgtaatagttatgtcacaaatgctaatcctgtgtactccgcgcctaaagaatgtgccagtccgccgcgcattatcaccgctttacgtaaggcggctttgtcgtccaacccagccagacaccctatatggcgtacagcggatcgttttcatgctattaatcatcaacggttgcctaaagaacgtgcaatgaatgagcaccgcgcccgtgcggtaaatgccatttgtgcgtgtattgctgaccgtctcaatatcgttaccggcaaagtgtttatgacactggcgcaaatttccgacagttgtggcctgaccacctacaataaggatggaacgccctgctacagtcgcgccagtcgcgccattaacgaacatcttgaagctatcggcgcaatccattgtgatcgcgtatgggacgaaacaaccggctcatggattcctaacctgatatgggtatcagaactgtttttcacgttgataggctacgagtacgggaaatatgaggcggcacaacagcaacaactggcatgggaaaacaagggactgaaagaaaaaggggaaccggctatttcattaaccgaagcccgcagacgggcaaaggttaagcacattcagaccgcatttgaagtccgagccaaaaaacgcgcgtttaaaacacagttacgacaggccagaaaactggccgctatggaaaaacagaaagcgcaggctaaaatccttaacgatctcgtcaaactctactcacaggacgaactggccgctatggggcatgttgaactgaaaagacaggttgaacatcgctatgcggccatgagaaaactggctaccgccccgccacattaa

SEQ ID NO: 309414 - DNA, 285 bp, Proteus mirabilis; identical to SEQ ID NO: 293456

SEQ ID NO: 309415 - DNA, 642 bp, Proteus mirabilis; identical to SEQ ID NO: 293457

SEQ ID NO: 309416 - DNA, 306 bp, Proteus mirabilis
atgagtgaatataaaaatatgagttcagaaggattaatgaataaagctatagatataataaaaaattatgactggggggacgctactggaagatcgttagcaaatcaaactctattaaatggttctaatgatgatacagtccaacctagtattaaagaaaacatagtttgtgctatagctatacacaatattaccactcataaaggacttttaaatgacacaattaagcaagctataaatgcacgaacaaaaggtgaattaaaagaagctattacaaaagcattaaagataatagaaggttcttga

SEQ ID NO: 309417 - DNA, 360 bp, Proteus mirabilis
atgaataacttaatcactattaacaacacccaaatacctgttgctgaatataaaggtcagcgcattgttactttctcaatgattgaccttgtacatggtcgaccagacggtacggctcgcgctgcttttaatcgcaatcgtgaccactttattgaaggtgtcgatttcaatgaagtaggttcggacgtaatacgtacggacctacctgaaggggtattttctaaatttgctcctagcggcatcgtactgtttgagtctggctatctcatgttaaccaagccattcaatgatgatgttgcatggcaagtacaacgcgaactagttaataattactttcgtccccccccaaaccgctattag

SEQ ID NO: 309418 - DNA, 786 bp, Proteus mirabilis
atgctaattactatttcaccagctaaaacactggatttcgaatcgcctttagcaacaacgcagttcacccagcctgaattgctaaaatattcccaacaacttattgcagaatgtcgaaaactgtcgtccagtgatatcgcaagcttaatgaaaattagtgataaattggcaggactaaatgcggctcgctttggtgaatggcaacctgactttacacccgataatgcgcgacaagccattttagcgttcaaaggtgatgtttataccggaatgcaagccgctgaacttttcacagatgacgactttcaatttgcacaacagcatttgcgtatcctttccggtttatatggcgtattgcgcccactcgatttaatgcaaccttaccgcttagagatgggcataaaactgaacaataaaaaaggcagtgatctataccagttttggggcaacacaattactgaaacgttaaataacgcccttgaagctcaaggggataatattttggttaatttagcctctgatgaatattttaaatcagtcaacccaaaaaaactcaatgctgaaattattaaacctgtttttcttgatgagaaaaatggcaaatataaagtgattagtttttatgctaaaaaagcaagaggcttaatgagccgttttattattcaagaaagattaagtgataaggcacaacttaaagaatttaatctagagggttatcaatttaatgccgccgagtctgaaggcaatacccttgtctttaaacgtgcagaacatttagcaaaataa

SEQ ID NO: 309419 - DNA, 141 bp, Proteus mirabilis
atgcctaccattattcttataggtgactcggatacaggccatgatcatcatggccctaccaacgtcatcacaggttcatcaacggtaaacttgttgcttgagcaaaagctcccattagttgataatgtaggtatgaaatga

SEQ ID NO: 309420 - DNA, 210 bp, Proteus mirabilis
atggctcacgaactcaacttagaggctgttgcaaaaaaaagctctcaattaaatgccctgttatttcaactaaataatcttcgaattccagaaaaccctgatgttgaaactttaatagaactagcgcatgaattatctggtgatgttgttaactggattcttgaagaaaatgcacagagagataatgatcatgacaaaagaaataattaa

SEQ ID NO: 309421 - DNA, 873 bp, Proteus mirabilis
  misc_feature (848)..(857): n is a, c, g, or t
gtgaattcaattattttagatgactcacaggcttgtattgattctataaagaatagttttacaattaaagtagataaaaaaagcaagctctacggagcaattttaaatattttctccagcgaacttaaagatcaaggtgaaggaagttacttggaaatggagagtggtgttggaaacaatacattgctccctgtgccatattgggcctggattgataaaaaagagcaagttgcgcaggaattacttaataatattgaagataaacgagtatcctttatttggcctttaataaaaaatgagctacataattgccaagcatttatatctggtgaatctttagaaatatcaccaattttttcactcatcgattcatttggaagctttagtaaagcagctcatcgttttcttatgtctgccacaacacaagacgattctttttttattaaaggattaggttttaatattgatgctgtgaagcatcctttgattaatcctgatcttatttggtcgggtgaaaaaatgattttgattccgtcattaattgatgaaacacttgatcgtgagacaataattaattggttgctaaaaccatatgaaaaaagaaattttggtactgtatgtcttacacctagcttttcaaacacaaagcagtttgagcgtattggtgctactgttgccaaaacagaaacgatttatgaatgtgtagaacaattaaagagaggggtttatggaaaggccctagtattaggtaatagatatgatggcatagatctccctgataattcatgtcgtattttaattattgattcaaaaccttattctgaaacattatcagatcgatacgaggnnnnnnnnnnacgaggaagaatgtag

SEQ ID NO: 309422 - DNA, 660 bp, Proteus mirabilis
atgacagtttttgagtcttgtgatgagttgagtaatgctacgactgagaaaggtatttttgatactgctagcgttaacttcagtccttgttctatatttaataaggttgaaacagtaattgatacttcatctagttatctttttttagatgatttagggaatgaatgggcagaccatatttcagtatctgatgggttaattgaattttatcattctaaatctggtgatgaggggctttcagcatcaaaatttcaagatgtagtagggcaagcacagaaaaatttaggtaatttagttcctccacatcacagaattgatgctaagaaaacactgtggaatagaaaatatatagcaaaagttgaaaatggtagtgtggcgactaatattcaacgattgcgtagagcacctgaaggttgctcattagataatggtattgagttctacaaggagcaaacacgtaaaccaaacctcagaaaaattgtttatttagtagttaactttatatcaagatcaagacttgaaaataatcttagagctttgtctacaggaggaagggtggagaatcgtaatgaaatagttcaaatactgtggtttatttcctcattaatttcttcctgtaaagagcaaggaaccgaagttaaaataatatgtttggagtag

SEQ ID NO: 309423 - DNA, 201 bp, Proteus mirabilis
atgactggttcagtaaaatggtttaacgatgataaaggttttggtttcatcacccctaaagatggaagtaaagatgtatttgtacattactctgcaatccaaagtgatgacttcaaatctctgatggaaggccaagaagtttcatttaccattgaaaatggtatgaaaggtccagcagcaggcaacgtggtggctctctaa

SEQ ID NO: 309424 - DNA, 423 bp, Proteus mirabilis
atgccaaaagagataaacgaattacagtttagtcttcactatgcttcagaaacagacagcgaaatgaatacttcagccattttaacggcgaatatccatacggctgatggcgaaactcaacaactcacacaactaatttgcacgacatctcccgcaggtaaaaagcaatatcgaatcggcacacaaaagattaatgatgcaggtgatccattgctggtggcgattgaatcctattggcgcaaaaacacacaagagagttgtgtttatttgttagagaaagcgaagcaatttattcagggacacttacaacaaacgaatacatggatatccatgtacggccttgtgattgtttctaatgcgtcactggaagaacagttgcctgaaggtttattaaaggcacttaaagtatcaatgcccgcctaa

SEQ ID NO: 309425 - DNA, 621 bp, Proteus mirabilis
ttgaagtttgagtttcaagtaagaacaattttacaacatgcgtgggctgaacttgctcacgataatagttataagtttaaagaaggattacctccagaccttgaacgccgtttatatttatatgctggaatgttagaaatcgcagataggggacttaatgaattatctcaagaagttacagtatatagaaaatctattcatgaaggtataagtagtggtgatcttgatcatataatagatgtaattagcttagatgagtttatctcaaactgggcaaataagaataatataaaacttgaacctgttcaagatagttatagggatgtttctgtggttatagaagagttacatgattttggaataacaactataaaaggattaagtgatattatcccagaaggctatgctgataaaattaaaaagattcctgaatcacagacaatagtgggacttattagagattggatgatcataaacgatttagaacgatatcgtgatactactaattatacatggaaaatattcaaggaggatctagtttactataaacagcttctggattctaatacatatgataaattttgtaatgttttttcagattggatagtagataaagaataa

SEQ ID NO: 309426 - DNA, 180 bp, Proteus mirabilis
gtgtcgcgttcaaaagaagagactttgtcaatacgaacatctaaagaaatcaagctgttgctaaaagcagcagcggaaaaagaacatcgctctcaagcatctatgatagaaatactaattttggattatgcaaaatcgaatgggctaagccccatcatagcctcagataatactaagtag

SEQ ID NO: 309427 - DNA, 972 bp, Proteus mirabilis
gtggctaacggtaaaatactgagacagttgattagggctggaaccattggtgattccgaggcctttcggcttgcttcagaagctgttattcaagatgagcgtcaaaagcaacatcaccttcttgcaaatgatcttgagcagatattgtatggtgagcatttaagaccgcttaaacaaaatggacgtaacactttgcctactcctcctgtagataaagagcgaggactaccactattagatgttcgacaagctcagcgaccaatagaagaaatggttttacctgaatctagtatcgcacccatcgaggaacttcttgaggaacaccgccgtgtcgatgtgctgagaagttttggaatgaagccgtctggaaaaattatttttcatggtcctccgggttgcgggaaaaccttagcagctgaggtaattgcttttgagcttgatttacctcttgcaattgttcgtctcgatgcgttggtatcttcttttttgggtgaaacagccgcgaatcttcgcaaagtttttgattttgttgctgaacattctatggtggttttatttgatgaatttgacgccataggcaaagaacgttctgactcaggcgaacatggcgagttacgccgcgtcgttaacgcagtgcttcagatgatggacgcttatcaagggaagagtctaattttagcagctacaaaccatgagcacattttagacagtgctatctggcgacgcttcgatgaaaaaattgacttcccattacctgatgagctgcaaatacaacaaattctttcactcaaattgcgtggtgtacgtcgccaatttgagttagatgataaatctatcctcgggatattttctacaaagagtggcgctgatattgaacgtattgttcgtagagcagtaaaaaggatgatcctacgtagtcaggaatttttgaccgttaaggacttgaagcaagcagcttctcgcgaaagttaa

SEQ ID NO: 309428 - DNA, 2379 bp, Proteus mirabilis
atggctaattatgaacatcttaagattgaaagagaactgcttgaaaatgaacgtagaacaagaaaaatcaatattccaagacatccacgaggtgatcttcgtgggcatggtcaaaaattatccagagacttaactgaatcattcaaattcgcacaaagtcaacaaacgtcacgccctggtaattttgtactgaaaattcgttatacaggacttctcgatattacccatctaaacaaacatggtatcgagtttgtaagccaagaagacaatcatctgtgtgttgtttttgttgatgaaaccggaatggctgtgtttgcagatcacttgcaacgtttaggtttagacgatgcggagttgacgtacaaacagattctcgaagccatagagggaatcgataactggacaagtgaggatcggaagagttgggctctcagaagaaatggcttaccaaggtcagaaaaatttctcttagatgtggaactttggcctgtggctgttgcttatcatcctgagaggttaagcacttgtgatgcatttgagcgttggttagttcataacggaatacggcgaacagataaagttaaccttgatagcttaataatgtaccgtctggaggttaactctagtcaggcgaatgtactgctgaatcacagcgatgttaggctggttgatctcccacccaagagcggtattcactatagccaattgaattgtgacatcgatagaattcctgaaggaatactatcccctactcatcaagctgccagggtttgtgttcttgatagcggagtaaatactaaccatcccctgttggcacccgcaattgcggaaagtgaagactttattggtgatacaggtggcatggatttgaatggtcatggcactgctgtcgctggtgtagctctgtatggtgacttggaagcgtgtaactcaactaattattggcaccctgaactttggattttcaatggtagaattcttgatgagaatgcggagtttgactccagttctatcgaaaaaactctcattgaagctgtaacctattttgtcgaagaacaccaatgtcggattttcaatttgtcgttagggaattccaatgcaccttacgataatcgtcatattcgaggaattgcgtatgtcttggataaattggctagggacttcaatatcttatttgtcgtttctgctgggaacttctcaggctctatcgatccagatgtgccaagacatagctggagagacgagtatccagaataccttctagctgacgaaagtattatcatagatccagctccggcactaaacgttctaacggtgggaagcttggctcgacataatgcgactttcgatgctcaacggtatcctgaaattgggcaattggctccagccacagaaaatcaaccatccccatttacacgtcacggtcccactattaaaggtgcaattaaacccgagctggtagctatgggtggaaacttggcttctccaataagaacaggcaacgaactcaatgcagttatgcgaggcatgggggtactgacctgtaatagtcgattcgttgggaacacattgtttagcgaaattagcggaacaagttttgcggcaccttacattacccatcttgcaggtcgtttattgaataactacccgaaggcttctgctaatttgctcagagcactactggttaatcatgcgaatatgctgtcggagattgaaagcagctttcctgaagatatgaagaaatcttataggagcgcaaatggacgagatgcgtttagagatatagctggttatggtgctgttgatgagggggagctttttagatcttcacaaaatgccgttgtcttaatggctgaagagaaaattgaaaacaactcgcatcactttttcgaactgccgcttcccgatgattttttaaggtctcagcgtgcttccagagaaattagagttactctgtcttattgtccagcggtcaggacaactaggatagactatgtggccactaaaatgtcttttaggttagtcaaagatcagtcgcttgagtctgttcaaaggcatttcaatcacagtactcaggatgaaactaaaaccagaaatgatgatgctacaagtaatagggacataagtgctgaattaagaggtaaaggtacagttcaatcttcaacttggcggattaaacagccgaagccttctgaaaagtggtttgttgtaattactcgacaagatagagattggggtgaggcgttgagtttcgaacaagaagactatgccttggttgtgactgtcactgatcgagagaatgaggaagcccagctatatagccaaatatcacaacgcatagagcttaaggcgagagaacgtgcacgggctcgagtgtag

SEQ ID NO: 309429 - DNA, 1926 bp, Proteus mirabilis
atgaaactgcacagtattcgggtttcaaattttcagagttttggtgctgaaccaacagaactgacactggaaaatattacctatctgattggccccaacgggtcaggcaagactgctgcactccaggccttgtgccgactgtttgcatttgatccatcattacgccgtattcagcgctcagacttccatgtcccgcacgatgaacaagaagcgcccgaagaaaggcagttatggattgaggcggacttcgtgttccccgagttggaggatgaagaagataactcgaccgttgctccccatttcagtcacatgcgccttgatgcccctgacggaattcctagggtacgatatcgcctaagtgccactatgggcctggatggggatattgatgagacttttgtgtatgtgcttgaagctggcccggatggttcgcctctaaatcctcaaacggttccaaggtctgaacgaaatcacatacaagtccactatctgcccgcaagaagagatccgactgaccacatagcatatggaacgaacgcgctgcttggccgcttgctacgggcagtgaactgggaaaatgaacgggaggaagtcaaagggttcaccgaccagattagtgagagtttggctgctaatccatcggtcaatgcttttagtgcccacctgaagaaaacatggggcacccttcataaaggcagctactttacagatcccaagattacttttgtggcatctgagatcgaggcgttgcttcgtcatttgtccgtatcattctcgcctggacatgatgaacatcttgtcgatttttccagactcagtgacggccagaagtcgatgctctatctgtcattggttctttcatctcaagcaattgggcgtgctgtccttgccggtgaggacggctcttttgacccagaaaaattgcgtccgccagtctttactttgattgcccttgaggaaccagagaacagcctctcgcctcactatctggggcggattgtcagcgctctgaactccatgacgagcaacgaggatgctcaggccctaatcgctacgcatgctccgtcaatgttacgacgtgtcgatccggaacatattcgatatcttcgacttaccgaaacccggcaatcaagaattacgaaaatccaattacccgctaaaaccgatgaagcgcacaagtttgtacgcgaggctgtccaggcattccctgagatctacttctcacgtttggttgtgttgggtgaaggggatagcgaagaaattgtactaccgcgccttttccaagcgaagggtgcgccagttgatgagtcagcggttacgattgctccgcttggaggtaggcatgtcaaccatttttggcgcctgttatcagcactgcaaatcccatttttgacccttctcgatttagatgtgggcagatatcaagcgggctggggaagaataaagtatgtaaataaccaacttggcttatatcaacctgaaaaagttctgccaaatactttttctttatcagattggaatgatgacaaagtacctgttcgtacccaccatttctttgaaaacggtactaagagtgtatttgcagagctggaaatgcgtggtgtgtttttctcatttccaatggatttggatttttcaatgctccttgctttcccagatgcttacggtgttcaacaggaagttccggatgactcaacgattaaagccgtgttgggcaagagccatcatgacccatcccaatatagctatgacgagttaaatcttttctctacgtatcacaagctttttaaactgggcagcaagcccgctgctcatatcgatgctctcgctcaactaagcgacgcggatttgctggcgaacatgcctgaatcatttggacgactcactgatgccgtgatcgccaagcttgcggaactgcccgagtga

SEQ ID NO: 309430 - DNA, 1677 bp, Proteus mirabilis
gtgattgctgtagatgcatggctgccttcggatgggctaacgcttgaacccaatgcactgcgggctgcgaaggaacaagcgcgctgtcttgcactgacggcggggccgggcgcgggcaagacggaaatgcttgcacaaagagctgacttcctcctacgaaccggaacctgccgttatccgaagagaatactcgctatctctttcaaagttgacgccagcaaaaacttgaaggagcgaatccagcgacgctgtggacaagaattggcttcccgttttgatagctacacatttcatgcgtttgcaaagcgtattattgatcgtttccgagtagtgcttactggtaatgatgctcttgatctggattattcgattggcgaaagaaaagtcacaaaaaggcaaattacatttcatgatcttgtaccgctagcaattcaaattcttaaggcctccactgtcgcaagaaatgccatacgccaaacttacagcgatgttttcttggatgaattccaggactgcacggatcagcagtatgaactcgtgaaggtagccttccaaggtacgagcattcgtctcactgctgtcggtgataccaagcagaaaatcatgggatgggcaggtgcattggacggaattttccaaacgttcgctagggatttttcagcggtcccattaaacatgtaccgaaactttcgttcaaaaccacgcctgcttcggatgcagaacgagataattcgcgtgctcgatccggcttccgtcatgcctgatcaccaacttgctggtgaagagggagaggtcttcgcgtggcaattcgagaatgcccagagtgaagctgagtacttggccgatttgattgccgggtggataagaaatgaacaggttccgttatccgaaatcgccgtattagtgtccaaacaactagatctttacgccaatcacctgatggtggcattagaagttaggggaataccgtaccggaatgagcaggagatgcaggatattactgtcgaacctgccgcaaggctcgttgttgactatttgtcctgtctctatggccagcgagagcccaaagcctggattcggctgatgaatcaattgattccctttgccgatgatgaggtgcagtctagcgtcaggcaaaatttccaaagcttcttcaaggaacagcgaaaaatcatagccatggccgagttgttggatgaaccgttttcaggatggtgggattctgtgtgtggatttttgaaggaaataggaatggagactcttgttgctctctcgcctgactatgagtcacatgccagattaggtgaagttgtgggagataccaaagcacgcattgaagaattgcttgaacttacccccgatttgcctcaagccttgactcgtttctctgatgatcaggctgtgcgtattctgactatccataagagcaaaggattggagttcgactcaacgataattatggccgttgagaacgaaatattctttggggatcaagatgctaatcggtgtgctttctttgttggtgtatcccgtgccaaacgtcggcttgttcttacatacgcaaaacaacgcgacaggcctcttaactatgcaaaaagatgggatgtaattcgaactccacaacaggaataccttcaatatgcagcacagtttattaccgatttaacgcacatttaa

SEQ ID NO: 309431 - DNA, 1446 bp, Proteus mirabilis
ttggataacaaaaacacactgctttgttggcactcaaaaagagctggggttgaggtattagacgaagcgttaaagcggcttaagaatcgtaaagtttatgttggcaaagtaattgttcttactcagtcagctggggataacagtctgtacaaagagcatgaatttggcgatatacagattacctttcgaactgtagctatcgagaacccagctgatcacaacgaaatttatcacgcaatagagtctgagattattccagagctaaagcttgaacagaatcttcatatcaatgtatcgccgggaactccggcgatgcatgcggtttggttgattcttcatgctcgggggcattttccacgcgaaacaatcctctggtcatcacaatataaccccgataccaaaagaaccagcattgccaaagttgatttcagtgtaaatacgtatttggcagagatctctgctatttcaagttcagagggcggttacgccctttacgatttagaccctaaatcaaaagcaaggcaggatgcattacaaacgttaaagcagttctcttgtgttcccaaagctccgttacttgtactgggtgaacgtggtacagggaaaacgaggctaattgaaaccgttgtcggtaaggtaaagcaaaagcaggttgttacgcttgcatgtggaggactagattctcaagtggttgatagtatgttgtttggccacgtaaaaggtgccttcactggggcggaaaaggatcgcaatggacttttgaaagaagcaaatggaaaagttttgtttttggatgagattcaagatttaccaacttcggttcagcgaaagctggttcgagtgcttcaagataaccatcacagttttcgccctgttggaagtgacactgaggaagcatctgacttcgagctagtttgtgcgagtaataaatcacttgagcaattggcaacgatactcgatgctgatttctttgatcgtgtatccatgctcacaataacaatacctccacttcgtgcatgcagagaagatattctgtcggattggcaaagaatctggcaggaagttaatgttaaccccaatctgcctgcggaagctccggtgtcaaatgaattaatccagttttttaactcggcatatttaccaggtaacttacgtgacctaaaaaaactggcatacatgtcttgtgcgtttttgagctctcaaactacagagtcggcaatctctagctcattagctgcgttgggcgagcctgttatccaggaagatagtcctgacacaaggtttgcatttggtgatttatccaagacaactaaggatgagttaacgaaagcgtttcataaggaatttgcaacagctgccaaaaagcaattcggtacatgggttaaagccgcggaagcattgaaggtggatcaaaaaactttgcaaaagtatatgagagacaactga

SEQ ID NO: 309432 - DNA, 1533 bp, Proteus mirabilis
atgaatctaattgaaaagtttactaagactgaaactaagattgttgatcaatcaaataccaagttgccccctgtgcttttgcctgttttacctaaacaggtatctgatccgcaacctattaatagctctttgttctgcaatgagctgcaatcaagagttgtcgaattaatcgataatgctgagcactcggttattcttagtacgtttttacttgctgatgagaatgtcgaatctgctgtcctaaaagctgcaaagcgcaaagttcgtgtgtacatactattggcatgtgagactcgtcttgatggcgatgtgcctgacgatgactttggtaagaagtgtcttgtgcagcataaggaaatgttaaacaaattgtctggacatgttcactttgcatctgcgccgcatttccacgcaaaagccgttgttatagacgcattacatgaaactggtaatgctaaagggttgcttttaacggcaaaccttacagaagaagcacttttacgaaatgaagagctgggggtcgcgctttcacgccatcaaatagctgagatcgtgaatgtgttccgttgggcaatcttcgagagtgcgcagcaccatatgacaagccgtggtgaattctcagcatataagtcgccgggcaatgtcagatatccaagggaattagctgaaatactggtcacatcgagtgaagacgctcgaattagggaacacgcattagcgttgataaatcaagcggaaaatgaactcatcatatcgagttttggatggcaagaggaccatcagcttgtaaaagcaatatgtgaacgtgcgaagtcggggctaaaagtcaccattctatctcgccaaagacccgcagccatgccagcgttgttggctatgaaacaggctggtgcatcggtgatgtgttttaaatggctacatgccaaagcgattgtagtagatggaatgcatggcatggtgatgtcggccaattttcaagcgcatggtatggatcaaggctttgagttaggcgtaaaactcaccggtactcaggtaaaagagctgatgaactgcttagatatgtttttaactaatagccacaatgaattgagcatcgacatgagtctagggatgatttctggtggttttgaagcttgggaaaataatacattcaagaggtactcagtcagcgaagtagacattgttgagttatcacctataaaagcagattgtttgtctgatatggataagcacccaaaaatacccaatgcaaactggcgggaaaaaacatcgcacaagattgagtataaatggcgtatagagccgccagttatcactaacgccagtccagagtatttcaaacctttaacggctaaggatgaaacttctaagaagcaggattcaggatcgcctagagagagttatgagccaaaggttgttcgactgacaaaaaaacagttagctattacagttcgtcaagaatacgaacttgccatggcaaaaaggctgaagcaaagtgaattgccaaacgcccgaattgtattggaggcgtaa

SEQ ID NO: 309433 - DNA, 1110 bp, Proteus mirabilis
atgagccaggacatcatactaaaacgagaaattaagactgaaagttggctcatacagggtgaaatcgcgctggcagatagccgtccagaaattaactgcgtgctgcaattccttcaagattatccgaatgcgagttctgctgagtgctccgagcatttatttggggacaaaatcggacgtcgtgtcgttgctgataggttactaaacatatgtcgattatatgggcttgctgagtctaatcgagaccaatacaggctcactgaatcaggactgattgctcttgagaaagatcaaatcctagtgccagaagatgggtgttggagcctttgcgtttgtcatgagcctttgttgcctcatccacttcttgctattgaagcgcacacagagcctagtgcagcgtcgatcggacttggaaaaaacagaaatgagctaaatgaaagagcaaagcgactcgttgaggtttctcaactagtcaaagacgttcatggactgaaggttgaaccaataggtggaggttcggaagtacgcgttgacaaaattgaactcaaaggtgagcgcatctcacctcaaggaaaaccgtattacatcgagtggaatgtgactgatggcaatgtcgatgtgaagcgcggaaaggatcttatattttcacgtcgggttgaaccaatcagtcgtcagcaagttttgaaagtacttctgcatagtgagggcttgcttgaacaatgggatgagcaaacggaaatcttgtcagtggttttcgaaaatattactgaatctgagcgaatcaatatgaagcgctcggtaagtgtaaaaagaccatctgttcacaagttgggctcgtttgatgcgatgaagttacacaatatttctatatcagcattgactgaattggatgctaaaaagtgggctgaatggagattagagaaaaatatcaatatgtatgccactaatagcaagtaccaagtttggagagaaaaagcactcgaaccttttaaaagttggaatttcacactacctgatagggctgagttggcaaatcagttttggactgaagaagaccagcaaaatcagcatacctggcatgtcattgcagcccatgattggaacctataa

SEQ ID NO: 309434 - DNA, 2730 bp, Proteus mirabilis
atggcgttattaagatacgcaaacttaggaattcacaggccagacatcctgcttagtaaagcagtgagtggtcttggtgacttttataagtatttagacaccactcgaaaatacctagaaagtacgaaggctgttaaagcgatagcttgggaaaagctggacgatgctcaaagtggagtatggatacaattagttgagcctgccgataactgcggtgatttcgaaaagaacttaaagctctttttagatgaaagtaccgacacggtatacgaagcaagccccgctagatggaaagccgtgggtagtgccgctagagaatgcccaaattgtagaagtcacggtaaacctaaaatggcttatgcaactgaggagcacgcggacgaaattgcgagtgaattaggcaatgggctgtcgtcgtatgagtgtccagacggttatggttggcatttgactgggaaatcacaaagcaatgttggattcaataaatccaacgcaatttcagtcctagacagaaatgtagagaatgacagcttgttattggatcgtttacctgaccacgactatttggttattcgtccaaacacataccagttaaagtgtcagattaatgcattacaaagcttacaagacaccccttctattcaccatcttccgctattgaggctgtttgaaggcaaggatcatgctaaatggccgaatgttccttatgatgagcacttatttaacgatgactactacgttcttaccgatggagcaagagagggaacatctcagcagcgtgagtttgtaaatattgcactcaatacaccagactttgccttccttgaaggccccccaggatctggcaaaactacagccatttgcgaactgattcttcaattaataaagcgaggtaagcggatcttactttgtgcatcaacacacgttgctgttgacaatgttcttgagcgaatgatgtctgaagaaaatatttatcgcgacatggtgttacctgtacggattggagataaatcaagcgtttctcaaaaggcaaagccatggcaattggaagagtttgttaaaactgaacgcacaagattgctaaaacatcttcagcaacaaccgcacatttcagttagtcagaagttacttaaaagtaaggtcggtgaaggtaaacatattgttgagcgtcttgttcttgaagcggcgaatttagtttgcgggacaactattggtttgcttcagcaccctgatatcaaaaataaacaatcaacatcgccaatcttcgatgtgatgattattgatgaagcatcaaaaacaacttttcaagagtttttggtgccagcggtacttgccaagcgttggatcatggtgggagacccaaaacagctttcaccttatgttgatgatgaagctaccgaagtaaatttgcagccatgtttacaggatagttatcagcgagaagcatgcgcagatattttctctgctcgacaaatcaatattcagaaacgagaagtatccttggtttgcactgacgatgaaaagacaattgaattttatcatcagcaagcaaaggccaaaaatgtattggtcgcatcatctaaaggtccgaagacagatctcccttacgcatcagtagtccttggttcgtcagcgttcatcgctcagaatgctaatcaccttcccctggatatgacgaccataagggggctgcctgcgttaccgaaaaagttagaaatgcgactttcagcgcattcgagattaactcgtacaaaaatcaagaccgagtccgatagctgggaatcccagttagcgtggcgactggctcgtatgtacgaacagcgcctaaatacagaatctaacggaagttctaaaactgttaataagttagaggaagatatcaaagcgctactaccatttgactcagaaaaagatacgttcactgcaatagacagggtacgtaggatcgcactgccttctatccttgaatcactgcaagttggatttgaacgaacagagtatcagaaacaaggcaccgctctgtctgatggacttccagccagtgttttggaacaacgacaaatacggcttagttaccagcacagaatgcatccagacattgccgagttttcccgagtacatatataccatgaaaaagcactgcaaagtcctgatggccaagctgaaaagcgggactggggataccgaagcggctcacatcgttgtatatggcacgatgttaaaggtcgaaaaggcaaagaaggtgaaatcaccgctgaagtagaagaaatattaaaagaattaagtcgctttgattcttgggcaaaatcaaacccaaatgttgagaaaaaccaacaaaagccttgggaagttgctgttttggcattctatcgggctcaagagcgagctatacgtcgagctttacgaaagtggacgggaaatcatcacggagtaaggcatttctatcgaggtgaaaaatcctcaccgtatattgatattcagatatgtaccgtagaccgttttcaggggcatgaggctgattttgtcatgcttagtttcgcaaataaccatcccacgagttttcttgaaagcccaaatcgcttgaatgtggcaattacgagggccaagcatcagctcattgtgtacggaaaccgccctgcaatgcaaaaggcatcgggtgtgttaggtacttttgccagcaattcttactggtctacaacaatcgagactgaatcacaggaggcactatga

SEQ ID NO: 309435 - DNA, 3627 bp, Proteus mirabilis
atgaatacgaacaacattaaaaaatacgcaccaaaagcgcgccgcgaatttatggatgcggtagctaaacgattaaatacctttggtatcaccgcgaataaaaagggcgagctacaaattgcagaagcgaatctacaaggttctgtacttcaaatcgccggtaacagttttgacggtaaactggccgagcccagaaaacgcatagtagccagaagccagaaacttgggtatacacaacttattgaacaagtagcttatacctggttcaaccgtctgtgtgctattcgctatatggaaatccatgactatctaggccacggtttccgtgttttgtcgcatccagacaatcctaaaggctttgaaattatcgatcatgcgcaagatgctgcggatgaactcggattagatagagctcgcattattgaactcaagcttgcgggcaacaaagacgaagagctgtatcgtgaactgctgttaggccagtgccataagcttcatgaagcgatgcctttcttatttgacgcattggacgatgaaacagaacttctgctaccagacaacctaacacgtaccgactcaatactgcgtggattggtagacagcattcctgaagatgactggcaacaagtcgaagtgattggttggctttaccagttttacatttctgaaaagaaagatcaggtaatgggtaaggtggtcaagagtgaagacatccctgccgccacccagctatttacacccaactggattgtgaagtacctggtacaaaactcagtcggtcgccaatggctgcaaacctacccagactctgccattaaaacgcagatggaatactacattgagcctgctgaacaatctgacgaagttaaccaacagctaaaggctattacgccagaatctattgaacctgaaaccatcaaagtacttgacccagcttgtggttcgggccacatattgattgaagcctataacgtgctaaaagccatctacgaagagcgtggtttccgctctcgtgacattccaaagatgattctggagaacaacctctacggcctagacatagatgatcgtgcagcgcagttatctggctttgcgctgatgatgatggctagagatgacgataagcgtatttttacccgtaacgtgcgacttaatgtactgtcattgcaggaaagtaaccatatcgacctgccaacgttgtggaaagcactcaacctatcgggaagttggcaaagcggcacatcacaaggcttgttctcagatgatgagcaagatttaagctcgttcaacgcagacaaccgctaccaactgctgaagcgaacgttggcaagatttactcaggctaagacctttggttctttgattgatgttccaaacgatgatcatgagcagctaaaagagctactttgcactctagtcgagctacaagagtcaggagactcaatgcagaagcctgcggcgaagcaattgattgaatttgtacatcaggcactggttctgtcgattcgttacgatgctgtgattgctaatccaccatatatggggggaaaaggcatgaatgtcgagctgaagaacttcgcagtagagcgatatccaaatagtaaatcggatttgtttgctattttcatggaacgtggtttctcgttactctctcaagatggttttaatgcacaagtaaatatgcagtcttggatgtttctttcgagttatgaaaagttaagaaattcacttctagagaatcagactttactgacgatggcacacttaggcgctagagcattcggtcaaataagtggagaaattgttcaaacaactgcatgggtatttaagaatggttatgtaaggggacatcagccagtattttttagactaacggatggcaacgagcaagaaaagaaattagcccttattgaacagcagactcgccttgatgaggtgcaacaggaagattttctaattataccaggacgcccattgacatattggctttcttcaaaggtttttgaactttttaaaaacaataaaagttttggtgatatatatgatgcaaggcaaggcttggcgacgggtgataataataaattcctaaggtactggtgggaggttgatttctctaaaatattttttgatgcaaaaagtatcgaagaatcaatgacctctggctgcaagtggtttccttataataaaggtggatcatttaaaagatggtatggcaatcatgagtacattgtaaattgggagagtgacggttgtgaaattcgtaatttctttggtgagaacggtaaattgctttctcgaccacagaatacgaaatattattttaaacctagtataagctggtctgatattaatacgtcatataattcgtttagatactaccctcatggttttattcatgatgctacagggcattcagcatttaattggaatgaaaatgagaagcgtatagctttagcattttgtaacaataaattggcttctgaactgatctcggctttgaatccaacaatacattttcatattggttattttaatgctcttccttatgtgcaaaatttgattgacgctgatttgtcccatgtagatgaactgattacactgatgaagcttgattatgactcaagggaaacgagtcgggagttttctttgtgccttgcttcccacgattcagaaaagatttcggattggtttcggaataaactagcgcttaatgaactccatataaattcagtccagtctttagaaaagaagaataatgaaataacactagaagcatgtggtttgttagatgtttacggtacagatctagatgaaaaagaaatttcaatcgagaaaataactgcttgcgatatagcagttaacattgtatctctttcagttggttgtatgcttggcagatttttgctcaaaaagggaaatgatgcccttcaagacaaagtcaaattcaatttagagttttacaacagtaaagaagaagaaattttttaccaaatcgatgaagacggtatcatccctctaaccgacaaagagtggttcaaagatgacgcaaccaatcgtttccgtgagtttgtccaagttgtttggggtgaagaacacttacaagaaaatctcgattttgttgccgagtcactgtgcttaaatgccattaagcccaagaaatctgaattagcactggagacgatccgccgttatttatcgactcagttctacaaagatcatctgaagacatacaaaaaacgccctatttattggctgtttagctcaggcaaacaaaaggcatttgagtgtttggtttacctgcatcgttataacgagggtacgctttctcgtatgcgtactgagtatgtcaccccgctactaggcaaatacgatgcttatgcagagcaacttgagaagcagattgaaacggcagactcaaccagtgaagcgaaccgcttcaagaaagagttggatgctttaatcaagaaacaggtcgaactacgcgagtttgatgacaagctaaaacactacgccgatatgcgtatttcactggatcttgatgatggcgtgaaagtgaattacggcaagtttggtgatctgttggctgatgttaaggccattaccggttcggccccggaggttaactaa

SEQ ID NO: 309436 - DNA, 483 bp, Proteus mirabilis
atgagaattggacacggttatgatgtacataaatttggcggagaaggcccaattattattggtggtgtgagaattccttatgaacaaggtctcctagcccattcagatggcgatgttgtactacatgcggtgacagatgccattttaggtgctgttgcgatgggcgatattggtacattatttcctgatacagatccggcttataaaggtgcggatagccgagtattattgcgcgaagccttttcaagagtgatggctaaaggttaccgtattggtaatcttgatgtcactattattgctcaggcacctaaaatgctacctcatactccacaaatgcgtgtcaatattgctgaagatctccattgtcatgtcgatgatatcaatgttaaagcgaccactactgagaaattaggttttgtaggacgcaaagaaggtatcgcttgtgaagcggtggtgttattaatcaaagagtctttatcttaa

SEQ ID NO: 309437 - DNA, 1422 bp, Proteus mirabilis
atggattacctacccttatttgtggaattaaaacagcgcccagtattactggttggcggtgggcatgtcgctgcgcgtaaagccgtactgttattaaaagcgggcgctcggttacgtgttatcgcgccacagttgtgtgatgaattgcatcttgcttatcagcaaaatcaaattgagtggattgcagggcaatatcagtcagagtatttacttggcatgatgttggtgatcgtggcaacagacgataaggtattaaatcaacaagtgtatctagatgcgcaagcacgccacatttttgtcaatgtcgtcgactctcaaccccaatgctcttttatctttcctgccattatcgatagaaatccgatattaattgccatttcatcagcgggcaaagcccctgttttagttcgtatggtacgggaaaagctagaggcattattgcctacttcattagggactatggcgactattgcggggaaatggcgcaataaagtgaaacaaaaactgactggttttcaagcacgttgccgcttctgggagcaagcgtttagtggcaaatttgcctcattagtggcaagtggtcaattaatacaagcgcaagcacagctcgaacaacaactatctcatccagatagcccacaaggtgagcttgctttagtgggggcagggccgggtgatgccggtttattaaccttacgaggtttgcaagttatccagcaggccgaggtggtactttatgacagtttagtcagtgcagacatcttagaactggtacgtcgtgatgctgatagaatttgtgtgggtaaaagagcggggcaacacagtacgttgcaagaagaaatcaatcaattgatcgtgaaatatactcagcttggtaaacgagttgtcagactaaaagggggcgatccttttatttttggacgcggaggagaagagcttgaaattgcggtacaacatggcattccttttcaagttgttcccggtgttaccgcagctagtggggccagtgcttatgcgggtattccattaactcatcgtaactatgcgcaaagtgtcacttttatgactgggcattgccaatcaggggggatagagccagattggcaagctttagcgcaagctaatcatacgttagtaatttatatgggaacgacgaaagcagaacttattagccagcgtttaatagagcaaggtcgttcaccactcacccctattgccgtcattagttgcgctacacgccatgatcaacagatcttaacgggaaatttaacacaattagcgcaattagctaagcaagctcccaccccggcattattaatcgttggagaagttgctgcattacatcaccaacttgcgtggtttggtgatagacaaactcaacatacctctgccatccactcatctttggttcattttgcctaa

SEQ ID NO: 309438 - DNA, 1179 bp, Proteus mirabilis
atgaatgttaaaactatgctcgctgatttcctccgatttgtcaccccaaaaaccatgcataaagccagattttctgtcttgttagatgcggttactgctcttgctaaagacgctcgttgcaccgttacagcaattggtcgcgctatgccagggccctcagacaaaatcagcatcaagcgagccgacagattactcaataatgccaatctgcaacgagagctaccgttgatttatgccgcgttgactgcttctgttgtaaccccccattcccatccaacgattttagtcgattggagtaatgcggataccgccaagcgtcactttattttacgatcgagtattgctgcggacggcagagcattaacgttgttgcaaaaaatcgctgctgaagaagagtacaccagcccccgtttgcatcaggcattcttagagcagcttaaagccatgttaccagaaggctgcaaaccaattatcgtgacagacgccggatttaaagtgccttggttaaaacaagtacgcgaattcggctggcattatgtcgccagagtcagagggaatgtgaagctgaaagtggcagggcaggaagagtttatctctgttaaccaattttatcataaggccaaagccaagcccaagcatgtcggcaacatcttactcacccaatctcagagctatgaaacacaagctgttttggttggaaaaggttacaagttattgaaaagagataaaaacaggcaatacaaagagccttggctattagtttcctctttaccagaaagtcatgaatatgccgagaaaattgccaaatgctatagctgccgaatgcagatagaagaaagctttcgggatcaaaaaagtcaccgttacgggttaggtagcgatctacatggtactcgcaagaaatcacgcttggagatcttactgctcttggcagccctggctaactggtttcattacctgcttggcagtgcgggtgagaaggctggcttacaacgacgttatcaggctaataccgttaagcatagacgagtgctcgctctttgttcccttgggatactgctctgtaaagagcaaaagcttaatataagtaggcgatattatcagcaagggctaaagcaaattttgcagtggatagctcagtggtgctggacaccggacgatctgatagagtgtggataa

SEQ ID NO: 309439 - DNA, 2019 bp, Proteus mirabilis
gtgacgactcctcaagaacggacaacaggtattacaaatgcgtcgataaaaaaacgtttcggctcaattcccgcttggaagatgttgagtgaatatatctggaacggtttggatgctggtgcatcagatattgatgtcattattaacacctgtgatctcggcggggtggagtcaatagagatccatgataatggtgaaggaattgactttcataacctagaccgaaattttgataattgggatgactcatccaaaaaacaggttacccaaaaaggcagtcaaggcagagggcggtattcatttcataaatatgctgcaacagcaacctggcttacgagaagacaatctgagaatgcacgtattaccatagactcgtctcgtattaaaacgtacaaagttgagttgatcgacgataaagaacagcatagtagtattctttcaaatggaagtgggacatcagtatttcttacgggcattacgagtgaaaaatctcaaaaaatccctaatattgaaaatatcatggaggagctttcaaatgaatttggttggaagctaatagttttttctaaccttaaaatatcagttaatagagtccgagtgacgcctccccaacataggttgtttcaagagcttatagatgttgatggaaatatatttagttcaagtatcattcagtggataaaaaaaccatctggtgaaaagtcatacaattattttagagattcaaaagaacatcagaagtatagaaatctgactggttttaactacaaaaacaattttttcataagtggatatatacaatctgagtggttcgataattttcaagatacctcatctccaaatgctgatctcttcattagtgaaaagagtgatgggaataaagttttagctatgctgctaaaagaactgcgcaacaaaacagccgagatttatcaggggttccttagagaaagagctgttcagcttgtcgattctttcgaagaaaaaggatattttcctgtttacaattgggagtctgacgaagatcgttcctttagaattgcacatacgaagaaattagtaactagtatctgcgttgctgatccagcagcttttaatgggctaaaggctaagcaaacaaaaattataatcggtttgcttgataggctatctacatcaagtgaaaatgatagtttgatagatatattggaaggcgttttagacttaaataaggagcaaatggatgaatttgcatctcaaataagtaaatctaaacttgattatataattagcacgattggacacattcataagcgagatctagtcgtacagaaaatgaagtacctttttaaagagcacgctaaagaagttctagaaacaccagacttacaaggtattattgaggctaatacatggttgtttggccctcagtacacaactataggtgccgaagaggatgacttttctaatacagctagaaatcttcggaattcagatattgaaatattggatggggacgatatcagtaccagtgatcttattgaaggcgctaccatagagggggcaaaaggccaagtagatttgtttcttgcacgcaaaatggtcacaattgatcattctacacaagaagaatttattaaatgtacgatcattgaaataaaaagaccaagtgtagcattgaataagaaacatttagctcaagctgaacgttatgctgaggtacttgataagcatcctgcctttaatgatgagagaatgagatttgatgttgttcttgttggaactaaaatctcccagaatgatactcaaattacaaggcggttgaaagaccttgctggtaagggcggcgcgggccttgtttccggggcggatgaaagaattcgagtatacgttaaaagttggtctacaatttttaatgatttcgaggtgactcatagtgctttattacaaaagctaaaaataaagagaagcgagctagagtataaatctaagcaaacccttgtggatgaattgcaaatacctctctctgaggcgtcgtga

SEQ ID NO: 309440 - DNA, 1443 bp, Proteus mirabilis
atggggagtgagtggcctttagtcaaattgggtgagtattgttgtaaaattggtagtggggctactcctaagggggggagcagtgtttatttggatgctggtgatgtttgccttattcgtagccaaaatatttataatgacgggttcgaggaaggcggcctggtttatatagatgaggttgctgccgctaagcttagaaatgtaattgttgaacataatgatattctgcttaatatcactggtgactcagtagctcgcgtatgtttagttccagatgcttatttacctgctcgtgtaaatcagcatgtagcaataattcgacctaataaggagcattttgatgctagatttttacgctatttcttagctagccccaaaacccagatattgctgctaaatctgtcgagtgcaggggcaacaagaaatgcgttaacaaaaagtatgattgagaattttgaagttccaaaaccctcccttagtgttcaggtttttattgcaaatatacttcaaatcttagatgacaaaataatgaagaatcgccaaatcaaccaaaccttagaacaaatggctcagaccttatttaaatcatggtttgtagattttgatcctgtggttgataacgcgctagatgccggtttttttgagcagaatttagctttctcagatgaattactgcgtcgggttgaagtacgtaaaactgtacgtaaaagtgataattttaaaccgttagcagaagatattcgtcaattatttcctaatgcttttgaagaatgtgcagagcctgcattgggacttggggggtgggtgccaagtggatgggaactcggtaatttgagtgatgtaactaatattttgagtggttttgcttttaagagtaacgagttccaaaattctgggtttggtgtcataaaaattaaaaatattggtaatgataaaagtgtcgatatatgtgacattcaacgaattgatatttcattagctgagaaagctaaacgttttagccttaaagatggagatttattaatggctatgactggtgcaaccgttggtaaatttggttttcttgttactgaaaatcaagaaccgtattatttaaaccaacgcgttgcaaagtttgaggctattgatgaaagtactgcttatttatattgtattctaaatagaaagattaccgagtcttatattgttaatacagcgcaaggaagtgcccagccgaatataagtgcaaaagatattcttgcaatgccattaattactgctccacaatctataagggaactattcaatgacaaagtaaatgatagttttcaaaaaatcattcagatgagaaagcaaaatattattcttgagcatctccgagacacactgctcccaaaacttatctccggcgagttgtctctgagtgatataaaaatagacattccagaagaaacactcatctaa

SEQ ID NO: 309441 - DNA, 495 bp, Proteus mirabilis
atgaatatctttgaccctaacgtttttcctgcagtaactgccttattaggttctgtttttggtgtgcttgctggtattgttagtaacctatatatggagaatagaaaacacaaaaggaatatagatgtctactcagcagggtttattgctgaggttgaatccttagcatctataattaggtatagaggttatatcgccgaattagagagtgcgatgaattatttatatgcagatgaaagaatgccaataagcattctaatacccgataattattcacgtttttatgacgcaaatcttgctcacgttggtctattaaaaccaattacagctaaaaaccttgttactttccatcaattattacaatcagtagtacaagatttcaaacctgaagccacctttaactctattggttatgatctcagttcattaaagcaattaattgaactactcaataaagctttatgtttagcagatgaaattaaagaaaataaataa

SEQ ID NO: 309442 - DNA, 162 bp, Proteus mirabilis
atgaaaaaacgaataaataaaagttataccacagaatttaaacaagaagctgtcacatttgtgacggaacaaggttatagcgtacccaaagccaccacatctttaggaattaccgacaaaattactcagagaatgaattgcagaatcagagcaagtaattaa

SEQ ID NO: 309443 - DNA, 285 bp, Proteus mirabilis
atgttcttcaagaaactatcgccattaactcacaaagagcttgtatacgggttgaaatctttaggtttttccctgaatagaacaaaaggctctcatgagcagtgggttaaagtaagtggtggtggtaagtgggtagttacagtggacgggcatcactccccattttctagggatctgataaaatcaatggctaaacaagcgggtgtgaaggctaaaaattttcatgccttatgtaaaggtgttgttcgtgcttcagaaattctaactgaagagctgggaaaatag

SEQ ID NO: 309444 - DNA, 300 bp, Proteus mirabilis
atgaaattacgttgcatggcttatcgacaaaacggtacttatattgcatcgtgtcttgatttgtcactggcggcgagaggtgacacaattgaagaggctgtaaataatttagaccttcaagtaaaggattttatagaagaactcaagaaggagcctaaatacgccaaacaattgttaagcagaaaagcacctttatcaatgtggtttaaatattgggtactagcctttagaatactctttaataagaaaacatcgcataaagctaaattgtttgatgaacccattgatgcaacttgctaa

SEQ ID NO: 309445 - DNA, 240 bp, Proteus mirabilis
gtggccttttttattgggtggaatatgaaaaattacaacatagacgccaagaccacaggggctgtaacgaaggtggatataactcatggtaacttgaaggcttgtttgtgtcaggctggaaatgttagaaaaatcatcgttactggtcgtggaaatgttcgtcaaatcaaaactattgctaaggcatttcatgatgtattgaaagaaggctcgaattcatgtcagaaaaatatcacgtaa

SEQ ID NO: 309446 - DNA, 189 bp, Proteus mirabilis
atgaacagaaaactgagaatagcaatttcgctattaattctgtacctagttttattcgttccgatttccatcgggctaatgagcgaagggaaagattttatatcaatatttatcgcatttaacggctgtattgttgctgcaattatccttatcgggcggctgtttacattgctgaaatggatagattaa

SEQ ID NO: 309447 - DNA, 225 bp, Proteus mirabilis
atggaagataaaacaggtggagcggcttttcctgcaagtggacatccagatatgcaatttgtagcgcaggaaggcatgagtttacgcgactatttcgctgctaaggctatgcaggggatgctttcaaacgaacaatgcaagccatttgatatgagttttagtgaagaataccacgcaaattgcgcataccgcatggcagatgcaatgttaaaggctagggggtga

SEQ ID NO: 309448 - DNA, 135 bp, Proteus mirabilis
atgatctttagtcgctacagtctctttttacttgttactttggggttgctttcaggttgtgttcagcaacctcagcttattgataggggggattattttgcacaagttgtaaccctgggcaagataatcgcgtaa

SEQ ID NO: 309449 - DNA, 237 bp, Proteus mirabilis
atgtgtacctatgcagacaaaggtgagcgatcagctgcacaaccgaacgaaacttcgcaacctgatgaaaagaggagtgttaccgtcctgcgactgaacagctacgcgcacctaggggagttcaccgtaccggacggcatccagaaagccagtgttgaacgtttcaacaacaagatttatgtattatccgagaagcttgacaagcgcctggctggattgtggatcgtccaaggataa

SEQ ID NO: 309450 - DNA, 1158 bp, Proteus mirabilis
atgtctggagtaaggcccattatcatgggtaaagcaatggcgttaaatggagataagaccactactggagcaacttgtatcgcaactattgaaacggtcacttgtttcaataaaaaagccttaagagtgggtgatccaacaacaaattgccctaagtgcggccaaccaggtactgtaatttctgggcagcaaggttttttaaatcacggaaaactccaggcagtgcatgactcacttgtacaatgtggttgcccggcaggcactaataaagttattgctcatagtggagcagaacaagcgcacccaagccactttgtaacacaatccccaacatctttaacacattctcagggatccagttttggcagccgtatcaatcctgtaacgccaccccctctaattggtgaatgcagaatttcagataatttgctatatgatggtgtgtttgtttggacggaaacatttggttctggtcattcgtttgtaaccattcacaagaacaatcatgtgtcactatattcatatggtcgctacggcatgcctgggccattgactttgacgggtgatggtatactgctatatatgacaggtgaagatgctcgaaaatatatcagagatgagttatacattacgaatgcaagggtttttaaaataacggatgcaaatacagataaaacagaaatgtattttaataacctttggaaatctggcagcatccctaacctccctgaaaaagctggtgagttgactcgaagaaacggcaggtccatagatgtttatgatgtctcaggcaataattgcacaactcatactgtaaaggggttaaagcaatctggcacacggatatttgaagacagttatacaccaatgagaacacagtatcctatcgagcgagaggaagcgttcacggtgcctgtttcattccaaaattatttggatggcaagaaaaataattttaagaagcttgatgtcattgaagttacaagtgacttccataaacagtatccaaatatcgacaatctgacgccatcagataaagggactatgattcaatcttttgaatttaccacatcgtcagcaaaaatcggtggggaggcaacgggttttgatggtggtgaaatgggtgggggtatcttaggtagcacttatgataagtaa

SEQ ID NO: 309451 - DNA, 1158 bp, Proteus mirabilis
gtgctattaggtaattttaagagtatagtagacaatctttctgcctgtttagatattatagtttttattatggaatcaacgctttctgctcaaaatatacgccaactccttgccaatgaaacaccaattattgatgttcgtgcgccaatagaattcaatcaaggagcgatgcccaacgcaataaatctacctttaatgaataatgaagagcgtgcggctgtagggacttgttacaaacaacatggctctcaaaaagcggtagagttggggcatcaattagttaaaggcgagataaaagcacatcgtgttgctgcttggcgcgaggcttgcgagcgttttccttccggatttatttgctgtgctcgtggcggtatgcgttcacacattgttcaaaaatggttagctgaaataggcatcgattatcctttaattgaaggtggatataaagcgttaagacaagcgacgatcgaaatgaccaatgagctagtacaacgccctattatcttaattggtggttgtacaggtaatggtaaaacaaccttagtacgctctttaccagagggaattgatttagaaggattcgctcatcatcgaggctcctcatttggtcgcactgttgaggctcagtttgctcaagcgactttcgaaaactaccttgctgtcgatatgttaaaaaaatccccctatcattcgcgctgggtactcgaagacgaaggccgtgctattggtgctaatggtttaccggaaagcttgcgtatacaaatggcaacagcccatttggttgtggtgaatgatccatttgagcggcgtatggcaagactcaaagaagaatattttgatcgtatgactcatgactttattgaagcgtatggtgaagaaaaaggttggcaagaatacagtgattatttgcatcatggattgtatgctattcgacgtcgattaggtgctcaaagagccgcggagttaacccaattacttgataatgctttagccgcacaaaaaataagtgcgaatacagaagtgcatttttcatggttatcgcctttactaaaagaatattacgatcctatgtatcgttaccagttaagtaaaaaacaagataaaattatctatacgggtagctatgaagaagttgaacaatggtttgctaaccattaa

SEQ ID NO: 309452 - DNA, 900 bp, Proteus mirabilis
atgagctatgcaaataaagatttttataaaaatgcagtagaagaggatgcggatacaatagaaaagagaaaggacgcgtcgaaaaagaaggaagataaactaaaggcattacaaaaggaaaaaattaaagctaaaacagatgctcttgaagcagattcacttaccggatctcggccttacgaaccaacgttatgtaaaacacaattaaaagaagctgccgaagaatttagggctgattattatgaacaacgcagaacagtacgaaactggaagcaattttctgttgataatttattatctaatatgatgtgtttattgaataccgatgatgagaaaatagaatatctgcgaatgaaaaaaagtggtgatgatatttatcggcaaggaaaaggcttccctttatttttagaaaaagaccatttagaacccgatggtcaattaacagctgaactttttgatgaacagctacacgattctcgtgcttggtttatgcatgatacattacaatcccgtgagccgtgggcaagttattttagctatagaatgatttatgcgggaagtgagaccaataaatcgctatctgtggtagcagccgcagggcaactgatcggtattgccacttttatcggcggtataggttatgttattaaacaaaaaaacattaaaaatgcattaggcgctttagcaggaacaataggtgcaatgtcaattggatacgaaatcgtcaatgcaacaaccggcctcacgttacccatagatccgaccgatgtacaaccaaccaaagatacaggccccattcaggaaatggccaaagcacaagcgatgattaaccaaacccaaggtgtgattgagagtttatctcagataattgaaccacaaaaaatactacgactttcttaa

SEQ ID NO: 309453 - DNA, 921 bp, Proteus mirabilis
atggtaatgtcgcataaaccaacggttttatctacctcagggcgtagcgagcacgcgttgcgtcctgggtatcatttagcgcaatgggaaatccaacagctgataggtgaaggtggatttagtctggtttatcaagcaattgataaacatactcatcaaaaagtggcgataaaagaatattttccctcatcagtgtcgatacgaaattctcaacaagaaattattgttcgtgatgatattttattaaccacttttaatactggaaaggcttgttttcatcaagaagcggagatccttcggaatctttcacatcctaatgttcctcactatattgattatataaataaaaataacactgtttatattattaccacttattttgaaggaataaatttaaaacaatggtatcaacaaactaataagaggttgagtcaagattggctgatccgttttctgctttctttgctggagattgttcgcgatgtccataaagagggatatctacatctagatatttcatgggataatattcaactacaaaatagatatagtgctatcttacttgattttggctcagcatgttcattattatcgagagaggaaaaaaatgcgattatactaaaaccaggtttttcaccgccagagctttattatcccgaaggaataacaaaaatagggacttggtctgatatttattctattggtgcattggcgtatgctttgattacagggaaaatacctccagtaagtttagtccgtacgatagatgataattatcaacctttagcatcgacaatgcttgagggatattcggccgattttttatcactgattgatcttgcactttctcttaaggtagaagtgcgtcctcaaactgttgagatattaatacaacagcttcatagagtacttaaatattaa

SEQ ID NO: 309454 - DNA, 2646 bp, Proteus mirabilis
atgagtgaaatcagccgcagtgttttgtttaacaagttaaatacgcaattgctgaccagtttagaaaatgctaccgctttttgtaaattacgcggaaatccttatgttgaattagctcactgggtgcatcagttaatgcaaacaacagagggagattggccacgtattatcgattatttcaatattgatagtgtggtacttaaaaatgacattattactgcaatagacagacttccccatggtgctagctctatcagtgatttatctgaacatattgataatgccgttgaacgcgcttggacttattgttcattaacattaggtggagacaaaattcgcggtggtcacttattagtaagcttacttaacacccccaatttatatcatcaaatgttagatatctcttcttgtttctcacaaatcaatcgtgacattctggtgagtaattttaatcaaattcttaatgatagtgatgatgaaacattcgcgttttacgaaacgtcatcggcgaataattatcaaggccaaagtgcccttgaacaatacggtagtaatttaaccgaaaaagcgcgtcgtcatgaacttgatcccgtagtgggtcgcgatgaagaaattcgccaacttatcgacatattaatgcgccgccggcaaaacaaccccttgttaattggtgatgcgggggtgggtaaaacagcgattgttgagggattagcctctcgtattgccacaggagaagtgcctcctaaattgcgagatgtgactttatatctccttgatattggtatgttacaagctggagctagtgcgaaaggtgagtttgaacagcgtttacgtaccattgttgatgaagttcaagcaagtactacgccaatcattttatttgtcgatgagatccatatgcttatcggtgctggtggaagccaaggtacgggcgatgccgccaatttgatgaaacctgcattagcgcgcggtcaattacgtactattggtgcaacaacatggtctgaatataaaaaatatatagaaaaagatcctgctttaacacgccgttttcaggttgttaaagttcttgagccgaatgaaaacaaagcaattattatgctacggcatttacgccagaccttggaacaacatcaccaagtcattcttcttgatgaggctattgaagccgctgttcatctttctcatcgttatattcaagacaggcaactgccagataaagcgattagccttatggatacggcttgctcacgatgtgctattagccaacattcagagccagcaaaagtagaaaattgccgtcgtcaaattgaagcacttgaaattgaacgtgatattgctaaacgtgaaatacgtattggcactatgaatagtgaaagacttgaaaaaatagaagcacaaatagtgattgctcaacaacgtttagaaacattgatttcacgctggcaggctgaattagaaatagtcaaagagatcattgaattacgcagtcaaatttgtcagttaggccaacaagaagaaaatggcgttgaggaggatagagacagtgaagaattgacagtattgggtttacgtttagatgaattacagcaacaactgacagctttacaacaaggagagccgttaattttcccaactgtagatgccaataccgttgcgtcagtgatttctgattggacagggatcccattagggcgaatggttcaaagtgagattgatgcggtattaggtttagctgatacattaaatcaacgtattattgggcaacgatatagcttagagcagataattaagcgtttaataacatctcgtgcttcattagataaccctaataaaccgattggcgtatttatgttatgcggtccatcgggagtaggtaaaacagaaacggctcacgcattagcagaaagtttctatggcggtaaagataatgtcatcacgattaatatgagtgaatttcaagaatcacatacggtttctacattaaaaggcgcgcctccgggatacgtaggttatggggaagggggaatattaacagaagcagtacgccgtcatccttatagtgttatcttgcttgatgaaatagaaaaagcacaccctgacgttcatgaaatattctaccaagtctttgataaaggttggatggaagatggtgagggtttacaaattgactttcgtaataccattattattttaacctcgaatgtcgggactgacattattagctcgctctgtgctgatcctgatttatgccctgatccagagcaattaacaacagcacttagagcgccactattgcaagtttttcccgcggcacttcttgggcgattaacggtgatcccatattatccattaagtgatgtagtgctaggtgatattgtaaaattacaacttaatcgagtttgccaacggctacaagaaaaccatcacatgacttgttcctttaacgacagagtggtgcaacaaatcgttaatcgttgtactgaagttgaatcagggggacgcctaattgataccatcattactaatacattattacctcagatcagccatcgcttattaattgcaagcaaaacgctccatcaataccgccatcttgatattgattatatcgatcaagattttgcctatgattttcaggtatag

SEQ ID NO: 309455 - DNA, 1020 bp, Proteus mirabilis
atgagtgtaaagaaaccctctcgtttagccgacgatttttggatcttacttaaaaatcacccttatgaattcgatttattccaagtgcttaggttattggatgcgcaagggggagctacgtggccattaggaaaagctccgcacccttatcaagagcctattcgtttagggcaacaaccttcgctttcgtttgcaccctcaacattggctagtgtcgaagctaaaaaagagtgtgatttacatgagttgatgatttatagctttggtcttttaggtccgaatggacccatgcctttgcattttactgaatatgtacgagaacggtatttgcaccatcaagatcgtactttcgttgattttcttaatttatttcatcaccgtttaatcttactgttttatcgagcctgggcggatagccaacctacagtctctcttgatagagaagataatcaagcctttagtcactatatttctagtttgattggtatgggaagtgataaggggcttattccccgtgatgctaaatgttatatggcgggtcacttcgttcgacaacattatgatgctgaaggattagcaaaaattctttctcactattttcagctgcctgttcaaataatcgaaaatatccccgtttggttaccgattgaaacagaacaacaaactcggctctctatggagcaatcggcaacgttaggacaaaactccttcttaggattaatgactcgcgatatacaacataaatttcgtatcgaattaggaccaatgacgttatcacagtaccaactctttttacccggaaataaatacgcctcagaattacgcgattgggttcgacattatgttggtattgaatatttgtgggatgtgcgtttgatccttcataaagaagaagtgactcgaacccaattagggggaatgcatcgattaggattgaatagctggttacgtgatgcagacaatggtgaagatgccaatgacctcttttttatgcccgaaaattttgcatctgaatattag

SEQ ID NO: 309456 - DNA, 1896 bp, Proteus mirabilis
atgaataataagcttcttgaatactacaatcgtgaattgatttacttgcgtgagatgggcgctgaatttgctaaatcttatccgaaagtcgcaggacgattgggtatgcaaggtatagatattaatgatccctatgttgagagattattggaaggttttgcgtttttaacttcacggatccaattaaagatggatgcggaatttcctaaattttcacagcgtatccttgaagttctttaccctaattatcttgcgccaattccttctatgtcaattgccgaacttcatcctgatggacgaaaagggaatattaatagtggttttctcgttcctaagggaactcttatgacgtgtgatgtatttaaaaagaaagggatcacttgtaaatatagtacagcacatgatgtgatgctttatcctctcaatataagccatgtttcattagaagcggcacctagtgacatcatagagttcgaaaggattaatcgagaaaagagtagccatgctttacgtattcgcttgcaacttaatgataataccaaattacaagatttaaccctcgataagctgacattctatcttagtggctctgatcttgaagcaacacaactgcttgagcttttaatgcaacatacgacaggtattttttgtcaaccgaccaataatgctaccttacgttactatattcctaaagataaactagtgcatgaagggtttgagcctgaacaagcgttattgccgaatgatttacgtaattttgatggttatcgactattacaagaatattttgctttcccagctcgctttctcttttttagtatttcaggattatctcgtctatttaatggcgaaaaattacaaaaaagcctaataaatgaaaagacgaatgagtttgaaattatccttttgctagataagacggtacctgagttagccaaacgaattgatcgtagccatttatctttatattgcacaccagttgttaatttatttcctaaggttgctgagcgtattacgctcaataataaaaccaatgattatcatcttattgtcgataatattcagccactagattatgaagttttctctattaaacgtttgtggggaacgcaaaaagataataaatatgaacaagaatttcgccctttttattgtacccaaggacgagatagccaaaattatggcgcttatttttcgcaatctcgtctgccccgtattccatcaagtacgagtaaagctcagggctcacggagtaattatcatggctcagaaatttttctctctttagtcgatgcgaacaatacaccttggcgtcatgatcttgaatatattactgctgaagtattagtgacaaatcgtgatttaccgttattacttcaaaagcaggagttttatgcttttaccgtttctgactctattcctttgcatcaaataacgttaaaaaagactccctctttaccaagaggtgctttagaagaagatcgtatatcttggggattgattagccaattacagcttgattatctcagtttaatggaaactgataacaccaattgttccagtaaactcagagagtttttaacgttatatgcaaaattagaagagccacatatattaaaagagataagtggtgtacaaaattgtcaattaacgccgacttatcaacgaagtccctgtcctggtcctattgcttttgctcgagggatcaatattaatcttatgattgatgagttggctttttctggtggaacaccctatttattaggttgtgtactagaacgtctttttagtcgtatggtttccatgaattcgtttgtagcaacaacattgagtacccctcagcgaggtaagattgctcaatggcctgctcgagtgggtaggaaaacattaatatga

SEQ ID NO: 309457 - DNA, 372 bp, Proteus mirabilis
ttgcgtgatttacagtggttatttaattgtacaaataatgaatcacttcttgagctagataattacccagaagttcgacgttcgacattgaattatggtattgccactttagcgggtcaaagaatgtcagaaatagagtggtctgatatagaaaaaaatcttactcaagcgatcattaattttgagccaagaattattcctgatcagctagttttgcagtgtatttctaataaagatgatctgaatttacacaatgtgttatccattcaaatccatggttttttatggtattcgccttacccgttagaattctgttttcgttccgatgtggacttggaaaatggttattttgatctcaaagatatagggtaa

SEQ ID NO: 309458 - DNA, 171 bp, Proteus mirabilis
atgattaaccattacgatacgacaggaaggatgccgattaaaaaagaaagagataccgtttctcgtagcagaacgttgccaactctatttgatagattaacggatttagaaccgaggaaaaaacatgaagtacaaagaaatcaaagtatttcacatcgcgctcttaaataa

SEQ ID NO: 309459 - DNA, 804 bp, Proteus mirabilis
ttgaaatcacttttatcagttctggaaaatggctctttattaaccgctttaagtgaggcagaagctcgggttaaagccgcgccaattgatgcggataaacgtgcatattgggcacagcttctattactttatggtgattgggacagggcacaatcacagctcaaagcgtgggaagtcttgacgccaatagcacgaccaatcactcagcagttattagcaactgtagaggctgaacgttatcgagaagcagttttttgtggaaaagcaaaaccgcattttatggttcagccacaacaatggctattgacattagcacaagcgttaacactctcgggtgaacaagcatatcagcaacgaaatgatgcttatagactcgctgaggaaagtgctggaactattattgatgagtcaagtgaatcacataactttatctggctggcagatgcggataatcgtctgggacctgtatgtgagttattaatagataatgagtattactgggtgccgttcgataaaattaaatcgattacctttcaaaaaaccatgaatatcgtacatttggtctggcgacattcgttggtcaagttacattcaggacaacaaaaagtttgtcaaattcccgctcgttatccccttacgcaagcaagcgaagagatgcaccgtttaggacgctgtacgcagtggagcctgttagatggtgatggtcattacgcggggcaagggcaaaagtctttgataacagaagataatgaataccctttattaacattacatcaagtggattttttacgggatgaacattaa

SEQ ID NO: 309460 - DNA, 801 bp, Proteus mirabilis
atggagctctgtttttttgcttgttcacatcaaggtgctcgcccacaaaaccaagataaagtagcacactatatcggtgataattcagcctgttttattctatgtgatggggttgcaggacataaaggtggtgaaatagcagcatcgctaagttgtcagtttctattagataaaatctccaatgatgagccttattcgccagagaatgtgccgttattagtaaaacaactccagcaatatattcagcaagcacagcaaaaaaattatgcatatagacaaatgcagacgacattagtgacgctttttattgatagaaaaacacagcaagcgcattgggttcatgtcggagatagtcgactttatctctttcgtcatggctatcttagccaagtcacttcagaccacagcttaacgcaaaaaatgaaagagatgggttatcaggtgcatgatattcctgataatttattaatgagcgctttaggcagtcaaaaacaagatatgacttatagcgctatcttacctctttatgacggtgatgcttttttattatgcagtgatggtttttggaaacgtcatcacttagcacttttagagcatacgttgcggcttgcacaaactcctgaggattggttacttcttatcaatcacttatctcaacatcaaccacaagatgataactatagtgcaatcgccgtatgggtaggatcaccgcaagagtctacgttattacaaacacttcccttggatgaaaaagttatctgtccagccgttattaacccatttattggagataaacattga

SEQ ID NO: 309461 - DNA, 1812 bp, Proteus mirabilis
atgcggctaataataatcagaactaaagataatgaaacgttatctcaggaccattgcgatttccttgcgccaaaaggaacaataggtcgaggcgctgataatacattagtgctacctgacgcttcccgtgcaatctctcgtttacaggcaacggtagatattgctactacaggtgaggcttttatcaccagtcataaaagtacgcttccacttttattgaatggtaatcacttgccttatgataatcagcatagcttgatggagggcgatattcttactgttggtgactaccaactcaaagtgacctttcaatccaacaccggccttgatacacccttaccaaaggaagacgttagtaagataacacccgtttgccatattaatgatgcgatatgggatgaattagaagctgaatttccatcatctttgcctgagatagcacctgaaataaataatgatcctacccaccctctgtttactcctccttcgggatcaaccacattaaaagatccacttgcaatgtcaaaagaaacaagcctcgaagatctttatcaacagcatgatgtgcctgaaagtttatttgcacaagaagatgtcttttctcagccaacaataatgaaagatacgacgcctagtgtattacaagcaccacaagatctctctttatcatcctcgtcttcaatagagaaaaaaacggctactgaaacagttatcaatgcaacatcaccggctgaaactcgccatcattgtgcttcagaatggtctattagtagccctcttctcgatgaatatagtgatgaaaatgactttattggtgttgatgatttatttataaataatgcggttccattaacaccagcgcccgataatctagcgatattagcatcagatgaaacgccatggtcaaaacagcgagcacaacgtcagcccaactcagtactatcatctgatcttaacgagatgatagataacccactatttgaacaggagcacaatcttgttcacaacgtagagggatcattgacggatgacgaacctttcgcatttgaagaaacgctttttcaaataacgtcagaaaaaaaaccatttcgcgaaaaaacagcggatacattactgacgaaacaagcaagaatggggatagatcccgtcgaacatcaaccattaaaaacccctaaatcaacgtcacaagcacaattaaatggcgaactttatgaggcttttattgctggattaggcttggatgacattccaaatcgccccgatttctcacccgaacaactttatcaggccggaaaattattaagcctcttttcgcaaggtgcagtggcattattgtcgtctcgtcatctgctaaaacaaggtattaatgcagaaatgaccatgattttagaggaaggaaataatccttttaaattattgccttctggtaaaacggcacttatgcaactttttagtacgccaatgccgggttttatggaaccagaaggtgccgttcgtgatgcccttatcgatctacaagcgcatcaactcggtatgattgcaggtgtgcgcgctatcataacagcactgctacaaaaattttcacccgaagaactggaaaagcaggctgtagaacaagggtatctaaaaagtaagaaatctttctttaggtctcgtaaaaccgctttatggcatgttctggaaacagaacataaaaaaatggtagaagcggcagataatgatttttatacgttatttagtcatgcctttcttcctgcgtatgatctcgaggttcggcaatatcgagcaacgcaaaagagtaaggagtcatga

SEQ ID NO: 309462 - DNA, 483 bp, Proteus mirabilis
atggcaattgacatgtttatgaaagttgatggtgcgaacggtgaatctaaagattctaaccataaaggttggactgatattgtgtcgttctcttggggcgctgctcagccaggcaatatgggcgttggtggtggtggtggtacaggtaaagtttgcttcaatgacttgcatgttaaagcattaattgacaaatcaaccccggcgttactgaaacattgtgcgagtggtaaacatttagccaaagttgaattatctatttgtaaagccggtggtggacaaatggaatacgccaaaatcaccttggacgatgtgttagtgaccaatatccagtatatcggtgcggataacgatgacaccgttggtgtgctttattctttccaagcatccaaagttcagcagcagtattgggaacaaactgatcaaggtggtaaaggtgctgaaagcagttctggctgggatattaagcaaaactgcgaagcttaa

SEQ ID NO: 309463 - DNA, 1497 bp, Proteus mirabilis
atgagtttacaatctcaagtacaacctaccaaagcagccacattagatagccataatgagttcaatgcgttactgcaaaaagagtttcgaccaagaacagaacaagctaaaaaagcggtagaaaatgccgttaagactttggcacagcaagctttagaaaacacagttactgtatctgaagatgcttatagaacgatccaagacttgattgctgaaatcgataataagctttctcagcaaattaataaaattatccatcatgaagaattccaacaaattgaaagtgcgtggcatggactgaattatcttgtgaataatactgaaacggatgagatgttgaagatccgttttatgagtatttcgaagaaagagttaggtcggtcattgaaacgttataaaggtgtcggttgggatcaaagtccactctttaaacgtatttacgaacaagaatatggacaatttggtggtgaaccctttgggtgtttgattggtgactattattttgatcatagtcctcaagatgttgaattattaggtgaaatgtcaaaaataagtgcggcttctcactgcccatttattaccggagcatcaccaaatgtgatgcaaatgcaatcttggcaagaattaggtaatcctcgtgatttagtcaagatattccaaaataccgaatatgcggcttggcgtagtctgcgagagtctgaggattctcgttatatcgggcttgctatgcctcgttttttatcccgcttaccttacggtattaaaacaaatccagtggatgagtttaattttgaagaaagtatcgatagtgctaatcatcaaaattatacctgggcgaatgcggcttatgctatggcagccaacattaatcgttcatttaaagaatatggttggtgtactgctattcgtggcgtcgaatctggaggggctgtagcgaatctaccttgtcatactttcccaagtgatgatggtggtgtagatatgaagtgcccaacggaaattgctattagtgataggcgcgaagctgaattagcctctaacggttttatgccacttatccaccgaaaaaactctgattttgctgcttttatcggggcacaatcactgcaaaaacctgagaaatattacgatcccgatgcaacggctaatgctcagttggctgctcgtcttccttatctttttgcctgctgtcgatttgcacattatttgaaatgtattgtgcgcgacaaaatcggttcgtttcgtgaacgcgatgaaatggagctgtggctgaataactggattatgaattatgtcgatggtgatccggcgaactcttcacaagaaaccaaggcgagaaaaccattggctgcggcggatgttcaagtgcaagagattgaagactctccggggtattactccgctaagtttttcttacgtcctcattatcaattagaaggtttaactgtttctttacgcctagtttcaaaacttccgtcattaaaacaaggcgaataa

SEQ ID NO: 309464 - DNA, 537 bp, Proteus mirabilis
atggcaaatatgaaatctcatagcgggcaaaaatttatcgcccgtaaccgagcccctcgagtgcagattgaatatgatgttgaaatttatggctcagaacgaaaaattcaattgcctttcgttatgggtgtaatgtccgatttaatcggaacacctctcgaaccacagcccagtcttgaagagcgtaaatttctagaaatagacattgataattttgatgatcgcatgaagtcattaaaaccccgcgttgcctttcaagtagaaaataccttgaatcaagaaggtaacttaaatgtggaattagtctttgaaagtatggatgatttttctcccgcaagtatcgctcgtaaagttgaacctttaaaagtgctattagatgctcgtactcaactgtcgaatttactttcttatatggacggtaaaagtggtgcagaagagttaattgctcaagtactcagtaacccagagttgctgcaatcattaactcaaactccaaagccaactagtcaagacgttcaaccaggatcggaggagtaa

SEQ ID NO: 309465 - DNA, 1029 bp, Proteus mirabilis
atgaccattggaacactgttaacgcctatatctccagaaaacccttgtggtgataatttggagtatgacgcagagtttatgaaattagagcagtttactgaaggtaaagcagaacagcagtttggcgatacaattattcctgctgaattacctgattgggccgctgtagagcgtatagcatctaatttattatcacgcacaaaagatttacgggtgatgtcatatctcactttagcttggacacaactgcgtggattacaaggatatttagatggtttacaacttatttattctgctattgaacaatactggcctcagttataccccttattaaatgaagagggtgaaaatgatcctatttatcgaattaacgcacttgccttattaggtgataacacaccgctgacttatgcggtgcgctctgcaccttttatcaaaggaagtaatagtgagttatcactaagagatgcttgttcattgttggatggcagtaaacaagaattagagcactttcctgatggtttacctcgtttaaggagtgaattaggtaatccactacaagaaaacgttcaattaatcgcgcctattacagacacactggttaaattgcgacatgccattgtgttgctattagacgaaagtgcgttacctgaaatggcgttattgttagatggttttgacattctcagtaaagccattgtgcaggctaatagtatcaccgatgtcgattcggagccggaatgtattttagatcctctcgccacacctttaagtgatgatgctatttcgttaacaccaatagagtttggctatgggaaagttcaatctcgcgctgatgcaatgcatttattagaaaaagtgaaagagtactttgtgcagtatgaaccaagccatcccgcccctttaatgatcgaccgactacaaaagcttattaatcttaattttatgcaaattatgcaggatttggcgccagatagtctgcgtcaattagaaacgattttaggaacacaagagactgaagaaaaatag

SEQ ID NO: 309466 - DNA, 3630 bp, Proteus mirabilis
atgtttaagtcattgatatctatagtaagtagccgtttcctttgggggatggttggcatcagtactatttcactcattatttggtttattagtccttttatttctattggtggttatcgtccttttgagtcacctgttaatcgagtaatagcaattgttgttatttgggtggtttggttattgataaaactcattgctatagcttggcgtgcacgattttctgccaaaaaagcagagagtaaagtacaggagtcagtccctaaagaaaaaacgagtgatctcaaactagcggaacgctttgaagaagcaacaagtttgctaaaaaaagcgtatatcaatcagaaaagtttacgatctctacctcattggctatggtacttcaataaacattatatttatcaacaaccttggtatgttctcctcggggctaaaggggcaggaaaaacaacagccttagtcaactcaggtatcccttttccgcttgtcgatcgctttggtaaaacgatgttgaaaaacattgttagcaccagaaattgtgactggtggtttgctgacaatgccgtgttacttgatactgcagggcattattcaatgccaaataatcaggaagaaaatagtaattatgaatggaaaggttttctaggtttattaaaaaaatatcgccccagacaaccgataaatggtgccattgttactattagtttggctgatttaatgaatcgcactcctgaagagtgtttagaacaagcacaggcagaacataagcgtttagttgaactaagagactctcttaaaatagattttcctatatacgtcatgatcacaaaagtggatctattacgtgggtttctggcttattttgagaagtatagtgctcaacaacgtgagcaaatatgggggttcacttttagtcgagaggacgccaagaaagcagatttttcttttatttcagcatatgagaaaaactttgagcaacttttacaacgcttaaataaaggacttgctgatacgatgctaaatgaggaagacccacttaaatgtggtgatatctacctctttccacaagcattttcacgtattcgcaatgtgttaggtaactatttaaacgcactttttgccacatcccactttgaaacggcgtttattcctcgggggatctattttactagtggtgcccaacatactttatctcaagacaatataacgccagcactgagtgatccacttaatgccgcaacggatattgatgagaaaggtaacaccgctgaagaaaataatagcgcatcaagcaaccgcgctaaaaataaaggctattttattaaagatgccttagaaaaagtgatttttcgtgaatctgctttagcaacgaataatcgctggtggatttactgtagtacgacgttacattggataggatatttattattagggcttcttttctttagtgctgcactctttttatattcaagttatagcaataataaacagtacctaaatgaggttgatagccatattccgtctatagaacgtcaatcacaaggaatggagctttataataaccaaaacatttttacgttattaccttatctcgatagtttgagcgcgcttgctgagagtaagcatttttctctttcgcatcccccgatgacttatcgtttaggactctaccgaggcgatcaactcgaaaccgcgagtgatgcgttatatcaaaaagcattaaaaaatattctattgccttatgtcgcttggcaagttaccgcgatattacaaaatgatatggggggcgatgcggattttagttttgaagcccttaaagcctatcgaatgctttatgagccagagcactatgatggtaagttcttacgcgcatggttaatctttaacttacaacgttcatcgacaccaagtaccagtaaattggcatggcgagctcttgataatcatcttggtagacttcttgatgaacaagtacaaacttcaccttatttacgtgatgagcaattaaaacgttctgcacaacaacgtttaaataaaacaccgatatctgtacgaatttatggacgattaaaacgtattcttctaaaagaagcctcactcaagccgctttccttaaccgatcttgcgggtacacaagcagagcttgtttttcaaagtaaaagtggtcaattttcatcggaaggcattcctggactttatacaccaaaaggttattggttggcgtttaataaacgcattaatgatattacccaaactttgctaaatgaagatggttgggtgttagaaatcgatgaaacagcattaacaagagaaaatcgtatagatctgcaaaaaacggtgcgactattgtatatgcaggatttcatcacagtatgggatgggtttcttaatgatatagaactgaaaaatatatcaagtttaaaagaacgtattaatactgcccgtatcctctctgcagaaaattccccactgcgcaattttctgattaatgttgtaaataatgtacgtcttactgatgaggctgaacgtcaagataatagtattaccttgagtcattcacaaaagaatgcaaccgatccagaaccctttttaaatagcttgttttccaatcaacaacctaatgaaaatgacactggtgatatttctacccagcctgagcaagtggttttaaaccattattcaccaattattgagttgactaaaagtagtggcgagaaagagtcagaaagtattgcttttgactcagtacttaagcaagccgatacactatacaactatttattagcggttcaaacggcgtcaaatagcggtatgcaacccccttctggcgaagtgattttgtcattgcaagcagaagcaggtcgtttacctcaacctttcaaaaaaatgatcctctcattggctaatggtgcaagtcgtgactctcaagtcaaagaattagaggcgctacagaaaaatgttgaatttgaagtaagaaatttttgccatcaagcgatagaagggcgttacccattagtgcgtgatgcgcaaaaagagatcaccagtcaagatttctctcagatgtttgcccctaataccggcattatggatagttttttctataaaaatttgaatggaaaagtggatacatcgcgctcaacttggcgtttttatcctggtgttgatggaagcagttcgttatttagcaagtcgaatatattacgctcttttcaacaagcacggatcatcagagatacgtggtttagtggtcaaagtcaaaagccttattacacccttgcgataaggcctattagcatggataacgacattcttaatatgatgctggacttagatggacaagtctttcggtacagccatggtccacttgtgcctttaattgtcagttggccaggtcctaataacaccaatcaaattacgctacagcttaatctcgcaaatggcaaaacagcaacattagtgacttctggtgattgggcgctacaccgtttaatggataaagcaacgatagaaacacataacgcctctctcgcgcaaatcgcgactttcaatattgatggacaccgtgtggtgatggaattcacacctaatagtgtcagaaatccgtttcagccagtttcatttcgttgcccataa

SEQ ID NO: 309467 - DNA, 1272 bp, Proteus mirabilis
atgcagaatgatttttctaaaacggcaactgaacaagaattagatccccaaaaaaacaccaaactggttgacaatcctttagtgattgccgctaacccgttactgaatatgatccaggtgatacgtagtcaagtaacgcaacaaaatccagtgaaattacgtcaaatgcttattgatgatattcgccgttttgaagtgcgtggtcagcaagaaggattatcttacgatgttttaatcggtgctcgttattgtttatgtaccactttagatgaagctgtcatgtctacgccctgggggaaaaataccgtttggtcgacaaatggtttgttagtgaccttccacaatgaagggtgggggggagaaaaattcttccaattactggcgaggctatcgaaacaacctaagaaaaatattttattactagaactgattaattattgtttattattaggttttgaaggtcgttatcatattatcgacaatggctactctcagctagaaacgttaaagcaacgtcttgctcaaattattcactcagtgcgcggtagttactctatcgcgctatctccgcatcctatcgacaagccagtagagcagaaaagttggcgccctatgttgccattatgggtctgcgctatatttttaggtcttctattatgtttatggtttattacattaaattggcgattaaccgaagagactacccccgttgtttcgtcaatttatcaaatagatttaccgtcagttctgtctgaagatatctctgtccccctcgcattttcgcccgctgttgcaaaaatgaaaaaccaattacaaagagatattgttgaaaataatttaagtatccgccatggctcacccaatagcatatccattattttgacaggggatggattattcgattctgcatcaacgacgataaatgaaaattatcaatccactttaatgcgtattgctcaggcccttaatcatattaatggaaccatcaccgtgagtggtcataccgataatgaccgtatacataatgcgcgtttcccttctaattatgagttgtcgtttgaacgagcggatgcagtaggaacggtattgaaaaaatatttacaacaaccaagccgggtcaccatcgaaggtaaaggtgctttagttcccattgttccgaacactagccttgataacaaagcattaaatcgccgggttgaaattactgtacagcagatgcccaatactcaactgcccaccgttattcgcgcatctcaagtgggggataaataa

SEQ ID NO: 309468 - DNA, 1338 bp, Proteus mirabilis
atgaaacaagcacataaagtcgtttggacggaaggtatgtttttacgtcctcaccattttcaacaatcagaaaactatcttgaacaatatatacgctcttggggaatggctcataatgaatattattggggattcacttctttagatattgatgaaaatgcattacggcaaggaaatatagctttaaatgcagcgacaggtattttacccgatggcagttttttttctttttatggtgccaacgaagcacctctacctttaaacattcccgagggtaaaaatattacggatattgtactggctttacctatttatcgtgaaggtaaacatgaagtcagtttccatgcaacgcctgatccacaaacgcgctatcttgcttatgaaaaagaaattgaagatatgaataccattacggtaggaagtgcggaactacagttaggtaagttacaactaaaactgttacccaaagaagaagttacctctgactggtgtgcaattggcgtgttaaagctattagaaaagtcagcagatggaagtttgaaaatagatacaaattatatcccaccgatgcttgtcagtcaggcaaatacacgattaagtgcttttgtgatagatattcttgggctattacaacaacgtagtcaacagttggggcaacgccttaatcaaagtggtagaggagggatctctgaaacatcagattttatgatgttgcaactcattaaccgctatatcgggatcactcatcattttcataaaagtaaacaactgcatccagaacgtatttttgcagattggctttctcttgcctgtgaattgatgacattttcgccctctcgcgctgtaggcaaattattaccaacttacgatcatgataacttggcacagtcttttgacgcattaatgaaatggttacgccaaggtttatccatcgtttttgaagaaaatgcgattcaattacccttggttgaacgttctcatggtctgcatattgcaacggttccttatgctgaaatgcttaatgaatttggtttcgttattgccgtacatgctgatgtacctaccgatattcttcgttcccgttttcctgctcaactcaaaatagcccctgtaaacagtattcgagatcttgtccagctacagctaccgggtattggattgaattgcatgtctgtggcacctcgccaattaccttatcacgcaggttatacctattttgagttagaaaatagcggggatctatggaagaaaatgcgccaatccggcgcttttgcattacatctcgcaggagacttccctgggttaaatatggagttttgggctattcgccatcggtaa

SEQ ID NO: 309469 - DNA, 507 bp, Proteus mirabilis
atggtaagtctattcctttttggatgttctggaagtggaggggataataaagaaatacaaacgacgataactaaatataatctttctatttctgctacttcggatgcaaatattaattctattggtgatccagcgccattaaaaataaatatttttaatttatcatctgagaatgaatttatgaattcagatttcttcaccttacatcataatccgaataatgtattaggaagggatttgttaagtagtaagcaagtttatttattaccaggaagtgaacctattaatgtagtagggcaagttactgaggaatatccttatattggtatttcaggtgagtttcaaaatttaaataatagaacttggcggacaattttttctattaagcctattgaaaaaataccattttataaattttggcttacatcaccatcacaaaaagaaattaatatcgtcattgatagtcagggaatatatatcgtagaagataacgatagtaaaaaataa

SEQ ID NO: 309470 - DNA, 315 bp, Proteus mirabilis
atgaacttttctcattttaataaggtagtgtttgctgcctctcttcttgctactggcttttcttatgcggatagcgatcgccctctgctctctttaagtgtaagccaatctggcggcactgcgttaaatagcgaaggttcgttagatacccgtactcctgcaagccaatcgcgcgtattacctatttggggtgatgaagctcgcgcccgtggttatgatttaccagagccatttggtgcaagctatagctatatgaatctacgtcaagatattattgtggataaaattggtttattatgcccaaatacccaataa

SEQ ID NO: 309471 - DNA, 270 bp, Proteus mirabilis
atgcctgcagaaacggataatattgggttatctcaggatatgcctgtttatcgtggtgttattcaaattaacgtggttggcaaagtagggggtggagactcgcaactctcaacgattgttgatgatgttaaagccagattggagaacggattaacattaggggagggagtctacattaacggagagcctagccagtttccaccaatttcagatgaaacaaattacaccattcctattcgtgcatcctatcgatgtaacgtaatccgataa

SEQ ID NO: 309472 - DNA, 390 bp, Proteus mirabilis
atggcctataacattcctaatgggtcgcgtgtttacgtcgcaagtaaatacgatgacgaaattaaaattactgaggcgaccaatgccgaagaagctgtgctgacagttgatgacgtgggcgacattgcaaaaggcgatattgtgcatgtgacatctggatggaagaaggcgtctggcgcgttccgtgttgcaagtgttattgaatctaaagtcaccctagagggtgtagataccagtgataaaaacgtattccctgtaggcggcggtacaggaacattaaagaaagcactatcatgggaagtcatgccacaggtaatgacactgtctaccgaaggtggtgaacagcaaactcaagaggtgatgagcaggcagaaactatcgatactataa

SEQ ID NO: 309473 - DNA, 306 bp, Proteus mirabilis
atgcctaaatttacactcgtcccaaatccaaccttcaaagctaacgttaaaattcctgttgctggcaaagaaaagccagaaatagttacattcacatttaaacatcactcagtaagtgagcttgatggaatgcgagaaaaaccgatttctgagttctttgagcagattattgctgactgggcgatcgaagaaccatataacaaagaaaatttaaacatattgttagataactacccttcagcctcccgtgctatttcatcaacgtattacaacgagctgctaggtaaccgcgaaaaaaactcctaa

SEQ ID NO: 309474 - DNA, 276 bp, Proteus mirabilis
atgagctcaaaagaatcggctgagttcaagcgtgtttttggctttccgcctgacgttgatgatgttgaggtatggcctgatgtttggggatcgtatcaggtattttcggctatgaatacaccgtggcgtgtaggtatgaatggcatcactggcttggattacaacccattaaaccaaataatggacttactcaacatcaaagatagagcgaccgtttttagtgatctccgcattatggaagctaaggcgttagaggtgatgcataagagaccatag

SEQ ID NO: 309475 - DNA, 207 bp, Proteus mirabilis
atgccatccaaaaaatacctacttgtatatgaagcgttcgacaatacaaatgtattcttattaaaaggaaatgctgctatagaaatagaatccggaaaaggtattgaggaaatattgaatacctttaatgaagttgcctactctgaagctagaaaaattgataaatatgctagaagagtggcgatagtaagcgtaatagaactttaa

SEQ ID NO: 309476 - DNA, 426 bp, Proteus mirabilis
atgggattttatcaagcccccaaagagcaaggcgttgagtcacgctatcaagtacatattgaatgcataagtgccgatgataatctcccgcagtttttgaaaaatcctgatgatatgggtattaatgacccgtactatttaaaatgcttaccgggattaatgttatgggaaaaaaataaggtcggtgaatttgttaaaacagaacggaagacaacatgggaaagcctgcataaattaagcgaattaaaattagaaacagacaagcaacagcaaaaatactattttttacctgaacatttagggtattttcccaaacagattgatatcagtgacacggataaagataaaatcggttcactaataaagcgtgttgaagaaatgaagacgcaaacacacttattgcttattgaagaaacaagttattaa

SEQ ID NO: 309477 - DNA, 222 bp, Proteus mirabilis
ttgcctgctaatttctcggggcattatcgaatatatacatttggttgtggcggtggagcactttgtggtgaagttttagatattaattcaggtttagttgtagcaatgcttcctgatgagtatttagtaacaaatcacatcgatgatttaaaaatagaattcaatgtaaatagctcattaatatatatcgagggaatcttagctaatgataatgaaaaataa

SEQ ID NO: 309478 - DNA, 1131 bp, Proteus mirabilis
atgatgaagcgcaatattcttgcagtggtaatcccagctttaatgtttgctggtgcagcaaacgcagctgaaatgtacaacaaagacggcaacaaagtagatatctacggtaaagttgacgttcgtcattacttcgcaaactctgaaagaagtgaaccaggtaaagttcgtcacaatgaaagtggtgatgcttctcgtgcacgtatcggcttcaaaggcgaaactcaaatcaataaagatttaactggttttggtcgtttcgagtacgaaattcgttctaacggtacagaaagcgataacgatactcgcactcgtttagcatttgcgggtctgaaatttgctgatttcggttctttagactacggtcgtaactacggtgtaatttatgacaccaacgcatggactgacgttctgcctttatggggcggcgactcaatgtcacaaactgacaacttcatgactggccgtactactggcgtattaacttaccgtaacactgatatgttcggttatgttgatggtttaagttttgctctgcaatatcaaggcaaaaataactctcaaacagttaatgagcgtaccgatgtcaaaaaacaaaatggtgacggtttcggtctttctacagcttataacttaggctggggcgtaacactgggtggtggttactctaattcatcacgtactgatgaacaaaaacgagcaagcactgctaaaggcgagcgcgctgaagcatggaacattggtggtaaattcgaagctaacaatgtttacttagcagctatgtatgctgaaactcgtaacatgactggttacagcggtggcaacattgctaacaaaactcaaaatatcgagttaactgctcagtacgactttgctgatttaggtatcaaaccatctttaggttatgttcaatctaaaggtaaagatctgaataatcgcgttggcggtctgaaagacaacaaccatgatttagttaaatatatctctgtaggttctttctacaaatttaacaaaaacatgactgcggttgttgattataaaatcaacctgctagatgaagacgaattcactaaaactaacggtattgcaactgacaacgtagttggtttaggtctgacttatcagttctaa

SEQ ID NO: 309479 - DNA, 1494 bp, Proteus mirabilis; identical to SEQ ID NO: 13713

SEQ ID NO: 309480 - DNA, 1665 bp, Proteus mirabilis
atgtctacaattccaacacaaaatccaattccaagtgaagcagcgaaagacctgaaatttaactcaggtaaaattgacgagttcgttacgtcaaataatcacttttacactgaccgttttggtaaaaaacactatacaatagatggtattatctatttatcaaaacaggcaatgcttaactatggctatatcacgaagaggtcttttgagtcgggtaataccatcatcaatcctaacgatgttcttctctgggaaagtaatggcgaatactacagatgggatggcgaactccccaaagtagttagcgctggctcaacaccggagtcagcgggaggcattggtgatgaaaaatggaaaagcattggcgatgcttcgctgaggcaagatcttcttagcagcgatggaacgtcacatatttttcataatgaaagcctgttatcttcaattattaatgatttagataaaaagaatccagataactcaatgattaatgctaataatcactatgttatctctaatgatatgatgccattgttagatgtcatcggtatcatacatactggtcagtctcttgctgagggtggtgttggttatgatcattgcccaataatacagtcatctttgaattgtagttcgtatacattatctggtggtccagttggaataactagcaaagttctaggtggtagattaaataactttaatgagacggttagatcgacaatcgcatctacgttatgcgataaattaataaataattgtattgccaataaggtggttttttcagggcaagcatggggtggtaaggcctatggggatataaaaaaaggcggttcgactggtgtttatgaaaagtgcataactcaagtttcagatgtaataaaaaacaaaccatcaactgaataccgagctataacaatcattcatggtgagcaggatggtgttgaaaataacacatcatatgcaaacaatctctctagctgggtctatgatttcaacactgatattaggagcattacaaaacagatgacaaatatatcagcatatatttgtcagacagcatcagcaggaggatatggttacaacggagggataacggaattgtcatttccaactccaatagagcagttaaaagcgcataagacagatccattaataacattagttaccagtaaatatcatttaaaatacgctgaccatgctcatataacaaattcatctcagggatttttgggtgagtattacgccaaagcgatttcgtatcaagaaataactggcgagaagtttgaaccatgcagaccaattgaattcataaaaaacaataacaccattacaattaaatttatcggatatgaggatgctttagtaattgataccgatctggtaaatgagatagataattatggtttttcttacaaagactcatccggaaataaaattatatctgtttcaattgttgacaatgatgtagtcattcaactttctggaaatccatcaagtgatgccattctatcatacgcctatcataacggcttgggaggtgccattaatcaaaaaaatggatatggcgacaggggtaatattagaggatctagcaagataatatcaaaagtaaatggtgaaaaactacacccatggtgtgtcatttttagagagaaaatataa

SEQ ID NO: 309481 - DNA, 216 bp, Proteus mirabilis
atgattaacttaaaaatgtatgaatttctaagaaatgatggaacaagaattttctttaataaagagagtatttcttcaatagaagaaggagcttggtcagatgggaaattaatgactaagttaactctaaactgcggaacaaccattatggacttagttccgctagatgagtttttaaaaatgcatcatatagtaatagagagattagatccttag

SEQ ID NO: 309482 - DNA, 1884 bp, Proteus mirabilis
atgctaaattcgaaacatctttttactgtggggcaaattacaaatttattcgaacctcttctattttataaattgacaggtgaagagaagctctcagatatttacaaatttgatgttgaattactttgtccgaaaaataccattgatttaaaagaacatttaggaaaatctctcacgattaaaatcgatgaccatcgagcacctacacgatatttaaatggtcttattacgagtatgtcgttattaggtagagaagaatcagagaaaagatattatctctatcgtgttacactctcaccgactctttggtatttaactcagaataaagattgccgaatttatcaagaaaaaagtgttcctgaaattgttcttagtatttttaatgaatatcaaattaatgttgataatcgtcttacacataattatcggatttggaattattgtgtccaatatcaagaaagtgattacgactttatttgtcgtttaatggaacatgaaggtatttatttctacttttcgcatcatgctaatggtcatacattagtattgagtgattctcctcaacaacatgatcctttagagggttatgcaaaaattgtttatcgtcaggtagaaggggggctaacagaaaatgacgcctcaatctatcaatggaatatttccgatattatcaccccaagcctttacagcatggatgattatgattttaaaaagccccgcgctaatttattagaaaattgtcgtaatccattttcttatgctaaagaaaaaagtgaaatttttgattggccgggagtgtataccgaacaaagccatggtcaattttatacaagtattcgccaacaagagtttgtcgcaaaccatgaacttataaaaggtcgtgcatcttcaataggtattgcgccaggttgtcgttttttactggataatgcacctcgtcctatcgatgcacgtgaatatatggtgattagtgcgagttatttctttaaagaaaatagctattcaagcaatgatcatgatactgcggagcattatattgattttattgtcttgcccgcagatacccaatggcgacctaaaaagagcacgccttggcctaaaacacatggtccacaaacagcagaagttgttggtcctaaaaatgaaaaaatatggactgatagctatggcagggtaaagcttaaatttcgttgggatcgatatagcgaaagtaatgaaacaagttcatgttgggttcgagtatccagtaattgggcgggttggcagtatggcggtgtccaaattccaaggattggtgaagaagtcattgttgattttattaatggtgacccagaccggccgattattataggccgagtttataatgaggaaaatatgcccccttgggatttgcctagtaatgcaactcgcatgggcattatgactcgttctaaagatggcaatatcgccaatgctaatagcctatttatggatgatgctcaaggaaacgaaagttttacgatgcatgctgaaaaagatatggatatttcagttgaaaatgatttcaaactattagttgaaggaacaagtaacgctgtcgttaatctagatgccgtagagatgtataacgccaatcatgcaaaagttgttgtacaaacagacgtggaggctgctttaagaaaagtatttgccgcgggtttgcgtgttgaagccgtcggcgcagatattaaagtgagagggatgcatattgattcaacacaatttgaagcgagggttgtacctgtttatttaggagtaacagcggccaaaatattatctgacgatacgatactccatctattcaaaaataaaatagaactaggtgtcttggaattaaatgcaaaattattagtgctttatctttag

SEQ ID NO: 309483 - DNA, 2526 bp, Proteus mirabilis
atgaaaataattaagccattgcgtcttagtattatgcatcgtccttattataaaaatgatacatcttatttaagtgttgctattttagctttggtcgatatgaaagatgcattaatgcaattacgtccagagcctgaattatggcaattagctaaagatgagctaacttgtagccaaggtattatcgatcttgtttatcctaagtcttatcctgagtttttagccgttggttatgcttatccgcacagttatttatctgagaatgtttgccaagtcagtattacattaggtgataaacaaaaatcgcttattgtatcgggtgatcgtcagtggcatgcagacatggcttcaaaacccgctacttttcattctatgcccattgattgggctcacgcctatggtggcgagcatgttcttgataatcctcaagggattggcgcagaaaataatcaatcttcacattggctacccaatatagaattaccctcagaacgcttaacgttcccttcgcaaatgattacacccgcaggatttgggccaatagattttacatggcctgctcgtcagcaatatatcggtaaaaattatgatgaagaatgggtgaaaaaaggcgcattaggttttgcctcagatacagaccctcgtttgtttaatatggcgcctgaagatcaacaatggttggaacatacgtcacttccaccttcgatgccttatctgattgaaaatatgcatcctgaatgtcatctgcaaagtggtacattacctgcttggaaagcacgttgttttatccatcataccacattggggaaaacacttttttcagaaattgaaatgcgtcatacgacagtctggtttgtaccacatcttgataagatgatttttgtctatcatggcgagtatcccattgaagaagatgatgcacataatgttcatttactgatgccagctctagaggagagcatagcaccacgctcaattgaacattatcgagatgtatggcttaaacgtagcgataaagagaaaggcgcaacatatgcttttcaagatcaagatttaatacctgaaaatgctattggtgaatggattgatacccagcaaaatacgagagaagtcaccccattacaacaaaatttaaccgcaggtaaacaatctgtctatcaggagatagagagtaaattacaagctgtaggtactcaattacctgcacgagtgaaagcgtctcctgagctagcttccccgacattgtcacagttacctgcatttatggctcaattagaagggatggcggatcaagcacaaaatgaagctaaacaacatttaaatcagcatattgagacagcccaagagtttgaagataaacgccctgctggaccctttgcattttatcaattatgcgaaaatttacgtcaacagcaaaaaggtgagttaaaggcgacccaaagagaaaatttatatcaactttatcgtttaagtgtacaaactcaacatcgtatttcaccccttactgacagcgaaaaagtaaaattgcgccaatgggtgattgctaaattatcacaagatcgtgattttaccgattgtgatctcactggtgccgacctctctcatcttgattttagtggcgcaaacttaacgcgaaccatgatggaaagtgcggatttaagtgatgcagtatttaatgactgtcagttaactcaaacgttgttagctcgcactaaaatgcataaaacacgattacgcaatagtgaattatatgaagtaacatttgcacaaagtgattgtaaacaatgtgattttactggtgctacattagtgaattctgttactgaagaggccgtttttgatgactgtgatttttctcaggcaaatatatcaaaccaactttttcagaaagcgtcatttgatggctgctatttttataaggcatcttttaagaatgtcattttcaataatgaaaccatcttaaaagagactaatttctccgcagcccaattttttaaatctagttttactgattgtgaaatgccatttaattcatttaaagatgcacagttacaaaactgtgccatggtggactgtaatgcttctcactgtgactttacgcaagcgaaagtaaaacagagtgcttttctcggatcaacttcattagcgaatacgacttttggtggtgcacactttacgcaatgtaatttagctaaaattaatctcgataatagcaaattacatcgagctaaatttattgagtgtgatttttctgaagcatctttaatatctgctgatctctcttatttacaagcaaataacagtacttttattcgtacatatcttcaagctagtcattttgagcatgcaaacctaatgggatgcttattaaagaaagcatatttaatcggttgtaattttaatcgagcaaatttatttagagctgatatatcacaagcaatcatggatgaaacaacgacgatggaagatgcatttattaaacaaatgaaggtttatcctttatatactaataaaggagttgcctga

SEQ ID NO: 309484 - DNA, 1044 bp, Proteus mirabilis
atgatcaatgccatgttgttacagcagaaaatcaaacaaggagaggtaattgaagatctcgatttatcgggaattgatttatctcattgtgatctatcgggaggtgttttcagccatgttaatttaacccgagctaatttgacaggttgtcatttaaaacagtgtttatttattaaatgtgctatgcctgagattatattgagtcaagcacatctagataatacaagttttagtgaatcaaatttatctaaggctaattttagtcatcttgctctttcttttatcatttttagtaaatgcgatttgcagcaggctaattttgaaaaaataactggcgaagtgctgcaatttaatgaatgtcaattagagcaagttcgtttttgcaatgcacaactgactaaaagtgtttttttagagtctgaaattaatcaaagtgattttacacaggctcatttagttaaagttgttttttatcaaatagatatgcgtaaatatattcctagggagactgtttttgaacaagttaattttgttgaatgtcaacaacagaacttagcttatcaacacttagtttttatacagtgccaatttacgcgcaatcaacttgataatgtcaattttgcctctgcaacattaaaacattgtttatttcatggtgcttcactgcaacatgccaatttatcgcaagttaatgctgatggtgcacaatttattgatgccaatctatcgcatgccaattgcaaaaaaagcgtcatgaatcaatcaatgtggataaatgcaactttgatatcaacgtgctttgtcgacagtcaactagcacaagctctgtttagtaaaagccaggcgatagggacggtttttactaacacatcccttgagtacgctgatttttcatatgccaatatcagtgaagcaaactttgagggcgctcgctttaatcaaactcagtttcatcgttctattcaacaagagacgcagtggggtgataaaacaggcgttttagaaaacgatcctgagcttttactggctgaaaattggggttaa

SEQ ID NO: 309485 - DNA, 639 bp, Proteus mirabilis
atgagtattgcaaccttaccgaaaacgctatcaaccaatatgccacagcaaagtagtggttatgtcgttaatattttacctgacaaaagcattattgttgatgttaatggactaggttgtcattgccggcgtgcggctagttgtttaattatgcctgaaattggcgatattgtgctgttaagtcaacccgttaacgacacattatggttacttgcggtattagaaaaagccactcaaaaaccacaaacagaaattgctatacaaggtgatctgacgatttcaacacaagggggttcgcttattttaaacagcgaacaaacattagaaatgcgcagtaataccttacaaattactactattcaggctcagtatgccattgaaaaattgacctatcagggcgatgagattgatgtgcatgtaggtgttaatcgatggattggtgaacgttatgagtcagtttggcataccacgacacaattaagtcaactttcatttagacgtgttgaaaatactgaacatcttcgtgccggacaacttgattatcaggcgcaagactaccttagactgcattcacataacacactgatcacggcagaaaaaataaccaaaatagattcagaacagatccacgttggttaa

SEQ ID NO: 309486 - DNA, 390 bp, Proteus mirabilis
atgtttgcgaattgtcaattaggcggattagatttagcagcgccggatgtttgccaaactccaccacttcctactcctattccttatgttaatgtgggattgggggtaaccgcaattccaaatgtattaggtgtccagttttcgtcaatgcctgcacataatctggcgacaataaacccagtaacaacgggtgatgaagcgggaagtttcgggggcgtttgctcaggaaccataaaaggattatcgaaacacattacgggagtacaaagttttttaattgtcggttttcctgcaacacgtcttacaagtatgacacaacaaaatatcataaatgcaataggtatgcgtattgtacctagtcaaccggtgatcctgttattaggtgcatag

SEQ ID NO: 309487 - DNA, 195 bp, Proteus mirabilis
atgctggattttttaaaaaattatgacaatttaaccgtcagtgaaaagaaagtattaaagtatcttaccgataatatcgccgatatcccctatttaaatattaatgatttagtcgctaaaacctttgtatcaaaaacggtaattattaatttatcgcagaagttaggttttagtggctttaaagagctaaagtag

SEQ ID NO: 309488 - DNA, 567 bp, Proteus mirabilis
atggttatttatttttatagagaatgggtaaaaatattattttttatgcttatttttttacctgttgcaaatgcggctacaacaatgaattttgatggtactttgattgatacgccatgtagaattgatcaatcaagtttaaaccaaaatgtgttttttttgaatagtacaccaagggattattggaaatatcctgcggttagacctgcagaaaaatttaccattaaacttatccaatgtgatgccaaatcgttatggaaatcagtgaaaattaaatttaatggacagccagagccagagatgggcgctgaacaacaaaagtaccttacactttcatctggtgttaataaaagtaagttagccattggattaattgatatagatggaaaccaacgtattacgttaggtgaaaaccataacggtggaaatggaactcaacttaacgatggcacgatgttgctgacctttaatgcatttgttgaagcgacaccaaaagcaatacaggaaaaaagtgttgtacctggagtttataatgccacggtagaatttgaggtttcttatgaataa

SEQ ID NO: 309489 - DNA, 186 bp, Proteus mirabilis
atgttaatcttttcctctattttagagatgcgtattgatgcttatttcaatagtgtgttgttctttcagactagatatttatataattcaaattgcttaaaaaataacgccctacccatcatcaaaattaattatctattaagtactgctatcccattatttaacaactataaatcaatcggttag

SEQ ID NO: 309490 - DNA, 1674 bp, Proteus mirabilis
atgaagaaatcgcttgtcgctgttggtgttattgttgcactaggtgttgtttggaccggtgcatcatggtacatgggcagtaaaattgaaagccgcttacaggaagaaaccaaacgcactaacgttcaattagcgcaacttgctaaagaaagccaattaggtgcggatattaaacttgaaattcgtgactataagaaaggcgtctttacttctactgctgatcttgcggttgtgatttcagagcatgccaaatcagatgaagataaaaaagtagaagaagtgctctttaagacggatattgaccatggaccattccctctttctgatattgctcaatttaatctagctcctaagttagcagcaatgaataatactttagtgaataatgagaccactaaagatctatttaagttgaccaaagagccatcatttattgatatgcactcttctttatcgtttgatggcagtgtatcgggtaaagttaacataaatcctattaattacagcaaagaaggtagccagttaacaacatctgcgtttcagattgatttttcttccgataaaaatgcaacaaacatctcaacagcagtaaaaggtgatgaagtcattgttaagaaaggtaatgatgaaacctttacgctgaaaaatattgcaggctctgtcgaaggaactaaagttaaagacgatcaatatctatttgatacacaaacactgaactttggtgatattacctttacgagccaagataagtcatctaatttcactttaaaagatacttctcttgctactaagagccaaattaaagataaattattctttatcactcaagattatagttttaaatctcttaatgttggtggttttgattttggtgcgggtaaatttgcttactcaattgataaagcagacccagatgcgatgttgctattaacaaaagtttataacagcaccttcttaccttggaatcaaaataaatacgataattcagcgatgattgagcaagctgtacgtgatgttttggaaaaaggtttagtattccgtatcgatgaagcatcgcttaccaatagcagtggcgcaagcaagctaaactttaagttagatttaaatgcgttcaatgctgatgcactgaaaaaagaagacaaggcgccttcagttctgtttaatgaattgtttaataatatcgattttaatatcgatctttctgtaccaatgctaacggagttccgtagtaccacacaataccttgatgttatgcgttattctgaaaaaggtttaacagacgaagataaagctgaaattcagaaaacaaccgctaacgacatggcacagttaaaaactgaattacagcaaaatatcaatcaaatttctcaagacgagaaagatgctctgccattgatgctgttatcacaagacggtaataaactgtctttaaacctgaactatgctgctgataaatttactatgaacggtaaaacttacagctttgatgagtttatggaagtaacacaagcccctcaaatgttaggtttagcggcgatgttatttggtgcgggtgcttcttcttatgattatgatgactctgattatcctgaatattcagaagagccagatcaaaatgatgcaatagaagagccacaaattgagatcccaacagcacctgctgaaaacaattag

SEQ ID NO: 309491 - DNA, 357 bp, Proteus mirabilis
atgaaaaaagataaattggttgtgacatcacttgcaaccgagcttttagatgatgtatttataagttataaaaaaaaactcactgatttatctaagaaaaataatagtggtgacccctactcaaaaatgcgaaatgctttagctaaattatcaaatgaagaacaagtgtctattttcaattttattcgattggctatggttgatacatcttcggttatctttggaacactagatggctctcacttcccacctaatatagatggtgattttattgtttcgtataatggtgatgaaattcagggctcattgcaggatgaattaatatctattgcagaagaaaaaggaatatataaataa

SEQ ID NO: 309492 - DNA, 1452 bp, Proteus mirabilis
atgaatactaaagcctttgatttaaatatagagaaaatattagaaaactgggaagttagacatgcagtaagagagattattgccaatgcattagatgagcaaacattaacgaatacagaccaagttcaaatatcaaaaaatagggataactggattattagagattttggtcgaggtatcacttatacccatttaactcaaaatgaaaatcaagaaaagctaaatgctcaaaatattattggtcgatttggaatagggttaaaagacgctttagcaacgtttgagcgacatggtgttgaatgcttaataaaatcaaagtatggcatcataaaaaccacaaaaatgactaagcagggttttggcgatataactacactgcatgccattattgaagatcctcaggatactgagtttattggtacagaggttaagttaagtaatattgatgacaatgaagtcgaagaggctaaattactttttcttaatttcagtagcgccaaagttatagatactactggatatggtcaaattattgagaatagcgacagtgaagggaaaatttatataaatggagtactggttgctagagaagaaaaatttttgttctcgtacaatatcacacgccttaatgcccaactaaaaaaatcaattaacagagaaagaactaatgttggtcgtagtgcttacacagatacagtaaaaaaaattctgttatcgtctaaaaacgaaaccgtaatcgataagcttgctgatgatatgtctggttatgagtatggaacaatgcatgatgagttatcatggattgacgtacaagaacatgccgtatcgattttgaattcatcagaaaatgtgatgtttattacttcagaagagggaatgatacatggggcactgatagatgaggctagatctaatggtgttcgaatagtaactattcctcataatttaagagcgcgaattgcagactctcaagatatagatggaaatgcaattaacgatatcgataatttcaaacaagtatataacaatagttttatatttaaatttatcaatgaatcctccctatctagagaggagaaagatatttatcaatttaaagatgaaatagtcagagtatttggtgggttacctaactatgtagttgacataaagctttctgatactatgagacttgatgatatgacaatgagagaaacgttggggtgctgggatcctaattcgaattgtattgtaatatcacggaaaacattaaaatcactttctatgtttagtggaactcttgttcatgaattagtgcatgcaaaaacagggtttcctgatgtggatagagagtttgagtgcgcgctcacagatgaaataggcaatgcatatcatttattgttagcaagtagacaaagtaatgaaggtaatgaaaaaatgaatattagaaagccttggtataagttttggtaa

SEQ ID NO: 309493 - DNA, 645 bp, Proteus mirabilis
atggaaaagcactttatcaatgaaaagttttcacgagatcaatttacggggaatagagttaaaaatattgccttttcaaattgtgatttttcaggggttgatttaactgatactgaatttgttgattgtagtttttacgacaggaatagcttggaagggtgtgattttaatagagccaaactaaaaaacgctagctttaaaagctgcgatttatcaatgagtaattttaaaaacattagcgccttaggtcttgaaattagtgagtgtttagctcaaggagctgattttcgaggggctaattttatgaatatgataactacaaggtcatggttttgtagtgcttatataaccaagacaaatcttagttacgctaatttttctagagtcatattagaaaagtgcgaactgtgggaaaatcgctggaatggcactgtgataactggcgccgtgtttcgtggctccgatctttcttgtggggagttttcatcgtttgattggtctttggctgattttactggttgtgatttaacggggggggcgcttggcgagcttgatgcaaggcgaattaatttagatggagtgaagttggatggagagcaggcgcttcagcttgttgagagtttaggtgttattgttcaccgataa

SEQ ID NO: 309494 - DNA, 564 bp, Proteus mirabilis
gtgtggcatatgcatccgctggtgtttttagattcattccatagtaaaaagtatgatttttccactaaaaaaggcacgatccatgcaattattgctgaatgtaaaaatcaagggattttcttaaacacacaaatagcatacattttagcaaccgtaaaaagagagacaggggatgcatttcagcctgtacgagaagggaactacggaggaagaactgttagtgatgaatatagaaagaaaaaattcaggtattacccatattatggtagaggttatgtacagataacatggaaatacaattatgaaaaatactcacagaaactaaatgtcgacatggttaatgaaccagatttagcattaaatccagagtattcattgttcattttaattgatggttttaaatatggtgaatttacaggtaagaaaatcaccgattatattaatgagtctaaaactgatttttataatgcaagaaagtgtattaatggattggatcaagcggagcaaataaaaggatttgcagaggattacttggaaaaactaaacaatggtttattgtcatga

SEQ ID NO: 309495 - DNA, 363 bp, Proteus mirabilis
atgaaaaaaaaatatttgatatgtctccttctatttatacaattttctgtacatgggcaagaaattcgttgtggctggttagataatcctacaccaggaaatctttggtttatcgatcgtgatgctgaatggaatatatctcagcaaggaggccgaaaatcggaaggaattgaaaaaattattgataattctattgacccttcagaaataatttacactaacggtaactatggtatcaggtgtgcctgtttatctgtagatgttgatagtaaatcaaaaacaattataaagatatacacttttgatttactgaaaatcaaacaatgccgtgatgataaaaaaatacaatactttatcaattag

SEQ ID NO: 309496 - DNA, 579 bp, Proteus mirabilis
atgtttaagaaggcgttattgagtttaactgcaggtgcattattatttaatgctagttcagcattagcggctgattatcaaattgataaacaagggcagcatgcttttgtgcaatttcgtatccaacacttaggttatagctggttatacggcacatttaaagattttgatggaagcttcacttacgataaagaagatccttcaaaagataaagtcgatgttgtgattaaaacggggagtttagatactaatcacgctgaacgtgacaaacatttacgtagtgctgatttctttaacgtcagtaaatatcctgaagctaagtttgtctcaaccaaagtgactcgtgatggtgaaaattatacggtgacgggtgatttaacacttaatggcgttacaaaaccaatttcactaaatgcaaaattaattggtgaaggtactgatccgtggaaagggtatcgcgctggttttgaagcaacaggtaaagttaatctgaaagagtttaactttaaatcagatttaggaccaaaatcgcaagaagcagaattaatcatctctgttgaaggtgtgaaaaaaaattaa

SEQ ID NO: 309497 - DNA, 534 bp, Proteus mirabilis
atgaataagatggtgaaatttctagggcttatttctttaacaatatgtaattggcagtctcaagcattagcggccaataatttagatgttgaatttagcggtgagttaatcagtgttgcatgccaagtcgcttcagaatcaataaataaaaaagttactttacacaatctacgttggcaatttattaatgaaaatgaaattagtaaagtgactcatttcacgattgcgattgataagtgtagtgaaactgacttacagaaaagtattaaattaacctggaaaagtaacgaattagttgatatcgatggtaatcattttcttattactaaaggggatagtggagcactattaggaattattgataataatggaaggtctgttatatggaataaaccgatgacaattggagatgtaagtgttgttgatggttcacaacaatttgagtttggtgtttttgtccgtaagccagcaataggagaaattaagattggtgaattttccagtatcgtaacttttaatgtggagtatgaatag

SEQ ID NO: 309498 - DNA, 441 bp, Proteus mirabilis; identical to SEQ ID NO: 289321

SEQ ID NO: 309499 - DNA, 540 bp, Proteus mirabilis
atgtgtgaaaaggaaggtatcacaccaatcactcatgacgataacaggaagttactactcatgagggacagtgtaatggcataccctcctgctaaatggtgtttggaagctaacggagtagctgaaagtagcatttattggaatgacgaagatacggacattctttgtcgttgccggccagataaactcattcaagagcaccattggattgttgatgtaaaaagctctgctgacattcaacgatttgaccgctccatgtacgaatatcgatatcacgtacaggactctttttattctgatggatataaatcattaacaggcgaatcccctgtatttgtctttctcgttgttagcacgactatcgactgcggtagataccccgttagagttttcaatttagaccagcaagcaaaagatattggtcgaacaacctacaaacaaaatttaagaacgtatgcagaatgcctaaaaacggatgaatgggcaggcatacgtacattatcactgccctattgggctaaggaattaaggaatgagtaa

SEQ ID NO: 309500 - DNA, 411 bp, Proteus mirabilis
atgagcggtattaatcacgttaaaggaacttcggttaattggtttaaagttaatggtaattatgctcaaagtgccaatgatacctgttgcattatggtgccaagaaaatggacaccgaatcaaaccgtattagtggaatgggaagtcgaccctaatgcctatcccacagattcgcccagtgtaaccgatcctaaatttgatgcctatatggaaaaacacaaagccaattatcgccattacagtaaagttgttgaaattccccagtatgacgaaccttgtagtatgaaagttcattttctgccctgtcaggaagtaaaaatcagcttgtcttgttattctccttggcttccagagtatcctatacaagagcctttggggatggaggagcctgccatatgtccacaaaattaa

SEQ ID NO: 309501 - DNA, 207 bp, Proteus mirabilis
atggaacgagaagcgtttgttaattctcaggaagagaaaatatcagttgatgatgttatggatagcctaccagaagaactactgtgcatggatttagcaaggaagttaaatccggtatttgaaattagcccccaagcacttgatgcagttttagatggaattagaacagctattcagatcgggatagataaagaggttttaggatga

SEQ ID NO: 309502 - DNA, 261 bp, Proteus mirabilis
atggctaaaattaatgtcacttgtccttattgtaattctgataaaaaagtggtttgtaatggttatacttctacaggaatccaacgttatttatgcaatgaatgtcaaaaaacatttcaacttaattttacccataatgcctcaaaaccaggaacacatgaacaaattattagcatgataagaaatggactaagtcgccgagctactgctcgtatcttaggtgttagcctaaatacagtattaagacatttaaaaggatag

SEQ ID NO: 309503 - DNA, 543 bp, Proteus mirabilis
atggttccttaccaacccgtattaaccttttggtttgaagaatgtaccccaaaacagtggtttcaaaaggatagcgcttttgataaagaaattaaggatagatttggtgagctatgtattagcgcaagtcgcgcagagcttgcctcttggcgcgagagcattgaagggcggttaggggaaattattattctagaccagttttcacgtaatatttggcgtgatacaccaaaggctttcgcccaagataatatggcgttaattcttgctcaagaagccattcgattacccgaatatctcaccctgacacctgtaaaacgcaaatttctgatcatgccatttatgcactcagaatcacaaaaaatccatcaagatgccattgcgttgttttcacaattaaatgatgacgacacgtatcaatatgaattacgccataaagagattatcgataaatatggtcgttatcctcatcgtaatgaaattttaggccgtacttccacaccagaagagttagcgtttttacaacaacccggctcttcattctaa

SEQ ID NO: 309504 - DNA, 438 bp, Proteus mirabilis; identical to SEQ ID NO: 309057

SEQ ID NO: 309505 - DNA, 321 bp, Proteus mirabilis
gtgctaaataaagcaccaggtcttgatcataaacaccgcttacaaaccactaaattagacttaagtttctccgaaacttttaaccaaactcatttagctgatgcttatgagcggttattgcttgaggcaatgcggggtattcaagcgctatttgtccgtcgtgatgaagtagaagaagcatggaaatgggtcgattcaattattaatgcatgggaatgcgataatgaattacctaagccataccaagcaggaacatgggggccggttgcatctgttgcaatgatcactcgtgatggccgctcttggaatgaaattgagtag

SEQ ID NO: 309506 - DNA, 246 bp, Proteus mirabilis; identical to SEQ ID NO: 300218

SEQ ID NO: 309507 - DNA, 270 bp, Proteus mirabilis; identical to SEQ ID NO: 300219

SEQ ID NO: 309508 - DNA, 174 bp, Proteus mirabilis; identical to SEQ ID NO: 300220

SEQ ID NO: 309509 - DNA, 327 bp, Proteus mirabilis; identical to SEQ ID NO: 300221

SEQ ID NO: 309510 - DNA, 339 bp, Proteus mirabilis; identical to SEQ ID NO: 300222

SEQ ID NO: 309511 - DNA, 498 bp, Proteus mirabilis; identical to SEQ ID NO: 300223

SEQ ID NO: 309512 - DNA, 651 bp, Proteus mirabilis; identical to SEQ ID NO: 307889

SEQ ID NO: 309513 - DNA, 1206 bp, Proteus mirabilis
atgattaaattaaataatgttccatccgaatttcgtcccttagaaagctataaaatgttaattggcggcgaatgggtatccagtacatcgcaacaaacgaccaaaacctatagtcccgcaaccggtgagttattaagtgaatatccatcaggtacagctgaagacgttgatcttgctgtaaaagcggctcgtaaagcttttgatcattggcgtaaaacctctcctgctcaacgccaagcgctattattaaaaattgctgaccgtttagaacaagagcaagaacgttttgcttggattgagtctcttgataacggtaaaccactcaatgaatcgaaaaacatcgatttacccgcctctattgaccattttcgatattttgcaggcgtgatacgctctcataccgatgaaagtgctgtcttagacgaaaataccctgagtcttgttattcgtgagcccattggtgtcgttggacaaattattccatggaattttccattattaatggctgcttggaaattagcccctgccatcgccgctggagataccgttgttattaatccagccacactcacctcactttcattattagagctaggtcgtattttaaatgaaatattaccagccggtgttataaatattgttactggtcgtggatctgttgctggacaagctattctagaacaccaagacattgataaactagcatttaccggttcaaccaatgtaggttataccgttgcagctgcggcggcgaaaaaaatggtaccagccactttagaattggggggtaagtcagccaatatcgtcttccctgatgcgaatatgaaaaaagccgttaaatattccgcattagcgatattaatgaaccaaggacaggcctgtgaatctggctcccgtttattcttacatagagatattcatgacgcattcttaaaagagttaaaagcagaatttgagcgtatccgtgttggtgatccacttgatcctaatacacaaatgggtacccaagtcagccaagcgcaaatggataccattttaggttatgttgagctggccaaaaaagaaggtgcaaccatactcacaggaggtgagcgtattacgggtgaagggtttgatgatggcttttttgttcaaccattattatcaatgccacaaaccaaatgcgtgtcgcacgtgaagaaatttttggccctgtattatgtgtga

SEQ ID NO: 309514 - DNA, 279 bp, Proteus mirabilis; identical to SEQ ID NO: 305737

SEQ ID NO: 309515 - DNA, 213 bp, Proteus mirabilis
atggctgcgagtcttgttcaaacagatgtaagttcaactaacaaagttgaccaatattttcataaacctgtaagaactgatacatctaatgccgcggcattagccgaatatcaaggcaaacttgccgaatataatattacacgtaatgcccaatctacatcaatcaaagtcattaaagatctagcaatgagtattattggtaatatgcgttaa

SEQ ID NO: 309516 - DNA, 480 bp, Proteus mirabilis
atggctcttactgatgctaaagtcagggctgccaagcctctggataaatcgtataaattgaccgatggtgatggtatgcacttgatggtacataccaacggctcaaaatattggcgtttacagtatcgctttggcggtaagcaaaaaatgttagcgctgggtgtttacccggatatttcacttgcagaagccagagagaaaagagatgcagccagaaagttaatagcgaatggttttgatcccagtgaaaaacggaaagaagtgaaagaagagcaacaaaaggaatttaatacattcgagaaggttgcacgtgattggcatgcaactaatcagcgatggtcagaagggcatagccatcgagtactcaaaagccttgaggacaatatctttgttgctattggtaaacgtaatattgctgaactaaaaactcgcgatctactcgaacctattaaagccgtagagatgtctggacgtctttag

SEQ ID NO: 309517 - DNA, 294 bp, Proteus mirabilis; identical to SEQ ID NO: 297475

SEQ ID NO: 309518 - DNA, 249 bp, Proteus mirabilis
atggttaaagtggcgattattttggtttctcctgtattaattattatgtttttaagtgatgttgcattaggggtttattcattattttgtcctcaactaaatgcattttctctctctctttgtatcaaaggtattatcgcttttttagtattactgctcttttttacctcagcaatgacgaatgaattatatcatttttttaacagtagatacttttattctatttttatgagtatttatcatggctga

SEQ ID NO: 309519 - DNA, 876 bp, Proteus mirabilis
atgagtcattattcattatttaaaaattctttatgtattgccatttccataatggcgttaaattttagtggagtcactatggcaaaaaataccatgaatgatatttatgttattaatttatcctcaaataatgcaatttgtggtgtgaaaattaatgaattattagtctcggataatacaatggcagccgaaggaagctattctactggtcaaaatatatctagtatattagccaatgggaaaaataccttaggtataattatgtttaatggatctgtttttactggtgaagaaaaacttacccctgatatgtggtgtgaagtcgaacttaagaaattatctgcaaatggcgataacaccttaatatcgggacttaggttaaacggaaataatgacgggaaaatggtggtctcggataaatatcaaaataacagtgagcatatctattttggtggtcccagtcgaaaaagtgaatataaccttttagaagcaaaaaaccaatttaatatacaggacctcccccaatggcaatgggaaaaagcaactcccgttactgaagatgatattcctaaaattcgtgctttttatgccgaactacgacaagcatttatcgataaaaatctagataaattaaaaactatgggaaaaatatcctgggaagaaatggcctatgccgataatggctctcctgatatcttttggaaatcgcttaattttcaagaacgattagaacaaggatataaacccaatactattaattgggatgaatatacttttgttacttataacgacaatcgagtctttcgctatgaggttggttttagccgattatcccctattgaattaatcaactctgaaggaagaaattatttttaa

SEQ ID NO: 309520 - DNA, 267 bp, Proteus mirabilis
gtgacaccgtttatcgtgaagaatggacaggtggttattcatgaagccttaatggataaagcgtggatacaaaaattagtggtactcgattattttaaatcatcaggatttgataaagggaatggctttttattggatgctaaaaacaatgtttttcgctttacgagtggtaatggagggacaacattaaccaatcaaaatttatatgtaaaagacgaaactgggtataatgttgttattattggtgatatcacaaatgagcgataa

SEQ ID NO: 309521 - DNA, 1212 bp, Proteus mirabilis
gtgaaaaatcgcactataggcagtgtatttattgttgcaggaacaacaattggtgcaggaatgttggcaatgccacttgctgctgtgggtattggctttagtaccatggtgttattgctggtgggcttatggctattaatgagttacaccgcgcttttattagtagaagtctatcaatacaacgatccccatacaggccttggctctattgcgaaacgttatctgggtattggaggacaagtcgttacaggtttagctttgctacttcttatgtatgctttaacaacggcttatatcagtggcgcgggtgaattattagcttcgactttatcttcttggattggtcataagataaccatcacacaaggtatcattatctttacagttattggtggtgcggtagtcggtattggtaccacttctgtggatatgattaaccgcttactctttacagcaaaagttattttcttaatttttatgctggtagtcatgttaccccatgtggaaaaagtcaacttaacctctatgcctatcgctcagggactcgttctttctgcgatcccggttatttttacctcttttggtttccacggtagtgtacccagtattgtcagttacatggatggcaatatcaaaaaactacgcctaatatttatcgtaggtagcgcaatccctcttattgcttatattttatggcaattagcaacattaggagctattcctaccaccacctttatggggattttagcccaagaatctggcttaaatggtctactcaccgctatccgtgatgtggttgctacaccgcgagtcaatattgctgtcaaccttttcgcagcccttgcactcgccacctctttcttaggcgtagcattaggattatttgattatctagctgatttgtttaaacgcagtaatcgcgcatctggtcgttttcaatctggtttattaacctttgttcccccgctattctgtgcgttatttttccctaactttgtgcaagccttagcctatgcagcaattgctttatctattctcgcactattattaccagcacttctggtatggaaagtaagacagcaaaagcagactacagagcattataaagttaaaggcggtaagccagccttagccatcgtatttatctgcgggttagtagtgattggtattcaaattgcgattacctttaatatattgccacaagtgggttaa

SEQ ID NO: 309522 - DNA, 252 bp, Proteus mirabilis
atggatattcgcgatctcaaactcttcttacatcttgctgaaagttgccatttcaccaagactgcgcaagccatgcatgtcagtccatccacgctttcacgtcagatccagcgtcttgaagaacaactagggcatccactttttttgcgtgataaccgccaagtcacactgactgatgcaggggagcaacttaaacgttatgctcaacacaccttattgcaatataagcaactcaaacatacgctaaactag

SEQ ID NO: 309523 - DNA, 870 bp, Proteus mirabilis; identical to SEQ ID NO: 302239

SEQ ID NO: 309524 - DNA, 390 bp, Proteus mirabilis
atgaatattaagttccaaaatggcaataatttagatctcactccaaacacggcaagaatcacaaactattttaaatttaaatttaatattcaacctccttataataaaaacaatactattgaattatctagaaatagtaaaatttatccatatttctacttctgctatccagagcagaataacaaaaattatgctattcaccacttttctggttcatggcttccatcacattcaagaaaagataaattgaatatttttgataaactaattctaactaggcttatcagaatcagaaacaaaggagatgaaccaattttacataatgaaagaaaattatttagtacaaaagaaaaaaataataaatcttatatcttactcctaagaaaataa

SEQ ID NO: 309525 - DNA, 816 bp, Proteus mirabilis
atgccattacatttttctggtaggatttttgcgtctcttttattagctgggacactattaacaggttgcgataacaatgataacaaccgttatgcaattaaagtgggggtgattaatggtgcagagcaagatgtggcagaagtcgctaaaaaagtggctaaagaaaaatatggtttagaggttgagctggtgggttttagtggctcattgttacctaacgatcccactgcaaacaaagaattagatgccaatgtgttccaacatcgccctttccttgagcaagataatcgttctcgtggttataacctcgtcgcggtaggcaatacctttgtttttcctatggcgggttattcaaccaaaattaaacatcctcaagaattaaaacccggtgatacaatagcactgcccaatgatccaaccaacttggggcgcgcattattattgctacaaaaagagaaactgatcaccttaaaccctgacagtggcctattacccacaacactcgatattattgataatacacttaaattaaatattatgcaattagaaggtgcgcaactacctcgagtattaaacgatccccaagtaacagttgcgataattagcacaacttatatccaacaaattaatttatcaccaaccaaagacagtatttttattgaagataaaagttcaccttatactaatattattgttacaagagaagataataaagaagcagagaatgtacgcgattttattaaagcctatcagtcacccgaagtggcaacagccgctgagactatttttaaaggtggtgctattcaagggtggtaa

SEQ ID NO: 309526 - DNA, 273 bp, Proteus mirabilis
gtgataataaaacccgatgatcgctggcgttggtattttgatgacgagcaacaaaagttgatgctcgatttagctaatggaatgatttttcgtagtcgttttccaagtaaaatgctaagtgcaactgctcatcaatcatcaccttttactgttgatgatgctgctctttattatggatatgatgagcaaatccgccagattgatatgccttctgagtcgcgagcagaattagcgttaaacgcattaatagcccatcgttttttaagccattaa

SEQ ID NO: 309527 - DNA, 1254 bp, Proteus mirabilis
atgttagaacaaatgggaaaagcggcgcgagaagcttcttggcacttagctcagctatcaaccgaacaaaaaaatcaggcactgttagtcatcgctgatttattagaacagcaagaagccattattcttgctgctaatgaaaaagatatggtggcggcacgagagtctaatattaatgctgcaatgcttgatcgtttattactcacatcagaacgtttaaaagcgatcgctgatgatgttcgccaagtttgtcatctagaagatcctgtaggtcaagtgatagatggtcgtttattagacagtggcttacgtttagaacgccgccgagtccctttaggggttgttggcgttatttacgaagctcgtccaaatgtgactatagatgtagcatctttatgcttaaaaacagggaatgcggctattctccgtggcggaaaagagactcaccatactaaccaagccgttgtcgcggtgatccagcaagcactagaaacatgcgctattcctgcggctgctattcaagctatcgataagccagatcgtgaattagtcgcaaaaatgctaaaaatggatgagtatattgatatgcttattcctcgaggtggtgcaggattacataagttatgtcgtgaacaatccaccattcctgtgatcacgggggggattggtgtttgtcacacctttgttgacgaaagtgctgatttagaccaagcattaaatgttattattaatgctaaagtacagcgtccaagcgcatgtaattcgttagaaacgctattggtacatgaagctattgcggagagtttcttacctcaattaagtgatgcgatggcagcacaaaaggtcactttgcatgccagtcaacgcgctataactgcattgaaaaagggacgtgcgacggtcgtcgatgtgactgaagcagattattgtgatgaatggttatcactggatctgaatgttgaagtcgttaatgatttaacagcggcaattgctcatattcgccaatatggtaccgcgcactcagatgctattttaacgcaatctatcagtcatgctgatcgctttgtacgccaagttgattctgctgcggtatatgtgaatgctagcacacgttttacagatggtggacagtttggcttaggtgctgaagtagcggtgagtacacaaaagctacatgcacgaggccctatgggattagatgctctaaccacctataaatggattggttacggcgacaatacattacgtcgctaa

SEQ ID NO: 309528 - DNA, 1146 bp, Proteus mirabilis
atgaatagtttgattggctcttctgtttatcgtcgccaactcacttgtggcacattaagcgtaacgccaaattgctcattagaacatcttgatgaactttttgatattgcggaaagacgcaaccctaagcgcgcttttttgtttgtcagtaaagtattagggcgccatattcctgtttcaccgaagaaaatgcgtgaaacttatcaacaaatggccaaacaatttcctcaatcactcgaaggccctattctttttattggtatggcagaaactgcggtcggtttaggtgcgggaatttttgatgaagtaagagatcgctatcctcaagccctctaccttacttcaacgcgccatcctattgctgatggtgaattattctgtaaatttaaagaaaatcacagccatgcaactgatcacctactttatttgcctcataacctagaacaacgccaatggatccagcaagcgaaaaccattgtgttaattgatgatgaagcaaccacaggtaatacctttcttaacttgctgtctgcattacgtgaagaaggtaagttaacacaaattaagcagattattgctgtcacattaaccgattggagtggtgatgctctgcaaaagcgttcaccattacccataacaaccttctctttagtgcagggaaaatggcaatggcaagccaatcccgatgcaccattacctgttatgccaaatgtcaatattactgcttcaggacaggttgctatcacagggaaacaaagctggggacgcttaggcatgacaacccctgctaatgatcttggcctatttattcatgtttctgagggtgaaaaaatattggttttaggttctggtgaatttgtctgggaaccctttttattagcagaacgtttagaaaaacaaggggctattgtaaaatatagctcgacgactcgctcacctattgccactaattttgctatccaatcagcgataacttttactgacaattacggattaggcattcctaactttgtctataacgtggctcatcagcaatttgatcgcattctgctttgttgtgaaacccctgccgaaagtattgatagtcaacttattaaggctctctataaagttgcccctattgttgaagtaattagctatgactaa

SEQ ID NO: 309529 - DNA, 597 bp, Proteus mirabilis; identical to SEQ ID NO: 305582

SEQ ID NO: 309530 - DNA, 2910 bp, Proteus mirabilis
  misc_feature (2889)..(2898): n is a, c, g, or t
gtggcactatcatctgcgatgctctacaaagagatagagcaactctcgttgcgggatcagcaacgattgagaaaacgcttacgtggcgttgataaaataagtaaagaaacgtcgaaacaggcggtattaagcgagattgagcaggatattattgtcgcaaaacagcgtatattaaatcgacaaattcactgtcctaaaattgtttatccagaaaacttgcctgttagccagaaaaaagaggctatctacaatgcaatcaaagataaccaagtggttattattgcaggggaaacggggtcgggtaaaacaactcagatcccgaaaatttgtctcgaattagggcgaggcgtaaaaggttatattgggcatacgcagcctcgacgtttagctgcacgctctgtcgcagagcgaattgcccatgaattaaatacaacattaggtgagtctgtcggttataaagttcgttttagtgatcatgttggtgataacacgctagttaagttaatgactgacgggattttattagctgaactacaacaagataagttgttattacaatatgatactattattatcgatgaagcccatgaacgtagcttaaatattgactttattcttggttatttaaagcagcttttacccaaacgcccagatttaaaagtgattattacttctgccactatcgatcccgagcgtttttctaagcattttaatcaagctcctattattgaggtatctggccgaacttatccggttgaagtgcgctatcgtcctattggtggtgacgctttggatagtgataaggatatgactgagggcattattgatgcgattgacgagttaagtcgagaaagtgcgggtgatattcttatttttatgagcggtgagcgtgagataagggataccgcagaggcattaaataaattacaactgcgtcataccgaagttttacccctatttgctcgtctttctaatagtgagcaaaaccggatatttcagcctcataccggaagacgcatcatattagcaaccaatgttgccgaaacctctcttacggtaccgggcattaaatatgtgattgatacgggttatgcacgtattagtcgatatagttatcgaaccaaagttcagcgcttacccatagagcctatctctcaagcttctgcggatcagagaaaagggcgttgcggtcgtgtttctgatggtatttgtattcgtctttattctgaagatgattttatttcccgtgcgcaatttaccgatcctgaaatactaagaaccaatcttgcttcggttattttacaaatgacctcgataggattaggggatattagcggatttccttttgtacaagcgcccgataaacgcaatatacaagatggtgtacgcttattagaagagctgggtgccttacaagagggtactgataataaaggtgcttatcgtttgacgccgatggggaaacaattagctcagcttcctatcgatccaagattagcgagaatggttcttgaagcacgcaaatatggtgcagttagagaattaatggtgatcacatcggcgctttctattcaagatcctcgtgaaagaccgatggataagcaacaagcatcagatgaaaaacatcgtcgtttccaagataaagattcagattttctttcattactcaatttatgggactatttaaaaactcagcagaaagagttgagtcactctcagtttcggaaacactgtcgccaagagtttttaaactttatgcgagttagagaatggcaagatgtctatacgcaactacgccaagttgtgaaggaattaggttttccaattaatagccaaccggccgattttaaaagtattcatgtggctttattaagtgggctattatcacatatcggacaaaaagatagcgataagcaagagtttactggcgcgagaaatgcgcgttttgctatttatcccggctctgggttatttaaaaaaccgcccaaatggaccatggtggcagaattagtcgaaacatcacggttatgggggcgcattgctgcacgtattgaagcggaatggattgaacctatcgccacccacctagttaaacaccactatagtgagcctcattggtcaaaagcgcagggtgcggtaatggctaatgaaaaagtcaccttatatggtttacctattgtggcctcgcgattagtaaattatggcaaaatcgatccactattatgtcgagagctatttattcgccatgcgttggtagagggcgattggcaaactcggcatgcttttttccgtgaaaatttaaaattacgtactgaggttgaagagttagagcataaatcacgtcgtcgcgatattttggtagatgatgaaacgctgtttacattctacgatcaacgaataccacaagatgttatctctacccgccattttgataaatggtggaaaatagcgcaaaagaattcacctgatttgctgagctttgaaaaaagcatgcttatcaaagaagatgctaaacgtgttagtgcattagattatccaaattattggcatcaagataatttaaaattacgcttaacttatcagtttgagccaggtacagcagcagatggcgtcactgtccatattccattaccgattttaaatcaggttaaagatgaaggttttgattggcaaattccgggtattcgtcatgaattagttgttgccttaataaaatcattacctaaacctatacgtcgtaattttgttcctgcgcctaactacgcttcagcttttttagaacgagtggttacccctgaaggtgaattactcgataaattagaaaaagagctacgtagaatgactggcgttacggtcgaacgtgacagttggcaacttgagcaagtggcnnnnnnnnnnccgatcacttaa

SEQ ID NO: 309531 - DNA, 177 bp, Proteus mirabilis; identical to SEQ ID NO: 296449

SEQ ID NO: 309532 - DNA, 204 bp, Proteus mirabilis
atgacaactgaaccaataatcatagcgccagatggtttcactaatgaagatatcgcaaagtggatgaggggcaagttgcagtgcatagattatctccctgttttacacggtaagcgagaaagactaatgagcgatgtaaaaaagctagatgctgaaatagcagagtacatcagtaaaagcgctattcagatacaaagtaaatga

SEQ ID NO: 309533 - DNA, 375 bp, Proteus mirabilis; identical to SEQ ID NO: 297318

SEQ ID NO: 309534 - DNA, 570 bp, Proteus mirabilis; identical to SEQ ID NO: 297306

SEQ ID NO: 309535 - DNA, 201 bp, Proteus mirabilis
atggaagaaaaacgagttgaaataactcataaacttaagttctctgcaccaacaccacgcgggaaacgggctgaagaagatactactaaaacaccaatgtacgtaggtaaaggtggtaagttgaccattatgcaagaagaccaaggtcaattattttctttgcaaggtcagcccgacgggaaattaaaatccgttaattag

SEQ ID NO: 309536 - DNA, 540 bp, Proteus mirabilis
atggcaagtaaaggcgttaacaaagttattctcatcggccacttggggcaagaccctgaaatccattatatgccaagtggtggtgcagtcgctaatctcacactagctacatcggaatcgtggcgtgataaacaaaccggtgagatgaaagagaaaaccgaatggcatcgtgtggtcattttcggcaaattagcagaaattgcaggtgaatatctgcgtaaaggttcacaagtgtatatcgagggttctcttcaaactcgtaaatggcaagaccaaagcggacaagaccgatacacaacggaagttgttgtgaatatcggtggaacaatgcagatgctaggtggtaacggtggtaatcaggcaggaagccagaagacacagcagaatcaaggatggggtcaaccacagcaaccgcaagcacaaaaacaagcatcgagtaatcaaacaccacaaagtgaacctcctcaagattgggatgatcctatacctttcgcccctatcggactcccctacccacgccacgctatttatgtgatttaa

SEQ ID NO: 309537 - DNA, 765 bp, Proteus mirabilis
atgctgaaaatattagtgagtaatgacgatggtgttatggcaaaagggatacagacactcgcaaaagccttacgccagcgttatgatgtacaaattgtcgcaccggatcgcaatcgtagtgcagcatccaattcattaactattgatagaccgttacgtaaacagcgacatgaaaatggtgatattgcgatagttgaaggtacacccacggattgtgtctatctcggtgttaatcatctcgtcagaccgcgtccagatattgtggtgtctggcattaatcatggccctaatttaggggatgatgtgctttactctggtactgttgctgccgctacagagggccggttcttaggtttacctgcgattgcggtatcacttgatggcgaaacgcattttgacacagcagcccaagtgacttgtgatgttttagctatgctacaacgagtgcctttaagagctgggaatattttaaatattaatgtgcctgatattccgttagcggagatcaaaggttttcgtataacacgttgtggaagtcgtcatgcttcacaacatgtttatacacaaacagatccgaaaggaaataccctttattggatcgggcctcctggcgaaaaaaatgatgtggggccggatacagattttgcagcggttgatgcaggttatgtttccatcacaccattacatgttgattcaacagcgtataaagcgcttgagttattaaaagattggttaaataaagcagaggtcgaaaaaacatgttaa

SEQ ID NO: 309538 - DNA, 1053 bp, Proteus mirabilis
atgagtgatttaccagaacttcattggctacatggcaaaccgacagcgacagggcgattaaaatcgacaccagaagattttaaggtcagcgaagatctcggctttaccttagatggtgaaggcgaacacgtgatggttagagtcagaaaaacaggttgtaatacggcttttgtggctgaaaagttagctaaatttgccggtattcatcctcgagatgctagttatgctgggctcaaagacagaaatgcggttacggaacaatggttttgtttgcgtatgccgggtaaagagatgcccgactttagtcaatttacgttagaaggttgcgaaatattagcaactacccgccagcaacgtaagctacgtattgggacattaaaagggaaccatttcaccttagtattacgtgatatctccgatgtgacatcggtggaaactcgtctagtagagatacaaaaacaaggggttcctaactattttggtgtgcaacgctttggtcgtaatggcgacaatttacgccaagcatggcgttgggcaaccaatgaaattcgggtaaaagagcgtagcaaacgtagcttttatctctcagctgcacgtagtgcgatgtttaatcatctggtgagccaacgacttgagcgtcatatttatactcaagtgctttgtggtgatgcgatgcaattgcacggtaaaagaagttggtttgtggcagaagaagcggaacttgcccaaacacaaacacgctatgaagagcatgatatacatattaccgctccactgccgggtaaaggtgacttaggtacacaagcacaagcactgatatttgaaaccgacaacttagctgactacgaagcattatggtcattagcacaacaagagcgagttgataccactcgccgtgcgattaatttgctaccagaaaatatgtcatggcattggctagatgatactacggtttctttatcgttctttttgccagcaggaagttttgccactagcgttgtccgtgaattgatattattagggaatattgatgctgaaaatattagtgagtaa

SEQ ID NO: 309539 - DNA, 321 bp, Proteus mirabilis; identical to SEQ ID NO: 308586

SEQ ID NO: 309540 - DNA, 363 bp, Proteus mirabilis
atgataaccaccatctttaaagattttcagtttgaagctgcgcaccacttaccccatgttcccaaaggccataaatgtggacgtttacatgggcattcatttttagtgagattagaaatcactggtgaagtagatgcgcagtcaggttggctaattgattttgctgatgtgaaagccgcatttaaaccgactcttgataggctcgaccactattatcttaatgacattgaagggttagaaaatccaaccagcgaagtactggcaaaatggatttggcaacaagttaaaccatcactccccctgttatccgccgtgatggttaaagagacatgtaccgcaggatgtatttatcgtggtgagtaa

SEQ ID NO: 309541 - DNA, 771 bp, Proteus mirabilis
atgcctaatataacactacaaaaacaacccgttattgcctatttagagagtattgaaaatgtagtaggcagtgaaataggtaatgatattatttatggtgaccaaaaaaataactatttaaatggcatgggaggggtagattcattatatggattagctggagatgatacgctggtattacgggaaggttatgcacaaggaggggcaggaaatgatagttatactattctaagagcatcaaatacggataataatgttaaacaacttgaaactattattgatgaagagacgcatacagaagctagtcttatccagttaaattatacttttgatgaaattaccgctatttctcgtcgtgaaacagatattgtttttacgcttaaagttagtaatgacaaagatcctgatcaatttatcgagcatttaattgcattaagtcatgtataccaagataaaaatagtcaattattagcccatcgatataccattgtgactatggatggttttatacttactattaatgaaaataataatcaaccaagagaggtatcatataactttagttatttagaaaagtataatcagcaagagaagcttcaacagctttctattaatgacgataaacacacattgtctattcaatctgaaaataaaactaaacttattcaattattacctgagctacaatacagtggtttctcttctggagaacatttaaagcttaatctacagggtaatagcgaaaataatcattatgctggaatgttatga

SEQ ID NO: 309542 - DNA, 786 bp, Proteus mirabilis
ttgagtgtattaaatagttttgttgcagaacggaatcaggctattcaatttcacaggttatttgcagcaattgcggagcaagaagggcaaccgattgatgttgtcgcggcttttttttataggaatcgtacagaaatagctgagggaattccatttcctgcataccaatgttatttgtactcaagaatttctggtttcgatccgtatcctgatcaatggtttcaagaaagatgttttgatttgataagggcgattggcgaacagtatcaaatttatgatgaagagttaccagaaaatgaatttggctacatggtaactccgaataaatgtactggattgcctgatgattaccaaggtttcttccctgagttttatttcaaatacgacgaaattaaatcatttttaaatgctcataatattgaatttcctgagcagcttgaaattgttgatactaatccctcaaaaaaagaagaccctacagatggcatagctacagaagaaataacggttacaacacattcagtggaactagacaaacccatgagaacaagagaaagaaataaccttcatgcgattattggtgggttgctggttagcattatcaaaaatagtaaaaaaaatcagagttctgttatttatgaactaactgagctatttcaagatgcggagccattttctaaaagaaatttagaagaaagattctctaaatctaaaaaagttttaaaagataaaggatttgagttcgatgagctaaaagctatccctgatgaggtgaaaaatgattga

SEQ ID NO: 309543 - DNA, 771 bp, Proteus mirabilis
atgattgattacgataaggagagctgcgcttcgtttcaacgtttatattcatactataatgttgaacaaatggctatgctatggtgtggaataaaaccgtctgatttcgatgaggtgatctctgagtgtgaatatataaaaagagccgtacctaaacacccatatattggatgtttggaacatcgagctatggctatcatggatggaatagaagcgagacaattagctgttggacgggatggacgtaatcatgaaataaatgagcatgatcatatagccccagaaagaagaacggtgttattaaaagattttaaagaatggttaattgagttttatcctaatgagaagcctaaacttatatttgatgatattgagcgaaatatgcatacatcaattacggttgaagcatatcaaattcttagggctgatagagatcacttgcaagtcagaataaataatgccgaagagatatttaaagtacaaaaaaaagaattagagttattgaaaagagaaaatatggctctaaaaaatataaatgaacagagtctaccgaatatcaactctagagcagaaaaaacatatctaaatattatcggtgggttattagatgttattttaggaaagtctccatcgggtaaaaaactatctgtctataacaatcaaactagcgtgataaatgctttacttgcaaagcatgaagggaaagctggaattagcaaaagaacattagaggaaaagttttcggatgcgaatgaaagtataaatcaataa

SEQ ID NO: 309544 - DNA, 1128 bp, Proteus mirabilis
atgccaaaaatatttagtttatatactgatcctgaaaaagcattatccttcatatgctctgttacaaaaattgttgccagaggaaagttcaaggcggtaacattaaattatagtaatgtagatacgtattgcttaggggctgagtgtctgcttggtttagctcttattgaagccagaaaagttaactcaaattttgatagcaatattgcgataaacggagtttatcctaaaaataccgagcatttagagataataagggatgtagggttagttaaagaacttagcgaatccaaagaaagtaaaatagaggattcatcagttaaaagagataaccctaaacagaggatttttaaaggggagagcataggtaaggaaaaagcgtcagcgtatgcagaagatactaaaaataaagctgcgcagggttttactaattacctcagtaaatgcttgggtgatcacaaactatttttaaatgaaaaagcagctgaacaccttacatcctgcatgggagaattgcttgataatgcagaaaggcactgcggtattgatgagagaccaaggtggtatttgagagggtacgttgataatagctccaagaggccggtttgtgagctttctatttttaattttggtcgtacaattgctgaaactttcagtgacctacctctagaacatttttcaatgtctaggcaaatcacaccttatgtagagaaacataagaaaaaaaatggcatgtttgaggaaggtttaataactgttgctgctctacaaggtagagtaagctgtaaaaatatgcatgatactgatagttctggtactggcacgattgagttacttaagtttttccaagatatgcacgaccaacttagaaagatcagagaaggcatttctgaaaagccgatgatatcgttgatttcagggagaacccatatagtacttgatggtagttatgatctgaaagttagtacatcaaatgatggggaaagcgagaattacacttatccatttaatgagatagggcttgagcaagctccagacaaagagtatcttagaaaaatgaaaaaagctcttttccctggtgtcatggtaaatatccgctttccacttgaagaagtaacaggtaattga

SEQ ID NO: 309545 - DNA, 705 bp, Proteus mirabilis; identical to SEQ ID NO: 14478

SEQ ID NO: 309546 - DNA, 1011 bp, Proteus mirabilis
atggcaactatcaaggatgtggcaaaagaagcgggtgtttctgttgctacggtatctcgggtcattaataactcaccaaaagcgagccgagcatcgatagagattgtcaattcggcaatgcaaaaattaggttatcgccccaatgctgctgcgcgagcgctggtcagtcaaagtacccaaacattaggtgttttggtgcatgacgtatccgatcccttttttgggaccttggtcaaagcggtcgataatatcgccagaaaagcgggaaaacatattctggtgtgtaatggttaccatgatgcgcaagatgaacgccaatctattgaactcttgatcaacagccgttgtgatggtttagtgatccactctaaggcactttctgatgaagagttgttagcttatgccaatgaagtcaatagcatggtattaattaaccgttttatcccagaaattgcggaacgttgtgtcgccttagataactacaaaggggcatggattgccaccgaacatcttattcgtcagggtcatactcaaatcgcctatatctcatccactcaccatattgaagataccagccaaaggcttgcgggatataaagctgctttagcggcttataatattagtttgcctgaaagctatgttgaatatggcgagccagaaggcgaagggggagagcaagcgatgatgcgtctattaaccaagtcgatagattttacagcagtggtcacctataacgactttatggctgctggggcattatcggtgcttgatgaaaatgagatccctgttcctgaaaaaatttcagtgattggctttgatgatgtacttatcgctcgttatattcatcctcggctaacaacggtgcgttatccgatacatatgatggcagagcaagcagcaacattagcgttaaagctttctcaaggggaagtcctaacccaaaagcagcgtatttactcacccactctggttcagcgcaactccgtttataatttaagccatctttcttaa

SEQ ID NO: 309547 - DNA, 300 bp, Proteus mirabilis
atgaatattgatgaattaattactcttcctgacttaagtaaattaacagaaggcgagttgggaaaattaagagcaaacttagacttatctattgattcactcattacgggaatgaacatatttggtgaatttatgttttgggctgataacaatgaaaattatcaagatggaaaaaatcatattagtgatgtgggattatttataagccaaatgtcgttattaatatcaatattaaatgaaaggtttggcggagttgaatatgaaatatcaaatcgaagaataaaaggaacaaaaaaatga

SEQ ID NO: 309548 - DNA, 2547 bp, Proteus mirabilis
ttgttaaagaaaacaatcaaatggacagggatgatactactgggtgtcggtgcagttagcacgaccttgtggctcaccattccacgttggttacctgttgtggctaaaagctatttacctgaaggtgtttcactctctttaacacaacctaggttacaacaatggggtgtttttattgatgatatcgcattaaaaagtgatagctgtaccttggctaatgtgcagcaatttacgtttaactatcaaaaacagcaaattgatagcctatcatttaatagtcaacaaattactattaacgaagggtgtttttcacaattatcttttgcagataaaaaagagaccgcaacagttcctctcgatattcatgcgttattagctactattcctcacttatcggttgatatcaatcatgtttctttaatggataatcagcgctataacggccattttcagcttaaaagtgatacaaatgggcgattaatcagctatcagggagataatacgcagatacaagcgctgatccgtgataatcaatggttagatattaaacaattaaagattaatttacctgacgataatcagatagagctggcggctgaaatagcgttaccccttaatgttgattcattaccagaaaatggttctatcagcacaacattgttaacatcccattatgcttacccattagtctttattgctcaatggcaagggaatagcggtactatttctattgctgaacaaggaggagggcaagcgttagctgtgttgccttggaatgtaactgcagaaaatatcacgatagaaaaagggcgttgggaatggtttgggtttgatcaacccttacgtggtggtgtgaatatcaacattgcccagtggcagcaaggattaacgggattacgcttaactgcgcgcttaaatgttatgacgcaagggcatgcaggaaaagggaatttagtgataacgatacctgaaacggcgattaactggttagatgctgatatacctattcaattgacaggaattgtaaataaagatctcatgcaagccagtgcacaacttcccgttaaagtgactggtatgttgacagatcctactatcgaatttcagcccggttcactattacgctttaaagggcaactaacagaaacgctgacggtaaaagatgctcgtttaccactggctggctcaacattatcttccaaaggatttaatggtcacctaaatgcgattgtgttagctgaagatactatttggggagattatcgggtccattttgctggacgttcgaccgattttttacctgatcagggcaattggcaatggcgttattggggagagggcaatttattgccattaaaagcgcgttgggatatcgctggaactggctcttgggtagataacatggtgagttttgagacattaaataccggatttgatgttttaacttatcagcataccagtatgttagcacccagattgacgctcttaacgccatttcgttggttaagagacgataaaaaaccattatttgaaggaaaattgaagttaaccagtcaacgaatcgattttcctgcggggggattcttagatagagctgactttattgccagtgtaaaaggtcaatctccttttcgttttaatatgaaaggcgagctcaatgccaagccaactattggaccgataacgattaatacacgttgggatggtgaaaggctaagagggcagatgcgttggcctgcacaaccaatcaatgcctttcaatctttattgccagaaaaattaggcatcacattagataatggcgaattttatacacaagctgacttttctattgcccctcaacaaggtttagttgctggtggacatttagtagttaagcaaggcagcatgtggctaaaagatggcgtattagaaggactcgattttattttaccttggcgtttaaacggtgatgaatggcaactaggtgtaaagcagccagtgcaattacggattaagcgcgtcaataatttatttgaaatgacagacattaccgccgatctgcaaggattttaccctattacagaagcaaaacctttagttttatctaatgttaaggttgccatgcttgatggcactatttctatggctaaattagcattaccacagcatgaagcggcgattatttcattagacaatctagagttaagtcggcttttcactttattgaaggtgacccaatttgccgcatcaggtaaagtaagtggcgaattacctttctttatcaataacaatcagtggatagtgaaagacgggtggctggctaattcatcatatttaaccctcaggcttgataaagattttgttgactctattgatgatagcaatatgacagccggtgtcgctatggcatggttacgatatttagagattagccgctcttggacgcgggttaatttaagcaacctaggaaatatttttcagttatggcgcagcttgcgatttggttcgcaattggaagagtggttagaaaagagcctatccgatttagggagtgagtcagaatga

SEQ ID NO: 309549 - DNA, 1818 bp, Proteus mirabilis
gtggctttaacgttggaagaggatggtgcctatttatatgaagatgtgattggtaaaccgtttgagcgtccaccgtttgtgagtttacccactggcggtgttgcttcccctattaatcttgcttttgttccacttgccgtcagtgacattgttcaaggtatgctttcttggcagaatgtggcgtctgatgtgcgctacaacacggttaatatccttcaaaacggtagagtgattcaatctattcaggtgccgggtgagcgcgttgatattaacggattagcacgaggaacttatcgtgttgaagttagagcgacgaatatggcgggggcaatgtcggcacccgctatcagtgattttgctatccaagcaccgccagctcccattaaggttgatgttacttcgggaatgttcagcctcaccgtctcgccaaaacaaggtgatagtgctgtctttggttatacctttgaattttggtttagtgaggaaaaactcgctgatctttctgaaaatgaagtgatcaccaaaacaaataaagttggccaaggaaatttctggacgcaagagaatttaaaagcagggcatacgtattatttttatgttcgaacaatcaacagctatggcaaatcaccttttgtggaagcttcgggtgtttgctcttctcaaacggatttaattcttgaggaattagcggggcaaattagtcgagatcaactcgcacaagatttattgggtgaaattaacagtaaagctaaccaaatcgatattactgaattacatgagttaatgaggataaatcacgacaagcttttagaagagtcaatgaggcaaggcgcgacgattgaagaaagtgaaaaaaaatgggaggaggccgaaaaattactggctgagcggattaaccaagtttcaacggtaacagaggctcaggccgccgcaattaaacaagagcaacaagcacgtattgatgcagataaagctgaagcgcaacaacggcaatctttagcgactcaacttcgtggtgattatacaggcaatgatttatcgaaagtcaccgcaggacttatctccgctgagaagcaagcgcgagttacaggtgaccaagcagaagcgaaagcccgacaatcattggaaacacggatgaatgggaatgtttcagcgattaataaatcattagaaaccctcacctcgaaacagcaagcacaaacgcaagagatttcaacgctcaattcaaatcttaaggggaaagctgatagcagtgtggtgaatgcgttaaatacgcgggtgtcgaatatcgatggaaaaatgacggctaccgctcagcaagtcactcgcctagaaagccaagtgggttcaagttcagccaaaatagagcaaacctcgaaagtggtcacagacataaatggcaaaatctccgcatcatggacaatgaaagtccagcaggatagcaaagggaataaagtcattaccggcattggcttaggatttaatgcgcaaggaaatagccaatttctggttaatgcccaaaactttgcggtgatatcgtcattaaacggcaaagtggtgacaccgtttgtcgtgaagaatggacaggtggttattcatgaagccttaatggataaagcgtggatacagaaactagtagtactcaattattttaaatcatcgggatttgataaagggaatggctttttattggatgcaaaaaacaatattttccgctttacgggtggtaatggggcattaaatatcaccaataatcaattggtcgtcaaagatgagaaaaaacgccttgtgatgaaaatcggttatctagggagttga

SEQ ID NO: 309550 - DNA, 252 bp, Proteus mirabilis
atgaataagacattaataggaatagctttattttctttagccacaccatatgcggtaggctggcaacaaaattttttgcatgtaccgtcaaatggtagtactgcatcagcaacagcccctgcgcttaatgtgacagatgctaacgccagtggtgtaattaaggtgaccatacctcaggttaaagggtggcgggttatcgcttcttactgtagtggttcaggctcaatggcagaagaaggaaattaccgctaa

SEQ ID NO: 309551 - DNA, 135 bp, Proteus mirabilis; identical to SEQ ID NO: 296591

SEQ ID NO: 309552 - DNA, 714 bp, Proteus mirabilis
ttgctagataaagaagggaaaataataagtgatgcctatgtactatgtgataatgaacactattttttaatttcagagtggatgaatagtgatgccatatgccagcagataaaaaaagtattagataagcaagatgaacgaggtgaatgctatcaaattgatgctatcgcttctcttactccagattggcgtatgatctgtctggaaggcccctatgcttgggaaattttatctgaaatcgtcggtatggatattattggattaccttttcatgagtttatgtatgttgatgaagatgtcattactatgcgtgttggtaaacacggtgaatattgttatcacattatgggagatgaagagaagttaatgtctatttggcgacatttatgcactttatctgagaaatttgatttaaagattggtggggttgatgatttaaaaaacatacgactagaaaatccttgttgggagcctcaagtgattaattcttttagtcgctgtcctattgagttacagatgcaatgggcgattagttacgataaagatgcatttattggtcaagatgcaataaaacaacgtgccgataatggggtagatcagaaaatagtgggcgcaagaataattaatatgcatcagaatgcaagcgggatactcttttatattaaaagaacatattgccagaatattattaaaacgagaatttgcttacgttga

SEQ ID NO: 309553 - DNA, 861 bp, Proteus mirabilis
atgcgtggaaaatttactcccacattacctaaaataggcaagattacatatagctttcgccaagggaaaaacactcaatcttccgatttcgatatatttgatattggagtcccggggctaggtattattattggtatggcaggctattggcctgcaacgcctttggttcccataaacagctcaagtatatatattgatcctgttgccgccaatacaaatccaaatgcttataatggtgcaactggaagttttggtgctcgtttatatgttgcttttgtcgcaacaggacgattacctaatgggtatgtaacgataccaaccaaacaactgggccatattttattggaatctaatcgggcaagtttgaataataaaagattaacagctcctgttatgttaaatggagggcgcatccaagtgcaaagccaaacatgctcgatgaatcaaaagaattatgttgttccattaaatactgtctatcaatcccagttcacgtctttgtataaagaagtgcaaggaggggaagttaatatacaacttcaatgccaagacggtattgatgtttatgctacattaaatgatgcgacccaacatgggaatcgttctgatatattaacattagcaacggattctacggcaaaaggcgttgggctaagattatataaaaataatgaagtaactgcgattagttatggttcagacactcctaacaaaggaaatcaaaatcaatggcatttttcaaattatagaggagagataaatccacgtataaaattaaaagctaattatataaaaacagaaaatactattacgccaggaagtgtaaaagcagtagcaacgattactttttcatatcaataa

SEQ ID NO: 309554 - DNA, 624 bp, Proteus mirabilis; identical to SEQ ID NO: 296788

SEQ ID NO: 309555 - DNA, 162 bp, Proteus mirabilis
atgggggtattacctgaaatacctccacctcaaagtaagtatattaaaatgaaagatttttatttgttaatttggacaggaatgtaccctaatgaagaatgtgttgtatatacacctgaactttataaagaagttccttccgtagaaataggctcattctag

SEQ ID NO: 309556 - DNA, 153 bp, Proteus mirabilis
atgaaaaaggctcaaccaaatgataaaaggaaaaatcggtttagtcaggcgcaaatagaactatggaaaaaggagcaagaagaccaagaaccacgagatgcctggcttactgaaagtgaagaggcgataaaacgtcacatgaaagacttatag

SEQ ID NO: 309557 - DNA, 390 bp, Proteus mirabilis; identical to SEQ ID NO: 305072

SEQ ID NO: 309558 - DNA, 360 bp, Proteus mirabilis
ttgagcaatgagattgatttatccgcaaacttacataaaaaagccgttgaaaaattcaatgacctttactctgcaatctttggcgaaattagctcaatgctaagaaaagcaaagcttagaccaatgatggaattgcaaaaagacaatccatcatttacagaaacagcaaaacagctaaaaacttataaagatctttctaaagcagtagcagagttacttgaacttgatcagagtgaagaactagctatgcttgaggaatatatttcactcgttaccgatttagctacggctattgataacgacgaccatgatgcactatgcggtgccatatccgcattagatgaaaagccttatatctaa

SEQ ID NO: 309559 - DNA, 123 bp, Proteus mirabilis
atgtcaaaacaatatgatttcaaaaaagtatttgaattattaaaccaaatggaagaatgcgtgaaaactgtaacgcagctaaatgagcaaattcagtgtaacggcatgaaaaaagctgcataa

SEQ ID NO: 309560 - DNA, 639 bp, Proteus mirabilis
atgagacagtcaattgttgatacactttcagtactgaaagtgatccccgtgatccaaattaatcgcgccgaagatgcaatttggctgggtgaaatactaacccaaaatcaattacctattgctgaaattacctttcgtactccagcagccgccaaagcaataaagctgatgagagaacactttcctgagcttattctttgtgcgggtaccgtattaacagcgcaacaagctgatatagcaaaagaagcgggtgcaagctttgttatttctcccggttataatccaaaaaccgtcgattattgccttcataatggcattgatattgtgcctggaataaataacccaagccaaattgaagttgctcttgagcggggtttaaccttgctaaaatttttcccagcagaagcttctggtggagtaaaaatgctaaaagcaatggcggcaccttactctcaagttcaatttatgcctactggaggaattagtctaaacaatgttagtgattacctcgctatcgggcaagttatcgcatgtggtggcagttggattgctactactgaggcaattgataatcaagacaaacagactattgctcgcaatattcaaaatatccattcattacttaagaataaaggataa

SEQ ID NO: 309561 - DNA, 810 bp, Proteus mirabilis
atgaattactatatttatacatggaaccctgataaatggaagtggctggaccgaattgaagcaatttgtaaagtgaataacgaagagtattatagccatatatggtctagcaaaaatatcaagaagataaagaaaggagatatattttttttgttacaaacaggtaaaaaaaataggggcataataggattaggcataattgaaggaatagcaaaaaatctacctatttgggatagtgtcagagcaaaaaaaggtgaaattgaagataaagctatattgtcttttaaggttttatcggatatcccaattttatcaagggaagaattattagaaaaatatccacatccaacgaatagtgaatggaaaattcaaacaataggtcaaaatgtccaagatgaattggctgaattattatttaagggtattgaacgaaaaattggcaatatcacgatagacaatacccatgtttcagactcaaaatattatcgtgaaggtaaacctcggacaactacagttacaacttatgataggaattcagaagctagagaagcgtgtttagctgaatatgggtacatttgtagtatatgtaattttgatttttaccgtcattatggtgtgttaggaaaaaattttattgaagttcatcatcttaatcaattagctgatttagctgaagaacatgaaataaatccaatcgaagatttaagacctgtatgctcaaattgtcatagaatgttacataggaaaagacctgctttatcaataaaagaacttcagaaaattatagaaaataatatatctatagtataa

SEQ ID NO: 309562 - DNA, 1083 bp, Proteus mirabilis
atgaattggatgcaagctgttgaggatgcgagcaaagtgacgccagaagatggccttattggcgtcgacaaacttgatagtaatatcaaaatgatcttttctttagcgggtaactatcttgtcaatcaaaaccctgatgttaatgcggcagctaagttacttgaagatgaatctaaagtagagtttatcgttgttagtgatctatatatgtcgccgtcagccaaatacgcagacttagttttaccagaaacgagctttttagagcgttggaatatcggtaatacatggggaacgggcaactatttcttactgtcagaaaaggtcgttgaacctgcttttgaaagacgttctgattatgaatggatcagcgatgttgctgagaaaatgggagtcaaagaggcttttaccgaaggacggacagaaaaagagtggatagcttatctcgttaatactaacaaagaacgctttaaagatagacctgatttcccaacttttgatgaattactcaagactcgccgctatcttttcaaagatgcaccttttgttgcatttgaagaaaatattcgtgatccagaaaatcatcctttcccaactccatcaggaaaaattgaaattttctctaaacgtctctatgacatgaataatgtcgatattcctgcattatctcattatgttcccgcaattgaaggtccagaagataaattgaccgagaaatatccactacaaatgttaacttggaaaggaaaaaatagagctaattcaacgcaatatgctaacccttggctacaagaggtacaacgccaagaaatgtggataaaccctattgatgcacaaaatagaggcatcaaaaatggcgatatggtgcgtatctataacgacagagggatcacacaaatacctgctttagttaccgagcgaattattcctggtgtggttggtttacaggcgggggcttggtggtctcctgacaaagacggcgttgatcatggtgggtgccctaacgttttgacatcaacacgtatgacaccattagcccatggtaattcacatttaaccgttttagttgaggtaaccaaagcatga

SEQ ID NO: 309563 - DNA, 513 bp, Proteus mirabilis
atgaagacaagtagattattgttaataatgattatagctttcatcattgggtttgttttaacgaaaatagttataggatatattgacttaaacaacaatattaccccatggattttagttacattatttatatttccaagctccttttgtgtacaagcaatgctgaaattaccagaatctaatgaacacattcaactaagttcatcagagttaagacggttaaaaggaatagtaagatcaaaacaactaaagctatgtttacttgtttttttctacataatttcagcagtaattattgtaactatgtttttaatgaaaaacttaaatctttattttggtagtattatatcaatatgttttggcttaatattttcctcactatcaactctgttatatataaaatccatcatggatgaaattcagtcttttaaaagcttaatgttgcatagagataacaaagcaaagaaaaaaaatgagctaataaataacctcacaaatacaaataaagaatag

SEQ ID NO: 309564 - DNA, 1023 bp, Proteus mirabilis
atgaaaagagataatagaactaaagttgttcactataaaagagccgtatttatgaactgtgaaacaaccctacaagatgttatatcttcgattatatccaaaaatggtagtgcatcaaaagtatctgacaggcgagaaaaaatatcttcaaataatagtgatggctcattcaaagttatcaataaaaatgaaaactatgaaacaatattatttggacagttaatattgtttgagcaagggaaaagccaagctttaatgacaattgatgatgatttggaatattatgatataaattcaataacatctgagcaaataaaattgtcatctgatgagaaattaacagaagaagatgcaaaaaaaataaaaagagaattcatagattccatactccattttggaatttttaaaaatcatgtaatgattgttcaatcaaaatccctaacctctaaagatatagaaaaccatttaaactggctgatacgtaacttctatgatggtgtaaaagaagatactgtactaattcttcaagataaaccaactgaatcaacaattaaaataatggagaaaacaccagtaaaatcaataaaactaggaagccttccattaaaagctgctcatacaccaaatgaattagaaaaagtaaaaaaaataaaatacatgcctattggtaaaggtggaagtattttaaaagcggcattaggagaggatatttttaatgatctaaacttagaagattctcttgatgacgctaatatacaagttaatttagagattacttattttagaaaaacaacaaaatcagggcaaagagtcttagatagtttagcctgctcaatgagacatattgatgaagaagacatacagatagatctcactggaggcggagtcattaaaggtggacaattaaagcttaaaggtaacttaagcgtgcaatataacaatggactgatcgatgagaatcacctatatttagtcatgcataagtggcttttatcacaagtcaaagatggagaaatagaataa

SEQ ID NO: 309565 - DNA, 183 bp, Proteus mirabilis
atgttctcagaaagacaatcactggtttctcagttaaaaaatacccatcctcgtgatcaagaaattgctaaattagaaggacctaatggcgcaggctacaatgatgaagttgcaaaactaaaaaaagaaaaactctatctaaaagatgaaatgcaaaaaatacttcaacaagctgagaaataa

SEQ ID NO: 309566 - DNA, 342 bp, Proteus mirabilis
atgagtattagtcgtcgttcttttattaaggggatgggtataggatgtgttgggtgtacggtgggaagtttaccaccaggggccctcgcacttaatccagtagcatctcttaagggtcagtctaaattaacaccaagtttgtgtgagatgtgttcttaccgttgtcctatagaagctcaggttgttaataacaaaactgtctttatccaaggtaaccgaaattcaccacatcaaaaaactcgagtctgtgcgagaggaggcagtggtgttagccttatttatgatccgaaacgcattgtaaagcccatgaaacgcaaaggccctagaggtgccggagaatag

SEQ ID NO: 309567 - DNA, 1770 bp, Proteus mirabilis; identical to SEQ ID NO: 305496

SEQ ID NO: 309568 - DNA, 2091 bp, Proteus mirabilis
atggcggttctggttgcctttgtccttgcatgggaaacgctggcgctggatgatgcactggacgttctggacgccatgctggccgttatcatccgtgacgccagaaagattgggcagaaaaaacggctccgctcgctgaaggatctggataaatctgcattggcgctcgccagcgcatgttcgtacttgctgaaagaagaaacaccggacgaatcgattcgtgctgaggtgttcagctacatccctaggcaaaagctggctgaaatcatcacgcttgtccgtgaaattgcccggccctcagacgataattttcatgacgaaatggtggagcagtacgggcgcgttcgtcgtttcctgccccatctgctgaataccgttaaattttcatccgcacctgccggggttaccactctgaatgcctgtgactacctcagccgggagttcagctcacggcggcagttttttgacgacgcaccaacggaaatcatcagtcagtcatggaaacggctggtgattaacaaggaaaaacatatcacccgaaggggatacacgctctgctttctcagtaaactgcaggatagtctgagacggagggatgtctacgttaccggcagtaaccggtggggagatcctcgtgcaagattactacagggtgctgactggcaggcaaatcggattaaggtttatcgttctttggggcacccgacagacccgcaggaagcaataaaatctctgggccatcagcttgatagtcgttacagacaggttgctgcacgtcttggcgaaaatgaggctgtcgaactcgatgtttctggcccgaagccccggttgacaatttctcccctcgccagtcttgatgagccggacagtctgaaacgactgagcaaaatgatcagtgatctgctccctccggtggatttaacggagttgctgctcgaaattaacgcccataccggatttgctgatgagtttttccatgccagtgaagccagtgccagagttgatgatctgcccgtcagcatcagcgccgtgctgatggctgaagcctgcaatatcggtctggaaccactgatcagatcaaatgttcctgcactgacccgacaccggctgaactggacaaaagcgaactatctgcgggctgaaactatcaccagcgctaatgccagactggttgattttcaggcaacgctgccactggcacagatatggggtggaggagaagtggcatctgcagatggaatgcgctttgttacgccagtcagaacaatcaatgccggaccgaaccgcaaatactttggtaataacagagggatcacctggtacaactttgtgtccgatcagtattccggctttcatggcatcgttataccggggacgctgagggactctatctttgtgctggaaggccttctggaacaggagaccgggctgaatccaaccgaaattatgaccgatacggcaggtgccagcgatcttgtctttggccttatggaccatgatgccgactatggcgtgctgaatgatattgccagagggcaatcagatccccgaaaaatagtccttcagtgggacgaaatgatccggaccgcaggctccctgaagctgggcaaagtacaggcctcagtgctggtccgttcattgctgaaaagtgaacgtccctccggactgactcaggcaatcattgaagtggggcgcatcaacaaaacgctgtatctgcttaattatattgatgatgaagattaccgccggcgcattctgacccagcttaatcggggagaaagccgtcatgcagttgccagagccatctgtcacggtcaaaaaggtgagataagaaaacgatataccgacggtcaggaagatcagttgggagctctggggctggtcactaacgccgtcgtgttatggaacactatttatatgcaggcagctctggatcatctccgggcgcagggtgaaacactgaatgatgaagatatcgcacgcctctccccgctttgccacggacatatcaatatgctcggccattattccttcacgctggcagaactggtgaccaaaggtcatctgagaccattaaaagggctttgttga

SEQ ID NO: 309569 - DNA, 924 bp, Proteus mirabilis
gtggcaaagcaaaagttcaaaatcaccaactggcccacctacaataaagccctcatcaaccgtggctccataactttctggctggatgatgaagctattcaggcctggtatgagtcagcaacaccttcttcacgaggcagacctcagcgctattctgaccttgccatcacgactgtgctggtcattaaacgcgtattcaggctgaccctgcgcgctgcgcagggctttattgattccattttttctctgatgaacgttccgctacgctgcccggattacagctgtgtcagcaggcgggcaaagtcggttaatgtcagtttcaaaacgcccacccggggtgaaatcgcacacctggtaattgattccaccgggctgaaggtcttcggtgaaggcgagtggaaagtcaaaaagcatggccaggaacgccgccgtatctggcgtaagctgcatctcgccgttgacagtaaaacacatgaaatcatctgcgctgacctgtcgctgaacaatgtgacggactcagaagccttcccgggtcttatccggcagactcacagaaaaatcagggcagcatcggcagacggcgcttacgacacccggctctgtcacgatgaactgcggcgtaagaaaatcagcgcgcttatcccaccccgaaaaggtgcgggttactggcccggtgaatatgcagaccgtaaccgtgcagtggctaatcagcgaatgaccgggagtaatgcgcggtggaaatggacaacagattacaaccgtcgctcgatagcggaaacggcgatgtaccgggtaaaacagctgttcgggggttcactgacgctgcgtgactacgatggtcaggttgcggaggctatggccctggtacgagcgctgaacaaaatgacgaaagcaggtatgcctgaaagcgtgcgtattacctga

SEQ ID NO: 309570 - DNA, 492 bp, Proteus mirabilis; identical to SEQ ID NO: 305263

SEQ ID NO: 309571 - DNA, 915 bp, Proteus mirabilis
atgtcatctcagttcaatggacttatcccttccaattctttatcttcgtttaatatagaagtgattaaagaacttctgctctggatcgaggtaaatctagaaaagccgttattacttgatgatgttgcgataaaatcaggttatacaaaatggcatttgcaacgggtatttaagcaagcaacgggcttaacattagcctcttatattcgtggtagacgactgaccaaagccgccactgaattgcgcttaactaaacttccggtattaactatcgcactacgctatcaatttgattcgcagcaatcttttacacgccgctttaaagctgtttttggcgttactccttcggaataccgtaaagttgatgtgttgtgtagcgacaattttcagcctcccatcaattttgaagttaccgacctccctattccaaatattatcgagctacctgaaagttttctttatgttattcaataccaatacttttgctctatcgaggatattggcaaactacatgaagatattcgtcatcagttttggaatgattttttgttgtacacagataaaaactttacggaaagtagtgtgttaatttcttatcagccaaatacattacgtaaagataagatccagattgattatgaaattggcctaaacaatttagatcactttaccagaccccgtggttttagaaaaaaagcgattgcaggcgggcgttatgttcgtttccaatttaaaggcacgttagaagaatataaacaatttgccatcaagatctacttttatactttaccggctttggggttatgtcgtcgtttagggccagatattgaaaactacatttgtatagaaacagatagcgacattatggaactaccaaaaacactggaaattgattattacgttccaattcattaa

SEQ ID NO: 309572 - DNA, 624 bp, Proteus mirabilis
atgaaattaaaatcacggcaacaagagaattcagaacaaacacgcttagctttacttgaagccgggcaatatctctttgtaaatcaatgctattatgatgtttccattgatgaaatatcacgttatgcaagggtcactaaaggggcgttttatcatcatttcagtaataaaaaagcccttttgagagagtgttatttactgcaagttaagcatgctgttcaaaaattagatgaagtgcctacttatgatgataaatggcaagagctaacggctctcttctctctttgtgttgaccatatttatcagtgtaaaaacgagttaattcccttacaagaagttatctcggtattaggttggaaagagtgggaagagattgacgccaacattcttattcctcgtatccaacactgtgttgatattctctttgctgaaaaacagatctgtgcttattcaccagctattgtggtgaatttaatttatggttttattactcatattgctatcaatctaaaaaatgaagcgtcattgccgaaagaggcatgtagtgactttaaagctatttttgctgattttttaatcggggtaaaacaagcatcaccacagcgtcatcaacatagggtataa

SEQ ID NO: 309573 - DNA, 432 bp, Proteus mirabilis
atgcctgacccaattgggttattgggtgggataaatctatatcagtatgcgccgaatccgttgggatggattgatccgtgggggttgtcatctcaggaaatggttagagtaaggcaccatacctcagttgaaggcctagaagggataaaaaacacacagtcaatcaaccctgcaagaggaacaccaataggagtgcatatcgagattgctccgtttggagatcccaaaacggcaggtgcagacataggatcttggaaaagtggttcatatgttgagtttgaggttccgaaggaaatgatagttgaaactaacgttgggccaagaaaaacaggggtcataccaactgaacagccattatctctacataataagaatactgtgtttaaaaaacaatcttggtggtctcgtttaacggaaaaaggttgtcgataa

SEQ ID NO: 309574 - DNA, 480 bp, Proteus mirabilis
atgaatatttactatgataataaacttttattagccttgtattcatatttacggcaaactgagttatccatagatagagggttaaatgaatggaagaatgctagatcttacttaaaacatcgctatttagctgataaactaatcatggcattggctataaataaaacactacatcagaagaacacctttagtaaggtatattgctatgcatacctaaagttacgacgtaaacaatatttgacacgacaagagtctgatacaatatgttgtttattaagaactattggaagttatctttctgaagattcacctgatagatctaatttaattaaactaagaatagaactgtataatgctgcaaaattagttagaaaaaggattaccaataataatcgaataatattagctgatagagtagagcattataatcagcatttgcatggtactttttattctatagaagaaataactagtttatag

SEQ ID NO: 309575 - DNA, 948 bp, Proteus mirabilis
atgtcatcacctaaatacctaataaaaagcaacttatcagagaaacaaattgaagcagatattgcatcatactttggttggtgtactccactaaaccaaagtccatttagacttttagatattaatgaacaagtaacaggagcagataagttctatgacggtgcgacagctatttacatgcaattcaaaaagtctcaaggattaaaatctatacaccaggtcgcaatatcaactcgaaaaaatagaagtcctcttgaaagtattcggcagtttcgtgatgtacatcagctagagcaagatccaacactatttttccaactacataaaaaagcagacaaggcaattgatttacaacataatgtgttgctaagctatgagcgtcagccttggtcacgagcattctatgttgccccacttttacttgataaagagagttactacaaagcactttttgatgcaaaaaatagatttcttctagatccatatttttatcgaattagagattcaattcatcacggcaagtgtattagctattttagcaggacgcctttccttcatgaacatgtttctattccaccacatgaaagagttcaagatcatcatcattattatgcatattctgaaacaggaacagatataagttggcattctccgtccattgtagaaagagaaccaagtcgactatctgacttttttgataatctaatttcaacagcagtaaataacccagaagctaccctttcactagaagctctttcagcaagaatttctaatattagttttaatctcggctttcaaactaataatcttaacgatactccggtagcaaggctagcagaacatggtcgctggttgggagacacctatggaattcgtcaatttattcttcttagtaatacacagtatcttaatgaattacgtaacaataagtccgtatcaaaatattaa

SEQ ID NO: 309576 - DNA, 216 bp, Proteus mirabilis
atggctggattacgggaaaaagatagcgacaaaaatatgcttccttgggaatttgctaagtttgttgagtatgtgcaacctaaaattgctgttttagagaatgtaacagggatcttaagggcattcaaagatagcgatggaaagcccttttatgcttggtttgaggttgcaaaagcatttgctgaaaaaaatatattccactatgcttacatgtga

SEQ ID NO: 309577 - DNA, 360 bp, Proteus mirabilis
gtgaacgctaggtttgcaggcgtcccacagaacagacctcgttttatcatgatagcaatacgcgctgatatatttgaagatatcaaaagctcttttgatagtgagagcattgattataaattacttttttcatcagagaaattctacaaacttgttcaaaataacccagacaaagcggtcatgggaacacttgaatgttatgacccagtgaagaatatttcgttgtttgaaggttcatttttgcaccatcttgttggtcatgagcctgtatcagtcaaagaagctttagatgatttaaaacaaacatctccgacaaaatcatcgaaatttgttgaaagcttgaatgaaacattctcatag

SEQ ID NO: 309578 - DNA, 345 bp, Proteus mirabilis
atgaaacattctcatagaagtaatggttatcatgttcagcgtagatttcggttataccaagttgtacaacaaagccaaagtacaacggtaaagaaagaaatattcgatatattgaaaggtgattcttgctcattatcagatgtagtctgggaacaagtaaaaggctatgagtttttaaaagataacaacaaaattgaatgtttcgattcaaaagacagttttattgaatatttacgaaatcacccaactaagaagcattcacaaaaagcgttagatcctaatcaacctgcgccggcggctttatcgatacctgatgatgcatgtcattatgataaaatgaattga

SEQ ID NO: 309579 - DNA, 654 bp, Proteus mirabilis
  misc_feature (618)..(627): n is a, c, g, or t
atgcccaaaactcttatgagtcttaaacaaaatgattttacgcataaaaaaattatcgtaggtattagttcatgcttattaggggataaagtgaggtttgatggtgggcataaatgttgtcatcttgctgctgatgaattatctgagttctttgaatatcaatctacttgcccagaaatggctattggtttaccgacacccagaccagcattacgattagttcagtctaagactggtgaagttaggttaaaatttagtaatggaagtgaaggtgacttaacccaaatgatgaatgattactctatagaatatttgaggagatttaatcaatttagcggttatatcgtgtgtgcgaaatcacccagttgtggattagaacgtgtccgggtttatgatccaataggcaacggcaataaaaaatcgggtacaggcatttttactgaaaatctgaaaagaataatgccgtggttacctatagaagaagatgggcggttaaacgatccctatattagagaaaattttattacacgggtgtttgcgcttaatgagctaaatcaattgaaaataaataactttactcgccaggcattaattgattttcatacaagatacaaactnnnnnnnnnnattcacaaccgctttatcggcaactag

SEQ ID NO: 309580 - DNA, 453 bp, Proteus mirabilis
atgggagaaggttggggggagaaagattattataatgaatctctgatcgaattatcaaaatttaattggcataaaacattatatccattttgtgatttgtttttatttcatcaagttaaagaggttctgttcagacaattatcagtaccctatcatgttaatattgaacaaactcaacgatggacttataaagctaaagatactcaaatgtatatggatttgtttgttttggatgagtgtcgttatttatatgattggatgccttcttttgatatgttttattcagggatgcaagatgtcgaaagacagtacagctttcgatttatattggatgccgttgcgaaacataggatgatatataataatgaattctttttcggaacagcatccgtttgtcgaatggaggacgggttcctagaaaaaatattaaaagttagagatgaaattctttag

SEQ ID NO: 309581 - DNA, 285 bp, Proteus mirabilis
atgacgagcgtaatggctaagcttttgccattctcaccggattcagtcgtcactcatggtgatttctcacttgataaccttatttttgacgaggggaaattaataggttgtattgatgttggacgagtcggaatcgcagaccgataccaggatcttgccatcctatggaactgcctcggtgagttttcaccttcattacagaaacggctttttcataaatatggcattgataatcctgatatgaataaattgcagtttcatttgatgctcgatgagtttttctaa

SEQ ID NO: 309582 - DNA, 195 bp, Proteus mirabilis
atgaaaattttaaatgaatttataaaaattatttttgtaacatttatatcttcaagtgcttttgcaagtaatgaagttttctttcaatgtgccactaaagacggaacaattaacttagagttaattggtaaagacttaaagttaacaatgaaaaaaataactccatttttattgaacgttcttccaaattattag

SEQ ID NO: 309583 - DNA, 183 bp, Proteus mirabilis
atggattatgcaatatataaaaattacgaagatggtcaatataatagcgggttacaagtgactgatttaaatgttaataaagaatataattatgattgcaataaaatacatatcgataaattagatgaattattaaatattctagattgtgacaaggggagtgcgttagggtgcatgcattaa

SEQ ID NO: 309584 - DNA, 135 bp, Proteus mirabilis
atgtaccataacgtagcctatacccttatagctttagagcaagctatcaaggaacctgtagctctaaatgatgaagataaaaaatatctgaaagccttcagagtgcacttttacatcttaatttcgccgaattaa

SEQ ID NO: 309585 - DNA, 555 bp, Proteus mirabilis
atgtatcttcacgaagcacaaaccaatagcttattagctcagctagatagcggtaaactcgactgtgctattttagccatggtaaaagagagtgctccttttatagaagtgcctttgtttgaagagccgatgaaattggctatttatgatgagcatccatggcatgatcgcaaatcagtgccgatgggggacttagcaggccaacgtttattaatgttagaagatgggcattgcttacgtgatcaagctttaggtttttgtttccaagcaggggctaaagaagatacccattttagagcaactagtttagaaacattgcgtaatatggtcgctgcaggaagtggtattacacttttacctgatttagcggtacctcaagcacaaaaacgcgatggcgtttgctatttagattgtacttcacctaatccatcacgttctattattttggcttatcgccccggatcgcctttgcgtaatcgttatgaacaattagcagagacaatccgtgatcatatgaccgcattttatgaggctaagaaagcagcatcaaaataa

SEQ ID NO: 309586 - DNA, 363 bp, Proteus mirabilis
  misc_feature (333)..(342): n is a, c, g, or t
atgaatatccgtgatttggaatatctggtggctctagctgagcataaacattttcgccgtgcggcagattcttgccatgtgagccagccaacattaagtggccaaattcgtaaacttgaggacgaattaggcgttatgttacttgaaagaaccagtcgcaaagtactgtttacccagcagggattattgctagtagagcaagcgaaaacggtattacgtgaagtgaaagtgctacaagaaatggcatcactacaaggtgagagtatggcagggccgttacatattgggcttattcctactgttggaccttatttattaccgcatattattccnnnnnnnnnntattattcccgaattacatag

SEQ ID NO: 309587 - DNA, 843 bp, Proteus mirabilis
gtgatcgacttaaatcgaggtatggtgatccaatctggtaatgatgccagtattgcgttggcagaacatgttgccggtagccaagaaacctttgttgatcttatgaatacctatgccgcgaatttaggtttaaaaaacactcactttaaaacagtacatggtctagattctgaagggcagtacaccacagcacaagatatggcgttattaacagctgccatgatccgcgatgtaccttcagaatatgatattcataaagaaaaagaatttaccttcaacaatattcgccagccaaatcgtaaccgtctattgtggaataaaaatatgaatgtcgacggtgtaaaaaccgggcataccaatggagctggctataaccttgtctcttcggcaaccgaaggaaatatgcgtctgattgcagtggttttaggggcgccatcagataaagtacgttttgctgaaagtgaaagattactcggctggggtttccgcttttttgaaaccgtgacacctgtaaaagagaacgtgcccctgactacgcaaaaagtatggtatggcgataaaggtgaagtggctttaggtgttgctaaagatgcatcaatcaccattcctaaaggagagttaaagaacttaaaagcctcttttacattgactaaccccgaattagaagcaccattaacacaaaatcaagtcgtaggaacagtgaatttcttactaaacgatgaagtgattgagcagcgtccattagtggtaaaagaagcggttgaagaaggggggttctttagtcgtatctgggactttgtggttaaaacagtctctggttggtttaatgcgctttttggttaa

SEQ ID NO: 309588 - DNA, 336 bp, Proteus mirabilis
  misc_feature (319)..(328): n is a, c, g, or t
atgaaaacaaatcttccatccgtattggctaaggttaccgcgggaatgggtttactgctaattatttctagtcctacttttgcggtgaataatcctgtgccgcctcaaattgaggctaaatcttacgtattaatggattataacagtggaaaaatacttgcttcagagaagcctgaagagcgcctagatcctgccagtctaaccaaaataatgagtagttatgtggtagggcaagcgataaaagagggacgtatgtcgcccgatgatattgttattgttgggcgcaatgcttgggcgacgggtaatcctgttttaaagnnnnnnnnnngaatctag

SEQ ID NO: 309589 - DNA, 1182 bp, Proteus mirabilis
atgatgagaaatgtaaaaaacgattttgatgcagtcattgccggtggtggcatgattggcgcagccgttgccattgggctggcgcaagaagggttgcgtgttgcaatggtagaacggcaatctccagcaccttttgatgcctcatctcatcctgatattcgtatttctgcgatcagctgcgcgtccgttagtttattaaaacagctaggtgcatggcaacatgttttagcgatgcgcagtgcgccatacctaaccctcgaaacatgggaagaagataatgcccatgttatttttgatgccaaaagtcttggtttacctgaattaggttatatggttgaaaatcgcattttgcaattggcattgtggcaagaagcagaacgttatagcaatatcactttattatgcccaaatagtctaagtaacatgaaatacttagataataaatggcaagtcacgcttgctgatggtcaggaaatcaccactcagttagttgtaggggccgatggggctaattcgcaagtgcgtcaaatggcagggattggcagtaatggttggcagtatcgtcaatcctgtatgttaatcaccgtgaaaacgcaattgccaccagaaaagggtacatggcaacgcttttacccttcagggccacgggcttatttgcctctgtttgataattgggcttgcttagtttggtatgattctccgcagagaattagaaagctacaaacgatgccaatggcacagttagaaaaagaaatcgaacatgctttccctgaacgcttaggcaaagtgacacctattgcagcaggctctttcccattaactcgtcagcatgctagtcgttatgttgataatggtgtgattttagtgggggatgcggcacatactattaatccattagcaggacagggggttaacctcggttatcgtgatgtggattgcttgcttaatttagtggcgcaagcgaaacagcattttgaaccttggcattcaatggcattgttaaaaaaatatcagcgccgtcgtatgcctgataatatgctgatgcaagcaggaatggatctcttttaccacgcttttagccatcaattaccaggtttaaaattagccagaaatatcgggttattagccgcagcatgcaggaaaagcgaaagaagccgcgttacgttatgctttagggattaa

SEQ ID NO: 309590 - DNA, 249 bp, Proteus mirabilis
atgtcagcaagaattatagatgggaaaacgattgcgcagaccatcagaagtgaagtggcagaaaaagtaaaacaacgtattaagataggaaaacgtgcaccgggtttagcggttattttagtcggtgataaccctgcatcgcaaatctatgttgctagtaaacgtaaagcttgtgatttatctctcgctcttacgatctaccggatactacaagtgaagcagaattactcaatctcattgatactctaa

SEQ ID NO: 309591 - DNA, 258 bp, Proteus mirabilis
atggctaagtatgaagttattatcccttggtatggcacagctaagggtcaagtggtcgagtttgaaaagttacacccagtgttaaagcctaatgttcgcttattgtcagatgaagccgttgcagcattaacgccttcggttgagcagtctaaaaagccaaccaagaaagaggtaatcgaaaaactaactgaattaggtattgagtttgatgagaaagccaagcttgatgagctaatcgctctacttccagacgaatag

SEQ ID NO: 309592 - DNA, 1119 bp, Proteus mirabilis
atgtattttaatgctgaaactttagcaactaacagtcatattcgagatcactggaatcatgtttgggctattcgaaatatgcataacgctcaacaaaacatgatgatgcaagctaatcagcgattcatgactaatgagatgttagtggctaaccaagcgtttatggccgctaatcagttaggtggattttctacaacattttgggctgaattagacaatcaagttatccagttgcgaaatcaaactgacggcatggagatcttagatgatttaatgagtgttcaaaccgtactaccaattggtaagacgctaaaaatgtataatatggtaggtgatattgctgacgatgtagctgtaagcattgatggacaggcaccattctcattcgaccatactagttacgattcagatggagacccaattcctatttatacgtctggttttggtgttaactggcgccacagcgaaggtctcaaaaccgttggtatggacttggttttagattctcatatggcaaaacagcgcaagcacaataagcgattggttagctctgcgttagacggtgatgcgtcaatttcggttgatggtaaaaaaatgcagggtattcgaaaccacagaaatactgtaaaaatcgacttaaaaacagcatctcctggtggcggcgctatcgacttgcgcacggcaactaaagaacaattaattgagttctttagtgctagcggtgcttttggtaagcaagcgtcagtaaacaaagtgtctacttatgacattatgtgggttagcgatgaagtttggtcaaacctgaataagcctaatatggtttcatttggaggtggcaacacaatcgttaatggtactgtccttggtgagattatggcatacatcccagtcaaagaaattcgccgttcatttgcgcttaaaggcaatgaatttattgcatatgagcgcagaaaggatgttatttcccctcttgttggtatgccaacaaatattatccctcttgagcgtcgactaccaacgtcaaactttaacttcatgttaatgacggcgcaaggtatgcaaattaaacgtgatgacgaacgcttatctggcgttatttatggcggcgacctgagctaa

SEQ ID NO: 309593 - DNA, 1908 bp, Proteus mirabilis
atgagcaaattcagagatgcgtcacagcaggggcagatagcgctgaccttaaaaattctcggacacgaatccacggggattgagaattcgtcctctatcttggagccaaattcttatcagcgcgctcaggataccttcagggatagcttacttaagatcgatcccccgggcttacgtgaaatcattgtggcggaaatcgagccacatgcgatttgggtgagttggttgttaaatgaacattcatattataagcgttattttttggacgatcagcaggtcatgagggcgttggtggacaatacgtccgagaaagattgcatctatgtacttcaactagtcgacccccctctgggggcgaataattgggccttcgagaaactagtcaagctgtattggcagtgtgtacgcgactatttgcaaatacatatcgacaagtcgtgggactattcaagccccaaaatacatgagctcctcatctctctatttgcgaattcgccgacagtgcagacgtgccggtgggcttgcaaacaggttttcgaacgagcagatccgtcgatctttggtgagcttatcaaacattgccaaaacatattgccggaggatgtacgtgatctattcctacgctggaacatacgttcgcagaataatatcaaggagtgcgctgccaaagccttctcaaggcttgctgaattgtgcggtgtcactaaacctataccctcggacctcgcacttgcggcggcttggcacgagtttggagacccacagctttctagtcagcaaagcgtcattgccagcctcagagaattgccatcccacccgagggatcgagaaacgctgtggacccaactaggcccagccgctcgcgaggcctggcggcaggatctgttcgatcgggtgaatgaggaacctgaattagcccaggggctcctcaattttgcctgcctttggctcgagcagactgcatttgccgaagtcgagccagtgcttttgcgattgatggatgacgaggaccatctggcgtttgcgaatgggcttgtcgatattcctgtaaggcaactgcaactgaggagtaagggactagtgcggtccaagcagggggcactcgacctggaggggccagtaggccggggcgagggtgatactgcgttgcctagcgtaggagcccaaacttggctgagcgacccttccgtggagcgtgtcatccatagggcgcttagccagatggaggaaaaattttgttgcgaatattcagtgacctggggagaggacgaggagggccatacggcgcgtctcctaacactgacaacagaggcgattgaaaacgcgagcaaacagttgcaccaactctcggttacgacgcgggcgacgtatccgagtctgacagtgaaggtgcgtcaacctggcaagaaagaggaaggggcgaacacatcagccggagctccactgggggcggacgtgctgttcttgagccgtatcgtggacaaggggaaaacagtgagccaacgtgcgacccttgtgcaggtgaaaaagcgcaaaggcactggttcggtaaggggcttcagttcaacggtaggcattgaactgaagcagtgcgaggacatactcaagcagtcagaacacgcctattacctgttcatgactccgccctcggctcacccggttctctgggttgccccagcgcggctcgtcagaaatttgacccagttgcacacgagtaaaactacggttctggcgatgcaggtacgcgacgccagctgctcctacgcggatttttttctgcacgagcttgttggcctgtgggctggtgacgagcataaggacatcatcgccatcgccaacggcgattctcggcttgggcgaatgccccgccacatcgttgatattgaggttaggcgccaatcggattga

SEQ ID NO: 309594 - DNA, 672 bp, Proteus mirabilis
atgtcatcttatgcattaagtgaaccagaatttaatcgactgataactctcgcgagtgatcgctatgattcctcgatatcatattatatccttcgtcgattattggcggtagttgataatacactcgagcactataaccgagtatttgcaatccgagtcgatttacgattcgctcaggatcatattcctgatgccccagatatgccagtatgttttcaacgcacagatgagcgagccattacccgttttattgagtcactgaaaagccaattgagagcagcacatcataattctggacgttctggtacaccgacactcccttattatgtttgggtaagagaacgtaacgaaagtgaataccctcactatcatctagttttgttattcaatgctgacgtttataattatcttggtaactatttacaagatgacgccaataatatggcgactagaatacaacgggcatggtgtagcgctattggcttggcttacccggactacgcgccattagttaactttccagagaatcccgtatttcgatttgatagaggagatgctctgattcgtaattccaattattttgatttcctattacgaataacgtatctggctaaaatgaataccaaggagctcattactgactttagaaacttcggaacaagtcagatttaa

SEQ ID NO: 309595 - DNA, 1494 bp, Proteus mirabilis
atgtcaaatgacaatccagaactgtgtttgcagttgaaatttttacctgaattttttcagcagctgattgggcatatacacactaaaacaggggcgagcccagatattattttacccaccctattaggggttatggggatggggtgtcaggataacgttgatgttcaacctatcgaagggcttcgttatccgacttcgctctatacgctcgtgcttgccaagtcgggcagtaaaaagacatcggtattcagaatgctgatagcacccgttattcagtgggaaaaaacacaaaaagcagaatatggtgcagcacaggcggagtatcaacgacatgaggctatttggaaaatagagctaaaagctcatgagaaacattatcaaaaagtgcttaaggataaaggtgatgtggttgaggctcatcgtcagttagatgaatgcctacaacaagcacctgttaagccggttgaacggcgtttaattatcaatgatcccaccagcgaggcattaactcgggaattaggtcaagggtatccagtgttaacattggcctcagatgaagctggagctctgtttgacggtaatctatttcataaaatttcgttattaaattcactctggtgtggcgagagtatttcggtgagccgtgtttcacacgacagctattttatttcagatgcccgttttagcatcttgttaatgttacaaccggaattgcttaatcattatttgaggaaaaaaggcacgaaatttcggtattctggtggactagtccgttttttactcgtggatttgaacaattccttaacgcgactggatgacttgaaaacgttaccactgagcgatcaggcatttaaagctttctcttctattttgagcggccatttagacaaggctacattgcgaagagagcatggtagtgagcgtcagtgtatcaagttaacggcggaggcacaaaaacgctggtatgaacagcagcgaatcatatcagattgtatgaagcaggacacggcattatcacattatgaagattttattgcacgctatatggagcatgcgtcgagaattgcggcagtgatgcaggtttttatggcaccgaattcaacgctgatcacagaagaaaccttgaatgcggcattttatattacacagtggtatctcaatcactttatcgctaaaactgatgaaactagggagcccagtgatgctgaaaaattactcgattggcttgagagtcatttagagagtaatgggtcttataattttagaacgaattatattattaaatatggaccaagagctgttagacatagtgagcgtttagagccagctattaaccaattggaaagagaggggaaactgaaaaggtttactcaagatggcattggttatgtgggatttattggtgcaaaaatgacacctgaagagctagccgaacgattgaatattccgttcagtagccgaggggtattcatactcaataactcaccaaaataa

SEQ ID NO: 309596 - DNA, 210 bp, Proteus mirabilis
atgtcaacatcaattcaacccttacgtattcttcgcattacagaactcaccaaggcgctgggaatttcacgttccagtatttatgaaaaattgaatccacgttcaaagtattatgatgacacgtttccaaaaccaattaagcttggtgcttcatcggttggatggctatacagttcggtggaaaaatgggttgcttcacgtgaagtttag

SEQ ID NO: 309597 - DNA, 993 bp, Proteus mirabilis
atgagtcatcacaattttgtcagtattatgttaacggtttgtcgagtgttcgagctaaatacaaaagacatcaccggtaacgcactgaatatgcgagataaatatgaaacttcagatttttcattacatcaaaagttttttgatatctattacaataaaatcattggcatgatagatgccgaggcggtttatagtcaggaggacaggcgtgatgtattctataaatacgaacaactgtataacgaagttgtgcatgcagtggtttattcagacttagaaagagatatcatcacaaaaaaatatatggaaacagcgatacccgccattattgcactcgatatgtataaaactctcaatcgccatactcaaaatgcgcagtcccaaagcttttatcaccatatacaggcctttttattgagtgatgacttcccctttgataactcggatcctaaacacctatttcaaggtgccaggcattacttgaaaaaagtccttaaacaacaaggcatacaaccgaaagagagtttaatgggaattgaatcactgattgataatatccggtgtggcaaaaaccaaaaaacaagttcaattaaacacgccattaatatttgcaaatttgaagcgaaggatttcgaaaacgcacttgacgcatttgaaaagacctatacgtctttaaataccttattaagacttcaaaataccacaggatgggtacctctcattactcagcattatcgtgaattgatggaggaaaatatgcgctcatcccatctattatcttctctacatatgtatctctatcgatttgattacgacaaaggtttattagaggagtgtgcgaaaacccttattcattatgccaatgtgattaccccaaaaaaagatcgtatagaacagtacagcctggcgattaattatttaaaatcgatgatatttaaagaagactttccttccgctaatcatactgaaaatgaatttaaaacgttggtttga

SEQ ID NO: 309598 - DNA, 792 bp, Proteus mirabilis
atgaatttaaaacgttggtttgaaaaaagagcggatattcccttattagctccctatgctaaactcactgtaatcatcgatttattgcacaataaaaaacttgaagaagcgtatcaactgacgcatgaaatgttatctgaagaattaccttacggatatttaaaagcagcctttgcaaacattaacctcgcattgaaaataaagctacaaaaaaacacaataaaaaatggaacactattgcgtctaattaatccgattttaaattcgcaaggtgagtatgctgatttcgcactaggttcagcagcatcactaaagaatcccatcatcacagatccgaataatttaacaatccttcgagcaattaaaacctacaacacactcattaccacaattacccccaatgaagataacgaaaagattgaatattattctcaaacgatctcaggcttattaagtgaggttaataccgctcttgaaaaaattgatgaccagctctctgatattgatgagatttctagcgaacattttgccgatttaataattgaacaaaaagtactgacccgtcgagagctcactcaaaacctaattggcatcttaaatcattgtaccctaactaattgtattggctgcttgcctgtgttaatgaaatatctgaaggcaccagatgaaaaacaagaagctatcgcttcttttatgggaatatctaaagacaatgaactcgaaagagacgtattagttgaaacgttacacatcgcgcataaaaagttagatcagcaagccaacacacaataa

SEQ ID NO: 309599 - DNA, 1107 bp, Proteus mirabilis
gtgaatatagatataaataatattttaaatgatgccgtaaaagatatgcctgtagcaaacatcattgttgttggtaaaactggtgttggcaagagttcccttataaatggtgtgtttagaggaaattttgctaagacaggtgttggtaagccagtcactgagaacattaaagttattaaaaaagctggagttcctttacaaatcattgatacacaaggaattgaggttgctgattatgaaaaaacaaggttgaatatagagtcatatattaatgaacataataatagtgagctatcagaaaaatatgttcaccttgcatggttatgtataaatgatatgggaaagagatatgaagaggctgaaatagatatagcaaaatatcttgctagtaaaggtataccagtcattatcgtgctaacaaaaactaatgcgtttaaaaataatgaatttgctgacgaagtcaagagtgcttttaaaaattacagtcatgacgtctgctctacgagagccatagaagaagttatttatgatgaagatgatgcagatgaaattttaggtataagaaaggttaaaggcattgatgaattgattcagatctcctacgagattatccctgaagctcaaaaaaaggcattttccaatgctttgtcaattaaaaataaaaaagcattggaaataaaaaaagagcaagccagtaaagaagtaatagcagctaccgctctagctggaactgcagctgcagttccggtgccattttcagatgcatttacattagtaccgatacaagtcgggatgatagcgaagattagttatacatttggtatggatgtatcaaaagctgctcttactacaatggttacgtctttaattggtgctagcagtgcagtttttgttggtcgggctattgttacaggtttacttaaaatgattccgggtgttggttctgtcgtaggaggtgcaatatcggcaacaactgcgagcgcaataactaaggttttgggggatgcttatgtattaatcctttacacactggcaaccgaatctgaaactggagagattgactttgaattagcagctaagttattaaaatcgaaagtatccttttaa

SEQ ID NO: 309600 - DNA, 1560 bp, Proteus mirabilis
atgacaagtttacaacaacgtgcagaacttcaacgccaaatatgggcgattgccaacgatgtgcgaggctcagtggatggctgggattttaagcagtatgtactgggtacgctgttttaccgctttatcagtgagaactttgttaactacatcacaggcggtgatgagagcgttaattatgctgccatgtctgacgatgacgaaaatatcaagtttgctaaagaagatgccattaaaaccaaaggctattttctttaccctagtcagttgtttagcaatgtggcagccaatgcacataagaacgaaaatttaaatacggatttggcggctatttttgctgccattgaaaactcagccaatggctatgattcagaaaaagacatcaaaggcttgtttgcggattttgataccaccagtaatcgtctgggcaatacagtagaggcaaaaaacaaacgtctggcagcggtgttaaaaggcgtagcaggtttaaccttcggtaattttgaagacaaccaaattgatttatttggtgatgcttacgagttcctgatttctaactatgccgccaatgcgggtaaatccggtggcgaatttttcacccctcagcacgtttcaaaactcatcgcacagctggccatgcacggccagaccagtgtgaataaaatctatgatcctgcggcgggttcgggctcgttgcttttgcaagccaagaagcactttgatgcgcatatcattgaggagggtttctttggccaagagctcaaccacaccacctataacttggcgcgtatgaacatgtttttacacaacattaactacgacaagttcaatattcagctgggtgataccttaaccgaaccacactttttagacgacaaaccctttgatgcgatagtctcgaatcccccttattcggtgaaatggattggtagcgacgaccctaccttaatcaacgacgaccgttttgcacccgcaggcgtgcttgcgcctaaatctaaagccgactttgcctttgtgctgcatgcgctgagttacttatcaagcaaaggccgtgcagccattgtttgctttcccggtattttttaccgtggcggtgctgagcaaaaaattcgccaatacctagttgataacaactatgttgaaacggtgatttcattagcacctaacctgttttttggtaccaccattgccgtgaatatcttagtactgtctaaacacaaaaccgacaccaccacccaatttatcgatgccagcggcctatttaaaaaagaaaccaataataacgttcttactgataaacacattgaagacattatgaaggtgtttgctagcaaagaggacgtggaacactttgccaaatccgttgatttgaatgttatcgcaggcaacagctataacctttcggtaagcagttatgttgaagcaaaagatacgcgtgaaagtatcaacatttcagaacttaatgctgaactgaaaacgaccgttgctaaaattgaagcgcttcgcagtgatattgatgccatagtcgcggaaattgaaggtgaggagatggaagaatga

SEQ ID NO: 309601 - DNA, 1182 bp, Proteus mirabilis
atgagtcagttgagctatatggaaaagttgttggatggggttgaggttgagtggagagcgctaagggacgttgtaaaaacaataacggcaccagcaaagctaaagagagaaagttatcgagaggcaggtcaaacaccaattatcgaccaaggtgaaaaattcattacgggctatacgaacgaagatgttaaagcattacctttgggagaatatgttatttttggtgatcattctgaacatatcaaatatgtagatttttcttttatccaaggcgcagatggcttaaagattttgaaatctatttcggataacccaaaatatgtttattactcttttctaaacttttatcagaaggaacttaattacaaacgacattgggctagagcaagtgagacgctaatccccattccctgcccagataaccccgaaaagtcgctggtaatccaatctgaaatcgtgcgaattttggataaattcactgccctgacagccgagctgacagccgagcttaacatgcggaaaaaacaatacaactactaccgcgaccagttgttaagttttgaagagggtgacgttgagtggaagacgttgctagaagtttgcgattacgttgactatcgtgggaaaaccccacaaaaaacagcctcaggcatattcttagtaactgccaagaatattcgaatgggatatattgattatgaggcgtcccaagaatttatcgatgagaatgattattcattagtaatgagacgaggaattccaaaactaggtgacgttctgataacgacagaggcgccatgtggatttgtcgctcaagtagacagggaaaatattgctttagcccagcgagttattaagtatagaagtaaagatagtcggttatctaattcatttttaaaacattatttactaggtgggcatttccagaaaaagcttcatagcgcagctacaggctctacagtgaagggaattaaaggaagtaaattacatcaattaactattccaattcctagtgaggatgaacaggctagaatagtttctattttggataagttcgacactttaaccacttcaattcaagaaggtctcccacgcgaaattgagttacgtcaaaagcaatacgaatattatcgtgacctattgttaagctttcctaaatctagctcatgtgaggctgtttaa

SEQ ID NO: 309602 - DNA, 1131 bp, Proteus mirabilis
atgagtaaaacgctaacagaaatagcagcgctgttgcaagcatgcgacaaaaaagtacagttgatctatgcctttaatggcactggtaaaacgcgcttgtcgcgcgaatttaaagaactaatcgcgccaaaagacagtgggcaggatgagtttgatgaagaaaagcaagcgccgctctctcgccataaaattttgtattacaacgcgtttaccgaagacttgttttactgggataacgatttagatgctgatgcggagccgaagctaaaaattcaacccaatacgtttacggattggatattaaaagtacagggccaagagcctaatatcactaggctgtttcagcgttatactaacgagaagttgacgcctcattttaatgaagactttactcaagtaactttttcatttgagcgaggaaatgcggaaagagcacagcatataaaaatatctaagggcgaagaaagtaattttgtctggagtgtttttcatggacttctagaacaagttgttagggtgatgaataaccctgatgaagaggatgatgagagcttcaatcaactggaatatgtgttcattgatgatcccgtcagttcattggatgaaaaccatttaattgaacttgcagttaatttagcggaactaattaagttaagtagttcggataagcttaaatttattatatcgacacataatcctcttttttacaatgtgttgcacaatgagcttaatgcgaaaatctgctatttattgcaacgttttgaagacggaacttttgatttaaaagaaaaaagaggtggcgcgaatactagtttttcatatcacttgtatatcaagcaactgattgaacaagcaatcacgagcaatgaaatacagcgctttcactttaatttactgcgcaacctttatgaaaaagtcgcagcatttttggggtacacagattggacggctctattacccgaaaaccgtgagctatatgccaaacgagtaatgcacttttatagtcatcgttcattatcaaacgaagaagttgcagaacctaccgaacctgaaaagcagattgttaagtttctacttgaacatctattaaataactacggtttcaaactgcaaggagcacagaatgactaa

SEQ ID NO: 309603 - DNA, 3117 bp, Proteus mirabilis
atgactaacacaacgaagccgattgcagagtcaaataattttattgtcctagacaaatacacaaagctaacgcaggtaagtgaaagctaccagagcgaaggtgatttagagtgtgagctgattcaggatctaagaaaccagggttatgagtatctacctgcactaacgactccagaggccatgttggtgaatgtgcgcaaacagctacaagctctaaataaagttgagtttgccgatggtgagtgggctcgcttttgcgagcaatacctaaacacaccaagcgacaatattctcgacaaaacccgcaaagtgcacagtgagtatatcttcgattttgtttttgatgatggtcatatcgaaaacatctacttgttcgacaagaagaccattgctcgcaacaaagtgcaggtcattaagcagtttgaacaaaccggaacccatgccaaccgttacgatgtgacgattttggtcaatggtttgcctttagtgcaaattgaactgaaaaaacgtggtgtggcgatccgcgaggcatttaaccaaatacatcgttacagcaaagagagttttaatgaagagaactcgttgtataagttcttacagctgtttgtgatctcaaatggcaccgacacgcgctattttgccaatactaccaagcgtgacaagaacagtttcgacttcacgatgaactgggcgaaatcagacaatacgctgattaaagatttaaaagatttcacggcaacttttttccagaaagaaaccctgcttgaagtcattttgaaatattcagtatttgatgtcagcaataccttgctcgtgatgcgtccttaccagattgcggctaccgagcgcattttatggaaaataaagagtgcttttaacgctaagagctggagcaacaccgatagcggcgggtacatttggcacaccacaggttcaggtaaaacactcactagctttaaagcggcacggttagccacggaattagaatttatagataaagtcttttttgtagtggacagaaaagacctcgactatcagaccatgaaagagtatcagcgtttctcgcctgatagtgtgaatggttcagacagtaccgcagggcttaagagcaaccttgacaaagatgataacaagattgttgttaccacaatccaaaagctcaacaacctaatcaaaagtgagagcaatttacctatctacaacaagcaagtggtatttatttttgatgagtgtcaccgaagtcagtttggtgaagcgcagaaaaacctgaagaagaaattcaaaaagtattaccagtttggctttacgggtacgccaattttccctgaaaacgcattgagtgctgaaacaacgggcagtgtattcggtcagcagttgcacacttatgtgataaccgatgccattcgtgatgaaaaagtactcaaattcaaagtggactataacgacgttcgcccacaatttaagagcattgagactgaacaggacgataagaaactcagcgcttttgaaaccaagcaagcgtttttacacccgatgcggctccgtgaaatctcacagtatattctgagccattttaaccagaaaacgcatcgcacttattctggtgcgaaagggtttaatgccatgtttgcggtaagtagtgttgatgctgctaaggcgtattatgaaacctttaaagcattgcaggccaaggctgaaaagggtcccacaagtaaacctctgcgcattgcgactatcttctcatttgcagctaatgaagagcaggacgccattggtgatattttagatgagagctttgaagtcagtgctatgaatagcagtgcgaaagagtttttgaacgctgcgattacggattataacaaaatgtttaaatctaactatggcgtggatagtaatggctttcagaactactaccgtgaccttgcccagcgagttaagaatcaagaaatagatttgctcattgtggtggggatgtttttaacaggctttgatgcgcctacgctcaataccttgtttgttgataagaatttacgctatcacggtttgatgcaggcattttctcgcactaaccgcatttatgatgcaactaaaacctttggcaatattgttaccttccgggacttggaacaggcgaccatagatgccatcaccttgtttggagacaaaaataccaaaaatgtggtactggagaagagctataaggaatatatggagggctttaacgatattgttactggccaagcgcgtcgaggttttatcgatatcgtaaaagagctgcaagaacgctttccaaaccctgaacacattgaaaaagaacaagataaaaaagaatttgccaagctttttggtgaatacctaaaagcagaaaatattttacaaaactacgatgagtttgctggtttaaaggccctgcaaagtttagataccaatgatgaacaagccgttgaagagttcaagtcaaagtactatctggacgatgctgacatcgaggaaatgcaaaccattgatatgcctagcgagcgtgctatccaagattatcgttctacttacaacgatacccgcgactggttacgacgtgataaagaaggtcaggacaaagataaatcaacggtagactgggacgatgtggtctttgaaattgatttgcttaaatctcaagaaataaacctcgattacattcttgaactgatttttgatcataataagaagaacaagagtaaagaaggtttgattgaagaagtccgtcgtatgatccgcggtagccttggcaatagagcgaaagagagtttagtggttgattttattaatcagacaaaccttgatgagatcaatgacaaagccagcatcatcgacgccttcttcaagttcgctcaggcggaacagaagcgcgaagccgatgccattattgtctctgaaaagctaaatgaagaagcagccaaacgctatattgcctcatcactcaagcgagagtatgcctctgaaaatggcactgcgcttaatgaagcattacctaagctcagcccattgaacccacaatatcggacccagaagcaaacggtttttcagaaaatcgccgcttttgttgaaaaattcaaaggtgtgggtgggcagatataa

SEQ ID NO: 309604 - DNA, 1206 bp, Proteus mirabilis
gtgtcttcgaagagagagccaatcaaaattgatctttctaacgatgacttagatgacgagctggccacattttttcgttttatcaataaagttttggatactgataacttagtcatactggctggttcaggcacgtctttaacatttaataggccttctcagcagaaccaatcacctatcgctccaagtatgtggcacctttgggattattgtaaaagagcagatgagaatctttttcaattggttttgaaggcgacaaattatgatgtccttcaaaaacatcgtgaagcaaacggagatgcaaagccagatattgaactattattgtctctttgtgattcctctttagccgttgggaacctttcaaatcaaagaactaatcaagtaagtaagttccttgagcaagccaaaaatatcattttagctaaaactagctttactgaatcgatcccagaatcagattgggttagtcatgataaatttatgcgtgcagtaggtagaaggagtgctcagcaacaacgacttaaacttttcacgactaattatgacttggcttttgagtacgctgcatcaaatactggttttgttgttattgatggttttgagttttctaacccttctttttttaatcctatgtggttcaagtatgacatagtgaaccgtgggcagtccaagagcagtgagggcgcatacatctccaatgtggttcagctatacaagatgcatggctctgtggactggagaaaatttaacggcagagttagaaagttaggtgctgatagcaaaattggtgaacctgtttttatctatccaagtagtagcaaatatcagacttcttatgattctccttacttagatatgatgacttcttttttggaagtagttaaacaacccaaaacggccgtattgtgtctaggctttggttttaatgataagcatataaataatgcattaactatggcgcttaggactaatcctgagtttatgctaatggtggcaactaaagatccatttagtgtaactggttcatttaatagtgaaattaggaatctgctaatggctgctattgaccatggtgatggcagaatcgcgataatggattcaacgtttaaacagttttcttatctgctacctgagcgaagatcaacaactcccgaggatgaactcttcgaagcatttgaaaagatcacagcgaacattaaatag

SEQ ID NO: 309605 - DNA, 1740 bp, Proteus mirabilis
atggagcggaaaaagtggttttccccgtatgatccaacaagacggattggtagcgtcattagcgtatctgcaaccgagctaatcattaacttatctaaagcgggatctggtgagcccagttggtcattcggaaatcgaatagcagctggagaagtaaatgaatttgtattcatcgatataggtgaaacagcgatacttgggcgcttagtgaaagtgtggattgagggaggagagagattaagtgttgacggtttggctgataaaccatccgcaaatcaccctattggactggttcaattattggtgagtctgaatccagctagtggtcgtaactacaaaggaattaagcagcatccgagattaggtagccaaatatattcagctcacccgtatctggtatcaataatcgctgaaggtaaacaagatgagaagcctggccaaatccatttaccattagcctcacttccgcatgatgaatccgtaactgttcacattactccagaaaaattattttcacgccattgcgctattttaggggcaactggtggcgggaaaagttactcaatgacaaacatcattgagcaagtgattaaagctggaggcaaagcaattattatcgacccgacgggggaatatgagtcactgggctgtgatagttactatgttggcaatcatacaaatgcaacaccgttgaatcagttaacttttccacattggcagtttacagactcagatattagagcatttttaaggccttcagcgcaaagccaagcgcctaaattagaggcggctattgagagtcaaaaaatagtgtggcaattttggcagcaacacaatcatggacttgatattactgcaaattatcttttgaacaaatcaggccaagcaaaggcatcttacgaagccgctctgttatctatgaatagctctattcaaacagctccatggttgtttaaaaacattgccgatcagattgtaaacgagtgtgtgtggcctaatggaggtactggtaataatcctaaccccactatttggggcggtagagctgataatgatgtcggccactgtttaaacctgatagctcgaattaaagcctattcaaacaatcccaatttaaaatggatgattgacgcagatgatgaattaaaaaccttacctaaccttattgatgagttttgttcaccaataagtaacaataatgtgttgagattagatctttctgaagttccatttgaagcaaactcaagagaaatacttgttaatgccataggtagaaagttgttatctgtagcgaggcaaggcgcaataaatcatggtgcacctctattagtatttattgatgaagctcatcaatttctaaataagcgtatcggtgaagaaacgaatagatttgagttggatgcctttggaaatatagctaaagaaggtagaaagtatggtttgaatactatcattgctactcagcggccacgtgacattcctgaggatgttttaagtcagattggtacactgatagtgcataggttgactaatcagctggaccaagaaattgtaaaaaaagctgttggtgctattgatcaacgttcagcgtcttttctacctgtattgggacaaggagaagcgctgttattaggagtcgatttcccattccctatgacagtgaaaatgaaacgtcctataaatgcaccaacttcgaaaagtgctagcttttctaaaagttggaaacctttgcaaaattag

SEQ ID NO: 309606 - DNA, 1122 bp, Proteus mirabilis
atggaactagatttagtcagcgttatcaaactagctctcgagggtaaggataaagacttaaggctttacttagccaaacatattcgctcactcagaaagagtaaccctttactagctaaacaaattgaagagttgttaaaaattcagccagttaggtctcatcaagtaatgagaaaagagacccactcattcgatcttccgataaatgaaactgatgataaacctaccattcctttgaatctcctcaaggaacaggtagccatcaatagttgcgacgaaccccttttacaagaatcggtaaaaaaacaactagaacaagtgcttcttgaaagaaaaaaaattgacttacttactaggaacggtttaacgcccacaaaatcacttatttttagtggtcccccgggggttggaaaaacaatgactgcacaatggttatcatcaagactagatattcctttatatacccttgatttaacaacagtaatgagtagttttttgggtaaaacaggaaacaaccttagaaatgttattgattatgccaaatctcacccatcgatacttttacttgatgaaatagatgctattgcaaaaaaacgtacagatgaatctgatgttggcgaactaaaaagacttgtaaccattatgcttcaagagctcgaagactggcctgctacaggattactcgtcgcagctacaaattatccagagctaatagatcctgcattatggcgtcgttttgactgtgaaatcacgttttcattacccaataataagcaagttagtgaagctatccgtttatattccggtaaagattttaaagtattagagccatggttagagttattaaaagaaaatttttacgggcaatcttacagcaatataaagcgtgagatatttcatttacgtaggctatatttacttcaaccagctgattttgattccaactttatttctcagattaattttgatttaaatgcaaaaactaaaactgaaaaaattaattttgctgtaaaactagtaagtcaatttggatttacgcagcaaaaagcatcgaaagttactagtgtaagtagagatactattcgcaagagactcatgggtaaggagaatcaaagtgagtga

SEQ ID NO: 309607 - DNA, 1155 bp, Proteus mirabilis
  misc_feature (781)..(790): n is a, c, g, or t
atgtctcgttttcgctcaccgtggatgagtattgccattttactcatcttatttaccatcattacgcttatttctgttaatagtggcccgctagcactctcatttagtactttatgggatcgctcttttgatgatatagagtggcaaatttggcttgatattcgtttacctcgagtactattagctattctcgtcggtggcgctttagccatatcaggcaccatcatgcaaggactatttagaaactcacttgccgatcctggattactgggtattagcagtggtgctgcgctaatggtcgctattgtgattattttacccttctcttttttatccgtattttctttctacagtcatattattgccgcctttattggcggcttaatagtggcaatgattattttttcattgcatcaattaagtgatggtaacttggcaagattgctcctagcgggaattgccattaatgcactttgtatgtcttttattggtgtattgagctatatcagcacagatcagcaactgcgccaattttcactatggatgatgggctctttaagtaaaatagactggaacaccttggcgattgcaactctcgtgattattcccattagtgcattagcctgttggcaaggtatcagctatggaataaattatacctacaataaaaatacagttaatcattcttatatttctgatcagaaaagacaaaatgatgatgaacatttgttggctttttcggtgaatgtgccctttagcgtatttgataatactttttatnnnnnnnnnnaacttaacctattacaactcggtgatgaagaagcacattatttagggttaaatgtaagaaaaacaaaatttattttactattactcagtgccattttaatcggttgtgccgttgcattaagtggtgttattgggtttgttggtcttgtggtgccccaccttattcgtatgcgattaggcagtaaccatatttggttattaccggccaccctattagggggagcaatactcttattagccgcagataccctgtcaagaaccttggtatcccctgcggaaattcctgtaggacttattaccggacttcttggtggaccttattttctttggcttattttacgacaaccagcaggacgcatgtcatga

SEQ ID NO: 309608 - DNA, 129 bp, Proteus mirabilis
atgaactctctgtaccgtgtaaatatggttttaataaaagcttcatttgatgaccatgaaaaaaaatcatttattgataaaggttggtttagttgttctagcctagttaactctcgagctagccattga

SEQ ID NO: 309609 - DNA, 618 bp, Proteus mirabilis
atggttgaaggtcaggataaaatctattacatcactgcagatagctatgctgcggccaaaaatagccctcatctagaattattccgtaaaaaaggtattgaagttctactgctatccgatcgcattgatgagtggatgatgaactatctcactgaattcgatggtaaatcattccaatctgtgagcaaagcagatgaatctttagataaactggctgatgaagagaaacaagcgcagcaggaggagacagataaacaactggcaccttttgttgagcgtgtaaaaaacttactaggtgataaagttaaagaggtgaaattaactcatcgtttaacggacacgcctgctattgttactactggtgcggatgaaatgagtacgcaaatggcaaaactttttgcggctgcaggtcaacaagtacccgaagttaaatacaactttgagttaaaccctaatcatccattagtcaaacaaacggctgagttgactgatgaaacacagttcgcggattggatcaatttattactcgatcaagcgctatttgctgaaagaggaactttagaagatccaaaccagtttattcgtttagtgaaccaactattagctaaaaacgcgtaa

SEQ ID NO: 309610 - DNA, 609 bp, Proteus mirabilis
  misc_feature (449)..(458): n is a, c, g, or t
atggggaaaaaacttttatttgcagccattgctgcagggttatttattatgtcaggctgccagaataatattggcctgtcactcgatggtaaaattgttgatcaaacatataacagtattctaccttgtgccgattgttctggtatcgacacgactattcttgtcaatcaagatggctcttatgtaatggagcaaagttaccaaggcacttctgatgacaatcgaagtttttttgagtcaggtacttggtcattaagtaaagataaactgaccttgactaatagttatggcgagaagagttactatttacctcgtgaagataaattagttatgttggatatcgatggtaatgtaattaattcgggtcttaattataccttagcaaaggttcaacctaagcagttagcgggtgaatttacctattttgctgacgctggaacctttaaagnnnnnnnnnnaacacctgtctatctagaggtcagaggttactatagtattcgtccttcaatggaagatggacagtatgatcgtgcattagtggttaccgataataaaccacgctttgatcgtcatggctcttgcaatagccgtcgtaatagcagaagttaa

SEQ ID NO: 309611 - DNA, 243 bp, Proteus mirabilis
atgcggatcttaattattgaagataatatcttacttcgccatcatttatctgtgcagtttcgcgatgcaggacatcaagttgatgcagcacaagatgcgaaagaagccgatcactttatcgcagaaagtacacctgatgtcgccattgttgatttaggtcttcctgatgaagtgatgaagatggtatcagccttattcgtcgatggcgggaaaataatattactattcccattatggtattaa

SEQ ID NO: 309612 - DNA, 1503 bp, Proteus mirabilis
  misc_feature (945)..(954): n is a, c, g, or t
atgagccaaactaaactaacattactaagccgtttaaaaggtgataggggccagcgtagcagtcgtttcacattgcattattactttgtggctcaagatattcatgaacgggccagctcttctcatattcaatatcaattactgagtgatagattacgccacagtgatgtccttttccgctttcagcgcttactgtcaatgcaagcaagagcctgcgaacaagtcgctcaatctattctttggcataaaaagtaccaacataatcctcattttgaacgtgcaatcactcatttagaaaatgcacttaataatgtaaaaaacagtacttctgatccacaaattattgcgccactctataatttattacaaaacttacagggcatcgatgctttattaaaaagtattagtacagagcaatatcaaatctctcatgaccaaaaagaagaaactcagttatctgatgaagggcttactgggtggcgagatatcgtgctaagaataaaaggtcacttaacaccaaaatcagctctatttagacatgcagtacgaatgtcacttgtcttatgtataggttatgtgatcatccagttttttgatttgcatcgaggatactggattttattaaccagtttgtttgtctgtcagcctaactataatgcgacacgtagacgattaacattacgggtcagtggcactattattggtattttaattggtttccctattctctattttgtgccttccatcgaaggtcaattagtgcttattgttgtgacaggtacgctcttttttgctttccgaaccgtacaatacgctcatgccactttgtttattaccctactcgttttattgagttttaatttattaggtgaaggctatgatgtcgcactaccgcggatcattgatacgttaattggatgtgccattgcctggttcgcagtcagnnnnnnnnnnccattgctcatccaaaaaaccatgaccaataactgctactatcttgatgcgatcctcattcagtattatcaaggaagagataatagcgttaattatcgtattgcacgccgtaatgcacatagcagtgatggtgagttagcatctttaatttctaatatgtcatcagagcctaaaagctttcaaacctctcaagaagaagcatttaagttactgtgtttaaatcatactttactgagctatatttcagcgttaggtgttcatcgttgcaaaattgaagatgaagcggtactcaccctgcttaatgatactgtctgttatattgattccgcgttgagacgtaaaaaaccacaagataatgattttatacaatctcacgatcaacttatcgcacgtgttaatgcacaaccaagttcagataacgcccgtattcaattagtgttaacgcaaatacgcttgttactggatttattgccacaaattgtcaattgcattgagctaattgagcaaacagaatggcaaaacgataaagataaattagctacagcttga

SEQ ID NO: 309613 - DNA, 615 bp, Proteus mirabilis
atgtcaattttacctgagcaaaggaaggctcatttattatcgcgcgtagcggaatatggaaagttaagtaagaagtctcaattcggcggttatagcttaatggttgatgaggttatctttgcgattactgctgataatgaattttatttaaaagggagtggttttgttgaaacactctataaagcaaacaacatggatgcatacgtctatctaaaaaaaggtatccccattacattgcgctattatcgtattacgcaagcaatatggcgtaatagcgctaagctcaatcaatatatcgattttgcatatcactatagtactcaggagtttttagggcagcaaaagcagcctcgtcgtatcaaagatttacccaatttgggcatagcattagagaaaaagctgaatcaagttgggattaaccgtatcgaggaattacgtacgatcggtgcgaaggcatgttatttaaaactgattgcgcaacctaagcaaggaaatagcgacttattgcttgcgttagcaggtgctattgttggctgtcatcggtctgtgttacctaatcaattaaaaatggaattgttaaattggtataaagagttatccgttaaatcctattaa

SEQ ID NO: 309614 - DNA, 1446 bp, Proteus mirabilis
atgaccgcattagttattggtaatgctaattatccaggtcaggagctaagaaatactaccaatgattctcaggatatagcagaaaaattatctgaattcggattttctgtaatccatttatctaatgcaaaaaaaagagatattgacgatgctgtaaagtcatttagggataacttgaatagtaatgatatagggcttttctattttgctggtcatggtatgcaaattgatgctgaaaattatattacagctgtcgatactgactttaattctgaaatggatgcaaaatattcatcataccctttgaataaattaattgaaataatggaaagaagtaaaaataaaaccaatatagttatattggatgcatgccgaaacaacccttatgaacgagcatggaatcgaacaccagctcaaagagggctcgcaccactatttgcacccaaaggaactattgtagcttttgctacttcaccaggggaagttgctggtgatggagtcggaagaaatggttgttacacagaagcgttgcttaagcatatcacatctccagatattccaattgaggagatgttcaagagagttagaaattcccttgctgttattacaaaaaataaacagacatcatgggagcatacatcactagctggtgattttttctttaatattagcctagtcaactcgatagggaaatacgcaaaggaatctatagctgacaatctttttcagattaaatcagatgttaagcttcactcaataatatcaaaattaaaactgcatgattggtataaacaaactccggcagcaagaaacgtaacgagtcaggacataaattcttcagatatagattccgcttttgtatttggccgaaatatttatcaggcatcatgcgggagtgctcatggtgcaagtgagtttatatcatcatttcgagaaagaacgcaggatacaaacttagagctaagaattgctattttggatggaatgttatttgagatatttttcaattcaaaaggcgagttgagagatagctttaaaacgtcacaatttaatgaggtttttgagtatcagaaatattcagagtttgatgaatcgtttaaatttatatcagatatattggcaatatatccaaatcgattccacataattccaggtaaaaacagggacgtatcggttgatgtagaaaccaaaagaaatgctaatgatgaatacaaggtaattggtatatacttgggtggcgtgaatattcttagggaagatgaggattacagtttctacgaagaggatgggaaagttccatatgaagcaatcagaaaatcagcttttgagtggagattatctgaagaaatgctagtatcgaaagcaaggttgactattaattttgactttgtggcagatagtaaatcaaaaatattgtttccatatgggtatactgtatcgaagtaa

SEQ ID NO: 309615 - DNA, 807 bp, Proteus mirabilis
atgaggttaatccccctatccacggcacagcaagtgggaaaatggtcggctaattatatcgttgagaaaatcaacgcatttgcgccaagcgccgatcgtccttttgttcttggtttacctactggtggtacgccattagcaacgtacaaagcgctaattgaactacatcgtgcaggtaaagtaagtttccagcatgttgtcaccttcaatatggacgaatatgttggcattccagcagatcacccacaaagttatcgtacttttatgtatgagaacttttttaatcatattgatattaaagatgaaaatatcaatttattaaacggtaatgcaacagatccacaagcagaatgtgcacgttatgaggcgaaaataaagtcttatggcaaaatcaatctgtttatgggaggtgttggtaatgatggtcatatcgcttttaatgaacccgcctcatcactcgcttctcgtacacggatgaaaacactgactgaagatactcgtctcgctaattcacgattcttcgacaacgatatcaataaagtgcctaaatatgcgctaactgtcggtgtagggacattattagatgcagaagagttaatgattttagcgactggcatcaataaggctcaagcagtacaggtggcaacagaaggtgctgttaatcatctatggactatctcttgcgtgcaattacaccctaaagcaattttagtctgtgatgatccggcgacaatggaactgcgtgtgaaaacactgcgttattttcagcaaattgaagcgcaagagcgccagcaataccaagactaa

SEQ ID NO: 309616 - DNA, 1086 bp, Proteus mirabilis
atgaaaaaatatcaagataccgaaacagggcagctcgatgaatttgaggatgttccaattcgctatacatcgccaatatcgagtggtccctcgtacaacccagcatggatagctaatttacgcccatatagtgctgttcatcggaccactgattctggcttgaactttacgctagaccaaatcaacttaaattcttatgacggaaataaacttgcggaggtggtcactttactacctcttgggaatccaagtggaattccagctcttgttagttatgatggagccatagcaattcctcagtgtaatgacttccctagccgggttgatggggtaatcaagttgaatgagatactttgtagccttcttttgggtggagtacatgttgaggttcttcgtgccgaagaactagttatcggagagttgcataataagaaccgtctctttgcacacactccatctatccacacaagccttagattgaactgggcttctctagctgagcgctataaccctttgaagctcccgagaattctcaccgtaaatgagatacaaaaagcatttgagcagggtcaacgtgtaattaaatcggtcaattccttttctccgatttttctattgaatggctacactgcaatggtgtatcggaataatagcgatgcactaaacaatctctggataaccgtggagcaactcacggaatatatatggaatgagcgatacctgaagaaaagtagcagctttcctaaaaaggttacaaaagcccacaagaaggcaaaggaccagaaaaaacttagcctcatttccacaaaacataaacttttgagtttgtcagatttttttagtgaagattgttactgtgtgcttaattgtgcgcgacaaaaacggaatgctcttgcgcatgcaggtgccgtacctgattctagtcttatagagcagttgtggaatgtaatgcctgaattaattgaagtagcttctaattcagaggctttagggttgaggcaattaagtggcggagcagtggaaaactggggtatcccagcaaggaccgactttagtgagtggataaaccttgcaaagaccctttaa

SEQ ID NO: 309617 - DNA, 1017 bp, Proteus mirabilis
  misc_feature (1002)..(1011): n is a, c, g, or t
atgagtgatcgctatgttattgaagccctattacgccctgcggttgaatttaatacagccatcgttacagcgtttgcaagttatctttgtattaccgcaccttgggctgtagctttagcgccctctgttagttatgtcacggcatcaggatttgctattttatcaataaggcgagttcttcaagggagtcgagttttacgttaccgtcgtaatattcgtcgtttaaaacgttatgtgatgtcgagtaacaatatccctgtaagccatcatcaactcttcttaggaaaagggttcttatgggaacaaaagcacacacaacgattattagatacgttacgacctgaggttgctaaatatattcgcccacctaagctgtatcgtgtggcacgtcaatttgaacaacgctatgaatatcatttcccttcactatgttcattattagcatccgattcgatatttaatcctgttcgcccattaccacccgttggcgggaaccctgcaatacatgggattgagttaagagagatgaatgtttctatgaacttaaatgaacgagtggggcatatgttggtgctaggcactacgcgagtgggtaaaacacgttttgctgagttactgatcacccaagatattcagcgaggtaatgtcaccattgtttttgatcctaaaggtgatgctgatttattaaaacgaatgtatgccgaagcgcatcgagctggacgagataatgagttttacgtttttcaccttggatggccagatatcagtgctcgttataatgcagttgggcgttttagtcggatttcagaagttgcctcacgtatcgccggtcaattaagccatgaaggaagcagtgctgcatttaaagaatttgcatggcgttttgtgaacattattgccagagcattagttgcgttaggacaacgacctagttttagtatcattcagcgttatgtaaataatatcgaattattatttgaaatctatgctgagtattggctnnnnnnnnnnggctaa

SEQ ID NO: 309618 - DNA, 663 bp, Proteus mirabilis
atgtcatcaacattaagtaaagaggcgcaatgggtacatgccgcgttagtggagcgtggtttggaaacgcctcttcgtgagccaaaactttcacccagtgagagtaaacaacaaattaaacatcacatgacggaagtgatgaaattgttaaacctagatttaagtgatgacagtttagcggaaacgccacatcgcattgcgaaaatgtatgttgatgaaattttttcaggcttggattatcacaactttcctaaaatcaccctgattgaaaataaaatgcaggttgatgaaatggtcactgttcgtgacatcacattaaccagtacttgtgagcaccattttgtcactattgatggtaaagcaacggttgcttatattcctaaagataaagtgattggtttatcaaaaattaaccgtattgtgcagttcttcgcacaacgccctcaagtgcaagagcgtttaacgcaacaaatattgattgccttacaaacgctattggggacgaaaaacgttgctgtctctattgatgccgttcactattgtgtaaaagcaagaggcattcgtgatgcaaccagtgcaaccaccacaacttcattaggtggactatttaaatctagccaaaatactcgccaagagtttttgcgtgctgtacgccatctttga

SEQ ID NO: 309619 - DNA, 690 bp, Proteus mirabilis
atgcaaactgtggatcttaatcatccagaacgattaatttctcatacttgtattcgtaatctcgatcttattatctctaatgatcctcatgaacaattaaaaacggccatgatgcatgctcctgatggtcgaattcgtctacgtaatctattacaacactcactttttactgcttatgatgtgattattatcgactcacaaggtgctcgttctattatgcttgagctagtactactggcaactaaccatattgctgtggtgatggttaagcctgtattacctgatgtccgagagtttttacggggaacggtaacgctaatggaagagctattaccgtatcaaggttttggtattgaattgccacagatgaaaattctgactaattgtatggattatactgttttggcaagaaaagctcttaaagcactaactgcgattattcataacagctcatacagtaaagaaaaaatcccaccgatctcactactgcaaacccagatttatgatctcgatatttataaattaggtcatagcaaaggacagccggcacatcggcttgaatatcaaacagatcgcaaaagtttacctgctgcacaaacaatgcataacttggcttgtgaattattccctcaatgggaagcgcgtttcgatttggttttgaaacatcaaccaaaaggcaatgcactgtga

SEQ ID NO: 309620 - DNA, 1353 bp, Proteus mirabilis
atgattaatcaaaaacagaaattacctccgcattctattcatgctgagcaagccatattaggtggactcattcttgataatgaacgttgggatgatatttcatcaattatttcagcggattatttttactctcgttcccataaaattatcttctctgcgatccagtcattatttcaacaaaataaacctgttgatttaattacattaactgaattaatggaacagcaatctattttaaatcaatgtggtggttttggttatctagcggaactttctaaaaatacacccagctcagccaatattgtggcgtatgcagaacatgttgccaattatagccaaaagcgtcaattgctggcattaggacatgaacttgtcactcaagcgagtgatgttagttgtgatttatctggattgttagagcaggcagaacaacgaatttttaatattaccgaacaacaatgtttagatggaaatgtagatctcccttcatcaattgagatctttctcaatgaactagagcaacgttgtaataatgaaaaactgatcactggaacacctacgggatttgaggaattaaatgatatgacctgtggtttccagcccagtgatttaattttattggcaggtcgtccatcaatggggaaaaccgcattaggactcacattctgtgaaagtgcattgaatgaatgtattgataaaaccgtacaaatttatagtttagaaatgccaactacgcaattattaatgcgttttacatctatgttagggcgaatacctttacagcatttgcgtaatggtaatatgcaagatgaagattgggcaagaacaagtaatgcaatgagcatattgcttgataaatggaaagggcgattaattattgatgactcaagttatataacaccaacaatattgcgctctagagtcagaaaaaacattcgtaaatacggttatccttcacttattttaattgactatttacagcttatgcggtgtccaaatcaagaaaatcgcactcaagaaattgccgaaatttctcgttctcttaaagcattagctaaagaaatggggtgccctgttattgcactttctcaacttaatcgctcattagagaatagagctgataaacgacctaacaatggtgatttacgtgattctggtgcattagaacaagatgcagatttgatcatgtttatttatcgagatgaaatttatcaccctgatagcgcaaaaaaagggaatgctgaaattattttaggaaagcaacgtaatggccctgtcggtactgtaaaagtgcaatatcaggcaaatatcacacgttttgaagataggttgagtggtcattatgcaaactga

SEQ ID NO: 309621 - DNA, 1413 bp, Proteus mirabilis
atgcaaactgaaaaagtaatttctttagatgaaaaaatgctacaacggggtaggacacctaaacagttggtaacacaaagtgtattagtggtgagtgaaataccaatggtattgactttagaacaacttcgccctaatccagataatccacgcactgcacgtaatcctaaatatgatgaaattaaagcctcaattcgtgctcgtggtttagattctgttcctaaagtcaccaaagatcctgattgtgctgatgatatttatatttttagtgatgggggcaatacacgttatgccattttaactgaactctatgctgaaacaggggataaacgttttcattctattcaatgtattgtgaaaccttggcctggtcgattgcaatgcatgattggacatcttgctgaaaatgatattcgaggcgaattatcatttattgataaagcatttggcataaagaaaacacatacaatttatgaggagcaattaggtcgtgaggtgagtcaacgagagctatcagaactcctcaaaaatacggggtatcctgttcatcactctaatatcagtcgaatgtttgcaacaattgaatatctttatccttggatacctaatttactgaactcagggatgggaagaccacaaattacgcagttaatagcattacgggcattggctgaaaaagcatggaaaacctttactcaaaaggcaaaaatatcaccagagcaaagctttaatgatgtttttgggcaagtttgtcactcttttgataacgctgaatattactcaatagaacttctaaaagatgatttgattacctcattattggagattattcctgatcctactattacttatgagaattggttgattgagctatcgcctaaaacgcagagtccttctttagagattatatccccgtcaattagggatgattatcaccaagaaaacccgcctattaagcaatctgaaaaatcgaaagctaaaaaacgaaagataaaacaagaacttcaatctcaagttatgccggttgtaaacgaattagaaccagtcacagatatttggcatatctctgcattacatgatgatattgaacatcttcaagatattgcctttcgtttagcctttgagctagccgaagtgatggggattgaatcgactattcaagaaaataaatctgctttaagtgctggattctcactaacacaccatacccaaaatggactctttgtcgctttaagtggcgatgaatctaatacaactttagtgccatttatggacgcattaataggaaatgagaacttacttggtgagccgttgtttgatgatgcttactcgatgaaatttctgcgattaatcaggattattcgacgattacgcgaattacaacgaaaactttcggcagagagaaatgaatga

SEQ ID NO: 309622 - DNA, 525 bp, Proteus mirabilis
atgaatgcactattaacggaaattgtgatgaaattgaaagcaggaaaaattcgtcacattgaatcaatgggattaacattggatgagatccaagcgcttgataaattgacggtagaagacctctattatctagtgaatacacccgtgccatttttgacgttaaatattaatcattgcaatcttaacatgatgttgcaacaagctcgtcaagagcaaaaacgggtcaagtacattaatcgagcattggcactacaaggttctattgagttaatgcaacacttttttggacttactgcgattgaagtgagttctcgacgccgattagtggggattgtcgctaaacaagggcgcaatgttaatccaacagaagaacaagaattattgatatggcaacaatggaaaatagcacaaatccagaatattgattcattagaggctttagaagtgatgatggatattgctgagcaacaaaaaattccacttgctgtcgtctggtcattaactaaagagtggagtgctatctga

SEQ ID NO: 309623 - DNA, 1203 bp, Proteus mirabilis
atggcaactgtgccggtcgataatattattcaacaaacgctgataaaaatgcaaaatcggattgagcaaaaagcacaatctagtgatttgagtaatgagcaaagtggattgctatttttaggtaatgtacatgatgctattcctcgtcggctatttttagatagccgattatcgccattagataaaatggcttgggtcatgatcagactttatgctcaacaaaacgaaggcgctattttccccacatatgatgagttacaaagccaacttgcattacctcattctgataaagcatctcgagagacaattagtagagcgttgttgatgttgcgattaactggctggctaagtttatgcaaaagagtcagagataactcaggacgcattcgaggtaatatttatgctcagcatgatgaaccattgggggtgtttgaatgtgaatattttgatcccagttggcttgataccattgctcaagcatgtagccatagcaataaaacaatacgcttaacagcaatttccattttacaaagtatcaaaaccgagaaacgaatgcgtcaccgacatgcgcgtgtcgctcttattgaagcgcgtttatcatcaccacaaacaccacaacaaatggtgatggaaaagcagaagaaaacaacttcttctaaaatcgaactcagttcaaaatcccctagttcggaaaccgaactaagcaataaaaatatcactcaaatacagagttcgatttccgaactaagctgtaaattaagggattgcgtcccagttcgaaaatcgaaccgttacgtacgtagttttacacagagtgtaaaaaatacgtatacagcaacaaactcaacactgttttggtctactcagatcaccgaacgaatcaacccagaggataaagtgatgctagagagacaactcgaggcattacctgatggactagggcaacggctccttgatgatttagccgatagaatgaaaaaaacaacggtcagaaatcctactgcgtacctattagctaacctcaaacgtgctcgagaagggcgatttaatttgagtgacagtgctaccgataagccattggaaaaattgcaaccaaagctacctgaaaccgtgttagtggcagaaaaaagagtgattaaacgtgcaaggagggagtacgtgtcaggtgttatggcagaacttagggaggcgtattttaggtag

SEQ ID NO: 309624 - DNA, 174 bp, Proteus mirabilis
atggtttttgatcatcctagatcggaaaacaaagttactatgacatttgaaagaactgccactcaggacctttttaactcaaaaaagagaacaattacaattcactggtgtaacttagaattagattataaaaaatcaatttaccatgctaagtatataaaagacccgaaataa

SEQ ID NO: 309625 - DNA, 477 bp, Proteus mirabilis
atgaaaaaaaatattcgtctattaacacataatgaaatccctcgcgtttgggaaattgatagaacagaactgattgaaaggctatatgttttacaacaagggcaattggtgttatctgaacagcgttttgatatgaaaggctggcctgaaggtgaggcagaacattatacccctgttttacttgaaagcgctgagcgcggtgcccctttttggggagtctttgaagatgacaagttagtcgctgctgccagtgttgatccacagtggcgaggccaagataacaccttgttacagctctctttcttacatattagccaccagcagcgtggattatatatatcctcaacgccttctgaaaatagtgttaatttttatcagcatatgggctgtcgtttaattgatgtgcctgatactgagctttatgaaagagagcctgaagatattcatttagtgcttaattttaataaagaagattaa

SEQ ID NO: 309626 - DNA, 222 bp, Proteus mirabilis
atgagccagttttcaactgtttgggtgttgagtgatgtactttcccctttaccagaattaatgggaggtgcttcttcattaggtcaatcaatcaatgtctttacctttaatgatgagcaaagcatcgctgcctttaaattaggggcgacagcggttttccaattagaaggtaaacctgatgatcgcattatggaagattatgcacaaagtatcgttgactaa

SEQ ID NO: 309627 - DNA, 276 bp, Proteus mirabilis
atggcagtaccatgtgttgcatctaactcaaaaccatttttcaatagcttagttgctaaatcaacgacacgttttttatcaccttcacgaaccgaaagtagcgctcttccttttttcttcatggtggaattgctacctaacatcgctttagcaaaagcttgtgcaaaagtagcaccaacccccatcacttcaccggtagatcgcatttcaggccctaaaataggatcaacacctgagaatttattaaagggaagtaccacctctttaaccgagtag

SEQ ID NO: 309628 - DNA, 168 bp, Proteus mirabilis
gtgaaagaaatggcagatgaaaagcgcaaggaaatagcagaaaaagaaattgagcaaatggcaattgatttatcaactggtgacttaggtttagttgatatgggaatgggaacagccagagcacatgccgagcgtttatataaagctggatatagaaaggtggagtga

SEQ ID NO: 309629 - DNA, 153 bp, Proteus mirabilis
atgaacagttttacacattatgggcaatttatgaaatttacatttccagagccagaccctaaggatgtttgtaacctttgtggagagaatgttggcaaagataatttaatccaaggtcatacggcaaatatttgtttgagtgttctgatttag

SEQ ID NO: 309630 - DNA, 225 bp, Proteus mirabilis
atgaaatttgatattgcggttattggtgcgggcattattggtttatctcatgcatatgcagcggctcagcgaggtttacgtgttgctatttttgagcgcagttacacgcctgtgggcgcttctgtacgtaattttggtcacggattaattttgggtcaagcgccgggaaaaatgctagatttagcaaaaaatagtcgtgaaatttggtatttatggtgttgttga

SEQ ID NO: 309631 - DNA, 468 bp, Proteus mirabilis
ttgtccaaattaagcaaacaattaaccacattagcaaaacaaggaggaggaagttttaaaaccgttgcggatcgctttaaaatagcctctcgcattgcggatagaatggcaaaactgaatattcaaattcgtgatgtaaaacatatcaaaacaaatcatatcgagctttatatcaaaagccgtcaggaagaaggcatttcaaaaagaacacttcaaaacgaaatggcaggcattaggaatattttagcggttgctggcagaacaaagcttgcctcgcctcaacatgaaaaactcagtaattatgcgcttggtttatcaaatgcgagccgcgatggtacgaaagtggctattagcgaagaacggtatttaactgctttttatcatgcagaaaagcaagatatgggggttacaatgaccatgcaactagcacgttatttcggattacgtactgaagaggcaagtcattaa

SEQ ID NO: 309632 - DNA, 255 bp, Proteus mirabilis; identical to SEQ ID NO: 298089

SEQ ID NO: 309633 - DNA, 531 bp, Proteus mirabilis
  misc_feature (17)..(26): n is a, c, g, or t
atgataaatcaaaaacnnnnnnnnnnaggtaaaggttcgggtattagtgagatctatgctcaagctaaacaagcatttactcctgctgatattcaatatgtgaaaaagatgtcaggtttaccagtcattgtgaaaggtattgaatcacctgaagatgccgatactgcaattaaagcgggggctgatgcgatttgggtgtctaatcatggtggtcgtcagttggatagtgcaccagcaaccattgatgtattgccagccattgccaaagtcgtgaacaaacgtgttcctatcgttttcgatagtggtgttcgtcgtggctcacatgtctttaaagcgctagcgagtggtgcagatgttgttgctgtggggcgtccaattctttatggattaaatttaggcggtgctgaaggtgtgaattcagttatcgagcaattaaataaagagttaagaattaatatgatgttaggtggtgcaagaaacgtcaaagaaattcaagcaacacacctgtatacagatgctgactttaaataa

SEQ ID NO: 309634 - DNA, 312 bp, Proteus mirabilis
  misc_feature (285)..(294): n is a, c, g, or t
atgaatggaacaatcacaaaatggtttgaagataaaggttttggatttatcaaagatgaaaatggggataatcgctattttcatgtgattaaggttgccaaccctgatcttattaaaaaagatgcaatagtcacatttgaacccacgaccaatatgaaagggttatcagcctatgcagtaaaagtgatcccagacagtaaatatatctttattgccggagagcgcgttaagttaacgtcaattaagtcttatcgtgtttatagcgaacaagtacccgttaaaacnnnnnnnnnntatcggttggtatgctaa

SEQ ID NO: 309635 - DNA, 231 bp, Proteus mirabilis
atgaacattacctatcctgaaaatcgttatttaattcactttccagaaaacccaacatattggttaaacgccaattcaattgaaaatcaaattctaatattaaatgaacggtgtctttatttagccaaacaccacaccaaacattatggagatggtgaatgttcatttgtctgtagtcgtagttttttacaacaagggggatctcttctgccgtttaactgggttatctaa

SEQ ID NO: 309636 - DNA, 393 bp, Proteus mirabilis
atgaacaaaaaactaaaattggtcctagggttaggtttatcactgctatctataaatgcttatgcggtaacatgggatgaattggaagcagtaaagacttcagagggctcttcaccttttgaggggtgtaatgaatatattatgtgcgagcttttagcagagaaaggacgttatagcgtggtaaaaactcagctacctagagattgtggatcaggtgggatttgggctgttaacgttaagaagaaacaagcggtctttatgcctaatattactaactgtgattttgatattgaaaaaaatgcagtggttatttatccacagcaaggatatgccaatatttatcaaggtagcacaaatgcaacatcaagtatcagtgaagtcgagttaccttaa

SEQ ID NO: 309637 - DNA, 390 bp, Proteus mirabilis
atgaaaaaattacaaacagaacgattattattacgtccatggcgaatatcagatgctgagagcctctattattatgcgagggataagcgagtaggccctatcgctggctggccagcacataaaagtgttgctgttggtactcctttttgggggaaaggacttattcctgaagcagtgaaagcgcttatttgtaatagctttgagactctacaattagatcatctatggtgtggttattttgcagacaatgtaaactcgaagcgagtacaagaaaagtgtggatttaaatatcatcacataattaaagatcagtatgtggagtatttagacgaaataagaacagaagttatttgtcgtttaaccaaaagtgaatggcaaaaacaacaataa

SEQ ID NO: 309638 - DNA, 1392 bp, Proteus mirabilis
atgacaagattaactgcatataatgtttgcaacacaaggcagtattttcaaattgctggatataataatcaaataataattgaggttaataatggttcagatgcgccgcagtttttgcaaagaagaacaaaatttaattattatgatgcgagagatttgctggaaaatatagaacctactcctattggagctatatctgttgataaaaatatcgaaaagataggtaaaagacaaggtattgcaattactccaaatggattaataacatcaggtggagcatatactccatacggtggtgatgttaatgatgaaaatattttttcattcagaacgttaactttttcaggtaatgagacaggttctttgttatgcgatcccaataagttgtgtgatcagataaacccacacttaaagcaaaaagcaacaaggatggaaaatgaagggtgtgcgtacactgaaaatggtgatggtgtcatcctttctttaaacgtattaaacacagataatgatgttggtggtatttttctttttgaacattttatttcttccgctgataaaaatattattgatgtatcttccgcaatcatcttggactgcttagataataataatgatacaaatattgatatatctataattccatacgataagttacaaaataaaagattaacaacactaaaacaaatactagatagaatgaatcgtgatggagttcaggtttatcagttttataatggttacactccatatgtgactgatattaacggtatggaaataacaccaagctgttcagtaactataaagaattttaattcctattcttatcttgtcacagtctcaggaaatagaaccagctatcaaatgtttgttacaggagatataggagggccatatactcagcatatggactcaatagcaacatcaccttttaatcagataaggcctgagtttttaagtagaggtgttaaaattcaaggagttaatgggcttccgtgtgataactactacactaataatccagggcaaatcgcaatagccagatattactctggagataactcttctcctatgctaacagggtctattattgttgacgggagctcagggagaacatcattcaatacaacatcagacgaaaggctaaaaattgacaaaggagaatataccaatggtttagataaaatattgaaactgataaacaataatgcattaagaaattttgaatggaagcataatggtaataatcagtatgggttgatggcacaaagagttagtgatgtcatccctgacgctgtatcttacgatgaggatacagacacatacatggttaactatagtgctatcatacctgacataatctctgctatagcagaactttcaaaaagaaaataa

SEQ ID NO: 309639 - DNA, 132 bp, Proteus mirabilis
atgactggtttaattattgccgcgctagttactgcgttggtagtttatttgctggctcgaggttataaacctcaacctgtgttattactcggaggcatgctgttattgctcaaaacaaggcgggatagatga

SEQ ID NO: 309640 - DNA, 1095 bp, Proteus mirabilis
atgagagccagtactattgtttttgattcaataaaaagttggcgtgaaatacgcgatcgtcgtattactgaacgagtattaagctatggtgctcgtggtacagaaacagcgtttgcacttgaagcattagtaactgaattagaaggtggttatcgagcacagctctttcctacagggctagccgcaattgcatttactattatgggctacgcccgaagtggtgggcatgttttatttgctgattctgtctatgaacccgtacgtaaaatagcctctgcttttttagagcctaataatatcacttatagcttttttaaaactgacggttcagatttcgagcaaaaaattcaagaaaacactcaacttattttcgttgaatcaccgggttcattactttatgaaatgctggatctaccagaaatttgccatatcgctcatgaaaaaaatattcctgttggggtggataatacttggggctcggcatggctttataaccctttggaattaggtgctgatgtttctgtaattgctgcaactaaatatttatgcggtcactcagatgtcatgatgggcattatgatcgcaaatgaaaccgcatggaaacaaattggggcattaccagaagctcttggtcaagcaagtagccctgatgatgccgccttagtcctgagaggaatgaggactcttgctcaacgtcttacaaatcatggtaaatcagcactggctatcgctcagtggttagaaacacgccctgaagtggccaaagtttggtttccagagttacccacacatcctcgccatgacttatggaaacgtgattgtaaaggtagtaatggattattaaccattgaatttaaacaaaaatataccattaaacaatctgaacaatttattgatgcattaaccttatttggtattggtgcatcttggggaggatttgaaagtcttgcattacccgccaatgttatgggtgccagaacagcaacagattggcgtgaaggccacggtccttttgtacgtttacatattggtcttgagtctactgatgacttaattgcagatctcacccaagcatttagtgcattaaatcaataa

SEQ ID NO: 309641 - DNA, 717 bp, Proteus mirabilis
atgtatggtactcaattacctttttggttagctgcaatatccgccagtattcctttatttatgatccaatgttttgtgcaacgttcagtggtagaccattccacagaagaaaatagtgtaaagtgggatccgaaaataatgctaaaagataaagcattaggctggtttgtgctttcaactttttttggcacattaacttttggtacatttgcttcgtgtatttcgcaataccttttagttgtttatgatgctaaattggctgaatctgctattgcggtgatcctccccgtcaatgcggccattgtcgtctcattacaatatatcgtcggtaaacaagtggttgctgaaagactacgtaaattaatgaccttaggcacactcttttttatcttaggattagcgggctttatgctggcgggtgataatttaattttctgggcaatggcgatagcaatatttacctttggtgaactgatttatgcacctggtgagtatatgatgatcgataatattgcgccgttaggaatgaaagcaagttatttctctgcacaatctctaggttggttaggtgctgcattaaatccacttgctagtggttatatcctgacaaccttgccccctatttcgttattcgctattttaatggggatcgcagtactagcttggctttgtatgctgcaaggtatgaactacagtgaaaaaagaatagctgcttaa

SEQ ID NO: 309642 - DNA, 348 bp, Proteus mirabilis
atgcataaacgccccggagatggcattgtccgtgttgataccagcaaatgtgttgggtgtggttattgctcatggtcatgtccttatggtgcaccacaaatgaatactgaaacgggacaaatgtcgaaatgtgatttctgcgtagatttattagcagaaggtaaaaatcctatttgtgttgatacatgtccattaaatgcgattaagtttggaaaaattaaagatctacgcgctaaatatggtcatttaagccaagttcaagggttacctgattttacaatcactcaccctaatttggtcattaaaccacatactggtgcaattaaaaaaggagggaaccaagcatga

SEQ ID NO: 309643 - DNA, 198 bp, Proteus mirabilis
gtgacattagcatcagcattttggttgagtctgaaaggaataaaacttgataaatcattaggtgttaattcagatccacttgaattagcaaccacaaagccaacacttttattattagaaacaatagcattaccttggactgaatctgcttgtaatcgcattgttaaatcagcactggcatctatattgtcacattga

SEQ ID NO: 309644 - DNA, 240 bp, Proteus mirabilis
atggataacttatatcctgaaaaaaaaattgattgggaattagtacctgaaaactatttaattgctcttttttcacaatctttatcaacattattatttcctttttctaaagagccaatgtcatcatgtgttgataatatctgtttaggtgctgaaaaaggatcttgctatccttgtgttgataccacattaggtcatgtttttagtaattggtgtcataacaaaaagagccatcattaa

SEQ ID NO: 309645 - DNA, 1167 bp, Proteus mirabilis
atgaaaatcaccatctcaggaaccggctatgtcggtctatctaatgggatactcctttcccaaaacaacaaagttgttgcattagatatcaataaagaaaaagtcgaactattaaacaaaaaaatctctcctatctctgataaagaaattgaagagtttttagctactaaagagctcgactttacagcaactttagataaagaattcgcttataaagatgctgaattcgttatcattgccactcctaccgattatgatcctaaaactaactactttaacacctcttctgtagagtcggttattcgtgatgttttagaatataatccaaacaccactatgattataaaatcaaccattccagttggttttactaaacagatgagagagaaatataataccgataatattatcttctctcctgagttcttacgtgaaggtcgcgccctttacgataacctttatccatctcgtattgtgattggtgagcaatctgcaagagcagagaaatttgctgagcttttacaacaaggggcattaaaaaaagatattgatgttctttttactgattctacagaagcagaagccattaagttatttgctaatacttatctcgcactacgtgttgcttattttaatgaactcgatagctacgcccaagcttacaatttaaatgcaagacaaattattgaaggtgtttgtttagatccgcgtattggtaatcactataacaatccatcatttggttatggtggatactgcttaccaaaagatacgaaacaactgttagccaactacgaatcagtgcctaataatatcattggcgccattgtggaagctaaccgcacccgtaaagactttattgctgattctattatcgctaaatcaccgaagattgttggtgtttatcgtttaattatgaaatcaggctctgataatttccgctcctcttcaattcaaggcattatgaagcgtattaaagcaaaaggtattgaagtagtaatttatgagccagaaatgaaagaagagactttctttaactcaaaattaattcataatttagatgagtttaaagcaatgtctgatgtcattattaccaatagaatggcttcagcactaaacgatgttgaagaaaaagtttatactcgagacctctttggtaacgattaa

SEQ ID NO: 309646 - DNA, 288 bp, Proteus mirabilis
atgattcatataaaattattttttgataaagtaattcaaaaaaatacccatcctgatatgtttaacgcgctgaaaaaagaagtaaaaaagaaactttccccttcttattctgagttggaggttagtgctttgtgggggtcacaaacaaagttaatcattgatggactaaagaaaaatgaaaaaaaagacaaaataaccgatgcattagaagaaatatggagcgatacaagctggatgcctgaggttgagtcgtctaactctgatgagcttgaatattttgataagtaa

SEQ ID NO: 309647 - DNA, 375 bp, Proteus mirabilis
atgagccaagaagatcgtaagacaaatgtccccgactttctttcagaattagacgctggcgtttttgaaaataaagtctctgctgttttaaatgatgtggctttaggcgttttgaataatggtggaaaaggcaaggtcactattgaattagatattgctcgccttagtaattcaatggaagaaaaacgagttgaaataactcataaacttaaattctctgcaccaacacctagagggaaacgggctgaagaagacacaaccaaaacgccaatgtatgtaggaaaaggcggcaagttgaccatcatgcaagaggaccaaggtcaactgttttctttacaaggtcagcctgacggaaaattaaaatccgttaattag

SEQ ID NO: 309648 - DNA, 294 bp, Proteus mirabilis
atgccgactatagaaaaaaagccaaagcctaattcggctatacaatgcagtcattgtgataacaagatcgattatccttattataatgtcgattctaaggctgtgtgcgatgaatgttttgaggataactactctagtttggttaaatgctctatagatggttgcaatgagtacgatgaaaaaagcaatttaataaaagggatgtgtgaatcttgctatgaagtaaattcaccgcttagtcctgaagaacaagaagggtgggagcacaatattagaaagtggaatgaaggataa

SEQ ID NO: 309649 - DNA, 381 bp, Proteus mirabilis
atgaatttacatgaagcgatagaggcaataagaaccgtgtctcgtgactataatcataaccaccaagatctccctgatatcacacatcccgatgtatcacgtatatttgaagacaatgaatatagaactagactaaccgatatattgaatgaaatagatgaaaataatgctgtaaaaatattaaatctaatatatatccaccgtgaaatagaagaaaatgaaagcttcaccacatgctatcagcgtatgacaagagcattgattcaaaatagagagcatgcaattcttaaagtatgtgaaaaattacctgtattagatagttatttatctaacgcgttggcattagccaatagagatcagatagttattgaggaattataa

SEQ ID NO: 309650 - DNA, 1326 bp, Proteus mirabilis
atgggtacattaaaaaaaccagggagagtgaagtccgccattcttaattggatgggtatccctattagtttaacggacggtacattttggggggagtggtcaggaaagagtagtagtggtaagaccgtgacggcagataatgccttacaactgtcagctgtttggtcttgtgttcgattgctcagtgaatccatttcaacgttaccgcttaaaatctataaaacaaatatagatggctctcgtgaactagctaagcagcatcctgcctatacagtgttgtgccgaagaccaaattcagaaatgacaccttctcgattcatgttaatggttgttgccagcttatgcttaagaggaaatgcctttattgagaagttatatattggatctaaattagtctcccttaatccattactaccgcaatatatggtagtaaagcgcttagataatggacgattagaatatatttacactgattcaaaatcaggtaagagagttattcatgataaaaatataatgcatatcagagggtttggtatggatggtgtttgtggaatgatccctattcaagtaggaagagatgttattggtacggcactatcaacggatgaagctgcaggaaaggtttttgaaaatgggttacaaaccagtgggttgctcacgtcaaaaacagcattaaagccagatcaaagagagcgcttaagaaaacatttgacgactttttctggctcaaaaaatgctgggaaagtaatgatacttgaggcagatttatcttttcaaaatgtaacgatgaatcctgaaacagctcagcttttgcaaagtcgaggatacagtattgaggaaatttgccgttggtttcgcgttcctccctttatggtggggcatgctgataagcaaagtagttgggcatcaagtgtagagggaatgaatatgcaattcctcactaacacacttagacctctattggttaatattgaacaagaaatcaatcgatgcctacttgatagtgacgacgattattatgctgaattctctgttgaaggtttattacgggctgacagtgcagggcgttccgcttactacacaacggcattacaaaatggttggatgagtcgaaatgatgtgagacggctagaaaatttaccgccgattgagggtggtgatatttataccgttcaacttaatttaacaccccttgatcagctcgggcaagaagcctctagtaatgaagctgaaaaacttaaagcgcagatcaccaactggttgtttcctgaaggtaatcccatagccccacactctcaaaaaaatcaacctcactctgaggagtaa

SEQ ID NO: 309651 - DNA, 3285 bp, Proteus mirabilis
atggctggcgcattgggaacattaaatattgatttaacgctgaacacggctagtttcaccaatgcgatcaaccgtagtcagcatcaaacagaacgatttaatcaaaatgttcgtgtgagtttgcaatctattactgttcagcaagagcgtatggcgtcacagacggcaaaatcagcttcatcatttgctaattttgccaaagttgttaccggcgcattgtcggtgaagcaagtgattaactatgctgacggttggactgacctacaaaaccgactgaaattagtcacagatagcactcaagccctaaacagagcgaccaatgatgtctataccattgcccaaaaaacctaccagtcactcgatgcaactgcacaggtttatcagcgtttttcagataatgcagaacgcctaggtattaatcagcaaaaagtagccgaactgacagaaacggtatctaaagcggtctctctttcaggaaccagtgctgcctctgctgcgatggggttaacacagtttggccaagcattagcggcaggccagttgcgtgggcaagatttaaactctgttatcgaacaaatccccggtttagcacaagccattgcagaaggcatggggatctccatgggggatttaaaaaagaaagcccaagacggtgaaatggcgattgataaaatcattcaggcattggaaaaagtcaaagattctgttgatcaaaaatttgctaccagtgtgacaactgttagccaaggttttactaatttacaatcagcaatgacaaagtttgttggtgaagctaatcaaagcactggtgcaactcagctattaaccactggtttagctggactttctaataatttatcgactgttgcaaaaatagttgaagctgttgccgtaactgcgctagttgccaagctttctcagtggacaaaggcaacctatcttaaaaatcaagcttctgctaatgaggcaaaagctgcattacggagtgcagaagcaaatagctttgctgcaacaagcgcatcgagaaaggcgtgggctgacaaagaagctgcaatatccgcgatgaactcagccaaaatgagttatcaatcagcaaaaggaacagcggcagaagcttatgcacttgaaaaagtgattgcgactaaatctctggctaccgccgcatccttgcaatacaaacaagcattagtagcagaaactgcaacacaacgtgcgttaactgcaacgaggcgccaagctacaattgcgggtagagcgttaagtggggtacttgcttttacaggcgggcctgttggtttagcattaaccgcaataacagctgtagggattggaatgtatgaatacagccaaaacgtcaaacaagccaagctagaatctattgagtttgccaatgcccttgatacttcaacagaagccttaaaagcaatgaataatcaagcgttgctgacgaatgtaagtaagctgtctgcaggtattgatgctgaaattgaaaaagtagaagagtccatagagaaagcgaaaaaattagccacagactcgaagtctggctggagcctaagcgccacgagttaccttcgctctaccaatgactatgaaggttataaagagataattgcagaacagcaaagagaagcgaaaatagggcttgatgctgctatgggagatgtggtctcacagttgacagccttagagcgtcaacgagccagtatgaggcaattactagcacaggtcgaagaaaaatatggcaagcaaagtgacgaatatcaacgttacgtatcgaaagtagaagaggcagatagtgtcgtcaataaatttagggtgacattaaaaaatcttggctttgatttcgatgcattaactgataaggcagatgaggcggcaaatagttcagctaatataattaaggggatggcgaaaaaaatagaagattctattgccgagtctcagcgcaccataatgaaagctaaagcctctcccgctgagcttgctaagttgaatgcagaagatgtgctgaaaaggcgacaaattaagccggaggatgatgggtatgaaaaggccttagccaaagaaattgaagctcaaaacgcgttgcttgcacaaagaaataagcctaaaaaatccaccattgattatgccaagcagtacacaaagctcctttctgaattacaggaaaagcaggcttcattaattgccgatgggcaaagtattcagttatacggtactacctcttcctttaatgaatacacatccgcattagccgatatcaaacagaataaagacaagtttgatgccatcttaaagatagatccaaaagcaatcgaaactattaaagagaaagctaaagccattgatgatatggctcgcgctaattctgttgcgcaatttgcttatgatcgcaataaagaagttgagcaaatgcaatttgagacctcattaataggaaaatcaagggcagaacaggagcgcttaaatgctttgagggaagttgatctgctgtataagcaagccagtgtggatttaggagataaagaactcgcaaacttacagcgcaatgtcgaactcacaaagcaaaagattcaggaagagcttaaaaaacgtgaagatattaaatccgatcctgtggagggtgtaaaacaaggattatctgactttagtgagtctgcagcaaatgtgatggagaatgtaaaaaatgttaccacgaatgctctgaataatatgtctgattccttagctgattttgtgttaacgggtaaaggaagttttaaagactttgccaattcagttatctcagatatcacaaaaatggtcatgaagatgttggtttttaaagccattgaagctggtggccaagcgatgggctttaacatgggatggatgagtaatggacatgcctacgggggatatacgggacacggtgggaaatttgagcctaaaggcgttgttcacggtggtgagtttgtctttactaaagaagcaacagctaaattgggtgttggtaatttgtaccgattgatgcattcagcacaaggttacgcttctggtggttttgttggctcattggctggaaaggtgccgtcaacaccagtcacaacatcatcttcatcaggagttaatatcacagtggtaaatcaaattacagtgacaggtaatggcgatgctgttcttgctcaagcaatgaaagaagcggcagaacaaggcacagaagctggtgcacaaaaagcaagggcgattatattgcaagattttcagagtaatggaactgcacgtagaacgttaggagtgtag

SEQ ID NO: 309652 - DNA, 336 bp, Proteus mirabilis
gtgaaaagaatatttattgtagcagtgttattgtctataggattttcggttaatgctaagacttacacaaaagaacagataacgagtatggtaaacgctggaaactatccagagcaaggtgaaagtcaaagtaaaagtagttatacgagctttgcagattgtaaaaataccgcaaattatacactttctgcagtttctggcgattacccagttagagtattggtcgatgctccgttagcttatttggtaaaagtatggacaaatgatggaattgtcatggtgacgtgctctgagcctgataagaaaatggttataactcaagctaaatataagtaa

SEQ ID NO: 309653 - DNA, 3036 bp, Proteus mirabilis
atgggtggtaatggcggattaattacaaaagtggttggcgctgggttgatgatcgcagggttattcaatggggggatcaccgcaccactaggcatcgcattaatgtcggcaggtattgcagttcaagttgccggctctttaatattcaaaccgaaaattccctcaatggactatcgagacactagcgaacgcaagcaaatgttacgttcaccttctgcgtcagaaacagtcattgttggtaaaacagttgcttctggattacttttctttgctgaagaagaaccaggagaacaagaggaaaatgaaaaaatcacactagcacttgctttggctgggcatcctatcgatagagtggggaaaatttggcttggtgatgatctcattgagacttttggtgataaggcttcatgggaattacataacgataggaaagatgctgacccctttatgctaaaaaactgcccctcatggaaagaggatatgattgggcgtggtatggcttggttacgtgtgacactcacatttgaccaagaaaaattcccttatggtttacccaatgtgaaatgtgaaatttggggtaaaaaactctttgatccgcgcacaggaaaaacagagtggtcgaataatggtgcgttagttattcttgattattatagagattatttaaaggttcctgatagcgatattgattttgatagctttaaacaatcagcagatttatgtgatgaaagcgtaagtaatgctgaaaatggctctgagcgtcgatacacattaaatggtgcttatgatctaaatgaaagtccatcaagtgtattggaggcaatgcataaatgtattaatgcagagcctacatttacagcaggaaaacacggcattcaagttggtgcatattatgggccagcgctgaaaactattacagaatcacaactcattgataccgtaacttgtactcctgaaacggggctaaaggacgccacaaatgcggtgtatggtacttttattgactccgagcaactctatactaaaacagactttacgcctgtcattgtcaatgaatggatagaagaggatggtttagaaatcagggaaaacgttgattaccgatttgttactagtccttatcaagcacaacgattagctcgacaatatctccgtaaaaagaaagctggtaggcgcgtccaattgacgatgaatttagatggctatgcgtatcgccccggtgaagttgttttattagatttaccttctttaaatattagtggtcttgaatttcgtattgctgaatggaccttccatgctttagaaggtgtctctctgacattagaagaagatggtgcttatttatatgaggatgtgattggtaaaccctttgttagacctccattcactaaactacctacaggtggtgtagcagcacccattaatctggcctttgttccactttctgtcacagacattgttcagggatatatctcatggcagaacgtggcatctgatattcgttataacacagttaatattctccagaatggcaaggttatacagtctattcaggtaccgggggagcgtgttgatataaacggtttaactcgaggcacttatcgtgtcgaggtgagagctattaatgtggccggtgccatgtctgcacccgctatcagtgattttgctattcaggcaccgcctgcaccgattggcgttgaaataacaccgggcatgttcagcttaacggcatctcctaaacaaggcgatagtgctgtctttggttatacgtttgagttttggtttagtgataaaaaactcgctaacctctctgaaaatgaagtgatcaacaaagcaaacaaagttggtcaaggaaacttctggacgcaggagaatttaaaagctagccacacgtattatttctatatccgaacgatcaatagttatggcaaatccgtatttgtagaagcttcaggtattccagtttcattgccagacgacatatttgatgatttagataacacggttagagaaacggatgcgtttaaagagctggataaaaaacttgattggaatgctgagacagcaattattcttagtaatgcagactctcaactatcacgcagtttgttagtgaaacacggtcaatcacaagcgggtattcgcgaattatggcaagttcgtgcaacggataacgaagcctgggcacaggaagttaaagaaatttactctgcggttggtgataacacgtctgcaattaaagagactcaaacttcaattactgagctaaataaggcgttcggtcaaacaactacggagatccgcactgagttaaaaacaactaatgatgcaacaaataaacgcattgatggtaccaatcaagatttagctaatactaatcagaagttaggcaatacagataaggaaatggggcgtattgctgcggatgtcgtgacaaataaggaggctattagtaaaacaaacgaagctatggctaaatccgaagagcaagtacaagcgcaatttggcgaacagcagggtatgattaaccagaaaatgcaggctgaatttagtcagacaggcgatggtgttgtcacgcactcaattaatatcacgattgttcatgacaaagttaaatacaatgcagcaggacaagtgatcagcgctcaagttaagaatggaaagcttgaaagttttataggctataacgccaataactttgcgtggtataacccagcaaacggcaagatggaattatttatgtacgttaaaaacggccagatgtttatgcgtgaggcgtttattaacgaagcatggctgaattctgttgttgttactgaatatattaaatcaggcgattatgtgccgggtaaaagtggttttttgattgatgggaaaaccaataatatggaaataaataatgccacatttcgcggtaagttggatattggtaccaataaaaccggtgaacgcatcgttatcactaatgatcgtattgctgtttatgatgataaaggtgtattacgtgttgaaatagggaaaataacaggggtttaa

SEQ ID NO: 309654 - DNA, 1941 bp, Proteus mirabilis
atgtctacaattccaacacaaaacccagttccaagtgaagcagcgagagatcttaaatttaactcaggtaaaattgacgagtttgttacgtcaaataatcacttttacactgaccgttttggtaaaaaacactatacaatagatggtattaactatttatcaaaacaggcaatgcagaattatggctatatcacgaagaagtcttttgaatcgggtaataccatcatcaatcctaacgatgttcttctctgggaaagtaatggcgaatactacagatgggatggcgaactccccaaagtagttagcgctggctcaacccctgagtcagctggaggcgttagtgaaggtaagtgggttagcgttggtgattcttctcttagaaatcaattatcatcaaatggtggatctgcgttaataggtgatgttcattttgataatattgccaatgcaataaatacaattagaccgttttcaggaaatatatttgatatttttattgtttatggtcaatcaaatgctgtcggttatgctccggaagcaggaaaaaaagactaccctgataatctaaatcaacagaaatgcctattttgggattatagagagaagaaactaaagcctttgattagagaaatgccatacagttcaggggatgtatcaacaggtcatgcctgggcttcttttgctaacaagtacacatccctaacaggaagagggtgcgtgataatcccatgcgcaaagggcggaatgccaatcgtacagctaatgaagggggttaatacggtttattacaattcaatgattgagtcatatacttcatgcgttgaatttatgatggctaactctttagatattgggaaaaaatcaatattgtggcatcaaggagagacagaccagacaaacaagaatgcaagagagtggtatttaaaaagaatcaacatacttattgatgacatcataagtgatataggtattgataagttttacatacatagagttgggaaccctcaatcaagagaagaagtcagttggatggatatccagcttgcacaggatgatatttgtgccattaaagatgttgcaattatggcatttaaagggtgtggagcattcactaaagaaaacggattattgagcgttggtgatggtgttcattatacacagtttgggtataatttaatgggagatcaatccgcccgtgtcgtttctgatgacttatttaataaaacaactcagtcagaaatcaatatcaatgagtacggttctttgtttttaccacaggatcagagatgggtaaaagtttctggaacggctagatatgataacggttggaagttgatggggttggataatgacttcggggctaatgagattagattgtctggcataagagacatcaaaattgataatgaaaaaatatcttttcagctcgcttataatcctacagatatattagagatgtctgtagagataaatcacctaggaaaggtatttaaaattgatccaagtgtttattttagacgagtgacctctggtgatggttacactacatcttggattgatgtcagattgttgcaggatttggattttttctgtgacgccaacggtgtcatcactagatacccagataattcatctccatctgaatttatatcaagtcaggtatcagcagtaaaagaatctaattatgttgtcattaaacaccccaatagacaatacggattcccctctatacagccatatggtagggatagtgcatcagagttcactagggtgtcaattggtaagatatctaacaaaagctctgcattttccttccactctggtgactcgtacactctagctatggtttcactaccatcgtgtgaagttaatccgttgcttacctctatacagacattacagattaatgttagtgctgtaatagcagaaagaagacggtaa

SEQ ID NO: 309655 - DNA, 192 bp, Proteus mirabilis
ttgcaatgtaaaattaagttaatcaatgaagtaacaaatattattgctccaatggctgacgccttaaatggcggatatattgatgataaagatattagacgactggataaatggcaacgttatcggtatgagttaaccaagattaatatatcattagcacctgatattgaatggccacaaaaacctgagtag

SEQ ID NO: 309656 - DNA, 234 bp, Proteus mirabilis
atgtattattttagtgcaaaagaaaattcattttatccagaggaaattaaagatatttatatatcaacaggctctttccccggcgatgttattttagttgatgactccgtttttaatgagttcgccgctaatttaccaccagaaggtaaaatgaggggagtaaaagatggttttcctgtatggattgatatcccaccactagcgcagtctgagttatcaagtattgcaatgtaa

SEQ ID NO: 309657 - DNA, 141 bp, Proteus mirabilis
atgacattaactgcccgtcagcttgagactgcaaagcctaaagagaagttatataaactctttgatggtaaagaaaaaagattagcttttggtattttccctacagtgacacttgctgaagcacgtgaaatgagaaaataa

SEQ ID NO: 309658 - DNA, 441 bp, Proteus mirabilis
atgatgagtaacgaaaaagacatacttttaaaagcatgggaattgactcagtcagttgctaaaaataatgcggaaacagcttggaaagttagaatgtgggggattacgatttggggcgcgttactgagttatgcctttacaaatcatagtacaataattatagcaataagtattgtaattttaatccctatatttatttttgaatgtggaataagaataattgaatataaaatgattgagcgctcacatgaaatagaaaatagcttgaatacattcttagagggctctgagttgcatttacccgatgcgggaataaaaataaatatcacggaaactagtttcgtcgattttaggaacgaaatcttcctctgtaaaagatggttgatatggggcccgtactgctgcctggctgttgtgagcctttttgcgattgtattttga

SEQ ID NO: 309659 - DNA, 444 bp, Proteus mirabilis
atgattatcaatgatgagatgtataaaaatctttcagaattattttatgcattcgataactcacaagaaagcaatgtttgcgacttaagaaaaagatttaaatttttctatgagagcttagttgaacaaacctttagccatgtatatggtaaagatttcaggaacttaacaaccacattaagaacaattaatgtgtcaaaatttaaaatagataaaaaacaccaaaaaatagtcaaagctcttcgagaaagcctgactacgaagtatccattgagcaacaaaacctatacagatgacaatggtgaaattatagatttcgttataaacttcatgatccctttcattcttgagataatatctctcgatacagtcaagaatgctaacaaggaagcattaatggatttcttaataactataaaacataactggggtaatgatgagtaa

SEQ ID NO: 309660 - DNA, 660 bp, Proteus mirabilis
atgctcaactatgaagaggaatcgtttgccgttctatttggctctgtcgcaaggggtgattacaataaaaatagcgatatagatatattgctctgtaactatccagaagacaaagcaaaaaaaaatatagcatcaattaaccttcctcaacttccggtaaatttcgttttatatgacagcaatatgctctggaaatttcatgaggaaggcagtctatttctttatcacatttttaagcaaggaaagctaattgatggagatgctttaaaatggagtgaaatttgtcaatcattcgttgtaaaaaaatcttttcaggaagagataaataaaatccaaaaagagattataccttataaaaaacttgattttttaaatgggtattatttatcggcattagtcaacatttacccattattaaaaaactattgtatctttactttagcaaaccaaggaatctatgaatttaataaaaaagaatgcatagtcctaactgcggccgataagaaaaaatcagaacagttacttatattacaagaattctatgattatagtgttagagaattagacattgcattagaagtaagccctaactcttcaaaagcaagagatttaataaaatgctcttacgatttcataaggaatgttaatgattatcaatga

SEQ ID NO: 309661 - DNA, 789 bp, Proteus mirabilis
atgtcacagtggtcacgtgtctctctcctgattaatgccggaacggcgagctgtagcagccctgtactttatgcggcggcggtggcgtcaccggggcggggtcgggtttctccggtgcggcacgtatcacaccgtcaaccgactcgatggtgcggaaagtggccgaacattctcccggcgctgggggtgaaagtgattaaaaaccggcatcaggcctgcccggtatgtggcggttcagaccgatttcgcttcgatgacaaagaggggcgcgggaggtggttctgcaatcagtgcggcgcgggtgacgggcttaagctggttgagaaagtgttcggcgtgaccgcatcagaggctgccgggaaggtgaacgccgtgaccggcaacctgccgccggttgccccggaagtgattgcggccgcagaggctgaaacggaggccgaccgcaaagcgtcggccgcgctggccgtcaggctcatggagaaaacccgaccggccaccggcaatgcctacctcacccgcaagggtttccccgtgctggaatatctgacgctcaccgtcatgcacaaaaccggcggcgtgacgttccgcggcggtgatttggttgtcccgctgtatgacgatagcggcgcactggttaaccttcagcttatcaatgcagacggtctcaaacgcaccttgaaaggcggtcaggtcaaaggtcatgtcatgtcatcgaagggaaaaaataggccggaaaacgcctgtggattgcggagggttatgcgaccgaactcaccgtgcatcacctga

SEQ ID NO: 309662 - DNA, 210 bp, Proteus mirabilis
atgcagcactcggttgattatctacgtgaagccctgtcggtgtggctgaccgcaggtgaaaaaattaattattccgtgcaggacagcgatattttaacggccatcggattcaggcctgatgcggcttcgcgggatgataatcgcgagaaattcaccccggcacagaacctgatttacacccgccgacgtgcagaactggccgcacggtag

SEQ ID NO: 309663 - DNA, 594 bp, Proteus mirabilis
gtggacaaggattttgtgacttcagatgattttgttaaactacttgaggaacctcaggaacaattatcgctggttataaaaagtcattacgaaattgataccttgttagatcggttgttaacagtttctattagtaatgtggattcattagaaatgcggcgtattagctttatattgaaggtcgatatattaatcagtttaggggtgatacgtcctgatttcaaaaaattatttaataatataaatatgattaggaatgtttatgcacataatccatattctattttcgattctaaacaagcagaaaaatcaaaaaccattttaatgcaaatagatgaatctaggagtctggtaaaggaattcacggagcccacagatattcttttatttgtgtttttgaatgcatatatatttttagagactgctttaaaaaaccaatacagcaaaatacaagggggagtagtactaaacaagaggattcacaaagttctgggtacaagcacaccaagagttagtgaggcttctattcaatcataccatgcggaaatcgaaagtaacttgcaagagattttcccaaagttgtttggaaagtaa

SEQ ID NO: 309664 - DNA, 1167 bp, Proteus mirabilis
atgcacatacccagccaacgtatacagaatgcgatgagtgcggaagaagctagtctttggtttgtgcctgccatgggaaacggtgatgttgcttttcttatgaaggcaccttcatcaattttgaaatcaataataaatggttgttctgtagaattcatcattggattaagaaatagtcttatctactgcgccatgaaaatacatgatatttcagatgccccggtgatgataactaaagtactacgtcatgaagatgatatatcatctttaataaagatacttgagtacaaaacaacacctatttttctgtttaatgagcttgatatttccgtatcatggtcaaatttaacaataaatactgatacatctcatctcattgaaaaaataagaaaaatacaacacaacattgcgagaaaagatccaatcgcagttaaagaaacacatgattactttgataacctaaatagcaactctaatacgtctctcaataatgaattcatgtataccctcccctttacctgtgaagcatggacctcaacgccaaatcattttattggaatcactgaaactaaggctataaatatttctgataatgatgagggcggtaatttcgagaatactatatgggcatcattagaatcagtattcccatatacactacacgcaagcccaaaagttaaaataggaaaaaaaacacgcgaactaacagatattcttgccttttatcctaatgcatcattttttattgaggctaaagatacatcgatactgaattcagcatcaataaaagatatgcaacgcagaaccagcaatctcaagaaacaagttaaaaaagccataggtcaacttgttggtgcagttaaatcgacaaagggtggatgcgatatatctgatttaaatgagatgcctatcaaacccgtattgaaacgcttccattgcattgtattaattactgaaatgaatcatcatggcgactgggacaatataacccatgaactactgagagcctcatccgaaacgagagagtatttccatttattagatctggatgatttaatttacttattgaaaagatgtaacggaagcgctgagctaattgatcttaatttaatgggccgatttaatacattcgtagagaaccaatcggtttttattagaatgcgatag

SEQ ID NO: 309665 - DNA, 447 bp, Proteus mirabilis
atgaagagaaatgtgattgataatgttacagagcttaaggcagagtatgcagaaagaaatcagatagtggctaacctagctgatcagattaatgcatattactttagcttattagaaatggacgaaaatcaaatccgtggcgttatgatacaaaacggactagaagaaaataaagcttgcgaagctgtcttgagagggtttgaaaatgttctcaaggttagagttaagcaggacgacttgtccgatgaagaaaaaacagaaatgaaatcatacttgcgaacggttgctaaagctagatatgcaatagctcgtttaaatgatttttctcgtcagttattcacaatgcctaagacattcgaaagtgaaataaatttcaatgctctaagtgaattagctgatcacacaacaaaaaaactaaccttaggtgactactcttttactggctga

SEQ ID NO: 309666 - DNA, 438 bp, Proteus mirabilis
atggacgaaattgaagtaactataaacaagaaaacaagaactcaattttttggtgatttattccagaaatacccagatctagaaactaatttaataaacgactttaagaaatataagtctgatggagttcttcctagttactttggtagggatgtagcatatgttaagccttattctgcggaaaaagcttgtttgatgcatattcatttaaaaataccaccagataaatttccagatgatagagttcaatattatagaactcacaaaaaaggaaatcctgaaaaagatatctgcttggtgtatgtgcaagggcttcttgaagatcaccgatactcaattatagccatactacatcctgatgctcacctgaaagcacaagactataaggtcatggataagctgtcgcagatagcccaaatttttagagatgaaaactaa

SEQ ID NO: 309667 - DNA, 585 bp, Proteus mirabilis
atgcaaaatatggattttgattctttaacaaaacgacaaaaagaagcatttgaagcttataaatattcaaaaatcattatcactggaaagtcttttgcataccacattaatgagcttttgttacaccataagacagttcctgtgaggtataaggattacttgattggtcttgatgaattatttaatttacatcacttggaaagtgatacaattttgcatcgagcttgttttgaggatgtagttaaagatttcttggatgataaaaatgacataaatatttatccagcatttatgtcaacatcaattagtgacaataatttatctgaacattttgcgggaagcagacctaatataggcttaccttgttatttgagaattaagtgtaaagccggggcaagagctatttggcttgaagataagccatcaatcggaggtgagtcagaaatacttctacctagaggtagttgttttaaattaaaaaatatcaagtatataacggatgaaaaagaaataaaaaaattggcaaaacatcgcgctataaatattaatactattgttatgtacgaacttgaattattgtcatag

SEQ ID NO: 309668 - DNA, 840 bp, Proteus mirabilis
atgaatactatatcaactatcaatgtacctttccacggtaacaatttatatgttgtgaattataaaggtcagccatatgtaccgatgaaacctatcgtcgaaggtatgggattaacttggcaatctcaatttgaaaagctaaaacaaaggtttagtaaagggatcacggaaatcgtgataccttcaaaaggcggtgagcaatcaatgctttgcctagctctccgtaaacttgcaggctggcttcacactatcagccctaacaaagtcaaaccagagatccgcgataaagtaatcaagtatcaagaagagtgtgacgacgtactttacgaatactggactactggtgaggttaaaaagaaaaccaactttcgccaatcaacagccaaagaactgatccctttacgccaaacagcagagcgcttaattgctcatggggttggtaatatttatcccgatatatggaaacatattcacaaagagttcggcgttgaacacatcaatgaactgttaccagagcagataccgctggcaatctcttatcttgatgctttggaaggtgaatacattcctaaacaggaagaaaatatactttttgaaccaaatcaaaactcaatcactgtaaccatacccaaagagggaagatggttggtttcttataaaaatggaaagcaacaagtagttagcgttgatggtcataacgttgtcagtgttgaatacattcaaaaattacaacgtgactctaatgctcttattgagttactgcaaaacttccgcttacgcacccaagttatgcaaggtgagaaaagcggagatattttaaatactccgttaattgcataa

SEQ ID NO: 309669 - DNA, 213 bp, Proteus mirabilis
atgaataatcaagccattgactctaagttaagtagaaataggttaagaatagtaaagcctaatgaaagggttgaggatttttgtactactatctatggtggcagtggtggaggtggtgatatggaattacgagtagctaaactagagcatgatgtaagtgatataaaaaccactcttggtgatataaaatccgacataaatacagcaaaataa

SEQ ID NO: 309670 - DNA, 432 bp, Proteus mirabilis
ttgagcaaaagaaaagaaataacagaagaaacatatatgtcttacggttttaaacgacaagacataattgatttttttcactcaaagggtaaatctgtaaattttggtttaccaccgatgaactttgttgaagaaaaagaggatattgagctaatttctgtagacgatgctttaagtgagattcagcgattaaaagcaaaaattgaggaactggaaaataaacaacctattctattaggaaaatatagggataacgatccgctcttattagctattgagataagaaatagcgagtggataaagtatgacccagaaaatgacagggcaactagaggtaatcagcaagcaattaaaaaataccttgaggataaggggtttactagccgacaggctgagtctattgagttagttgcgtgccctataaatcgttaa

SEQ ID NO: 309671 - DNA, 300 bp, Proteus mirabilis
gtgttggatattgtttctgatttaaatgaaaagaaaagcgaattgatttctttgcatgaagttattgttagtttgagagagcagtcaccagaggctactctgccacaaatagctgaatggttattaattcatttagctaatgaccccgagtctcctgatatgggttttttaccggtaggaggtgagtttgaaaggatatcagagtggagaaacaaccctaatgagcattattctttgaaagagttattacttgaattatatcgtaactatggagtttggccgggggagataccattttga

SEQ ID NO: 309672 - DNA, 453 bp, Proteus mirabilis
  misc_feature (439)..(448): n is a, c, g, or t
gtgaataaggatattaatgaacttaataaagatattaatattgtcggattacattggattgaacgctggcgagtgaataatggaaaacatcagtcttatgttattcctttcgcaacaacctatcctattaatattgtttatcacggtaaaagcgaatttaaatatgggcagtatggcattcatcttggccagcaagatacactcacctttttaggtgataaaaaacaaaagatactggctaaatttattgattgtcgtaaaaactcaccgacatttaaatcagaattaagtttggagataaccccatcatccgcaagaacacttattattcccccaggagttgctcatactttttcccatctagaaaatgtttttaccttaaatagctactctctttttttacctactatcgagcaattagcaagtgaaacattaaacnnnnnnnnnncctaa

SEQ ID NO: 309673 - DNA, 180 bp, Proteus mirabilis
gtggcattttggatcgccggagaagataaaattatccgtgcactaagacgttatattcgtcgtgataaaggctatgagcgcggacagatttatgctatcccttattggcgttttggctttaatgaagaaggttatcatgcagagcgtcatcatgttatggataatgaagatgtaagctaa

SEQ ID NO: 309674 - DNA, 849 bp, Proteus mirabilis
atgtcgagaacctttaaaacaccaggctcttatgattggggaagttgtaatatcactaattataaaattgaaggtaataattttttatattatggcgataatggttcagaccccatatggaaagacccagaagatgatgcttggtcttctgatgatccctttttcagaatggatatttacggttatttaaaagagcgacctaaatatgattatggaatacaacttcgtggaatgaataatatctacaaccttaattctgaattacgaggttattgtgtttatgcggagattgttagtgtcacaggtggtaaagaaaatggttggtttccaccaaaagaatttttcttaaatgaaaataacccaatgttatttgtaagaccagaaaaagatggtgtgactttttgttataacaaaatgagaggattaacagtctctgaaacatgcaaagtgtatgttgtgattttcaataccaatctaaggttgcaagcacctaaatcaggtgtcgttatttataacgaaaaaaaagaaattacttatacctctaaatataaacctctccatctagggcaatcaacgtggtttgaccgaaataatggtggaatctttgagcaattgaaaaagccaatgatattgcccgattctcattttgttaattgggtcgttaatcggggttatatggattactaccgcactggttattattttatgagtaataacaaagttggtatgagagatatttattatttgggtggtgagtatggcgggccatatgggcctagcgggagtaatggctataaaacgaattatgatttatacggtatcgaactcagcgactacttcaatatttaa

SEQ ID NO: 309675 - DNA, 2442 bp, Proteus mirabilis
atgaaaacaataattaatgagctattacaacaggacctgtcccgcagacaggttattgtgaacaccaccaaaattagtgctgcggttgcagcatcaagcacactgaccctgccgtttactctcaatgcagctgatactacatcggctacgggaaaggagggaattgaaaccataagacatagtgcctgcttagtaaactgtggcagccgctgtgcactgaaagtcatagttaaagatgatcggattgtgcgaattgaaccggaagatgctaaggatgattcggtattcggtgaacaccaaatccgtccttgtctgcgaggtcgttccagccgctggcgagtttacagccctgaccggattaaatatccgatgaaacgcgttggtaaacgcggagaagggaaatttaaacgcatttcatgggatgaggccacagcctttattgccgctgaattaaagcgcgtttctgaaaaatatggaaatgaagcaatctattttaattatcaatctggcgcgtattatcataatcaaggaacccccgcatggaagaggttattgaacctgaatggcggttttctgcagtattacaataattactcaaacgctcaaaactttaccgccacatcttacacgtatggtgctacaggagtacagtttgccagtcattttagccagattgcgcattctgaccttgtggttttttttggtctgaatttatctgagactcggatgtccggtggtgggcaagttgaagaactgcgccgtgcgctggaaatatcaggcgcccgggtgattattatcgatccgcgctatacagactctgttgttacagaacatgctgaatggttaccaattcgccctacaaccgatgctgcactggtagcagctattgcacacacgttgataaaagaaaatctgatcgacgaagaacgagtcaatacttattgtgtcggttatgatcgtagcacccttccagaagcagcgaaaccaaacgccagttataaagactatgttctgggtaacggcgatgacggcgtcgaaaaaacacctgaatgggcggcagatatctgtggcatcccggcaattcgtattcgccagttggcacgtgaaatggccggagctcgggcctgtttcattgctcagggatggggaccacagcgtcatgcgaatggtgaacagacttccagagcggttcagatacttcctgccctgacgggtcattttggattgccaggaaccaacaatgggaactggacatacggaacaccttatggtgttcctgctctgccgattggtgaaaattccgttaaggtgtcaatcccctgctatctgtggacagatgcgattcaaagtccggaaaaaatgacagccaccactatgggggtcaaaggcgcggataaactgaaaactggtattaaactgttcttcaaccaggccgggaatgcacttctgaatcaacatggaaatatcaatcgtacacgcaaaatacttgaagatgacagcctgtgcgaaactatcgtggttattgataaccatatgactgccagtgcccgctttgccgatatccttcttccagaaactagctacttagaagccgaggatctggtggacagttcctatgcagccggttctcatcattacatgattgcaatgcaaaaaacgatcacaccgatgtgggaagtacgcagtacctatgatatctgtgcagatattgcgggacatcttggagtgagggagcgttttactgaggggcgtactcaggcagagtggatggcgaagcattacggacaagttaaagagaagcgatcatatctacctgaatgggaagtagcaatgaatatgggggttatcgatcagcaaagtactcgtgatgaggacagtattatccttgctgatttccgccatgacccggttgccagtccactgacgacaccttccgggaagattgagatttactcgcacactctggcagaacttgctaaaacttggacactaccagaaggagatcgtattccggctattcctgagttttgtgtagtggcagagtcccatcttaacaaaaatctgacggcaaaatatccgctacagatgagtggttttcacacgaaaggtcacacccactcaacatatgccagtgtactgatgttgcatgaagcggtaccagatgaaatctggatcaacccgatagacgccaatgctcgtcagttgaaatcaggcgatctggtccatgtattcaacgatcgcggtgtggtggagatcccctgcaaggtgactcagcgcattctcccgggcgtggtagcgatgccacagggagcgtggacccggctggacagtaacggcgtggacgtgggcgggtgtattaacactctcaccagtcatctgccgtcgccgttggcgaaagggaacccgcagcataccaacctggttgaaatcaaacgcgcttaa

SEQ ID NO: 309676 - DNA, 627 bp, Proteus mirabilis
atgaaacagtatggcttttatgttgactcctcgcgctgctcaggttgtaaaacctgccaggtcagttgcaaggataataaagatctggacgtggggccgaaattccgtcgggtatatgaatatggcggcggaggctgggtgaaagaaggggaaagctggcacaacgacacttttacctactacctctctattgcctgtaaccactgtgatgaaccggtatgcgtgtctggctgcccgaccggggcgatgcacaaacgcgaagaagatggcctggtgctggtcgatgacagcatttgtgttggctgccgctattgcgaaatgcgctgcccgtacggcgcgccgcagtttgatgctaaggccaaagtgatgcgtaagtgtgatggttgtcttgagaggctggagaaaaacctgcgccccatctgtgtggactcttgcccacagcgagcgctggatttcggtccaattgacgagttgcgggcgaagtatggtactgagaacgaaatcgcgccactgcccgccgcgtcgtttactcatcctaaccttattattaaaccccatccgaaggctcgccctacgggagacaagaaaggggctatcgtgaacatgagtgaggtgcgcaatgcatga

SEQ ID NO: 309677 - DNA, 774 bp, Proteus mirabilis
atgcatgagttacctctggtcttttttacagtctttactcaaagcgcggtcggcgcgtttattctgttgctgattggcggcatcctggaacagattgacaggcagcgtatggccgttggtcttttttctgcgatgtgtctctttggcgttggggtgttgctgggaattttccatgtaggccatccttttagagcattgaacatgttgctacgagtgggccattcaccaatgagcaacgaaatcgtgttatcggcggtgtttgcgacacttggcgggttgggctcattagggttgcttctcaatcgtggatcggcttcgttatgcaaagggctggtgtggctggcggccgtggtgggggtgggctttatcttcgccattccgcaaatctatcagttgccgacggtggtcacctggcggacatcttacaccacagtgatgatgatactgactccgatgattggtggcggcattctggccgggctgtttggtctgcgcctggggttgctggtgagcgtgctggcgattctggtcagcttctgcctgcgtccaggctatattttgacgcttatggatgctgatggggtgctaactgccgctcaatccagttggttcactgctcaggtagtgctgctggctgtcggcattgtcggtgtggtggcctgggttcgactcaaaactaatgtggccgttctggcgaccacatcgctggtggttatcgctgcggagctggtgggtaggatcgcattctacaacctgtggacgttgccgatgtaa

SEQ ID NO: 309678 - DNA, 597 bp, Proteus mirabilis
atgtcccccgatattgtattaccgaggatcctcggtgcattgttttactactctccggaacgaccggaggtgaaagcacttttcgactgtctgcccactctgtcggagctgtatccctggctcgacccagcgcaggttgctttgtggtgttcggactggccgttgcccgatgatgaagaactggcatggcaattctctgtgctgtttgaggggcagggggaaatgcctgtgccgccttggggatctgtctggctggagcgcgataacctgctgatgggcgataccaccgctgagtaccgggcgtttctgcattctcagggaatgacttttaactcgcgtcagaatgaaccggaagatcagtttgggctgatgttgttagcctgtagcgcgctactggatgccggaaaagatgcggcggttaatcagttgttagaggtttatttgttaccgtggggatatcgctatcttgaacggctgcagtgcaacgtgatgagtccgttctatgcccgtcttgccgtagtaaccatgcgttatttgcaggatgtgcagcagcaacgagcgttgaaacctgcggtgaaacggttgtactttggatga

SEQ ID NO: 309679 - DNA, 537 bp, Proteus mirabilis
atgaacaaatctgagaaatattatcaggagttgatgactcaccgacacgtcagtcgacgcgggttgtttcgtgcatttgtcagtgcagcaaaacacacaatgccggaagtaataactacccggctggggcattcgctgccgccaggagcggttcctgatgcggagttcattgctcagtgtacccgatgtagtcaatgcattgatgtctgctcaatgggagtcctgtccaggcatgaagacggttacccacaactgatgattgagtatgccagttgtgatggctgcggtttgtgtatcgcagcatgttcgagcgatgcgctacgcgtgcagtctcgttttgataccggactgcgcccaatgttcagtaatactgcctgtgtgaatcctgtcagacagtgtaaacagtgcgtggatgtatgcccacgacaggcttgctttattgatgagtctggactggtgtcggctgacaacgaatgctgtgatggttgtggtgaatgcgctatacagtgccctcacaatgctgtaacactatactga

SEQ ID NO: 309680 - DNA, 1206 bp, Proteus mirabilis
atgaagtacaattttgatgaaattatcgacagaaaaaatactgatgccctgaactacgatgggtggcgacaatatatatttaaagccgacaagaatgcccgctttgactttaaggacgatgaatttgtcagaatgtgggttgctgatatggattttgcgacacctccggagatccttgcagcgattaaggagaggcttgacaaaaaaatcctcggttacacaaaagtttacgatgatgagtactatcatattttccacaactggtgccagagacgctatgactggaatatagataccgcggaaatcgtgctttcaccaggcattatccctgcacttaaccgtttagtgccgttactgacacaacaggatgagagtgttttgatcaatacaccatcctatacgccttttaagcaggctggagactatagctatcgtcgagtgatctgttctgatttgctggaacaggacaatgaatacgttatcgacttcgacgatatggagacaaaactaaccgatccctctctaaatattaaactgttcattttatccaatccgcagaatccgaccgggaaggtctggtctgaacaagagttaatgagaatggggcagttgtgccttgaaaatgatgtctggattatttcagacgaaatacactgtgatttactgagaaacggaatcagtcatatcccaatggcaaaacttttcccagacactgataagatcatcacctgcatggcaccaagcaaaaccttcaaccttgccggaaacctgatgtcacatatctttatcaaaaatgaaaagatcagaaaagaatggctgcgtctttatgatgagtttctttcaccactgagtgtggctgcgaccaaggcggcctggtcccgatgcgacgagtggctggaacaattgaaacactatcttgatgataatttcagactggtagaaaaatttacccaagagcactttcctgacgcaaactttaaaattcccgacgcaacttatctggcatggataaatattgagaaatacctgccaccgcaggtagacagacaacagctttctctctacttcgccaaccagacgggaattctgctcgaaggtgggaacatgttcgtaagcaatggagatggttacatccggattaatcttgcctgtccacgcgccgtggtacaagaagggttagagagaataagaaaagcactgaaatag

SEQ ID NO: 309681 - DNA, 1308 bp, Proteus mirabilis
atgaccatattagaacagaacatcgacagggcctcattgtcaccagaggagtggaaaaaactaacccgatttgacagtacagatgtaggatggattattataagcattggtatggctatcggtgccggaatcgtgtttttaccggtccaggtgggacttattggactgtgggtattcctgctttcatccatcattggttatccagccatgtacctgtttcaacgattgtttatcaatacgctggcagactcacgagagtgtaaagactatcctggtgtcatcgagggatatttgggaaaaaactggggaatgctcctcggtctgctctactttctcatgctggtcatctggattttcgcctaccctacagcgttgactaacgatacagcttcgtatttacacacatttggcttaactgaaagtcttttatcagaaaatcctttctatggcctgattcttattacatttcttgtgcttattgcttcacgtagtgaagaactcttgttcaagatttcctcttttatggtgttatcaaaactggtggtagtgcttatcctggggttgatgatggtcagtatgtgggacctctccaaaaacatcggttcattcccttcccttagtattttaatcaaaaatgccattatcaccctgccatttacactgacatctatcctgtttattcagtctttgagtccgatggtaatttcatatcgtgcaaaaaacaaatctatagaagtggcaagatataaagcactgagagcaatgaatatcgcttttggtacactgtttatcgttgttttcttttatgcattatcatttactttcgccctcggtcacgatgaagctgtcaaagcatacgaacaaaatatttcagcactggctattgccgcacagtttattgaaggagatgcagcaaagtatgtgacaccagttggtgtggcattaaatatctttgccctgatgaccgccttcttcggtgtttacctcgggttcaaagaggccgtacaggggctggcgatgaacgtattgactcgctttattccgtcagagaaaatcaataaaaaagcacttaacgttagtatcgtcattttcactatcgctatcgcctggggggcaatcgttctgaacctgccggttctgctgttcacctcaatctgtagccccattttcggcatcgttggttgtttaatccctgcttatctggtttacaaggtaccctctcttcaccgatataaggggttttctctgtatctgatcatctttactggcatcctgctctgcatttctccgttcctgaaattcatttaa

SEQ ID NO: 309682 - DNA, 462 bp, Proteus mirabilis
atggtaaagcttgacaaagttgatatgcagattttaaagctcttgcaggaagatggcaggctgaacaacgctgagattgccaagcgtgtttttctttcccctccagcctgctggaaacggctaaagtttttagagcaggaagtgataaaaaactatcgggcttttatcgaaccgaaaagccttggatacaatttttatgcattcatgaatattacattagctcttcattccgaggagtgcatgcaacattttgaggcagaaataatgaagattgataatgtaattgcctgtcataatatttccgggagatacgactatcttctgcatcttgtagtaaaagatatggatgattttcacaacgtatcaatgataaggatacgaaaaattgggaatataaaggagatgaataccagtttcagtatcaaggagattaaatcttttaaggggttacctataaaatag

SEQ ID NO: 309683 - DNA, 321 bp, Proteus mirabilis
  misc_feature (286)..(295): n is a, c, g, or t
atgtttagcacctataatattgatgttttaacagaacaaaatcatcaatatttaccaatagaaaacaccctatcattacagaatatattttccatctcttggcacccatcattatggaaatctttacccgccaagcaactccctgaatacccagatatacatgccttaaattattgcaaagaaaagcttaagcattatcccccgctaattttagcttccgaaatcagagcatttaaaaatttattaaaacttgttgcaaatggtgaagcttttcttctgcaaggannnnnnnnnnggaggagactgtgcagaatcttttga

SEQ ID NO: 309684 - DNA, 2193 bp, Proteus mirabilis
atgcatgaaaaatatagaaataaaatatctccttttatagaggaaactcatccggaatcagcttcaaaggggattccaattggttttacatcctccgcgatattggctaattggtatctggctaattttgatagagatattaaatctaagattaatccttcttactatggccgctatgtagatgatattttgtttgttttttcttcgcctaaaattgaaatagaagatagaggtaatgaggttgttaattttattaacagaagtttaagcgactttataattcctactgacgatcataaaggcttcaaattgacgtcagcgtatcatgagttacccattcaaaaagataagcttatctttcattattttaataaagatcatagccttgctggattgcaggtttttaagcaagaaattgaaaatagaagtagtgcttttcgctttttgccagaagagcatatttcaagtgatctagataagtttgcatatgatattctatttgatggttctgttaataagttcaggagtatagttggtctggcggaaaatgaaacagagctttctaaatatatatcctctcatattttagctcatagattatgtaatttaccttctaacgaacataccttaaagcaaattacattattctttaaaggtgaaaatgggttaaggttttgtcgattgtgggagaaggttctttcatataccttaattacaaggagatatggcttttcaataatgttttataagcaagttattgaattaatacgcaaggtcaaatggtatagaaaagatgatggtaatgtaagtgatagaaataatgaagttagtggtttggtagctgataagttaaagcagggaattcagaaatatatagacatttcactgtgcttaaatctcgcattgctagatttagatgttttgcttggggatgaaaaaccacgaaatagaagtttggaaggattgtgggatttaataaatcagcatgatgaaatgcccttgatgataaacagatttaggagaagtaatatgattcgccataatctagtttcttggcctttagctaattacaccaattatgaaggtgatcttacagaagaaaatttatatagtaaattacatggcgtttcactgtcaaaaagaaagattaataaaaccccaagatatatccatgctgatgaagaacaactatttgaattaatcgatgctttgcataccaatactttgaatgactttacagaggaaaataaatatcatgagaaaagttgctctgtagaaagtataaaagacaataaagcactggagataacgatcgatgttgacgatgctaaacataatgacacaataaaaattgctcttgcaaatatgaaggtcgaatacaaagatattgagagtgcatgtagaaaagatcagtcgccaaatttaagctatgagcgacagaaaaatctttatcgtattcttaattccgctactgatgagaaggttcaaatattacttcttcctgagttatcgatacctgtttcttggttgccatttatggctgcacattcaagaagaaagcaagttgctttaatatttggtcttgagcactgggtggtgaatgatcgtgcgaataatattttggttgagatgttaccttatacttcccattttaagcataagttcagtatgttgacattcagagttaaaaatcactatgcaccaagtgaaattaagatgctgacatcattgaggctgggtgtttcgtctcctgttcctgatgagcaaaaatatcatttaataaaatggaaaaatatatcgttttcaacgtataactgttttgagttagcaaacattgaacatcgggcacttttccgctcaaagcttgatatattatttgctagcgtatggaacaaagatattaattattatcaacatatcactgaatcagccgctagagatttacactgctatgttgcgcaatcaaatacatcacattatggtggttcgtgtgttcttcagcctactagtagtacaatttccaataaaatatatgttaaaggtggagagaatcattgtattttaacagctacgttaaatatctatgcgttacgtgaggctcaatatcgctcatttaggatagattcggattatatcaaagataatcctccaggatttgattatgacgaacttttagctcggggtggaaaatga

SEQ ID NO: 309685 - DNA, 690 bp, Proteus mirabilis
atgagtactttttgggaagggcttctgtcatctagcatttctttagctgtcattggctttgtctgtaaaatatttttaaaacatattgataaaagagaattggaatcctttaaaaataaactgaaatatgaaagtgatataaagataaaggaagaagaacgtaattatgatattcggaagacaagggatcttgagattggtcgttggggactaactttacttagtgctgcgaatggttttttaggtcgattgtgttatatcaaagaacagaggggactttcatcagatcaatatattattgatagcacaagattctatttgtgtcagtaccttttctgggctcaactttttagaaagaatagagactcttctgttttttccccaacaaatgatgagatgcttattaccgagctaattaaaaatatttcaatcactttacgagagaatacactcggtttgccttgtattcgatctcttgaacagcagtacattggcgatagtctcaatattaacggtgggtgtatgacctacaaggaatttatagacgtcaacgtgttgagtcaatattcagcattaaatgattttgttgattctatcctgaacgataacaataaagagtttatcaatataatcattgtgtcctttcaagatttgaaatctggatttgaggctacactgcaaaaaaaatga

SEQ ID NO: 309686 - DNA, 888 bp, Proteus mirabilis
gtggtttggcaatcactaaaatatgctgggtattgtgctaatttacgtcaagaaagtatcattgacatatttcagcgctatctcaaccaatatgaaccaaatgaaacgcgctcagcatctgaaatcattgttgaatttattggccgtgaagttgtacttaaccgcaaaggcacacaacgtgtcatcatggtagctgctcattttcgcaaagaagtgaccaataccgcattatggctgatgcaatttaatattcgtatccaatgttttaaagtcactccttattgctttggtaatgatgtctttatcgatattcgacaagttatcccaactcctgaagctgaatcgttcatgatcggcatggcacaaaaagaagcagaagaacaatcatcaggtaatgaccttcagcagcgccactacttacgacgtgagttttggacgcaagcactagaagagtttcgtcgcagtcactgcgacctttttaataatcgctcaccatcaacagatcattggttagcggcgggatcaggtctcagtggagtaccttatgagctaattttttcgcaaaaagatgctcgagtacaactcaatctttctcgagcagatgcccaagaaaacacatggttgtttgaacatttactcgaacaaaaattacaaattgagcatacttttggtcatacattagaatggaggccattaccagagcgaaaaagttgccaaatagtattccttcaatcttttgatggcatggataaagaacaatggccaactatcatcaattggatgattgaaaatatgtccaaattagaacttgctttaagacagcctcttgcagaactttctattcagctcaaacagagtggcctaatcacagaaggtgaagaagagtag

SEQ ID NO: 309687 - DNA, 144 bp, Proteus mirabilis
atgtataaagtcgataagcaggaaaataccctacattctttacaagaagtgtcttttagtagcttaggtttccgtgaacgtgaacatttacaagaatggttagctaaaaatccgcaagcattaactaaaaaaagaagacgttaa

SEQ ID NO: 309688 - DNA, 1764 bp, Proteus mirabilis
atgaccgttgagaaactaattactgaccatatcgatatctggtcttcagcgttacaaactcgctctactgctgggcgtggtagtaacggtaaaattgatctttatggtattaaaaaactgcgcgaactgatcttagagctggcagttcgtggcaaattagtaccgcaagacccaaacgatgaacctgcatctgagttgttaaagcgcattgcagctgagaaagcggaactagtgaagcaaggtaaaattaagaaacagaaaccgctaccagaaattagtgaggatgaaaaaccgtttgagttaccgaaagggtgggagtgggtgcgtttgggaactatagcgaacatttttaatggaaatagtattagttctgtagacaaagaaaaaaaatactccaactgtgatggtagaccttttattgcaacaaaagacattggttatggctttgaagaactcgcttacgataatgggatttcaattccttatgatgccgctaagtttaaagttgcagctaaaggttctgttttaatctgtgcagagggtggaagcgctgggaaaaaatgtggagttactcaacaagatatttgttttggtaataaactttttgccaacgaatgttattctgaagtggaagcaatttaccttctatctaatttcttatcaccatcgtttttctctcgttttgaatcatccatgacgggtatcatcggtggaatttcttcctctaaatttaatggtctgattattcctttatctccaaattcagaacaaaaaagaataagttgcagagtaactgagcttatgtccctctgcgatcaactggaacaacaatcactaaccagccttgatgcacatcaacaactagttgaaaccctattagcaacacttactgatagccaaaatgccggagaacttgccgaaaactgggcgcgaatcagccagcatttcgatacgctgtttaccaccgaggcgagcatcgatgcactaaagcaaaccattttgcaattagctgtcatgggtaaactggttccacaagatcctaatgatgaaccagcttctgaattgctaaggcgtattgagcaagaaaaagcacaactggtaaaagacggcaaaattaaaaaacaaaaaccattaccgccgattagtgatgaagaaaaaccgtttgagttaccgcaggggtgggagtggtgtcgaataattgaaatagctcaggttggtacaggagccacaccatccagagataatcctgattattggctgttttctgaatacaattgggttacaagcggtgaaacatctttaccattcatatttaatacagctgaaaaaatttctataaaagcagtaaatgagacaaatgtatctatttatccccccggtacgctaattattgcaatgtatggtcaaggaaaaacccgtggtcaaataaccgaattatgtatttctgcgggtacaaaccaagcttgtgctgctattcagctttttgaaccaaatgagcatcatcgccgatatataaagctatttttcgaaaaatcttatgaagacttaagaagcttagcagctggtggtgcacagccaaatttaaatttggctaaagtatcaaacacgttaattcctataccacctctcaatgaacaaataaaaataacgaccaaggttaatgagttattctcaatctgcaataccttaaaatcccgactgcaatccacccaacaaacccagttccatctggctgatgcactcactaatgcagtattaaactaa

SEQ ID NO: 309689 - DNA, 459 bp, Proteus mirabilis
atgaatccatttacgtttacagctaaaactagtcgctcactaatttttttacttttcaatatctctaatttcatcattctcttcttcaccaaaggccaaccaactaaagaaatttggttctatgaacacccctacccagagggagttaaaaactacagcaaaaccaaaccgatgaagtttgaagaatttcagagtgaaattaaatggtggggtaacgaagccgatggttttgcaagccgaaaagagaaccatcaagcatggaaagtcggcattgacgaaatcattacccgcaactttaaccttgatatcaaaaacccatatcagggtaaaaccatcagccacgatccagatgaactactggcgcagtaccaaacacaacaaaaggaaattagtaagttacgtcatcagttacgcgacatccttggtgctgcattgactggcaataaggaaacaaattga

SEQ ID NO: 309690 - DNA, 795 bp, Proteus mirabilis
ttgggatacgaggcaactgaacttttgttaaagtgcgacgcagatgattatgcgatgcttatttcacaaattgatagctatgtgaacttctcatctgacaaagaactcaaaaaactcttgattcgctatagaggtgatcctagcccgagcaacaaggttgaccttgcaaaagctgtagagcgagaaattcgttatataggcagtgctgatattgcctatatgttccgcaaaatctccaaaaaagaagatcctgcgggagtgagtatgagagaaataattgacgatgtaagtatcaagctcaaggtgaagcaaaaacaacttgggggcattgaagcaaggctagagcgtctagtcaaacttgtagcggaaaaatcattccttagcatgagttcagagcaacaaagaaaattattcgaagagtctgatattggcagcgaacaacaaaatgaatttttcaataaactaaaagataacaatctcgcacttttaccattgttaatgtcggtacttggcccagaaataacagcaaaattagtgcaagggttagctgttttaactatttctcaatttataggaaaagaagctgcaaaaaaacttatcgaacagttagcaacaaagtttccttggtggagcaattggcttggtccaattgtatggagtctcagtcttagttggcttgtttttgatttgcaaggtgctgcaaatcgaaagacaataccaataatgctttacttgggtcttgtaggtttgagagatggccctgaggatggagatgagttttggtcagaagaataa

SEQ ID NO: 309691 - DNA, 210 bp, Proteus mirabilis
atgcatcgaggctggtcacctgagcaaattgctggctggctaaaacgtaattatccagatgctcaggggatgaatgtgtctcacgaaacgatttataaaacactttttatacaaactcggggaactttaaaaaagagctacagcaatatcttagaagcagaagaacggtacgaaaatctagaaccacatcacttaaaggaaaaggattag

SEQ ID NO: 309692 - DNA, 393 bp, Proteus mirabilis
atgaaaccaagaaaacgtatttactatgcacctgaacagaaagcgattatttgggacagatataagcaaggtgattctttacatcagatcgccagaatgtttgatagataccattcttctattacgcccattatttatcaaacgggtggcttccgtcctcccgtccgtaaacgccacagattatcgctttcgcttgatgaacgagaagaaatatcgagaggattagcagaaaagtgtagtatcagggagatagctaaaaagatatcaagagccccttcaactgttagccgtgagatccgcaggcatggtggattaaccaactaccgtgcagcaaaagcggataaaaaagcatgggataatgccttgagacctaaagcttgtaagttaagttaa

SEQ ID NO: 309693 - DNA, 585 bp, Proteus mirabilis
atgtcacgtgtttttgcctactgcagggtctcaactctggaacagaccacagaaaaccagcgtcgtgaaattgaagcggcgggttttgccatcagatcccaacgacttattgaggagcatatcagtggctcggttgctgccagcgaacgccccggatttatccggttgctagatcgcatggaaaatggggatgtactgattgtcaccaaacttgaccgtctgggtcgtaatgcgatggatatccgaaaaacagtagagcaactggcggctttagatattcgcgttcattgtctcgcactcggaggcgttgacttgaccagtccggccggaaaaatgactatgcaggtaatttctgctgtagcggagtttgagcgggatttgctgcttgagcgaacgtattcaggtattgcgagggcaaaagcggctggaaaacgcttcggtcgcccccccatcctgagcgaggaacaaaagcaaacagtgacagagcgcctaaatgctggcatcagtatcagtgctattgcccgggaatttaataccacccgccagactatccttcgggtaaaggctggattgctgcaagagtga

SEQ ID NO: 309694 - DNA, 2985 bp, Proteus mirabilis; identical to SEQ ID NO: 287137

SEQ ID NO: 309695 - DNA, 1113 bp, Proteus mirabilis
atgtctttcttattgatcttgaatagtctttttattatttactcgatattactttctcgtggtgtttatcttgattgggaaatacacggttttgctgactggctaaaatcgttaggtatattgaaattacttgatattcctaaagtgatgttagcgagtgcacttattttgctctctttctttatgtatatgggggcgcggattgcgtggtgcgtttcattaatattattagtgacgatcgtttttttagatgtcgcagtttatcaccaagctggtactcaagcctatacttcattagcattagccattgtattggttatcagccggcgtgcttttcctcatcatagcttaaccagtgccggttttgttgcttttatctgtacgatttcgctactgtgtttctctatgttaggcagcctctatattggtgatgaatttaaaccacatatcacaacgttaatggatgctttttacttttccattgtctgtatgacaacacttggttttggcgatatcgttcctatctcaagtaatgcgagaatgtttaccctaacagtggttattttgggtatcactgtttttacgacttctattgtttatgtgatgggatttttggctcgtggtactcgcgatattgtgaagaaaaggatcgctaaaatgcatgatcattttattattattggctcttcaatgttggcagcacaattagagaaagggcttagagagcaaggtaaaccggttattgcgatttgttcggataaaaagcaagccatgtatgataaagaagccaatattattgaaggtgatccaaccaatgtaaaaacattacaaacggcaaatattcgccaagcgagttgggtggcgacgttatctgaaagtgatgcggaaaatacctttattttattaactattcaagagtgcccagatcttcaagcgaaattaatcactatcattaataaagatgagaatagagaaaaaataagtcgattacgtccagatatgctgttgtctttagcttcgttaggcaaagaaattatgatgaaagtcctttgtggtgaatctattaattcgtctgatgttactgatttattaatcaataaatatttaaaataa

SEQ ID NO: 309696 - DNA, 279 bp, Proteus mirabilis
  misc_feature (258)..(267): n is a, c, g, or t
atgattaaattaaataatgttccatccgaatttcgtcccttagaaagctataaaatgttaattggcggcgaatgggtatccagtacatcgcaacaaacgaccaaaacctatagtcccgcaaccggtgagttattaagtgaatatccatcaggtacagctgaagacgttgatcttgctgtaaaagcggctcgtaaagcttttgatcattggcgtaaaacctctcctgctcaacgccaagcgctattattaaaaattgcnnnnnnnnnntgcttggattga

SEQ ID NO: 309697 - DNA, 237 bp, Proteus mirabilis
atgattgataatcaacaccccattaaaggtaaagttgaaggaattagtcggggagtcatgtcgaccgatctgattaatattccaagagacttaccttatgtacctaaatcattaaattgggtacgggttgagcagcgttttcctgtcaaagtcattattactgaaccaccagaagcactcatgcgcatcggtgccactgctactgtaaatattgtacctaacgatgatgactgttaa

SEQ ID NO: 309698 - DNA, 1641 bp, Proteus mirabilis
atgaaaaagaaagttatgttaaaaatgatgtttcctgtcagcattatatcacttgcgctgacctcttttctttctcatgcggtaatacctccagaaggtactcttcttgcgaaacaacaagatattgttattaataatggcactgaagtttcctcccttgatccacataaagtggaaggggtaccagaaagtaatattattttaaatttattagaagggcttacttatatggggcctaatggcgaaagtatgccgggggttgccgctaaatgggagagctcagaagacaataaaacatggactttctatttacgcgatgatgcgaaatggagtgatggtacaccggttactgcagatgattttgtttatagttggcgtcgattaactgatccccaaactggctcgccttatgccagttatcttgaatatgcctatgtggaaaatgttgcagatattctgacaggcaagaaatccccagagagtctaggggtaaaagcaattgatccacatactttgcaagttacgctcacacaaccggttccctatctggtggatatgctaaaccacacctcattaaaaccagttaaaaaagagattgttgaaaaatatggtgtcaattggactcgcccggaaaactttgtcggtaatggggcgtatttaattgataattgggtggttaatgaaaaaatcactttaaaacgtaatccactttattgggataacaaaaacaccattattgaacgagcgacttttttacctattagttcagaaaccagtgatattaatcgctaccgtagcggtgaagttcaaatcaccaatagcgctattcctcctacgctttatcgaaagatgaaacaagagcaaccagagaatctacatgttacgccttacctatgtactttcttttatgagcttaataataaacgtccaccttttgatgatccccgtgtgcgtgaagcggtaaaattaagtttagatagagaaattatcgcggaaaagatcatggggcaagggcaaataccggcttattcttttactccaccttttattaataatggcaagtttaaaccccctaaatgggctggttggacgcaacaacagcgtcatgaaagagcgcgtgagttattaaaagaagccggttatgacagccaaaacccattatcttttacattgctgtacaacacatccgatcagaataagcaacaagctattgctgccgcttctatgtggaaaaagaatattggtgctaatgtcactttacaaaatcaagagtggaaaacgacgttagaaaatcgtaaccaaggtaattaccaagtagcaagggcaacatggtgtgccgattacaatgaaccaacatcatttttaaactctttcctctccactagcagtctaaatactattttatatgaaaatagtgattatgatgctgcattaaagaatgcgttactggccactgataatgaagcgcgtcaccaactgtatcaacgtgctgaagccttgttagacaaggactccgctattgtaccagtctattatcgtgtgagtgtcagaatggtcagtcctaaagtgggcggatttaccggtaaagacccctttgattatacggacttaaagcgctattttataaaggcagataaataa

SEQ ID NO: 309699 - DNA, 612 bp, Proteus mirabilis
atgatgactaatattacactcgataatataaaacttgctgtacaacgtatcgcaattgcctgtgaacagtctcaaaatagactatgtgaagcagatagccaacttggtgacggtgatttaggggtaaccatgcaaaaaggatggcgacaaattgctaacgatgcccaagattggcctgacgatttaagcaaagcgctttttcaatgcagcaaatcattacaaaaagcctgtgcgtcttcttttggtactttgcaagcaacggcttttatggcaatggccaaatattgcaaagaaaaccacctgcaagaaatagcgcttactgatatttccccactattgacggtcgcataccaaagcatgatggcgagaggaaaaggggaattagggcaaaagtcagtattagatattctttatcatttatctgaagatctagcgtcaatctcatctctgactgaactaaaacccactgctttaaaaagtattaataatacgctaaatgaatttcgccctaagcctaatttattgggacgtgcccgtatgttcccagaaaaatcgataggattagacgatcccggaatgttagcgattaacgttattgttgaagcaatttga

SEQ ID NO: 309700 - DNA, 996 bp, Proteus mirabilis
atgaaaaagatattaaataaaccagaaaattatgttgatgaaacattagctggcttatgccttgcacataatgatatttatcgtcaaccacaaccacgtttaattacgcgagctaacagctcagataaagctaaagtgggaattgttactggcggaggatcagggcaccttcccgttttcaccggatatgtaggtgaaggtttattagatgccgccgcagtcggtgatgtatttgcctcaccgtcagcagatctaatggctgatgcgatacgcgctgcggataatgggcagggggtattactgctctatggtaattatggtggcgatattatgaattttgatatggcttctgaaacggtagattttgaagataatattcgatgtacaacggtgttagcgacagatgatattgcttctgcaacaccagaagaagcgcataaacgtcgtggtgtggctggaatgatttatggttttaaaatggcaggggccaaagctcaagaaggggcatctcttgatgaggtgacccgcattgctcaaaaaaccatggaaaacacgcgaacaataggctgtgccttaacatcttgcaccttacccgctgttggacatcctacctttgaaatcgctgacgatgaaatggaaatgggaatggggatccacggtgaaccaggaatttggcgcgataaattacgtagtgcagatgatattgctgaagaaatgtttcaacgtttacaaaccgaattatcactaaaaaagggtgataaagtctcagtattagtcaactcgttaggtgcaacgcctttagaagaactctatattttatataataaagttgttcaacttattgataatacaggggcgagtatcactcatccattagtcggccgttatgcaacatcaatggaaatgaccggtgctagcttaactttttgtaaacttgatgatgagcttgaagctttattgaatgcacctgcacactgtgcattttggagagtgtga

SEQ ID NO: 309701 - DNA, 945 bp, Proteus mirabilis
atgaaaaaaactctcttagctctgaccctatgcagttctgtttttactgttcctgcttttgcacaatggcctgaaaaacctattacgattattgttccttgggctgctggtggcaatacagataccgttgctcgtttagcagcaaaaggattacaagaagaattaggtgtgacggttaatgtcgttaataagaccggaggaagtggcgttgttggacatgatgctattaaaaatgccaagccagatggttacacattaggtattgccacggttgaaattgcgatgatgcatcatcaggggatgactaatttaacctatcaagattataccccgatcactcgtttagcggtaatctacggtggattacaagttgcaaaatcatcgccttttaataatgcacaagaaattatcgattatgccaaagccaacccaggaaaattaaaagcgtcagggagtggattaaactctatctggcatcttaataatattggcatgttacgtgcagcaggtttacctgataacgcaatccgctttattccttcccaaggagctagtgctgcattacaagagttagcttcagggggcgttgatattgtaacgtcttcattaggtgaggctgacagtatggtcaaagccggattagtcaaacatatggccattatgtctaatgaaaaatcggcattttatcctgatgttcctctctttaaagaagcaacaggttatgattgggatttacaagcatggaatatgttagttgcccctaaaggacttgataaagaagcacaagataagcttaccgcagcaatgaagaaagtttatgcttcaggtgaattagctgaatttgctaataaacaaggatttgaagtcattgaattgtatggtgatgatgcgacacaatttatggccaatgaagataaaaagtttggcgaaattataaaaaaataa

SEQ ID NO: 309702 - DNA, 438 bp, Proteus mirabilis
atgtgtataagagacagaactaaagatgatcgtcagataggcattgatgtgacatgggacattattaatttttcatcattatattctattgatgaaaaagtaagtcaattaaacgcggcacaacagagaatggagagagtgattagagatattgaagaagcaagacgtttatcagtaattaatatccaaaaaagtactcaaaaattgaagatattagatgcacaaattttatcatcgacaaaagtagtcgatttttatcaattgcaatttaatgttgcacgccgttctttgttagatgttttgaatgcagaaaaagagttatctgatgttgaattatcttatgccacgacattgagtgatcttaggtacgggatgcttgattatttgtatgcacaaggaaaactttcgcactgggcacttaattcacacactcactaa

SEQ ID NO: 309703 - DNA, 519 bp, Proteus mirabilis
atggagctattgaccattattgagcgagtattaaaaaacgagcctttggagcgtgttatgtggtttattattatttggggagcattactaatattcagccctaattcatggtctgaatatgtcaattcaaaagttggaatagctcatttttggcaggtgtttgtttttgctatttcttttgttactgccgcaaatacacaaagatttgtaacgatggcaactaaagtgcttttatcttctattcataatagaagggcaaaacaaaaagaagtcaaaatatcacagaaaatatcaagcctttcaaaggatgaaaaagactgcttggctatatttattgatatcggagacgattttcttgtcttcgataaggatgacgcaattgtttcatctttaatcgacaaaaatattattcatgatttctctaaacaccttaacattaaacatgcagataagtgcacaatcaatcctgattattatttagagtgcgttaagcagtttactggacgccttgatggctaa

SEQ ID NO: 309704 - DNA, 576 bp, Proteus mirabilis
atgtttttcagttacatagatagattcgagcaaagaatggctcaacaagacgtggcagttgcgttctttactatccaatatcataactgtgccatggaaatcgcctattctaggacacaaaaaaaatttttgattgcgtttgttaatcacaacttaggttttacatgttcactgagagaatgttacgctaatggcttcatcaaccattatgaagctgttgaacagttggccgcatgtcgtaatcacggcgcttttgatcctattcacttttatgattttttaaatgcccagctactccttgtaaactttggtgagcttgcactaagggattacactggtatcgttggaaaagcagtatctaactttgaagaccgaatctactttaatcattggcgtagagccgcaatttctgaccgtcaggtaaacaaaacgatagaactaatggggtatgaagtggttgagttttgccgtgagaataggctgactccggtattctacccacgccctactgaacgcacgcttgaagcatttcgtgattttaatcaagactttgaagatcatggcttggtgcagtaa

SEQ ID NO: 309705 - DNA, 177 bp, Proteus mirabilis
atggctaatggttcgcgctcaatattttttagccgcatgggcgcgaggcagacaaaacagcatctggcagttggggacaaatcagtttggcgtaatgattataaattctgctatggtataggacgcgtgtttttagatgatgggatatattgggtcagttataatttgagacaatag

SEQ ID NO: 309706 - DNA, 546 bp, Proteus mirabilis
ttggatcgactggaaagtaggaaagtaaaattacaaagcgaaactccgataaaaaaagaaaaaagtgcggtgcaaaccggcattccagagtccgttgcccatagtctgtcgttaaaaatctcatctatattaaaagcttggcattttcctggagaatgccaagtattttttgataaagattcttcggattttgtaatcgatggaaaacctcgcggtagccggggaaaagggctacgagccattacccatgcagcagtcagtgtcggactacttgagttttgccaggagaatgggttatcgcatccgggattccttgttctggattcccctctactggcttactataaaccagaaggtgaagatggtgtggtactgcaatccactgacttgaaagagaaattttataattaccttgtgaaacaccataataaagagagtcaaatccttattatagagaatccgcatccgccggaaagcatgaataaacagattactatgacggtatttactggtaatcctagagttggccgtttcgggctgctttga

SEQ ID NO: 309707 - DNA, 1263 bp, Proteus mirabilis
atgatgagtgataattatttgcagctccgaaaaatttgcttccgtgccccagccaaagaatctgttttatctttttcatccggtgttaatgtgatttgcggggcttccgacacaggtaaatcatttctcgcagaaactctggattttatgctgggtggaacggagctcaggcaaattacagaattagctgcttatgcagaaataatgctcgactttgataccagtgatggtcgaagttggcgtcttcaacgtgcggtggttggcgggaatttcaagttaactgatttggatgagcccgactcgaaacctgtcgtgttaaaacagaaatacggccgaggcaaaacggataatatatccagttttctacttgaacagattggcttgccgaataaggcgattttgaaaagtagtgccaaagcgacaactcagagactaagcttccgtaatctggcgagggttgctctggttcaggaagatgaaattcagcaaaaaggctctcccttttggagtgggcaattcacaaccaaaacctctgaactggcaactgtcaaactgttgctgacaggagttgatgattctgcagtcgttgcagcaagtggtgatggtgtaagcaatacgtctcagattatgttgattgatgagttaattgcggagttaaccattgaaattaaggatatgggagaagagcgagatgatctggcctcccaattgacccgccttgaaaaatctattgaaattcaacatgaatcacttactaccgcacagcagcaactagaggggttattacaacaaaggagactggtctttgatgagcgaaacaaaatccagggacgacaagatgaaatatccgagctaattgctagatttacacttcttcatgagcattatgttatagatatcaaccgtctgaaatccattcaggagagtggattgatcttcatgcatattgatgtggttccttgccctcattgtggagcgaatccggatcaccaacacttggaaaaaatatgtgatggggatgtagattcagtcatcacttcagcaactgccgagatgcaaaagactgaacgacttttggctgagctgaatggtatagtcagtgatcttgtcagcgaaaagcaactccttgagatgcaataccttgttcatgaagaggactattttcgtcttaataaagccattcaggaaactattgcacctgaagttgatagtttcaggcacacgtatgctgaactgatcgacgaacgagcaagtgttcagtaa

SEQ ID NO: 309708 - DNA, 492 bp, Proteus mirabilis
atgaatcataaaaaacatccagagccctttaatagtcctttcgaaactgggatacgttctcttgcgattctggttgccgctttccctgagtcttatgatttgcaacggctggttgaaatggattatctcgttgtgcattccagtgacgctgatggccctgacagtttgcatgctccgctaccgatgcgtgtgggtgaactactggtcaggcatggattgattgaaaagggattgatgctaatgatgagcagggggctcgtgcagcgtgtttcagccagtgatggctttaactatcttgctggtgagctcgcggcgccttttatatcttctcttactactgaatattcatgccgactaaaagtttgtgctgaatgggcaaccggtgaatttaaaaacctgtctacgcaggaaattcggaacattacacaccgtttgtttcagcagtggtcaagccaattccagggtattcagtcatctggaggaggagaatga

SEQ ID NO: 309709 - DNA, 225 bp, Proteus mirabilis
atgaagttattcctcattacatcgcatttaacttctacggaatttgataaggttcacgtctatttttcttttaatattagtgactatcttcgccagcgtgaacgtttttatcacgcggaatcgctaaaaaatttcgcgcgagatactgtacctacaggaacatttgatgccttacaggatgaaatctaccatggcgtaattgatgtctgcgaagattatcactga

SEQ ID NO: 309710 - DNA, 558 bp, Proteus mirabilis
atggctcttaacggctctagcgctgaagaaatagcctatatcttaggccattcaagtacggttgccgcgggatattatatttcatcaacaccaagtttagctgaaattagagaaaatgcattaggttccaaccctgtttttcagaacatgattgctttaatgatgacaggtagtttagttcaaagaaatgactggattggtcgtaaagtggcaggaaatattaacaatcaatttcactttaatatcggtggttgtacttacgacaatgctctttgcccattctctcaggtcagagcttgctacggatgcctttattttaaaccttttatagatggtgaacatcagaaggtgtttgattcaataaatgaagagttgattcaactaatacgaagtgagcgaattaagcacggtatctcacaagagaatcttgcccttttgacagatatcgaccgtagttatgtaggtcggattgaacgtggtgaagtcaacatcacagtagaaaaactatatcagattgcaaatgtgctgaaatgctcaccaagtgaactgctaccgtaa

SEQ ID NO: 309711 - DNA, 609 bp, Proteus mirabilis
  misc_feature (547)..(556): n is a, c, g, or t
atgaaaatgataaagattaaaaaaaataaggagcctaattcattagtttcatacaaaaaaaaagaaggtgcatgttatgatggtcctgattttacagatgtaaaaaatgacattaaagagtctttacttcaagagcaaggctatatatgcgcatattgtatgtgccgaatttcaaagagtacaatgaaagtagaacattgggcgtgtcaaagcaaacatcctgaaaaacagttagaatacaaaaatttattggggtgctgtaaaggtggtgaagggttttcacctatgcaacagacatgcgatacccataagggaaatttggatataacctattctccgactgacgatatattttcctcagatgatttcattaaatatacttctagagggaaaatagcttcaagtaatgaaaggtttgacttagaaataaatgatgttttacatcttaatgacccaagattaatattaaatagaaaaataatattagataaaatacaaaaagagctgcatgaaagaaaaggcagtataaaagaaacagaaataaatnnnnnnnnnnatataaacagaagaattgtaacaatgagcatcttgagtattttggagtcatag

SEQ ID NO: 309712 - DNA, 333 bp, Proteus mirabilis
gtgattagtgaagttaagcataaacaaatattcatactaactgaaaatgcaaatggagcgattaatacctataatcctaagcagtcttacgggttaacctctaatgaaatacttaatgaacttatgagtgctgataaaaagcaattaattaggtcatattcagttgagtgtaagttagatgaaatttttgatttaattgaacaaggaaatattagtttagctaaagatgaaattagtgctttggaatctcaagttaatggcgatattccagaattattaagtgctaaaatggagatagaactacaggaatgggatgaaaatgataaagattaa

SEQ ID NO: 309713 - DNA, 654 bp, Proteus mirabilis
  misc_feature (9)..(18): n is a, c, g, or t
ttgccggannnnnnnnnngccggacaatacgaaagaaataaacaatcactattagaatcagaaattaaattactacacgcacaagtcaatccccactttttatttaatgcattaaatacattacaagccgttattcgtcgtgatagtgatcaagcaaaacagttagtgcaatttctgtcagctttttttcgtaagaatttaaaaagacccgaagcgatagtgacactcagtgatgaaattgaacacgtcacggcttatttgcaaattgaaaaagcgcgctttcaagaaagtttacagatagatattcagatacctgaacatttagccactgcgcgccttcctgcattttcgcttcagcctatggttgagaatgcaattaaacatggaacatcacagttattaggcatcggaaagattacaattagagcgcatcaagaagaccacttaatagtgatcgaaattagtgataatgcagggctttatcattcgcaaggcgcatcacatcagctcggtttaggaatgagacttgtcgataagcggattaaattacgctatggtgatctatatggtgtacttgtggagtgtcagcctgataactataccaaaataaaaatctgtttacccttagaaaaaaatatggataacgcagcataa

SEQ ID NO: 309714 - DNA, 195 bp, Proteus mirabilis
atggctattacattaacaacaaagcaaataatggctatggctgattttgctggcttaaaggtagacacacacggattagacattaatgatgagactgaatacaccatcgagccacgtaaagataaagaaaccggtcgtgtgcatgtattttactgtactgaatatccagaagaaggcgccattcagctggactaa

SEQ ID NO: 309715 - DNA, 246 bp, Proteus mirabilis
atgaataatgaatataatagagaacaaatgaaattaggtgttctatatgctcgcaatcatttaattagctcatataaagcaaactttattgaatgtgacgaatgccagttcgcaatgtttatgaatacattatctctcgttgcaaacgaatcaatagatattgaattaatgatggaaaatgttttgtcatgtaatgacgaggctgaaaattggattaaagaaattctaattaaacattctaaataa

SEQ ID NO: 309716 - DNA, 942 bp, Proteus mirabilis
atgacaattagagaaaattttggattctatgaaggacaaagcttaataattgcctttgaagaactattaacaaagtatggtatcaaagtcagcaaaaattgtgatttggagtcgaaatttttatctgtttttgatgttttatttcacttcgaagatcgtgaaagattaaatcaaggtgaagattatcggtcgctatttcgagactttgctgccctttatgatctaagtcttaaaatacttagcgtacagacacataaaaactttggtcaattaattcctcatttggaaaaacttaatacatgcagtatagctcaaaatgataaaagcatgataaccgaccaagatgcgaataaaataattgaactttacctagcatctttgtgtatgcgtttttgcaacaatatagacctagatcaccctagcaactcaaaaggaaataatcccgatgtgattgctaatattaatgatcaaaactgggggttcgcatgcaaaaccattcatagtacaaactcacaaacgatatttgaaaaccttgagaaggctatagatcaaatagaaaaatcaatatcaacgacaggaatcccagtaataaacctaaagaatgtcatcaatcatgatgcagtttggccagcacatcaaaccttccaaacattagatgtcccattatcttacttacagtctgatattgagtctattcgtcagtcattacttcatgatataggcattgataaattaaggagcctattcattggtaaaaagtcactcccaggaataatttttatagcccagagtgcatcatctgttttcctaatggaaaccatgtcacctactgcaactagaattaatgtaatgacactatttcaaatagatgaagataggttcaagcctgaagaattatgggtaattaatcaactaaatcatgttatgcagttggcaaactag

SEQ ID NO: 309717 - DNA, 405 bp, Proteus mirabilis
atgtctgaagtgtggaaaatatcaccaccttacaaaaattggagcgattataactctgctttatatgattatgcagaaaacctgacaacagacgaagatctaaagttaccagatggcgttgaatttttagagtggtttaaagcaaatttgagcgctttagaaaacgaccaatatatgagggaagccaacgctataattgcaattaagctactatctatctttgaagctaatactaaattgtggttagcagtaacgtacttgaacacttgggttattacaggcgatgataacatatatcagcttttcgataactggctgtcttgtgttcccaatgaattgaagcctgtggttaatatattggcacatgagtttggagcaaaggacctgaataattatgacaattag

SEQ ID NO: 309718 - DNA, 276 bp, Proteus mirabilis
atgtcaacttgtgatggctggtttattaaaccatcaattattgatgacatgagtgatgaaaaaaggaatttttatatgcaggattgcatgttctataatgaacgaaaattatatgaaaagtatgatttttctatttttgatactttaaaagaaaaaatatgtgctgaagatgatatagttttattatctgaagaactctccaatattccacaacgtgatgattacgaagttaggtatgctgccatgttggaatctatttttggcaaaaggaattga

SEQ ID NO: 309719 - DNA, 336 bp, Proteus mirabilis
atgaacattaaacaattacagcaacaaatccatcaacaaaataaatctgctggatggtgggatagcccacgcgagaaaggaaccttactctgcctgattcactctgaaatcagcgaggcaatggagggagaacgcaaaaacttaatggatgaccatttgccacatagaaaaatggctgaagtcgaacttgctgatgctgttattcgtattttggattatgccgaagcctttgattatgacattgaaggggctattgctgaaaagctcgaatacaacaaacatagagcagatcatcagcgtgaaaaccgcatcaaaaagggcgggaaaaaattctaa

SEQ ID NO: 309720 - DNA, 153 bp, Proteus mirabilis
gtgagtgaagaatcattacgcaaagcgctgaaagaaaaccctgaatgggtaaaacgatatttaggcttagataagccacccaagatacgaacccgacacgtaattctattcttttcgattgttactttagcgatggggtttatgtatggctaa

SEQ ID NO: 309721 - DNA, 435 bp, Proteus mirabilis
atggtcaaatgcgccaatggcatatttgcaccagcattcgaacatgacctaccacgtttaacaaaattcaaaaatggcgaggtgtacacgttcagtgtaaagatcacaagaaaccccgcctttcataaaaaaatgttcgcattcttcaaattctgttttgaccactggtgcgcaaataaagctggactcgactgcatggacgagcatagccaatttgagcgcttcaggaaggatttgacgatacttgcaggattttatgagcaaacggtaaggctaaacggcgaggtgcgtacagaggctaagagcctgtcatttgccaacatggatccagacgaattcgaacgctgttacaaagccatgattaacgcagcaataaaacacattttcaggggatgcaatgaaatcactgaaaatcggttactgacattcttttga

SEQ ID NO: 309722 - DNA, 174 bp, Proteus mirabilis
atgagcgaactcaagaaatgccctgaatgtgaatcaacaaaagttggtgtcgccaaaaaactgaaattcccaatgtggtttgtaatttgtcattgttgtgaatatcgaagcatggcgcaaccgacagaaagggaatcgatagcagcatggaacaggagagctaacagtgagtga

SEQ ID NO: 309723 - DNA, 225 bp, Proteus mirabilis
atgcagggaactaattgggttaagtgttcagataaaatgccaccatttagaacaccggttttgtgttgtgatattaattcactatctggtggggtgttcattgctaattacatcagggaatctaggttcggtgatagaaccaatttaactggtatctaccgtgggaatatgcaaggaaacgtaactcactggatgaacttgccatcaatgccagagggtgaatga

SEQ ID NO: 309724 - DNA, 774 bp, Proteus mirabilis; identical to SEQ ID NO: 195090

SEQ ID NO: 309725 - DNA, 702 bp, Proteus mirabilis
atgcaaacgctgaaacccacccttaccatcgatatctggtcagatttggtctgcccgtggtgctggattgctaaaaaaagatttgaacagggtctgaatcgctttgaatttcgcgaccaggtggtgatccgccatcacagctaccgtctggccggtggtactcccgcgatgccttttaaggatgccatcgttaaaaagctgggcagtcagcattcagcggagctgatgatgaatcaggtgggcaccgccggtaaatctgaaggtctgatctacaacttcgacggcatgatgtttggtgatacagaagatgcacacaccctgctggttgccgcgcgtaaggccggaattgcggacgcggtggaagaacgtttttatcatggcagtatcaccgaaggtcgctctctctttgatcgtcagcagctcgttgccatggccgtagaagccggtatgccgaaagctgacgctgaagccgccctggaaaatgacgattttcgcgccaccgtttccgacgatgaagcccacgcacagtctattggcctcagcggcgttccggtttttgtgatgaacgaaaaatatgccatcagcggggctcaggcagcagataactttttgaatgccctgcgtcaggtctgggatgaacagcaaaccgaatttacagccactgcgggtcagacctgcggaacggatggctgcagtatttaa

SEQ ID NO: 309726 - DNA, 1107 bp, Proteus mirabilis
atgagtaagcttttcaccccctacaatctgtctggcctggcgttaaaaaaccgtgtagtcatggcaccgatgacccgcacccgcaccatgaatgacgtgccggatgaggtcgtggctttgtactatgcacagcgtgcttctgctggcctgctcatcaccgaagggatgccggtttcagaagaaggccggggttacctttatacccctggtatctacaacgacgaacacgtccagggctggcgtaaggtgacacaagcggttcacgccaaaggtggccgtattttcgcgcagctctggcacgtcggccgtatgtctcacgtctctcttcagccaggccacatagcgccggtttcagcgggcaccgttcaggcggtcaataccaccgtttttgcgctgaccgaatccggagaaccgggcccggttgtaccaagccagccacgcgcgctggaaacgcatgaagttaaacgcatcactgcagacttcgcgcactccgcacgcctggcgatggaagccggctttgacggcgtggaaatcatggcggcaaacggattcatctttgaccagttcctcagtagcgaactgaacacccgcaccgacgaatacggcggctcggtggaaaatcgtcagcgtttcctgctggagaccattgacgccgtggcggaagccgtgggtaacagccacgttgccgtgcgcctgtcaccgttcggccgcatttatgacctcgcgccgtatgaaggtgaagagcaaacctggtcagccatcaccgacgcgctcggtcagcgggaactggcctacgtacacctttactatcagccggtgtacaccaaagcgccacttccggaaggcttccgccgccgttttcgcaacacgtttaaaggcaccatcatcgctgccggcggttttacccgtgatatcgcagagcaggctctggaagatgatgagctggatctggtggcatttggtgtgccctacatcgctaacccggatctggttgaaagaatgcaaaacggctggccactggcagaaagtgaccgcgccacctactacggcgtcagtggttccccggaaaaaggctataccgattacccggtctggcaggcacaataa

SEQ ID NO: 309727 - DNA, 339 bp, Proteus mirabilis; identical to SEQ ID NO: 195086

SEQ ID NO: 309728 - DNA, 582 bp, Proteus mirabilis
atgacaaccatgacacgggaacggctgctcagcgaagcagaacacctgatgcgcgaaaaagggtattcagcattcagctatgctgatttatcaaaaatagtgggtatcaccaaggccagtattcatcaccatttcccgaccaaagatattctgggtgagcaggtggtaatacaggcgttctctgatacacaacgcgtatttgagcagatagaggcgactgagaaaagcgcggatagaagaattgcggcttacatcgatatcttcgcgcaaagccataaagcttcactactgccactgtgttgtgcgttgtcagcggagaccgccaatctgcctcaggcaattactgtacagacatcactttatttcgatatgcaaatcgagtggctcacaaaagtcgtcagggcgggcatggagtcaggtgagttttcatcccatgccgaaccatcagatattgctttgatgatcattaatgtctgtgaaggctcaagcgtagtggcgcatgcaacggccagacccgaagtcttcgccaacagccttaagtatataaaactgcttcttaatacccctcattcaggagaatga

SEQ ID NO: 309729 - DNA, 363 bp, Proteus mirabilis
atgaataaatacaccgaactatctgatttagagattaacaagcgcgtctttgttgctgcgaaaatagaacatgaagatacagacttacatagcaataaagttttctatggcgatggtgctaactggattgaatttaacccatgcaataacccagccgatgccatgcctattattattgagaataaaatcagcttacttgctggtgacagtaatttctggtgtgctagatatggagagtggaatatacttccttgtccatctggtattgagtttatagaaaaagcgcaagttataaacgatagcccatatcgcgcagctatggaattattcttaatgatgaaggatgcggagaatgaaagctga

SEQ ID NO: 309730 - DNA, 456 bp, Proteus mirabilis
atgccaattatcccagaggttgttgagcgtaatgaagatggttattgggtgcactcaaaactaccctattccgaaactggcagtgaaattacacaatggttatctgataacaaattagatcagtcctgtgtttatatgagtgaagatgttgatgaggatgctgccgttttccaaaattatttcactcacggtaatactaatgtctcagcttggataccgacagagcttcctggtgaaggttggtttgttggagctatatacgaaagtgaagatggacccgtctgcctttggttacgctcttcaagatatcaattaaaagaacagtttttaaaagcccatcgagaagctgaaaaaacagcttatgaatatttctgtgcttgcgatatcggcgaagaaagaattcaagcacacgaaatctaccaacgcatcagaacagctacgcgtataggtggatga

SEQ ID NO: 309731 - DNA, 534 bp, Proteus mirabilis
atgaaagaacgcggaattatttttaatactgagatggtgcgcgccattttagatggtcgtaaaactcaaactcgtcgcatcgttaaaaatgtaatgccagataatggaatatggctaaagaaaccgaccaaaacaagaagtggcgcaactacacatgtattggatactccaaaacataatttgtgcccgcttggtaaaattggtgatcgtctttgggttcgtgaaacgtggagtgtagtcagtcatgagtttgatgatgatgggttgatgattgattatgttcctgataggccaaccaaagctatacgtgaaatgccgtatggtcatggttattacactggacatgtcatttactctgctgatggtgcttttacatggggtgacgatgatggttgtattgatgggcgctcttgctggaaaccatctatacacatgcctcgcagggcttcacgcattacgttagaaattactgatgttcgcgtagagcgtttaaaggatgctggcgatactgagtcgccaaccaaaaacaagtga

SEQ ID NO: 309732 - DNA, 240 bp, Proteus mirabilis
  misc_feature (22)..(31): n is a, c, g, or t
gtggttttagaaaaaaagcgannnnnnnnnngcgggcgttatgttcgtttccaatttaaaggcacgttagaagaatataaacaatttgccatcaagatctacttttatactttaccggctttggggttatgtcgtcgtttagggccagatattgaaaactacatttgtatagaaacagatagcgacattatggaactaccaaaaacactggaaattgattattacgttccaattcattaa

SEQ ID NO: 309733 - DNA, 1224 bp, Proteus mirabilis
atgaaatatgattttgatgggtacgtaagcagagagaaaacagacagtctcaccgtggacggctggcgggaatacctgttttcgggacagtccgaatttgcaatgcggtatccggcagaagggctaatcaacctctgggttgctgacatggcttttgccacaccagagccgattcttcaggccatcagagaccgtctggatagaaaaatactcggctacactaaaatctacgacgaagaatactatgagatctttggcagctggtgtgagcgacaatatggtcaccgtttcaaaacggaagacattgtgctgtctccgggcattattcccgcgctgaaccgtctcgtcccgcttctgaccgacaaggatgacagtattcttatcatgacgccttcatatggcccgtttaaaaaggcgggtgaatacagtcagcgtcgcgtggtgtactcggcgttaaaaaaatcagcaggcggctgggaacctgactgggaagactttgcacgcaaagccagtcaggccgatttacgtgtgaaaattcttttcctgtgtaatccgcataacccgaccggacgagtctggcggcctgatgaacttaagcggattattgaaatttgcctggccaatgacatctgggtggtatctgacgaaattcactgcgacctgtcccgaagcggcatcggtcatacaccggccgcctctcttttccctgattccacacgcattattacctgcatgtcctcgagtaaaacattcaatctggccgggaatttgttggcaaatatcattattccggatcccggtgtcagaagcgagtggcgtctcagacacgacgagttcatctctccgctgagcctggcagcaaacaaagcggcgtggagtgaatgtgatgactggcttgtccatctgagggaatatattgacggaaatttccagtacctgcacgactatctcaaaagctatttacccgaaaccaggttctcgatccccgaagggacatatctggcctggatagatattagccgctacctgcccgacaccgcaggtgaggatttatcgctgtattttgcccgggagtcaggggtccttcttgaagggggcttgctgtttgtcgacaatggggacggatatatccggttaaatctggcctgcccacggagtatgctgacagcagggatgaaaagaatttcacaggtactgcggataccggctcctcatcgtgtataa

SEQ ID NO: 309734 - DNA, 870 bp, Proteus mirabilis
atggccaggtgcgcgctcattcttaaaatatcagtggcaatgctggcatttgcggcaaactccattctgtgtcgtctggccctgcagggaggtcacattgatcccctttcattcagcagcctcaggctggccagtggtgcattcgtcctgtcccccttcctcttttatcacgccaggaccacattatccctgtggcgtccgctgagcgggttttacctcatggcgtatgcggtgctgttctctgtcgcctatatccatctcgataccggggcgggtgcgctgttactttttggtgccgtacagtttgcgatggtgatccacggattattcaaaggagaatcactctccgctatgcgggctggcggtttagttctggctctgacgggaattgctgccctgctgttacccggggcgaaggcaccgccgctttacagtgcacttatgatgatcgttgccggattagcctgggccgcctattccgtcagggggagggcgggccaggcggccggggcttcaacggcggcaaattttgtactcgccacgccgatggctctcgctctttcgttgctgtttatgaagcagggtcactatgatgctgcgggcattgctttgtcattgctgtccggtgccgccgcctcagccggtgcatatgtattgtggtatacccttttaccctctctcggctctatcaccgccagtacccttcagctcagcgttccctgtctggcaatgctagggggggtggtattcctggatgaatcactgacggtcagaacgatattttctgccctggcggtgctgactggcattgtgatggtgacacgcgagaaatccccccatcagccgatgacaaaggcgagaaaaccttaa

SEQ ID NO: 309735 - DNA, 600 bp, Proteus mirabilis
ttgaacgatattacttggtttgtagaatactttgatctaagtaatattactattctcgtgtgtttcttgggaactcatcgatatgcaacctatatgttaaagacgactctcgagagaaaatttcaagagcgaaatatctcacttattatcagagaaaatggattcctcaaaacgcgcgaaaatcgccttaggtattcctcatcttctgaagttttttggttgcgcagaaatggtattgagctaccaggctggatccaacatccggagatctatacatcgcgtgagggcactgaaaggactcattttgagccaaacgacatctttctcaacgaagcagatcgctatcgttttgaatatgcactaacaaaggctggtttttatatacttcagcaaagtcaaaatcctgcttcgattctcaaacctctcggcttttcaacattctctggactaggatttggtggaaccatttttacttatcgaaattgtccaaataatactccactagctttttggtggggaagatatgagcgcgatgagattccaaattgtgcactggattgttggtatccattaatgcgcagaattgggtataatcagtaa

SEQ ID NO: 309736 - DNA, 960 bp, Proteus mirabilis; identical to SEQ ID NO: 296664

SEQ ID NO: 309737 - DNA, 1452 bp, Proteus mirabilis
atgtcaaaacctcataacccagaaattcaaaaaattattaatcagttaaaacaacaatatcaaaatgctgttgatgccttacgtaatgctattattatgtatgctcaagatggaaaattacctgatataaaacaaagggctgaaggtctatttgcttatccgcaattaaccgtacattggtatggtgatgttaaaaaagaagataaaacaagagcttatgggcgtttatcaaaatcaggtacttattctacgactatcaccaatccaactttatttgaaaattatttaactgagcaactgcaacttattgcggatgcttatcatgtctcttttgaagtgacggcctcaaaacaagagataccatatccttttgtcattgatggcactggcattggttttgatcggtcaatgagcgcctctttagcaaaatattttccgactaccgatctctctaaaattggtgatgatattaccgatggtttaattgatgacagcgagcttttacctctttcacattttgatgcactacggacggatttttctttggctcgtttaaagcattataccggaactttacctgaagatgtgcaaccttatattttattcaccaattataatcgctatgtggatgagttcgttcgttgggcctgtgcacaagttgctgataaaaatagtccatattgcgcactttcttgtgcaggttttcagcaaataaccgccgatacggttgatccggaaaaattaatttctgatctgacatggaaaaaatatcaaatgcccgcctatcatttaattgcaaaagaagggccgggaataacattagtgaatattggtgttgggccgtcaaacgccaaaacaatttgtgatcatctggcggttctacgtcctcatgtttggttaatgattggtcattgtggaggcttaagagaaagccaattattaggtgattacgttttagctcatgcttatttacgagatgatcatattttagatgctgtattaccgccagatattcctattcctaatattgctgaagttcagcgtgcactttatgatgccactaaagccattagcggtaagcctggacatgaaatcaaacaacgattaagaacaggaacggttgtgacaacagatgatcgcaattgggaattacgtttttcagcaacatcaaggcgatttagtttaagtcgagccgttgccgtggatatggaaagtgccactattgccgctcaaggttatcgttttcgcgttccttatggcactttgttatgtgtatctgataaaccgttacatggtgaaataaaattaccaggacaagctaatcacttttatgaaggtgcggtatcagagcatttgcaaataggtattcatgcaattgagttattaaaagacgaagaagataaattacattctcgtaaattaagaacctttaatgagccgccatttagataa

SEQ ID NO: 309738 - DNA, 357 bp, Proteus mirabilis
atggcttgctcaccagacggcatttgcagtgatggctctggattagagcttaaatgccctaataacacggacgtatttatagacttagcattgaatggaatcgatgcaatgaaaaaggaatatgtggctcaagttcaatattccatgtgggttacaggtaaggatatctggcactttgcaaattttgacccacgcatgccggcagggaaagaaatcgcatatttccctgttgagcgtgacgaaaaaatgatgaaagaatttgacgagttagtacctgagttcattgaggtaatggatcaaggattaaacaagttaggcattcaatttggcaatcaatggagtgtatatggcaattaa

SEQ ID NO: 309739 - DNA, 501 bp, Proteus mirabilis
atggcaattaacacaataacagcaagcgggaatttaggcaaagattgcgaacagcgatggacgccaaatggtaaagcggttgcatcttttagtttaccagtgaaacaaggttacggagaacacgaaaaagtatcttgggttatctgcaagatgtttggccctaaagctgaaaatctacctccgcacctaaccaaagggaaaaaggttacagttactggtgagttcgttatggaagaatggataagccagaacggtgagaaaaaatcagcaccagtcattatcgttaaccagttagattttggaggtaacggtggtaatcaggcagggagcaataagccacaacagaatcaaggatggggacaacctcagcaaccgcaagcaccgcaacaacaacctaaacaacaaacgccacaaagtgaacctccgatggatttcgatgacgacatccccttcgctcctatcggactcccctacccacgtcacgctatttatgtgatttaa

SEQ ID NO: 309740 - DNA, 162 bp, Proteus mirabilis; identical to SEQ ID NO: 301407

SEQ ID NO: 309741 - DNA, 195 bp, Proteus mirabilis; identical to SEQ ID NO: 309714

SEQ ID NO: 309742 - DNA, 1374 bp, Proteus mirabilis
atgacatcacaatcacactccactcagccgttgagtcaacctacggcaagacctttaaaccgcaacgactataaaacgttgggtttatcctcactaggaggaacattggagttctatgatttcgtgatcttcgtgttctttacgaaaacattgagccatttattctttcctggtgataacgcttttatcgctcagatgcagacattaggtatttttgctgccggttatcttgctcgtcctttaggtggcatcattatggctcactatggcgatattatcggccgtaaacgtatgtttaccttaagtatctttttaatggctgtacctactttggtgattggcttattacctacctatgccagcatcggtgtggctgcaccgttattgctgttattgatgcgtattatgcaaggagcggctatcggtggtgaaatgcccggggcttgggtatttattgccgaacacacaccgaaacagcgttatggcttaggggtgggtaccttaacatccggtattactggtggcatcttattaggctctatcgtcgctattattgtacaacgcagctatagcgctcaagaagtgaatgattttgcatggcgaattccctttattttaggtggtatatttggcttgatctcggtttatttacgtcgttttttacaagaaacacctatctttaaagagatgacggctaaaaaagccttagcacaagaaatgccggtggtttcggttatcaaaaaccataaacaagcctgcttaattactgcagcattaacatggtctttatctacagctattgttgttactattttgatgacacccagtgtcattgttgaagggatctacaaaatagacagaacaacatcgttagaagctaactgtgttgccaccttaacgctgaccttaggatgtatcttctggggctggttgggtgataaattaggaacccgtgcatccatgaccttatcatggggtggattaattgttactgcattccatttttatggaagcttagatgccaatatgtctggtatccaattagcatttaactatggtttgatgggcttttttgtcggtgcaattgccacaaccccaattgtgagtactagagcatttcctccttcaattcgtttttctggcctctcttttgcttataatatggcctatgccgtatttggtggcttaacgccaatgttaacgggtgcttggttggaaaaaacggcaatggcaggagcttattatgttgcagctgtttctgcattagccattgttatcgcattcttacctttagcttataaaggctggatcgcggtaaacaccagctcacgggaaaaagagatagcattgcaagttgataaagtcgctagttaa

SEQ ID NO: 309743 - DNA, 1107 bp, Proteus mirabilis
atgttactaacagagcaacttcaaaaaattattgaaagattaccggatgaaccaaaaataaaatttaatgagcttgaaaaaataatagaaaaagcagatcttgtagggaaatcatggtctggttcgtggttaggctatcaatctagagtctattacgtaaatttttcaatccctcctgccggagcaatattcagtagccattacggatttgaacaaatgttttcatctggaactagaggtgattggagacaatataattttgatgatgtaattaactatatatatcaaatatctggtgatgtagatatcaataaatataaaattcaatttgatgaatatgaagagttatttgatgaatctagaaatgatatattatctttaatttatgccaataaggcaaaactaccaagtgatgacttatttcttcaaaagataatagaaaaaatagagaaatttaaaatatatactgagcgtgattttgtggatgttcatagaccgagaggtaaacttctgtcaacagatatggatgctatttctgaaggaataagaacgccaccacatatagcaatgatagctaaaatggcttgtctaagagaatcttactcacgctgtattgacctgaaaaaagaatcaataaaattatttagccatatcagcaacctacacgaaaaagagactaaggcatctagagttggaactaatatatttttgggtcatggacgctcacatttatggcgtgaactcaaagattttataaaagacaagttgcatcttccttatgatgaatttaatcgagtccctattgctggaactacaaatatagcaagattagctcaaatgttggatcatgctagttttgcatttttaataatgacagctgaagatgaattacaagatggtaacatgcaagccagaatgaatgttatccatgaagttggtttatttcaaggtcgtttaggttttgaaaaagcaattattctattagaagaaggatgtcaagaatttagcaacatcaatggattaggtcaaataaggtttcccaagggaaatatatccgctatatttgaaaatatacgagaggtattagagagagaagaattaatatga

SEQ ID NO: 309744 - DNA, 585 bp, Proteus mirabilis
atgagcaccaaaaagagaacggaaacggtcagatacgaagaaaatccgttcattgaagacatgattgttccaatcaaaaacaggaacgttaagttgtcacgtctaggccgtgatcaaaatattttggtgaaccagtcaaccggggaaattcaaggtacacacgtcaccacctacaggcgagtagatagtgaggagttcgtcaagctgttcacagcaaacatcgcccttactttcgaactgaaagcagcagggataaaagcctttggtgtgttggtctggatactccaagaaaaagggatcagcaaggacttggcgccgttggataagtttgtactggatgactttctagaagcgcacaaagaaaaaaaactggccttgtctcctgcgacatttgccagaggtttagccgaacttgaagccgcaaaaatcatcgctaagcacctgcgtcccggctggtatttcatcaacccaaacttcattttcaacggcgacaggattgcctttacaaccgtgattgaacgaaaaaaagcaacagatcaggagcggttggaagccatggggcaacaacgtttgattgaggattaa

SEQ ID NO: 309745 - DNA, 270 bp, Proteus mirabilis
atgaaaaaagcccgttttactgaaactcaaatcgttaatattttaaaactcgctgattctggtatgaaagtggaagatatttgtcgccagaatgggatcagtaataccacttattataattggaaatcaaagtatggtggtatggaagctaatgatattaaacgattaaaagagcttgaagatgaaaatactaaactgaaaaagctatttgcagaagtcagccttgaaaatcatgacatgaaggagcttttcgcaaaaaagggttggtga

SEQ ID NO: 309746 - DNA, 171 bp, Proteus mirabilis
atggcaggtttagtcgatatcgtccgtctttcaccgcagtctgatgaagtttttactaccttaaaacaatttcgccaaaatgaacaaggcgcacaccctattaacaccatccatcatcatgattgtaatggttattggcgtaaactggctggtttagaattagttgaataa

SEQ ID NO: 309747 - DNA, 396 bp, Proteus mirabilis
atgcttggccttgctgccctcgatgccgcgctgcaaaccgtgctgcttgcccacctgttcggcaaagtccgtttgcatctcccgcagcgccgccgcaccaccaaggaaccgccgacagttcagccgcccggtgtccgggtctttcggcaccacgtaggcgtacatgtgcggggttttttcgtctcggtggataccggcatagatcacgttttccgcaccatgacgcttgcgcagccagttcagcgagtcctgaaaataggcgtcctgctgttcgcgggttttgccctgcatcgcttccgggctggccgtcatcaggtactcaacgcactggacggcgttcttgcgcaccttttccggcagggcttcgcggaacgcagccatgccctcggccactga

SEQ ID NO: 309748 - DNA, 525 bp, Proteus mirabilis
atgttgttaagagactttcatacggcacaagttccctctaaacgtaaaaatattacacacccaactcgacgtagtgaattagctgaaaaagatcaaaatactattttatctagccgagattatcgatgtgatgcgatatggatcattgcgattaaattaacgggacattctcaatatacgcttgaacaactaaaaaatgcattattaaaacctgtttatatactgagtttagggcgtaaatcttgccccctctctttaccaatgatgcctaaaattgtagaagtagagcaattaaaagaggcattggatactcaatttccttatataacaacatcggataaagcagatagttattggtttcattcagatgggtgggtaacgtatttttgggaaggaaattatcaagatatcaagggagaaaatattatgacattgtacccttgggatgatccgataaatagacagcattggcaatttcgtcaacgtaaaatgtatcaaatgagtgtaaaaagggagagtgaataa

SEQ ID NO: 309749 - DNA, 279 bp, Proteus mirabilis; identical to SEQ ID NO: 301008

SEQ ID NO: 309750 - DNA, 231 bp, Proteus mirabilis
atgactacccaagctatttccttactagatgaccaatttgtcgatatgaaattcattacaaagctcacaggcttaacggataagtggttctataagttgatccaaaatggagagttcccaaaacccatcaagtttggtcgtatgtcgcgctggttaaaaagtgaagtcgtacagtggttacaagcgcgcattgatgaatcgagagggggcaactccgcccttggatcctaa

SEQ ID NO: 309751 - DNA, 414 bp, Proteus mirabilis
atgcttaaattacacgaagtcaaaatgtctctcgccctaacacaaaacaatcgattcgctggagccacccaagaaccgagttattcacgagaaaactattactgtgctcactgcggtgagcccgtcacactgcacaagacgccaacggagtcatggtttacccattctgatcctcagaccgcagagcactgtccgcaggtcatcagtaagatcaagaatttagaagacaaggcacgactgaacacacactttaggtcagtttcaccaatattaaaggtcacgaattggttttgtgtgcagtgccgcgaatactttacaaacaatcaaaaatgttgtctgaactgtcatgaggggatttggtgtattccagcggagaatgttacagaagaacatcagcctaaaacaaataggtaa

SEQ ID NO: 309752 - DNA, 324 bp, Proteus mirabilis
atggatattaatgtatccatttggcctttgcggatgaaatttaccttacttgatgataccgatgtaagccaagcctatgcggcatatttacgtgagttacgaaagcaggcaaagctgtcacgagcggcgcttgctgagcgcagctgtgtgcctgcggccaccattaagaagtttgagttaactgggcaaatttcatttcgccaattgctgttactttggcaaacacttgattcgctagagaggctttatcagctcacacaacatagcaaagaacgcgctgctgtacccgcgagtattgatgaggtgctaaaagatgagttttaa

SEQ ID NO: 309753 - DNA, 192 bp, Proteus mirabilis
atgagttttaaacccattcaaaaactcgccgtaactcgtacgttaagctcaggtgagcaggttgctgtagggatcttggcgcagaatcggcaaggcgtttttttttcagtatgcagacagctatttgcagcagtttggcaatttatctccttttaccttgcatgcgaacgcgcaagttcaagttgcacctaa

SEQ ID NO: 309754 - DNA, 438 bp, Proteus mirabilis
ttgcccgatggctggggcatgctgttacaagatcgtattttccggcaacagggcatcctgcctaatcaattaacggcgatggatagactggcctttatcggtgataaaggcatgggagcattgtctttttctccggtgtctgagttttcagcctccacgcatgcggatattgatttagccaccttgggcttagaagcacaaacgctgttcgatgcttcaatgccagattatatggatgataatcacgatgagttagatgggcgtactcaacaggtgttggccgcattagtcgccggaggtagttcgggcggggccagacctaaggcacaaatttatatgcctgctggggaaactcagcattgtcgaaccttcgctcagcttggagtgtggggtggatggttttggtttacacctctatggtgccagcagtactggtaa

SEQ ID NO: 309755 - DNA, 1740 bp, Proteus mirabilis
atgagcaaaactaaattagaactgacctggataggtaaaaacgagcgcaaaaagctagagccgcgcattttattagaagacccgagcaagtcttaccatgccagccaaaaagtcaccgaaaatgatatttttgataataagctaatttttggcgataacctattggcgttgaaggcgttagagcaagaatatgctggtcaggtaaagtgtatttatatagacccgccatataacacagggaacgcattcgagcattatgatgacggactggaaaactctatatggttgagtttgatgaagtctaggttagagatattagaggttttattacatgaaaatgggtttattgcagttcaaatagatgaccgacaatttgcaagattgtatttgataatggcagagatatttggtgagcaaaatttaaaaaccatctgcgttaagatgagtgagcctacaggtgtaaaaatggcttccattaataagaatggaagtattgcaaagctaaaagagtacataattttggctggaaaaagtggtattcgtggtcttacacttgaaaaaatccctaagggaagttgggactatgaatataaaacagtttgtctgggtctaagccaactagaacttgaatatataaaagatgttttggacaacgaattacgcacggaagaagagatcaagagagcagaagatttagctaaaaagctagaattctgtagtgctacagaagcgtgtaaaaaagagggaaactctaagcttacagaagagtggctatttgataatgcttggcgcgtagttcaatttgcaactattactggcggggctagagatctggccgttgaaaagaaattatcatacggtgatataccttcagcattcattgtcacgacaaaacaatccaaagcatatcttgttagaggtgagtttaatcatgaaacgcgcctaccacgatgtaaaatgctttttgcagataagtatttagaagttcatcccggcgatttttggcatgatataaaaacaacaggacttgataatgaaggttcagtagattttaaaaatggcaaaaaaccagaaaagttagtgaaacgcattattgcgatgacaacaagaccaggcgacttggtattggattcttttggagggtcaggaacaactggcgcagtcgcccataaaatgggccgtcgttggatcatggtggagctaggcgagcattgccacactcacatcatcccgcgcttgcaaaaagtgattgatggtgaagatcaaggtggtatttctaagtttgtaaactggcaaggtggcggtggcttccgctattacaaacttgccccgaccttaattgtgaaagataagtttggcttggaagtgatcaataaagagtacaacccagaaatgcttgctgaggcggtttgtaagctggaaggttttacctatgcgccatcggaagtgaattggtgggatcacggttattcaaccgagacggatcatatttatgtcaccacacaaagcttatcggtagataaattagaagcgctgtcagaagaagttggcagtgaccgaactttactggttatgtgtggtgcatttcgctgcgagccaggtcgttttgcgaatttaaccttgaaaaaactgccaaaagccattttgaataagtgccaatttggtcaggacgattattcgttaaatgtggcaaacctaactgacgatgcgtctgccgatgacgatgcagcgcaagattaa

SEQ ID NO: 309756 - DNA, 237 bp, Proteus mirabilis
gtgttatgggcaagtggcaacgattgggatagagaatggatacagcaggtggtcgctttattggttgggcatggtgcgtttactctctacccagcattaagccagtgcgataatgcggccgaacgcttaacccgctggttgacctatcagttaccacgcgttaaacaagcgcagccaggctgcccgattcaccaatggctaaatagcattggcgcacaagtgatcgtagaaaaatag

SEQ ID NO: 309757 - DNA, 267 bp, Proteus mirabilis
atggacaaagggtatgaagcggaatggttggaatcgtatctgagaagtcgtcgctatgaacctcatatccagtcacggaaggatgagtcagaagccattaaaaacacggattttaaggctcaacgcagggttgtagagagaacacacagttggatgaatcgctaccgtcgtgtcctgactcgttgggagaagaaagtcgagaattatgaggcgatgctgcattttgtctgtggtatcattgtctggaataaaaccctattgggatag

SEQ ID NO: 309758 - DNA, 399 bp, Proteus mirabilis
gtgacgggcaacaagtggcagatcagtgatggactctgggagaaaatggctccactgattccggagcataaaactcaccatcctcagggtactcaccgcaagcaggttgataatcgcgctgcaatgaacgccatcttcttcgtactcaggacgggttgccagtggaatgcgctgaatgccaccggtatatgctcgtcaagctctgctcaccgccgatttcaggagtggcgggatgctggcgtatttgaacgcttctggcaaaacgggttgcttgcttgcgaacagttggacgctattgactggtcgtggctgtcgatggatggttgtatgaccaaatcaccgctggcaggctcaaaaaaacaggcaggaaccctacagaccgggggaaacagggcgtaa

SEQ ID NO: 309759 - DNA, 2787 bp, Proteus mirabilis
atggataactctaatagaggtagttcagttagtcaaaatcatactgggacaggccataatgtagcgggtgacttaactatatataacattgataatgttgatttggcgactgagttagcagttgctgttttagttggttgctgggatgaaaaaaatgatggtgatattaaggtaattacaagccttattgatgaaccgtatgaaagttggataaaaaaattaagaataattgaaggaatgcaagatagtcccttgattcatgagcgaggttcttggcgttttaaaaatagaatacaagcatttcaaacggtatcgtcaaggttattcgatgatcatttagatttatttcaggcgattgctacatccatttttaaaactatcgatccgcaatttgaactggcacctgaagagcgttatgcagcagtgatttatgggaaggttttgccacacagtcaattaataaggaaagggctatctgaaggcctcgccttagtcgcaacaaagcaagagttgcttaccaactgctcaaaatataaagggcaatactgcgcctcaagtgtggttaaagaagtattttctacctctagttggcaattatgggctagtacgcaagatattcaaattatgcttgcagaaagcgctcctgatgattttatcgacgaagtggaaagagctatatcccataaagacaagccgtttgactcactttttgcacaggaaggtgtaggtggaatttcagggcggaattatttgacgggattgctatgggctattgaaggattggcttgggcacccgagtatttatctcgttctttagtaatcttaggggaactggatagccatgatcctggtggtaactgggctaacagaccacttaattcgattatcaacatattgttgccatggcttcctcatactacagccagtatagataggcgtattgcagcatttaaagcattggaaagagaataccctgatactgcatggcgtgttttagttcagttgctacccaataatatgagtatgactgttggtacacatatcccaacttttagaaagtttattcctaacgatttcaacaaagagccatctagtgatgagtatagagagcagattgaaacatatagccaattaacaatcgaattggcaagtaaatcttcattacgacttattgatttagttgaaaaaattgacaaattatcactatttagattcgatgatgtaattaaactattatctgatttctctaaaaatccagatagtgatgaattaaagttagagctatgggaaaaatgcttagaggtctataacaaacacaaaaaattctcagatgctcagtgggcgatacaaccagaacaaaatgaaaaaattaaagatgtttctacagccttaaaaccagaagaacctatgttttatagcaaacgactttttggtcaaagaagttatgacttatttgatgaaaatgaggactgggaagcccaagaagaaaggttggtaaaagaacgatgtcaatcaatatctgaaatacacactattaatggtattgaaggtgttttggaattttcgaagggcattgaaaggccggatcttgtcggcaatagtctagttgcagaaaatctagagatacctttagatacactaaaaaaacttcttcttagcgacattaaggaggaacgttttcttgcttctggctatgtgtgggcaaaaaaacacaaggagggacgttcatgggtattggatgcagttgataactggaatgttcaagaaaaagttgagctttttcttttattaccgtttaaaaaagaaacatgggatacattaaatgattcatttgatgatttcccttacgagtattggaaaaataccgttgttaacgcataccactgtggttcaacggaagagatttactttgcagtagattgcttgattaaagtagatcgtccagtatcagcaattaattgtttatctcgaattttgcataacgataaggtagttgatagccacaaaattgcaattgctctattgcaatctattagaaccacagaagatgttaagcggtttgatattaattcatttagcaaacttgttaattatcttcaaaatgatgacaccttttcagatgatgacttggtgaaaattgaatgggcatacctgcctatcatcaatagagatactaatggctcgttgcagcctcaagttttagagaataaacttgcaaatgaaccaagcttcttttgtgaaataattcgatatgcgtatcggccaaattttcaaaaagaaaagaacgaactatctgaaagcgaaaaaaatattgccaacaactcatactatctacttgataagtggagtaaggtgccgggtattggcgtagagggtaaatttgatgtcaatgcctttaataactggtttaattcagttcaaacagaatgtgaagagtcagggcatttagaaattgcttatcaaataattggcagagtattgatttttagtccttcaaatgaccaaaattggattcttcctgaacttgttgaatttttgaataggcgtgaacttgaagaggtgcgtactggttataagatagcgataagagattcgcgaggtgtccactgggttgacccagaaggcaaaccagaattggaattagcccaaaaatatcgtattaagtctgatgaaatagaactactaggcttccatcgatttgctagaactcttagagagttagctgatgagtatcaagcggaagcagagtcgataatagagcaacatagtaaaaaaaatgggtgttga

SEQ ID NO: 309760 - DNA, 321 bp, Proteus mirabilis
atggagtttttatctgctgcaatactttctggctttgtttatgacatgctcaaacacagcgtttcgattactacaacttcaataaaagaaaagttaaaaggttggactgttgatgaggcggtggctcctgctttggcggaagaaattgaaaaattgtctttaaacgatgagatgagcgaaaaagcaattgaaagaaaactattggatagttgtgaaattcaacaaatactctcgtctatacaacctaacaatactactgtaattacgcaaaaccatagtggtacaggtgataatgttggtggaaataaaattattaggtag

SEQ ID NO: 309761 - DNA, 1614 bp, Proteus mirabilis
atgggacggagatcaggatttgaaggttttatacgagctacaggcagagccgttgcagcagcagagcgtgagcgtaagagagcagaacgtcattatttggccgaaactcgccgtatagaacgcgaaataaaacgtgataatgctcagagacttcgcgagcaaaaagaggctgataagttagcaaaaataatgtatctggaagaacgtcaagatgaagtttccgatctaaacgctgagctaaccgagaatatcactgcactttctacacttctggaacataccctcgaatttgacgattcaattgatttttcggtattaaaaaaacgcccaaaaatcgaagacttcaaaacaccaaaacatctcttaccagaccctgaacctgagatgaaagtcgtgaacgctccagccctatggatgactattttcccatgggtaaagaacaaatattatcgagaattgcagagtgcagaagaatctttcaataaaaataaggaagattattcagttaaactcttaaatcaaaaagttgagcttgacgctttagttgctgagtatcagacccgaaaaactgcttatcttgaagaaataaaaagtcaacacgacgaaattgaccaatttgagcaagactatctcaactgcgatcctgacagcgtgttgacttattgtgaaatggtattgacacggtcggaatatccagagaagggctttcctcaaacctttagattggcctatttacctgatagcaaagagttggtagttgaatacaacttacctgaaattgcagtagttccacgcgagttagaataccgatatatcaaatcaagagatgctattgatgctaaggcgcgaaagattagcgagatcaaagaactctatcagaacataatcgccgcgatcacactccgtacaatgcatgagcttttcgaagctgacaaagcatctgctttaacgtcagttttgtttaacggtgtaatcgaaactatcgatcctacaagcggacatgacaccaaagtcacattagtatctgcccgtgctcacaaggacgatttcatgcaaataaaactgggaagggtcgaaaagagcgcatgccttagaagtttaggcgcacaagtttcagggcggccagatgagcttcaagcagtaaaacctattatcgagttcaacatggttgataaacgctttattgaacaaggtgacgctttatctgccctcgaaacacgaccaaaccttatggaactttcaccatcagaatttgaggtattagtatcaaatcttttcactcaaatgggactggacaccaaactcactagaggtacaaaagatgggggcgttgatgcagtggcatttgacactcgtccgatcctcggaggcaaagtggtgattcaggctaaaagatataaagacaccgttggcgtcagctctgttagagatctttatgggacaatgatgaatgaaggggctaacaaaggaattttggtgtgtacaagtcaatacggtaaagatgcatatcgtttctgcgaagacaaaccaatcgaactgattgatggcggcggacttctttacctcctaaaagagcatgctggagtatcagcacgtatcaatcccaacttttaa

SEQ ID NO: 309762 - DNA, 882 bp, Proteus mirabilis
atgagtaaagatgactatattcttcgggcactatcaaaaatctctcataagcgctgggaacactacattatcaatcgcatttttcacaggttgaatgaccctgaccttgagttcgtttgccagcagtgtattcgaaaggaagggcgctccggaaaaatttatcttgcagacctgctttttccacagctgaagttgtatcttgaaatagacgaggcgcaccatgatagcgatgaagctaaaatggctgacggaatccgccgtttggacatcatggaagcgacaggctttattgaaaaacgaattccagctcataacacgacactagacaagatcaatcatcttgttgacgaattcatccttcttgttagggatagaaaagcccaacaggaagcacaaggcttatttcgtccttggggctatgacagccgttataccgctcaaaagcatattaacgcaggctttattgaagtgggtccttacgcagtattccgatatcacaaggatgctttgcagtgctttggttatggggataaaggacaccaccaatcaggtagctggcgagtgccagagactgttgtaaaagcaatcggtttggacggagatgtaatagtttggtttccgcgtttgtataaggcgggggagtgggacaactcactttccattgatggtgatctgataacggaaaaaagtcttaatccaacacgcaactatagggaaacgtggcgttatcgtatcgtaatggctcattctcgtgatgagctgaaccggacactatatcgatttcttggtgttttcactctagatgagcaactatcatctgaaagtgttaacgttttcaaacgggtagatacacgcatcaaggtttatacaacacaaaagtag

SEQ ID NO: 309763 - DNA, 747 bp, Proteus mirabilis
atgatgaatgaagtctatgaacgtataaaaagtgaatttgattttttaattgctgacttagatacaaaaaaaacacgcaagatagagaaacttgatgaaaaggtagctcaggacattgagtggatatgtctaaattgtcatgatctaaagcaggccagaaaatacgtgacagataaatatagtgatgttaattattgcgttaatatatgcaaaaactacgatttagacagctatttgtattgggcactgcttaatttttactggggagaacatgagtggaagcaaggataccaggctgagggagtatggtttatggtacaggccacaagagctctgggtttatggcaggggtatcttgatggactgggtcgtcgtaagtatcaggagtcagtacagcaacgacggaaaagtagtggatctgaaggtggttttaaacgtgcaggtcgctatcagcctgtgaaagagaaacttataaggttgcttaaagaagaaaagcctgaaacgggttggaaaacaaagcgcgaagctgttgatgctatagaacacaagctgtggcgttttattgatggcccttatagaaaagcatttaacaaagaaaatatacagcgccgtaaggcctttgaactagaaagaaagcctttcagcatggtcagagaaagtttagatcgtactatgctggactggtcaaggaatgatgaagcaatcaaaaatgcatttcaacaggttgttgtcaggagaggtaaatag

SEQ ID NO: 309764 - DNA, 234 bp, Proteus mirabilis
atgacgacacaaaccataaaaatcttacgcatgaatgcagtcgcggacaaacttggtatcgcccgttcaaccatctacgactggctcaatccaaagtcaccacgctatgactgtacatttcccaaacaatatcgtttgggtatacagtctgtcggttggcttgagtctgaactggatgaatggttgttgaaacgccatttggtatcagcatctgctattgccgaaccgacgtaa

SEQ ID NO: 309765 - DNA, 1143 bp, Proteus mirabilis
atggctatttgtaaacgaaataactgtaaagccttagtaggccaactacctgatgagcgtaaattacgtttatgctctgaccattaccaacgtaaattgttgaatgcacatagacgagtaattaagcagggattaacatgtcaatatccaccttgtggtaacagtctatctaatacccgtaatcatcgctactgctgtaatgagcatcgtaataaagctaaacgattgatagatgataatggcattgttaatctagtcaaacattcttactggcttaatgtagagtctatgctcaaaaataatcctctaggattggggagtatcaacagtccggatgatattactaaccttattcggttataccagcgtaaagcaactcaccagaaggcatataacacaataaatggacgcagagttactggctctataaaacgtcttattccttgggttgagttagaattatgtcatatttatcctaactccaaaggtgggagtaatacagtaggaaatataattattgccccagcgttgattaacagaaagatgaaagactctgtacctactgacaattttagtgaaaagcttagtggtattaaggcggcaagaccaccctctcctgtcaaatccacgcttttaaaggcacttatagagcaatatggacagattgaagtacaagcagctctatcttcagctaaacaggtaacttttgcttccgccgaggcatcatataggttatttggtactaatatatatactcatccaccattgctaaagctattaaaggcagaaacatggcgcctaggttttgaacagtttagagactcaattaatcatattgaaaatagttcatatatatccgctggtcctgcaaatgagttatttgctgttgcttcttttcacgccatgttaaatggagataaagaccattttattgatatattttccggtctacgaaaagacattatatgtcaggcagaagataaaaagagtttaaattacgcttattatcaaaatatactagaccaatatatggccaattatttcaatctagatttacatgatcaggaagcatgtaatatattttataactcttttttttcagcgccaccacttgacaagcatggttttttagtcatcccatag

SEQ ID NO: 309766 - DNA, 1326 bp, Proteus mirabilis
atggctgtttaccgccacgctcctgatttacatctactgggccaatgtagcaatgaagaactgcaatcgctggttttcattcttaccacagccccccgtgacggtgatacccatagggctgagagtttgaccagcaccattgagtaccatttactaaaagctgaacatcggtgttattggcaacagatagctgctgagattcagtgctatggcgtgaataccttgatgagtttggcccttctgcggctaggagtggcttacagggaaatccttgaagatgaatacgacaagctcgaggtaaactacaacgtaaaaaattccaccgaagccattgaactcactctgttaatgaagctaccagagaagaacttggatcagatgccccaagaagaactggctaccttttcccgcaatatgcaacttgatctaaccaatccaacacatcaacttaccatcatgttagtacaggcagtgttacgaacctcttttttcagcataaatgattttcaacatttctggctcggcttaccgagtcaccatactggtctgcattatcgtgacctgactctatcagcgacatatttcccgttaatccactttttgccgaccgctggctggtccggctattttctgcagggagcacttatcatgcctaaacaggaacaccgctatgaccggttagccatacgtctcgctatacttgtcagtcgcctctttatgggggaatcactcaacattagtcaactggcacaagagtttggcgtttctggccgcacggtgcagcgcgacctgcgtgagcgtctacgttatctcgacactgaatatatcgacggtcacgttagtctccgtgatgcacgaggacctttccgaaccaatagtgatattctgcgctttgcccagataaccagcgtggcacattattttccggttctggatcctaaactgctttcagtactactcgataaccgtcaggactcaccttgtattatctggaatgatccgccacggcaggctcctgaattatttggtggttttcaggtcattgttcaggccatcatccgtaaccgccttatacgtttcctgcatcggaaacatcttcagtcatcaatcgcaccttacagactcatctgccacgacggagattggtatctggcggcggtatcaaaggatcgtattcaggtttttatcctctctgcaattaccgatgtggtgatgaccaccagcaattttgcacggaacaggcatattgatcgtatcctgcaggatccgagatttatgcgtgctcttcctcattttgattacatcagcgggattattcataaataa

SEQ ID NO: 309767 - DNA, 630 bp, Proteus mirabilis
atgaaaatgtttaaatcagcgatatttcttctcgtcgtatctaccctaacgggatgtgaagataatttttcgtgtgaaaacgaagaggtactaaaatcagttaacgaggttattgtcagtaacgctttaaataaagtcgacttcagaacattccgcccatacggtcagtctggtttaacgagtcatgcggtgaagataacttgggataaccctatcgctattgatagcaatccgaatgttaaatcgttaacttgcaaggtacatctcacagccatgctatccgatgatgaaaataacaatttaaaacagcggattgatgacattaaccaaagggcgatgaaagaatccagctacgagagtaataaaagttttatcgcaaatgtgaataaaaccgctattgatatggcaaacactaggcaagtcacgggtacggtagaatatactctctatcagtcaaagggacaggtggtgactgaagtcagtaatacgccagaggtgagccgggtaattaatcatattggagataatttattacgccctatagcaagagtgtatgcagctcagcggggagagttatcattaaataatttttattctatcgatattctgtctatgtttcgcgcacgataa

SEQ ID NO: 309768 - DNA, 474 bp, Proteus mirabilis
atgaaaatattatcatctcttgcactcacagctacgctgctgagtgctgtccccaccgcttatgccgtacccaacatctggggttccggctacggcatgggtgtatttgagtatatcatcactgattcacaggacactgagttgaatatcagctgtaccagtaatcccgatgatactcaggtgttacaacacagtgtactggtcacattgccggatggaagaatactgagttcacatgacgaaaatacccagatcacactggttaccggcgatgaacagtatggtgttcccccgtctttaggctggcgtaatggggataatgcatggatatcattcattgatgctattagaaaagcaacatcgtttgaagtctggattaacaacaaaaaagtagcccgtttcacaccctccgccagcaatattcataaggtactcgctgatatgtcagtctgtacaaccctcactgcggattag

SEQ ID NO: 309769 - DNA, 213 bp, Proteus mirabilis
atgtcctttttgaaaatgcttattactgccttaggccaggttattaacgggtacggagcccgtcaggcacagcagtttattaaaattcacctgcgacaagctggctatgatgacgattatatcaatatagccagagaagcggttacggtgtttttcaccgagttgataacggcgttgatgactcgtattctgcagatccttgacagtgtctga

SEQ ID NO: 309770 - DNA, 822 bp, Proteus mirabilis
atgagtttattagcttcgcgttttggctctgctaacagtattcgccgtgagcgtccactcactatcgaagagttattccgtactgtaccgagtgttttctctgaagaaaaacacgaatccagaagtgagcgttacacttacataccaaccattaccttattggatagtcttcaaaaagaaggcttttatccgttctttgcttgtcaaactcgtgtacgtgatgccagccgtcgagagcacacaaagcatatgctacggctaagaagacatgatcaaattacaggaatacaagtacctgaaattattctcttaaatagccatgatggctcaagcagttatcagatgttgccggggctatttagagcggtatgtcagaatggtttagtctgtggagatacctttggtgaagtgcgagtgccacataaaggtgatgttgtcggcaaggtcattgaaggggcgtatgaggtattggaaacgtttgatacagtggcagaaaagcgtgaacaaatgcaatcgttattgttacctctaccagcacaacaagccttagcacatgcggctttgacttatcgttttggtgaagagcatcaacctattaccgaggagcaagtattgcagcctcgccgttgggaggataagaaagatgatctttggacggtatatcaacgtttgcaggagaatttaatcaaaggtggattatcaggcagaaatgcgaaaggtaagcgagctcgtactcgttcagtgaatggcattgatggggatatcaaattgaataaggccctgtgggtaatgacagaaaagatgcatgagcaccttaattaa

SEQ ID NO: 309771 - DNA, 477 bp, Proteus mirabilis; identical to SEQ ID NO: 294711

SEQ ID NO: 309772 - DNA, 621 bp, Proteus mirabilis; identical to SEQ ID NO: 294712

SEQ ID NO: 309773 - DNA, 2016 bp, Proteus mirabilis
atggaacctcttcagttactgatgtggtcaatcatcctgtatgttgttggtggcgttattgcactgtttttaaagaaacaggaaggattggcaatcctaatatcggggatcagcgcaatcatcggtggtgtattaggtgttttaagcgcattaccggttattttaaatggtgaaacaatcagttttgctatggctgggccatttgatttcgccgcttttgtggtgcgtatggatatgcttggcgcctttatggtgtttgtcatttctttactcgtcactgtttgtgcgttgtattcactctcttatgttcaagaatacaaaggtcgcggcgcatggagtatgggattttttatgaatctctttattgcttccatggtaggactgattgttatggataatgcgttttactttattatcctatttgaaatgatgtcgttagcatcttggttcttagtcatcgctgaccaagatgacgaatctatccacgccggtttactctacttctttatcgctcacgcaggctctgtgctaatcatgatagccttcttcttaatgtggcgtgaaagcggtagccttgattttgattcattccgtcaactttctctttcccctgcaatggcttctgtggtgttcttactgggcttcttcggatttggtgctaaagccggtatgttgccattacacagttggttgccaaaagcgcaccccgcagcaccctctcacgcttcagcattaatgtctggggtgatggtgaaaattggtatttttggcatcatcaaagtaggcattgatttattaggtgcttcacaaatgtggtggggaattgtcgttctcgcattcggtgctgtctcttctgtattaggggttatgtacgcattagcagagcacgatttaaaacgtctccttgcatggcacaccgttgaaaatatcggcatcatcttgatgggcgtgggagttggcatggtaggtatggcaaccgatcatccagtgattgccgctctcggtctgcttggtgcgttataccacttattaaatcacgcggtatttaaaggattattgttcttaggtgccggagccattattaatcaaattcacactcgtgatatggataagatgggtggattagccaaactaatgccttacactgcaacggcattcttaattggttgtatggcaatttcagcattaccgccattaaatggttttgtgagtgagtggtatacttatcaatcactatttacgatgagttacgatggtaactttgtcatgcgcttaagtggtcctattgccattattatgttggcaattaccggggcattagcggcaatgtgtttcgtcaaagtttatggcgtcagtttttgcggtggcccacgtagtgagcaagcgactaaagctaaagaagtaccgttgccaatgaccattgctatggggttattagcacttttctgtgttgtattaggtgtgggtgcggcttttgttgcgccaattattgccaatattgcaatgtcacttagcgaaaccagtgcattaacagtgactcaaggtgcgatattagtccctgatagtgcatcacaagcgatgttctctcctggcttaacatttattttattaatcgccttaccactaattccattcttaatttatctcggcttaaaaggtggtcaacctgcatttcgccgtaaaggtaatccatgggcctgtggttatgtctgggaaaaagacatggcggtgtccgctgggggctttactcaagcactacgtagtatgtttgcaccactttatcgtatgcgtaaacagcttgatccatcaccttggctttcacgtggctttaataaaacacagcgcggtgctgaaaaggtcgaaccattctgggatgaaagcattatttatccattggttcgtggtatccaacgttttgctaaacgtatccaatgcctacaaggcggcgatttcagactctattgtctatacgtggtggcagcgctggtcatcttgcttttagttatcgcagcgtaa

SEQ ID NO: 309774 - DNA, 954 bp, Proteus mirabilis
atgatgactttccaagaaacaccttcgtttatgatgggaatattcgcggttattcaagcactctttctgctggcgataaccccattatgtacaggtatttctcgccaaattcgtgccaagatgcattcgcgtcaaggtcctggtatttggcaggattaccgagatatttttaaattacttaaacgtcaatccgtagcccctgagcaatccggcgtgatcttccaagtgatgccttatgtgttattaggcagcatgttattagtggcaatggcattgcctgtctttacggcaacctctttgtttggcggtgcagctgacttaattgcattaatttatctgtttgcactatttcgtttctttttctctttatccggtttggattcaggtagtccatttgcgggtattggggccagccgtgaactgacattgggtgtattagttgagcctattttagtgctttcgttgattgtggtggcattgattgtgggttcaaccaatgtcggtactatcagtgcgacgctcgcccaaggttgggtatcacccacagctacacttttagccttattggcttgtgcttttgcggcatttattgaaatgggcaaaatgccttttgacgtcgcggaagcagagcaagaattacaagaaggaccactaaccgagtactctggctctggttttgccatggttaaactgggtattggtttaaaacaagtagtgattgctgagctgttccttgccgtatttattccttttggcaaagcgactgaatttacctttgtcgcgcttcttgtcgccttagtgttaatggccgtgaaattgctggtcgtgtttgtattagcgtcattagttgaaaacagtttagcgcgtggtcgcttcttactgactcagcatgtgacatggttagggttcggtgttgcggcactggcttttgttttctatttaactggtctataa

SEQ ID NO: 309775 - DNA, 1440 bp, Proteus mirabilis
atggaaaatatagctcttgcgaccttactcatcccatttgcaggggcgttaattacgtccatactgccaaatcggatggcgaagtggttatgtacactgttcgctttattagccacattaggtactgttgttttaggttggcagttcctcgctgaaggtaaagtcgataccacaattacgctagtacaatatggtgatgttgcgctatttggttttaccattgatcgcgtcagtaccttaattgcttttgccgttgtgttcttaggattactcgttagtttttattcaacgggttatctcactaacggtaaccgtgagcatccccatgatgggactcgtcgttattatgctttcctgttgatctttattggtgctatggcaggtttagtactgtcatctaccattttagggcaactgctgtttttcgaaattaccggtggttgttcttgggcattaattggttattaccaatcagagaagtcattgcgttcggcaatgaaggcattgttaattactcatgttgcgtcaatcggtctgtatcttgcagcagcaaccttgtttgtaagtacgggttcgtttgaactaactgcgatagcaacattagatgagccaacaaaactgattgtctttggcggtattctgtttgctgcttggggtaaatcagcacagcttcctttacaagcttggttacctgacgcaatggaagcaccaacacctgtaagtgcttacttacacgctgcgtcaatggttaaagtgggtgtgtatatctttgctcgtgccattatttcagccggtgatgtccctcatatcattggttgggtggggatcgccatggcggttatcactctgatttatggctttatgatgtatctgccacaaaaagatatgaaacgtctgttagcatggtcaaccattacacagctttcttatatcttcctcgcgttatctatctcaatctttggacctcgtgaagcctttaatggtggtgtggcttatatctttaaccacgcttttgctaaaagtttgttcttcttagtcgcaggtgctctaagttatagctgtggtactcgtatgttaccgcgcttaaaagggttaattaataaatatccattgctgggtgtgggcttttgtgttgctgcgttagcgattgcaggtgtacctccactcaatggtttctttagtaaattccctatctttgcagcaggctttgaattatcgagtgtgttctgggtaatgacacctattatggttctggtgctgattgaatctgttgcaagtttcacttggtttatctactggtttggccgtgtggtgccaggagaaccaagtaaagaagttgcgcaaggacaaccggttcctatggcaatgcaaattgtgattggaatactgattattatgtctttcgcatccagtgttattgctgtgacttggctaggataa

SEQ ID NO: 309776 - DNA, 651 bp, Proteus mirabilis
atgactggagcacttattgttaataatttagcggggttaatgatgatcacctcgctactggtgataggcgcaagaaagcctattgcttcctgttggttttatgctctgcaatcctttgttttggtgatgatttttgtcactttagcaaatacgctagatgcacatcaactgacactttgggcgataaccgccttctttaccaaagttctactcgttccacttatcttaggatttgccttccgcaaattatccgatccgagcgccaatatcagtgtcattaaaccagcattattgatgttattagccgccgtgattgtgattttatgttggtttgtggttgagccaattcaaatacctatggtggcggaattgaaacctgcattagcggtctctttaggccattttatgctaggtctactgtgtattgtgactcaacgaaatatcctaaaacaagcatttggttactgcttaatggaaaacggctctcacttaacactcgctttattagcgtggagggcaccagagttggtagaaattggtatagcaacggatgccatttttgctgtgattgtcatggcagtattggcgcgtaagatttaccgcacgctcaacacactgaacgtggatcaactgaccgcgctgaaggggtga

SEQ ID NO: 309777 - DNA, 1734 bp, Proteus mirabilis
gtgagctatcaaaattatgtcagtagaaaagagggaaacgaactcggtgcgggttatgttgctaaagttcgagaaaaattcccatcagctattcttgatgaagagcgacaaaccgctgatcaattgacgataacagttaaaacgggatcgctgcctgaagtggtggagtacctatattacggtttaggaggctggttacctgttttatttggtaacgatgaacgtagtttaaatggtgattatgccgtctattacgccttatcgatggaagagggtgaaaagtgctggatagtcgttaaagcacacgttagtcctattacacttgaatttccttctgttaccccgcgagttcctgcagcagtatggggagagcgtgaaattcgtgatatgtatggtcttattcctgtgggattaccggatgagcgtcgtttagtgcttccagatgattggcctgaagatatgtatccgttacgtaaagatgccatggattatcgccaacgtccaacgccaaccacagaaacagaaacttatccgtttgtgaacgaaggcaaacaagatgcgcgtgtcgttcctatcggccctatgcatattacgtctgatgaaccgggacatttccgtttatttgttgacggtgaaaatattgttgatgctgactatcgcatgttctatgtacaccgtggtatggaaaaattggcagaaacccgcatgggctataatgaagtcactttcctatcagaccgtgtctgtgggatttgtggctttacacatagcgtggcatataccacttctgttgaaaatgcgttaggtattgaagtgcctcgtcgcgctcatactatccgttctattttattagaagttgaacgtctacatagtcatttattaaatatcggtttagcaagccactttaccggatttgataccggtttcatgcaatttttccgtattcgtgaaaaatccatgcagattgctgaaatgctgacgggagcacgtaaaacctacggcttaaacttaattggtggtattcgccgcgatattttaaaagatcaacgtattaaaactatccaattagtcagagaaatgcgcaaagaagtcactgaattagtcgacatcttactttctgcgccaaatatggaacagcgtaccgttggggtcgggattttagataagaaagtcgcgcgtgatttcagtccggtaggcccgatgatcagagccagtggttttaaacgtgatgtacgctttgatcacccatttgcagattatggcaacttaccattaaccctatttagttatgaaggtggggatgttttctcacgtgtgatggtgcgtattaaggaagtgcttgattctatggcaatgattgaatatgccttagataatctgccggaaggaccgttattaacagaaggctttacctaccaaccttataaatttgcacttggttttaccgaagctccacgaggtgaagatattcactggagtatgttgggtgataatcaaaaattattccgttggcgttgtcgtgcggccacttacgctaactggccagtactacgttatatgttacaaggaaatacggtttctgatgcaccattaattatcggtagcctcgatccttgttactcctgtactgacagggtaacgcttgtcgatgtgaaaaaacgtaaatcgaaaacagtttcttataaagaaattgaacgttatagcatcgaacgtaaaaattcgccgctcaagtga

SEQ ID NO: 309778 - DNA, 1401 bp, Proteus mirabilis
atggggagtaaagttaagttgggtgaactgttaagtatattaactgactatcatgctaatggggcttataagaaactaaaagaaaatgttgaattactcgatgagcctgattttgctgtaatgattcgtactactaactttgaacaggaagattttactaataatttaaaatatattaacaaacatgcttatagttttcttgcaaagtctaaggtatatcctaatgatataattatgaataaaatagcgaacgcggggtctagttatttgatgcccgacttgaaagtccctgtatcattagctatgaatctttttttgcttagagttgatgctgcaaaggcaaacccaatatatatttacctttatctgagggtaaatgaggcatatgtgaagagctttgctaatggttcagtaactaaaacgatcacaaaagatgcagttagaaatttagagattgaactaccaagtagaagtattcaagatcgaatcgctgagcaatttatttgtattaacaacaaaataaccctcaaccgccaaatcaaccaaactctagaacaaatggcgcaaacgctatttaaatcatggtttgtagattttgatcctgtggttgataacgcactagatgccggtttttttgagcaggatttaggcttttctgaagaattactgcatcgagttgaagttcgtaaagctgtgcgtgaaagtgataattttaaaccgttatcagaggatattcggcggttatttcctgatgcttttgaagaatgtgcagagtccgcattggggcttggcgggtggattccaacatcttggactctctcaaatgttggtgccgagtttgacgttacgatggggcaatctcctccaggttcaacatataatgaaataggaattggactacctttttttcaaggtaaaacagatttcggtttcaggtttccaacgaatcgggtttattgtactgctccaaagcgtatggcaaataagaatgacacattaattagtgttcgggctcctgttggtgatattaatcttgcggctgaagattgtgcaattgggagagggatagctgctgcgagacataaatcaggatccatatcttttacttattactcaatgaatagcttatctaaatactttgaagtatttgaaagtgaaggaactgtttttggtagtatcaatcaaaaagattttaaagcgcttttatttataaaatatccttttgaattaattaataaatttaatttcttttgttcggaatgggataaacgaatagatgttcaatccatagaaaatatagttttaaccaaactccgagacacactcctcccaaaacttatctccggcgagctgtctttgagtaatataaaaatagatatcccagaagaaactttaatctaa

SEQ ID NO: 309779 - DNA, 1014 bp, Proteus mirabilis
atgacgagtaagtcgggaaatcaacctcacacagatgaggcgcctgcaacgcttttggcagatacccatgatcaattaagccagcaatctattgatgaacaagctgcgctttggttcacccgtcaacatagtcagcaaatgagttcacagcaacgacaagcctttaaacagtgggtagcagataaagataatcaacaagcttatcaagctatcgcggaaatttggcatagttgtgaagccttaccacgccctactattgtgcctatagaaaaaaggaaatcttcactctggcgcccctttattcacactacagccacactctgtttagttgctgtgttatatcttccttatagtcatttacctgccctgttaatggataatatgaccttagccaccagcaattttcctaaagagatgaccctcgcagatggctctaaagtttttttaaatagaaatacacaggtacgcgtctcgtatgtccaaacccaaagacgcctttggttagataaaggtgaggcttattttaaagtaaaacccaatccttatcggccattttatgtccatgctgatgagcgattaattaaagttgtcggtactgaatttgaagtgagtcgttatcaaaataatcaaattagtgtcgccgtacatgagggcattgttgaagttaaagccacagaaaaatcccctgcgacttacctatatgctggctctcaagcaattagccaatcaaccgataatcaatttgtcatttcctcagtcaatgctgattctgtaggaagctggcgttttgggcaactccatttctttgaacaaccacttggtgacgtgatcactaaattaaaaccttatctggatattaacgttcatatctcatcagccgatgtagccaaaataaaggtatcaggtgtggcaaatattaatgatgcgaaaagctttattactgcacttccgctacttttaccggttaatgttatttttactgataaaaataatgtgttaattatcaataagtaa

SEQ ID NO: 309780 - DNA, 369 bp, Proteus mirabilis
atgaaacagaataaacaaacaacattgatacatagtgggcgtcaagcaattaaaacatctggcccaattaaccctcctgttatgagagccagtactattgtttttgattcaataaaaagttggcgtgaaatacgcgatcgtcgtattactgaacgagtattaagctatggtgctcgtggtacagaaacagcgtttgcacttgaagcattagtaactgaattagaaggtggttatcgagcacagctctttcctacagggctagccgcaattgcatttactattatgggctacgcccgaagtggtgggcatgttttatttgctgattctgtctatgaacccgtacgtaaaatagcctctgctttgttataa

SEQ ID NO: 309781 - DNA, 2169 bp, Proteus mirabilis
atggcgactcaacaaaggatacaaacctcatctgagaaatcaccggtattccagttttcagtacgtcccgataaggtcggaattatcaccattaatgttgtagatgaaaaggtcaatacactgaaagctgcttttgttgaacagtttcaaaatgtattaaaacaggctcagcaacattcaggtgtaaaaggattaattatcacctcaagtaaacctgataattttattgctggtgctgatatatcaatgattgcagattgcaaaaccaaagaagaggccaccgcattagcaaaagcaggacaagatctttttactcaattagaaaattatcctttgcctgtcgtcgcggccatcaatggtgtctgtttaggtgggggattagaactagcattagcctgccatgggcgaatttgctccgataacagtaaaactcgtttaggtcttccagaagttcaattaggattgctaccaggttcggggggaacccaacgattaccacgtttaataggggttacgaccgccttagatatgatcttaactggacgacaaattaatgccaaacgggctttcaagcttggcttagtcgatgacgttgtgccacaagctattttattagatgttgcagcccaatggattttaacagctaaaaaagctgctaaaaaacagactattatggagcgtttttgggccaataccacattaggaagaaatatcctctttgatcaagctaaaaagcgcactttagctaaaaccaaaggtcattacccagcggcagagcgtattcttcatgttattgaacgaggcttagagaaagatattcaaacaggttttaaagaagaagctaatgcgtttggtgaattagccatgaccccggtttcatctgcattacggcatctcttttttgcctcaacagcattgaaaaatgaaacaggatcatctgcaaagccagataagttacaccatataggtattttaggtggggggttaatggggggcggtattgcttttgtgacagcaacaaaaggtaatttacccgttagaattaaagatattagtgataaaggcattgcgcaggcacttaactatagttggaaagcgttatcaactaaggtcaagaaaaagcggctctctgctcgtgaacgccaacgacaaatggggttattatcagggacattggattatagcggtttccatcaaactgaccttattgtcgaagctgtttttgaagatttggctttaaagcaaaaaatggtggctgatattgaagccttaggtgaaggcaagatcatctttgcttcaaatacgtcttctcttcctatccataaaattgctgaaaaagcacaatatccagaaaaaataattgggctgcactattttagtcccgttgaaaaaatgcccttagttgaagtgatccctcatgaaaaaacggatgctaagacaatcgccacaaccgttgcttttgctaaaaaacaaggcaaagttgccattgtggtaggagataaacccggtttttatgtcaatcgaattctcgccccttatattagtgaagccttaacctgtttggttgaaggggaaacgatagagaatattgacaaagcattagttcaatttggctttccagtcggccccattcaacttttagatgaagtgggaattgatattggtactaaaataacgcctattttagtcaatgagtttggtgagcgttttgcatctcctcctgcggtggatgcgattattgcggatgacagaaaagggcgtaaaaacggtcgtggtttttatctctataatcagcatgccttacctttctctttaggaaaaaataaaaagcgtgcagatccgatgatttatcgcttattacaggttaaacctaaaaatcagttatcggcttcagaaataactgaacgttgtttattgcttatgcttaatgaagcagttcgttgtttagatgaaaacattattcaacaacctagagatggtgatattggtgctgttttcggtattggttttcctcccttctttggtgggccattccggtatatagatagtatgggaacaacaaaaatagtcgataagcttaatcaattaactgaaaaatacggtgaaaagttccagccatgtgagcgattagcggcaatggccaagttaaatgaacgattctatagctag

SEQ ID NO: 309782 - DNA, 333 bp, Proteus mirabilis
atgaatggattaacttacctaatattagccattatatctgaagttattgcaacaacggtgttaaaagcatccgatggctttagtcgattatatccatctattgtcgtcgtggtggggtattgtttttctttttgggcgctatctcaggttgtgaaagtcatgccactgggtattgcatatgcaatttggagcggattaggtattgttttagtttctgttgcggctgtttttgtctatcaacaaaaactcgatttacccgccatcgtcggtatgacattaattattgccggcgtcttagtgattaacttactttccaatagcacctcacactaa

SEQ ID NO: 309783 - DNA, 306 bp, Proteus mirabilis; identical to SEQ ID NO: 295378

SEQ ID NO: 309784 - DNA, 591 bp, Proteus mirabilis
ttgcaagcaggggggattggcctactgaatgccgttgagcgttatgactcaatgcaaggtgccgcctttactacttatgctgtgcaacgtattcgaggctctatgttagatgagctacgaagtcgtgattgggcgccccgaagtgtgcgccgtaatgcaagagaagtgacacaatccattcatcagttagagcaggatctaggacgaccaccatcagaacaggaagttgctgatcatttgcagattgagttagcagaataccggcagatcctattggatacaaataacagccagttgttctcttatgacgaatggcatgaaatttacggtgaaagctgtgaaccgtctcaagacgaagatcacgatgacaatcctttacaaatgttattggaaagtgatattcgccaaagagtcatagacgcgatagaattgcttcccgaaagggaaaaaatggttcttaccctgtattatcaggaagaacttaatttgaaagaaataggcgcagtgcttaatgtcggggaatcccgcgtaagtcagctacacagccaagcaatcaaaaggctgcgagcacgcttaaacccagagaaatag

SEQ ID NO: 309785 - DNA, 1032 bp, Proteus mirabilis
atgaaaggttatattcaaacggtaacgggtccggttaaaaaagcggatatgggactgacactacctcacgaacatttatttaatgatttatctggcgttgttgatgaacctttttatgaattctcacacgttttagtagataaaaaagtcagtgcagatattcagtggggactaaaatacgatccatattgttgttgcgataatatggataaaaaacctattgaagacgttatttttgaattaaataattttaaagagcttgggggcaaaacgattgttgatgctacaggttcatcgtcaattggtcgtgatattagaagattaaaacaagttgcagaattaacggggattaatgtcgttgcttcttccggcctttatattgagaaatttgaaggaaaacgcctagctgatgatattgatgcgatggcaaaaatgatcgatgatgaattaaatatcggcattgatggtacagatattcgtgctggtatgattggcgaaattggtgtatctcctttctttacagatggtgaaaaaaatagtttacgtgccgctgcactggctcaaaataataacccttatgcctcaatgaatattcatatgcctggttggcaacgccgtggtgatgaagtattagatattcttttaacagaaatggggtgtgatccagccaaaatatcgttagcccattcagatccttctggtaaagatatcgattatcaatgcaaaatgcttgatcgaggtgtttggcttgaatttgacatgataggtcttgatatttctttccctaaagaaggcgccgcgcccagtgtgatggatacggttgaagctgtcgcaaccttaatagaaagaggttatggtaaccaaattgtattaagtcatgatgtgtttttaaaacagatgtgggcaaaaaatggcggaaatggttgggggtttgtgcctaacgtttttctttcattattagcacagcgtggcattgataagacgataatagataagctgtgtattgataatccagctaatttattagcatga

SEQ ID NO: 309786 - DNA, 306 bp, Proteus mirabilis; identical to SEQ ID NO: 297334

SEQ ID NO: 309787 - DNA, 3936 bp, Proteus mirabilis
ttgcttttcttcgcagaggaagaaactggcgaacaagatgaaaatgaaaaaatcacattggcattggcacttgctggacaccccatagagaaaattgggaagatttggttgggggatgatctcattgagacatttggtgataaagcctcatgggaattacataacgatagggaagatgccgatccctttatgcttaaaaattgctcgtcatggaaagaggatatgattggtcgaggtctagcgtggttacgtgtgacactcacgtttgaccaagaaaaattcccctatggattacccaatgtgaaatgtgaagtctggggaaaacatctgtttgatcctcgcactgggaaaactgcatggagtaataatggggctttagtcattttggattattatcgccattatttaaaagtgcctgatacggatattgattttgacagctttaaacaggcggccgatttatgtgatgaaaaagtgagtctaccagaaggtggatttgagtcgcgatatacccttaatggtgcctatgacttaaatgagagtccatccagtgtcttggaagcaatgcacaaatgcattaacgcggaaccgacattcaccgcaggaaaacacggtattcaaatcggcgcttattatgggccggcaataaaaaccatcactgaatcacagttgattggcaccgtcacttgtacccctgaaacaggtttaaaagacgcgaccaatgcggtgtatggcacatttattgatgccgaacagttgtacacaaaaaccgacttcacgcctgtgattgtggacgaatgggtgaaagaggatggcttagaaattcgagagaatatcgactatcgttttgtcaccagcccttatcaagcccaacgattagcccgccaatatctccgcaaaaagaaagccggaagacgggttcaactcacgatgaacttagacggctatgcttatcgtccgggggaagttgtgcttttagaactacccgctttgggaattagtgggctggaattccgtattgctgaatggaccttccatgctttagaaggtgtctctctgacattagaagaagatggtgcttatttatatgaagacgtcattgggaaaccttttgttagacccccattcactaaattacccaccggcggtgtagcagcacctattaatcttacctttgttccacttgcagtcagtgacatcgtgcaaggtacgctttcttggcagaatgtggcgtctgatgtgcgctataacacggtcaatattttccagaatggcaaggttatacagtctattcaggtgccgggtgaacgtgttgatattaacggtttaatgagaggcacttatcgtgttgaagtcagagcaacaaatgtggctggtgcgatgtcggcacccgctatcagtgattttgctatccaagcaccgccggctcccattaaggttgatgttacttcgggaatgttcagcctcaccgtctcaccaaaacaaggtgatagtgctgtcttgggttatacctttgaattttggtttagtgaggaaaaactcgccaatctctctgaacatgaggtaatggttcatactcataaagtaggacaggggcattactggacacaagaaaacctgaaaccaggatatacctattatttttatgtccgaactttaaatagctatggtaaatcgccgtttgtggaagcttcaggtgtttgctctgctcaagcgaatttacttcttgatgaattagcggggcaaatcagtcgagatcaactcgcgcaagacttattgggtgaaattaacagtaaagcaaaccaaatcgagattactgaattacatgagttgatgaggctaaatcacgacaagattttatctgagttgatgaggcatggtgcgacaattgaagaaagtgaaaaaaaactggaggaggtagaaaaattactggctgagcggattaaccaagtttcaacggtaacagaggctcaggccgctgcaattaaacaagagcaacaagcacgtattgaggctgataaaactgaagcgcaacaacgacaatccttagccactcaacttcgtggtgattatactggcaatgatttatcgaaagtcaccgcaggacttatctccgccgagaaacaagcgcgtgttataggcgaccaagcggaagccaaagccagacagtcattggaaacacggatgaatgggaatgtttcagcgattaatcaatcactagaaaccctcacctcgaaacagcaagcgcaaacgcaagagatttcaacgctcaattcaactcttaaagggaaagctgatagtagtgcagtaaatgcattaaatacgcgagtatctaatatcgatggcaaagtgacgtccgcaacctctcaggtacaaacgttatccagcaaattagataaagtgaaagccgatttaacggagtctgtggtggtggatttagatttatctaaactcaatgaaaatacctattatccagttattttacctttagtaacctctcgacgttatgcctttaaggtttttagaaccttagggcaatattcagacaataaacccagctatgcgactcacagcactaaaggctttgccatgattgtggaatggcaagtcagtggttctggatggggaactcagtctgaaaatagcatcattgataattttgattggaaatggacaaatcaatcccctgtgatgggacccgctcaattaacgaatggctctgtggaatatatttatttacggggaggggcaaaatatcagttaactaaacataaaagtgttaaccatcaaattatcaccagcacttataccaacaacaagcaatcggtggcaccgaaagggtttgtggcgaatgacgtgcctaaatcgagcgaacagaaagccaatgcaacagcgaatgcggtaaatcaacttgaaaccaaagtgacagaggtttcaggtaaagtgacttctaccgcccagcaagtcactcgcctagaaagccaagtgggtacaagttcagccaaaatcgaacaaacgtcgaaagtggtcactgatttaaatggcaaaatctccgcatcatggacaatgaaagtccagcaggatagcaaagggaataaagtcattactggcattggcttaggattcaatgcgcaaggaaatagtcaatttctggttaatgcccaaaactttgcagtgatatcgtcattaaacggtaaagtggtgacaccttttgttattcaaaatggacaagcttttttcaatgatgcgttatttagcaaggctaccattgataagcttttagtggggaaaaaaatcatctccacgaattatcaagcaggaaaacgagggtttaatattgatggaaaaactggcaatgtagaactaaataatgccacgtttagaggacggattgagggggctgatgggcacttcaatggaacagtagatgcgaagaggattttgggagatgtgtattttgcaacgaataaagttatttcgggaacaccattgaacaacaagatatatccaaaaggaaagcttgaaacaggatgggttaaagctattgaaataagttctgataattttgcgcgggtattagatgctagattagcatgtgtttttgaaactaaaccagccagtagaggaggtaatcagtcaacacatgcatttttagtgggggttgatgatgggaaggggggaataaaggttcttgcaagacaagatggcactgagcatcttgttaacggtgtgaaagtaacaataatagttgatgatattccaattccggcaacaggtcgtggaggaagtatatttatctatatgcgggcgtatacagtaaatatgaatcccacccctgttaacactaacaggagtgtgaaatttacattttcaaatacaaagagacttgaaatattcaaggaaggttcaagtttaattaaaccgttaaaccattaa

SEQ ID NO: 309788 - DNA, 246 bp, Proteus mirabilis
atgaacttttctcattttaataaggtaatgtttgctgcctctcttcttgctactggcttttcttatgcggatagcgatcgccctctgctctctttaagtgtaagccaatccggcggcactgcgttaaatagcgaaggttcgttagatacccgtactcctgcaagccaatctcgcgtattacctatctggggtgatgaagctcgcgcgatttaccagagccatttggtgcaagctatagctatatga

SEQ ID NO: 309789 - DNA, 231 bp, Proteus mirabilis
ttgcgtttaagtactgctattggtgctgtcaatcaagatgagagcaatgccgcgtggatatcgttagttcgtggacatcctgatatttatatcaaaagagaggggaaagcgaacgcgctgttcagctttcctagttcagcaggaggggaatttttatctaacaaaacgcttgagatattggaaagtaaatcagatttctatggtaatggatttatgccgttagaaatatag

SEQ ID NO: 309790 - DNA, 183 bp, Proteus mirabilis
atggaggattcattacctacagttttttcagcggataaatatcctacgtcaccttttactctattcgcaacagagtccaaacctaatgctacggaaccccagctttgtgagctggcaccagaacccaatgcggttgagcttttgccttctgcaatagccccatttcctatagctgttgtatag

SEQ ID NO: 309791 - DNA, 312 bp, Proteus mirabilis
atggctctattgctattggctctaatacaaagacaaaatatgaaggaacaacagcaattggtaaaaactctattgccaatggttggagatcaactgcaattggtgttgatgccaaagctactgatgaatcagctaccgcaatgggtaatcaatcattatctacaggttggggttcctctgcctatggtactgcctcaaaggctattcatgcaggctctactgccatcggtaattgggctcagagcactgcaacatatggtacagcgcttggaacatcatccaatgctacagggaattactcaactgcattag

SEQ ID NO: 309792 - DNA, 1728 bp, Proteus mirabilis
atgcttaaacgaataaaaatatctagtggcttaatgtttattttgatcttgttttgtgccattcagttgttttctggtgctacaggcattcgtgatgcttatttaactaataagcgaatttcacagttagccgatggttttgaacagataaaaaccatggattatggttatgccgcattaaataaattacgtgaagatatgcttaatgtaatgtttgatgctcatctcaccccagatcttgctgaaagcaaaattacagatttcctctcctcttaccctcaacgaaaaaaagaagtctctagcattattacccaatattttacctccgctgaaaatgccgattttgatcgcgaaaaagtggcgaaaatgaaaaaactatttcagcgtgtcatttacgatcttgaccagctcgtttcatgtttagaaatacgagattattacggtttccaatcgctttatgctcacaatacgaatgagcggttcacacaatcactttatgaggcaacggatcatcttagtgataatgtcgtcaaccacgcgatagaagccgcacagggtaattaccaacgcgcgttgatcttcgcgtttatttttatgtcggtatttatcttatttacggtgtttgtcatgttgtggatacgccaccatatcgtgttacgtattaaacaagtcattgattatatgtcagatatctcacaagggaatttacttgaaaatagcaccataaaagccaaaggtaataatgagatagaccaacttattaatggaatacagtatatgcggtctgaattatcactgatagtcaatgctattcgcggaacaagtcatcatatttataatggtgtacaagagctcagtgctggtaataatgatctatctagtcgtactcaagagcaagcgagtgctttagaagaaaccgcttctagtatggagcaactaaccgccacagtaaaaaataatactgaaagtgctcgtgaagtatcacaccttatcaatcaaacctctaatattgccagtaaagggggggatgttacccatagaatggtaaaaaccatgaacgatattgcacaaagctctcaaaagattggcgagatcacaacggttatcaacagcattgcttttcaaaccaatatattatcactcaatgctgcggtagaagcggccagagcaggagagcaaggacgtggtttttctgttgttgccacagaagtaagagaattggcgcaacgtagtgcagaggcggcaaaagagatcaaagagcttattgatgcgtcgattaaccgcgtcaaacaaggtaatcaactggttgaacaagtcagtacttcaatggatgagatcctcacatcagttaaacatgttgaaagctcaatgactgagatcctatctgcatcagaagaacaaacgcgaggcatttctcaagtctctttagccgtcactgaaatggataaagcgacacaacaaaatgccgcaatggtggagcaatcttctgctgtagcaagtttactaaccgaaaaggcgggtgatcttgagcaaattgttgatcaatttaaaacagcggaaagtctattttcgaagaatagcacattagcaaaacccgttgagaaatcagcaaatattgggttatcgctcataaaagaaaatcaacaagactcaagaataaaagagccaaaaaaccataaacaatcgacattcaaagaagatgaagatgatgattggacaagtttttaa

SEQ ID NO: 309793 - DNA, 423 bp, Proteus mirabilis
atgggttttatatccaatttattcagtggaatattcagcaataagccaacaaattatgatcaacttacattacttagattcagtgaatggatggagttatataacgataaaaatccgtttaatcaatcaagtatggcaacaagcctgatggttcaagctataaatttacttgttgaaaatgtcgataatgaatattctatcttatattccttcatgaggaataaaaaagtaacatctaaaaaaatatttgatgagatattcgtgccatttattgttaatagcaaaaaaaacgctcagaaagaagatcactcatcactgatgaatatgcaagcaagagctgctgcatcattcataataggtaatatttacgattcagatccaaatttcttatttgatttgaatgatttttactcaaaatattag

SEQ ID NO: 309794 - DNA, 549 bp, Proteus mirabilis
atgtctgcaggtgttacctttgaacgaaataatggaccagtatatatacaaaaccaacccaagcaggttagagctagtgttcttggtaagttgatagaaattatgtcacaggctccagaaacggaacaaaatcttcaacgagagtcatcaaatatcgacttgaagattcagtttaatgatttaaagagaaatcgttggatagctgaattatatcgagaagatgcaattttagttgatgagtcaattaaaacactagatagcttaatattgaatgggagtaccaagctaaagagacaatttaagcgattctataatacagccctaggccgctacggtgtttatagtaaaccatttgtaattgatattattaaaaataattcagataacataattgatgatgtattaagtgcaacaaaagatatgattagtacatgttctgagttagattcggaatttttacaagaagatattgactctgcaatttgtatgatcatcagctattcaattattgagtgtgttattttggagaatcctaatgattacgattga

SEQ ID NO: 309795 - DNA, 264 bp, Proteus mirabilis
atgattgaagactttttggctaatccatatgtcagtggttttggttactttgttggcatgatttctagtgttatagcaatagttcagtttttcactatatcaagaaaaaataaagaaataagtgatcttaatataaaaataaatgatataaacaatcaagttagcagctctcatgacagtaataaaaatactgtgaaccaaggtaatagctcgcagtattttcaaagtaataatggctccgttagtattgataatagggggtaa

SEQ ID NO: 309796 - DNA, 885 bp, Proteus mirabilis
atgaggcgttttattagggtagatcttcctcctgaacctatcattaatgataaatgtgttaggaaacgcctcaaacaaagcctttgtgatagctgttcaaaagtctgtcctgtggacgctatcacttttagtcttttgaacgttgaaatagataatgagcgttgtttccaatgcggtaattgtctatttacttgccctgttgatgctatagaaaatatctccccccatgaacgtagctttcaagataatctattagtcattaatcatgatgaaccactggccagtattgaagagcttttggtttggcatcgacaatatcaaatacgcggtatgaaaatagcggaacccttggttgataagtggctgccgatactcgcacaacttaatttgcaattaaaaaccttacaagagcctatttggcaattagttttagtggagcctgaaccggtcgatagtggtcgtcgctttatgctatttcgacaaaaattagatgaaaagccacttaataaaggtcacgtaaaaacaggattaaatgcaaggaaacagctttatccgcaagatagctggttccatattcaattagataaagaaagttgtattctttgttctgcatgtgccaaggtgtgtgatgaaggtgcaatcacaatcgaagataatcgctttatcattgatgaaaaacgttgcaccggttgtatgaactgccaagttgtctgttttccaaaatcaataaaagtcgtagaacaaattgctaaaaatagcacaccgacacattaccattattatgatgcacaatgtgataaatgccgccttgctttttttgcttgggagcctaatgccaccttatgtccgatttgtactcagcatcaaaaacagggatggctataa

SEQ ID NO: 309797 - DNA, 534 bp, Proteus mirabilis
atggcaaatattgtatttattgcaactagcttagatggttatattgcagataggcaaggcaagctcgattggttatattcaataccaaatccaaataatattgatacaggttttatcactttaatggagaaaattgatgcgttagttatgggacgtaatacgctagacacgatactgagttttaattgtgattggccttacacaaagcccgtgtttgtactgagtaattctatgacaactgttccaaatggttataacggaaaagtatttttagttaaaggtgaattgcaagatattattaccgaattgaatgctaagggatttaatgaactttatattgatggcggtgtgacagttcaaagttttctaaatgaagatttaatagatcaaatgattatcacccgctttccgatcttacttggcggtggaacacctttatttggcgagctaaaacagccattaactttcaaggtgattaaaaatgaagtattactagaaaatctagtccaaaccacttatttacgtgataaataa

SEQ ID NO: 309798 - DNA, 579 bp, Proteus mirabilis
atgagtaggtacgagttacattcagagattcttgatgagattgttaaagctaacaaatatgctggccatatattatattctacatctataagctcaattaaaaattttagaagcattgagccttactctgactcccctcaaaacagacttaaaagtcttaaattactaaaacgttcaggtattgcgactaatgtaatggttaagccttttatacttggcataactaacttggaatcaattgaaattgcaactgctttaaaagaatatgaagttgaacagtgtgtggtaggtgagctattattggataatagaataaaaaaagaattttcaactattgggttgccgattattataaaaaatgaagaaagtcaaattcttgattgcacttcgggagaaaattatgagctcagtacttcgatagagttcattgttttttctaaaactctatctgatttaggtatcaaagtttttaggaaatccagctgtgttaattcctatattttaaatactccaaatccagccaattatatgcagtcagacccaaatcactattgtataaaatgcggggtatgtaaataa

SEQ ID NO: 309799 - DNA, 306 bp, Proteus mirabilis
atgagttatcttagacagcaatttttgacagaagaagaaagtaaattattagttattttacaagaaaatgtaaaagaaaactatcatgttttttgtaaagtgagattgagtgagtttttatattcttctcaaaaaatgggaacatctgaattttttaatcaattagtcgctgctattagttacattaatcctatcgaaaaatcgaatttattagaaaatcaagatataaaggttattcatttaacgatgttaaaagatacattaactaatggtgagctatcaatgttttattctgatagtgtttga

SEQ ID NO: 309800 - DNA, 684 bp, Proteus mirabilis
atgactaataattgtagaacaatttatgtcccttataatgtacctacgctaagctctacttgtggttcccgtacttatactgaaaacgaagaaagcgtcgtttctgtaagaaagtatcaaaccagaataaaaattgacaaggctattatttctggtacctatgtaaaaaatatttttgtaggcgaatttggtttttgccaaccacagaattgtgcgactaaacaaactatcattacaaagctatttttaaatctttcaatgacagttccacaatcttgcgttattaattcagggcaagtgttgaatattgattttgacaatattcctgcatcaagttttaaagtagcagggaaaaaagccgaaggagttaatacggtttctagaaacttaagtattcaatgtgacaatatagatgccagtgctgatttaacaatgcgattacaagcagattcagttcaaggtaatgctattgtttctaataataaaagtgttggctttgtggttgctaattcaagtggatctgaattaacacctaatgatttatcaagttttattcctttcagactcaaccaaaatgctgatgctaatgtcacgattaatgtttatcccgtaagtattgatggaaaaacaccaactgaaggcgctgtcacatcaagtggctttctaagagttgatttcccttaa

SEQ ID NO: 309801 - DNA, 408 bp, Proteus mirabilis
atgttaattacccatcgcaacatattaagaaatataaaagccttattaccggaagataaacaatttaatcgtgacttttccaatctacttattgcttttagttggagtctaaaacatgagctaagaaaaacaaacccaatggtcgatctctatcgcctcttaccccgacctttatttgatgagataatgaatagcccttaccccactaatcggattttattacatattggcctaaaaattggcgagttgcgagataacaaagtaataagtgatgtgatgtattgggtggctgtgaacgtatttcaaatactcctgtaccttttgcctatacgctcatattgcaacgtacggtatatctattctgtgctctgctaccttttgcattggttgccgatctccactatatga

SEQ ID NO: 309802 - DNA, 195 bp, Proteus mirabilis
atgtcattctacaaatatatgacaacggaaacgggtaagatagtaattgaacaaggcacacttcgatggtcaagtccaagtatttttaatgatatcgatgagtgtcaattttcacctttcactgatagcgagcttgaatcagcgaataatgctgtgtttaaagttttagctatcctgctattatctcaggtatga

SEQ ID NO: 309803 - DNA, 360 bp, Proteus mirabilis
gtggtagccagcgaggtgcgtaatttagcacaacgtagtgctgaggcggcaaaagagatcaaagcattgattaatacatcaagtaacaatattaagattggctcaaagcaagtgaatgagacggtggaaacaatggaaaatattgtggttcatgtaaaaaatgtcacgagtcttattggtgaaatcagccttgcatcatcagaacaaagtgcaggattaaaagagcttggtcgagctgtagagcagttagaatcaataacacatgaaaatgcagattatgtctctaaagcgtcatcaatttccggagaaatgaaagaacaaacgaattatttagtaaaagccattcatgtatttcactaa

SEQ ID NO: 309804 - DNA, 486 bp, Proteus mirabilis
atggcgtatgacggaacaattacatttacaggtaaagttgttgatcaaacatgttctgttgatacccaatcaaaaaatttagctgttattttgccgactgtttcagtcgcaacattaaataatgtagcaacaacagcaggcttaactccatttacaattaagttaactggttgttccacagataaagatggtgctaaaaacgttaaagtatattttgaaccatccgctgatactgatttaactacacataatttaaaaaatacagcaacaggaactaaagcgaataatgttcaagttcaattacttaactcagatgcagcaacaacaattcagttaggtactgatgttaactcacaaaatgttcaggaagtacaaatcgacaatgctgatgtaaaccttccatattttgctcaatattatgcaaccggatcatctaccgctggggatgtaaaagcaaccgttcattacaccattgcctatgagtaa

SEQ ID NO: 309805 - DNA, 210 bp, Proteus mirabilis
ttgaaagcacctgcggtaacagcatcatcaatcgattcaggtctatcatattttaatgaaaatactaatctaccactatcaccggcaacctccgaagaaaatgtacgttctgaattctcaccattaagtggaacaagttcacctgtagaacgcaataatgctactcgagcattggtatcattttctgtcgaaccagtattcattaaatga

SEQ ID NO: 309806 - DNA, 237 bp, Proteus mirabilis
gtgactatctctccagcaatgagtgagttgctattagttcactgtgcatggccacatttttcagcaaatgaagaggaagctaattggcgtgcagcgagtgccagtgtattagaagggctatatgaaggctggcttactcatcaagggggaaatgataaaatgcatgtgcaccgtcaagctacagatgcaaaagatgcctttatttttcgttatgcgaatagttcatcaaataaataa

SEQ ID NO: 309807 - DNA, 426 bp, Proteus mirabilis
atgcaagacattgcccgtaaaaccagaaatcaaagtgcgcgtaaggcaatgaatgcaggggctttggcgttaaagcaggaaatcaaacatcgagtgcctatccttaaggaaacggtaccgcatcgacgtaaaggcaccatcaagcgcaatattcgttctaaaacgaaagtgcagcgcaatggacaagtcaaaacgcgtatttgggtgaaatcattatcgggtaaaaaagtgtctgcctttaaacaggcaacgggaaaaagtgcggcattgaacccaaatgatccgttttattggtggtttgtcgagtttggtaccgccaagatgcccgcacaaccgtttatgcgcctcagctttgaggcgaaaaaggaagcgacggctaaagtgattgttcaaacactcaaagaggacattgaaaaaacaaggtag

SEQ ID NO: 309808 - DNA, 270 bp, Proteus mirabilis
atgcctaccattattcttataggtgattcggatacaggccatgataatcatggccctaccaaagtcatcacaggttcatcaacggtaaaagttgatggtaaagcggttgctcggctaggagatacgttagcccctcatggagaacattctagaacgataatcagtggctcaaacagtgtatttatcgacgggaaacccgctgcccgagcaggggacgctattagttgtggtggggtacttatcggtaacgcatccgttaaagttggttaa

SEQ ID NO: 309809 - DNA, 342 bp, Proteus mirabilis
atgatacagcaattaaaagagaccctttcaccgctggtcgatggaagggttttttttcaggtattacctgaaggcaaaaggcattatcccgccattgtgatccagttcgccagcatcacgcctaacagtgcgctggaggatacagatttagacaactatcgtgtgcaacttgatgtgtatgcgccacagccacaacccctcatggtcttgcgtaaaaacattgaggctcagattgttgaggcgatcccatttgcacaacgggtgaatgcggtctttgggtatgaagcggatgtcaaattgcatcggcttgttctcgaattaatgatttcatcagataaataa

SEQ ID NO: 309810 - DNA, 342 bp, Proteus mirabilis; identical to SEQ ID NO: 307527

SEQ ID NO: 309811 - DNA, 141 bp, Proteus mirabilis
atgcctaccattatacttataggtgattcggatacgggccatgataatcatggccctaccaaagtcatcacaggttcatcaacggtaaacttgttgctcgagcaaaagctcccattagttgataatgtaggtatgaaatga

SEQ ID NO: 309812 - DNA, 222 bp, Proteus mirabilis
gtgaaatcattatcgggtaaaaaagtgtctgcctttaaacaggcaacgggaaaaagtgcggcattgaacccaaatgatccgttttattggtggtttgtcgagtttggtaccgccaagatgcccgcacaaccgtttatgcgcctcagctttgaggcgaaaaaggaagcgacggctaaagtgattgttcaaacactcaaagaggacattgaaaaaacaaggtag

SEQ ID NO: 309813 - DNA, 765 bp, Proteus mirabilis
atgctgaaaatattagtgagtaatgacgatggtgttatggcaaaagggatacagacactcgcaaaagccttacgccagcgttatgatgtacaaattgtcgcaccggatcgcaatcgtagtgctgcatccaactcattaactattgatagaccgttgcgtaaacagcgacatgaaaatggtgatattgcgatagttgaaggtacacccacggattgtgtctatctcggtgttaaccatctcgtcagaccgcgtccagatattgtggtgtctggcattaatcatggccctaatttaggggatgatgtgctttactcaggtacggttgctgccgctactgagggccggttcttaggtttacctgcgattgcggtatcacttgatggcgaaacgcattttgacaccgcagcccaagtgacttgtgatgttttagctatgctacaacgagtacctttaagagctgggaatattttaaatattaatgtgcctgatattccgttagcggagatcaaaggttttcgtataacacgttgtggaagtcgtcatgcttcacaacatgtttatacacaaacagatccaaaaggaaataccctttattggatcgggcctcctggcgaaaaaaatgatgtggggccggatacagattttgcagcggttgatgcaggttatgtctccatcacaccattacatgttgattcaacagcgtataaagcgcttgagttattaaaagattggttaaataaagcagaggtcgaaaaaacatgttaa

SEQ ID NO: 309814 - DNA, 1053 bp, Proteus mirabilis; identical to SEQ ID NO: 305353

SEQ ID NO: 309815 - DNA, 1458 bp, Proteus mirabilis
atgggacttgcagccatcaaaaccaaccaactgatcgccggtgaaatagcacaatcaggtggtgtagaaaattatttaaaaacacaacagaacaaagggttattacgttttttaacctgtggcaatgttgatgatggaaaaagcaccttaattggtcgcttacttcatgatacgcggcagatctacgaagatcagctctccaccttacaaaacgagagtaaaaagattggtactcaaggtgaaaaattagatctcgctttgctggtggacggtttagcggctgaacgagagcaagggatcactattgatgtagcttatcgctatttttcaacagccaaacgaaaatttattattgccgatacgccgggacatgcacaatatacccgcaatatggcgacaggagcatcaacgagtacgctttctattctgctgatcgatgctcgaaaaggggtacaagagcaaactcgccgccatagttttattagcacactccttgggatccgtcacttagtggtcgcgattaataaaatggatctacttgattatcaacaagagatctttgagtcgatccaacaagattacctgcactttgcacaacaattaccgcgcgatctcactatcgaatttgtgcctatctctgcactggagggagataatgtagtatctccttcattaaatatgccttggtatacaggaaaaacactgttggcattacttgaagatgcgccggttaaatttaaattaggggctaaatctcaaagattgcgttttcctgtacagtatgtgaatcgtcctgatttagattttagaggctacagtggcacagtttcatcaggctctctttatcaaggacaacagatcaaagtattaccctcaggacagcgttcaaccattaaacgtattgtgacttttgatggcgatctggctcaggcgcaagtgggtcaagcgattacactgctgttagcggatgaaatcgatattagtcgtggcgacattattgttgatgctaacgataccactgctaatgttagcaatcatgcgttggtggatatcgtatggatgtcagaacaaccgttagtacaggggcaaacccttgatatcaaagtagcgggcaaaaaaagtcgtgccaaaatagagaatattcactatcaagttgatgtggataagctcactcaacaagtgaccgaaagtttagcgctaaatgccattgggcatgttgaagtattatttgaagagccattggtgctggataactatcaacttaatgcacaaacaggggggcttatttttattgatagattaagcaatgtcacggtgggtgctggtcttattcgagaaattcgcgacaacgtgcaacccacaacttcccaatacgatgcatttgaaattgaactcaatcagttgatccgccgccattttccgcattggggcgcaagagacttactgggaggaaaatag

SEQ ID NO: 309816 - DNA, 732 bp, Proteus mirabilis; identical to SEQ ID NO: 295448

SEQ ID NO: 309817 - DNA, 1731 bp, Proteus mirabilis
atgaaatcacaaactcaagcgcccttagtggttgaaggaaaactatctgatagtgaacgtatgaaaaaagagagtaatttcttacgaggcactattagtgatgatctacaaaatggtctaaccggtggttttgagggcgataattttttattaattcgttttcacggtatgtaccaacaagatgatagagatattcgtgccgagcgtgcccaacagctactagagcctcgtcatgccatgatgttacgttgtcgtttaccgggcggtgtcatcacaccaaagcagtggctaagtatcgataagtttgctagtgaaaatacgctctatggcagtattcgtattactaatcgtcaaacttttcaatttcatggcattttaaaaggtcatgttaaaccggctcaccaaatgctagcgtcaacaggccttgatgctcttgcaaccgccaatgatgttaatcgaaatgtgctatgtacctcaaaccctgaacaatcttcattgcatcaagaagcttatgaatgggccaaaaaactatccgagcatttattgccacgcacccatgcctatgcagaaatttggttagataaagagaaagtggcgacaacggatgaggagcctattttaggtgaaacctatttacctcggaaatttaaaacatcggtggtgatccccccttataacgatgttgacttgcatgccaatgacatgaattttattgccatcgcagaaaatgggcatttggttggttttaatgtgctagtcggtggcggccttgcgatgacccatggtgataaaaaaacctttccgcgtttagctagtgaatttggttatattcctattgataaaacattagcagtcgctgaagcgattgtgacgacgcaacgagattggggcaatcgtactgaacgtaaaaatgccaaaaccaaatacaccttagagcgtgttggtattgaaacatttaaacaggaagttgaacgtcgctcaggcgttatgtttgatatgatccgaccgtatcaatttactcaccgtggtgatcaaattggttggttaaaaggggttgataacaaatggtatctaaccttatttattgaaagtggtcgattaatcgataaacctaatgcgccgttaaaaacgggggttgctgaaattgccaaagtgcatcttggtgactttcgtttaacagctaatcaaaatttgattgttgctggtgtaccagaggcacagaaagagcagattgaggcgatagcgcgtcaatatggtttaattaatgatgaggttacaccgctgcgtaaacatgccatggcgtgtgtttcatttccaacttgcccattagccatggcagaagcggagcgtttccttcccgcatttaccgatacccttgataatatcatggctaaatacggagtcagtgatgagcatattgttgtacgtgtaacagggtgtcctaacggttgtggtcgtgcgatgttggcggaagtcggactggtgggtaaagcccccgatcgctataacttacatctaggaggaaaccgcatgggtactcgcattcctagaatgtatcgtgaaaatatttcatcacaagaaatcattgaaattcttgatactttaattggtcagtgggctatttcacgtgaattaaatgaaggttttggtgattttcttattcgcactgatgttatcaaacccgttgttaattcagccattgatttttatgaagtgcaggaggtgatatga

SEQ ID NO: 309818 - DNA, 672 bp, Proteus mirabilis
atgcaataccccattaatgaagtgtttcaaaccttgcaaggtgaaggtgtttttactggcgttcctgcgctttttgttcgattacagggatgccctgtaggatgtagttggtgtgataccaaacatacttgggaaaaagaagagagcaagaaagtccctcttggagatattcccattaaaacacaagaaagtgatacttggggtatagccactgtcgaagatattttatcacttttccggcaacaacgttatagcgcaaagcatgtggtgataacgggaggtgaaccttgcctttatgacttacggccgttgacggaaggcttagaaaaagcaggttttgattgccaaatagaaaccagtggcacgcatgacattctctgtagtgaagcaacatgggtaacactttcgccgaaagtcggtatgcgaggtggattgaatgttttatctagtgcgattaatcgtgccaatgaaattaaacaccctgttgctcgtgaaaaagatatcgaagcactggatgatttactgcgattaagaactcaacaacctatggcgatcgttgccttacaaccaatcagttgtaaagagagtgcaacagcgttatgtattaaaacctgtattgagcgtaattggcgtttttcaatgcaaacacataaatatttaaatatcgcctag

SEQ ID NO: 309819 - DNA, 399 bp, Proteus mirabilis; identical to SEQ ID NO: 302935

SEQ ID NO: 309820 - DNA, 1194 bp, Proteus mirabilis
atggcaacaaaaaatatagttattattggcggtggtacggggggtactattctcgctaatatcttagctaaaaaattaaatgatgaaatattttcaaaaaaaataaaaattacgcttatttcagataatccataccattattacaaacctgcatttatgtatattgcatttaaccttttcttaaaagaagagttaatgcgatcacaaagaagtttattaagaccagaaattgaatttgttatagataaagctgaaagtttcgattttaataataaaacagtttattgttgttctaagaaaaaatatcactatgattttctcgtattagccacaggatgtgttcctcgtcttgatagaattgaaggtttagctgaagctggaaatcatttttatcaatatgaagctgcacgaaaattagcagataaaattgctaccattgaaaaagggcgtgtatttatcacggtaactttccctgaaacgccaaatgtacctcaccaatgtggtattgcaccaatggaaacaaccttgatgctggatgaatttttacgtcagcgacgggtaagaagtaatatagaaattgtttatacctatcctaccgtagctcaactattaagaaattgtctttttatgcagcaagaagtttgtgaagtacttcctgcggtcttttctgaacgagatatcaaagcaaagcgtggttttacattaagtcatgttgatcctgataagaaaatcgcctattcgaaagaaggagaagcagagccttttgatatcttaatgagcacacctcctataacagcggtagaagccattcgtaatacaggattaagtgaatataacaatggtgaaggctggctaccgaccgatcctgaaacattacaggtatatgggttaaatcaagtttatgtgttaggtgatacggttgatttgcctattagtaaggccggtggtagctgtcataaccaagcgggtgttatagctaataatatttgtggtgaactgcgttatggttatccggctgcaatttatgatggtcgagtacaagctgttgcccaaatgggattatcagcgggtatgccattacagtatgactataaacatgatgttattccaacacctccaacaaaactcggtggcatgttacgtaacggttataaccggggcttatattgggcaacggtcagaggattattgtag

SEQ ID NO: 309821 - DNA, 786 bp, Proteus mirabilis
atggcgaaaaaaccgacttattcagtacgttttgtagcaggtcaacctgtagaaaggattgaacctagtctacctttaggccaaatagaagagatgctaccgattgggatgccactatatacagaaggcactttaaaaattgctgtttggaatatttacaaacagcaacgggtcaattggcgtagtatgctggaaacgcttgccaccgatactcaactattacttttacaagaagcgcaaacaacacctgaattagttcgttttgcgggtaaaaaccatttaattgctgatcaagttcctgctttagcctttcaacagcaccctgcgggtgttatgaccttatcaagttctcatcctatctattgttgcccattaagagaaaaagagccttttttaaggcttgctaaatctgcattaattacggtttatccacttattactggtgagcatttaatggtgataaatgtacacgcgatcaattttagtttcggtgttgatgtttatcaaagacaattaaacagcttatcgactcatatcatcgatcataaagggcctgttattttggcgggggattttaacgcctggagtcgtccaagagttaatgtgttaaagcgttttgctagaagattaaaacttaaagaagtgatctttgaaaaggatttacgcactcgcgcttttggtaagccacttgattatatattttatcgtggattatcactaaataaagcggaaatcttaatcacagatgcatctgatcataatcctttggtggcgaccttttcttaa

SEQ ID NO: 309822 - DNA, 204 bp, Proteus mirabilis
atgatggaaactgtgttacaggttaatgcgaaacggacccaccattttgatatcagcaatgtaacagcaaaaacgtttagctatgcttgtcgctgccaagaaatacaccagttaactcttcgccgacacaataaagtacaacgaggagaaacccagtatcgttgtcgtcattgtcaggcgattttacaattaattaaagagtaa

SEQ ID NO: 309823 - DNA, 363 bp, Proteus mirabilis
atgggcatgggtttagaaatatatgatgagaaagggcgactcattattggagaagacactattataccgcgccacttggggcaatttgaccttcctttgtcccaatatggatctcttactattcctgagatttccttaggaggtgaggttgtttgccatttctggctacggtttcgctctcgatttagtggtgagtttcatgtagataaacctaatgagagaacagaatactccatatctggaaacacgttaaactaccgcgttgattacaatatctatcgctgggagaataatggctctggtggtgggcagacacaaacgcatgactcattctcaagtcatgttgtcgtatgggtggtatga

SEQ ID NO: 309824 - DNA, 300 bp, Proteus mirabilis
atggcatgtccttatggtgcaccgcagtttgatgaagtcaaaggccacatgaccaaatgtgatggttgttatgagcgtgttgctgaaggcaaaaagccaatttgtgtcggatcttgcccattgcgtgcattagatatggcaccgattgaagagttacgcgctaaatatggtgatcttgctgaaatagcccctcttccatctgcgaaatacactaaaccgaatattgttcttaaattaaatgccaatagccgacctgtaggtgacaccaccgggcatctggctaacccagaggaggtttaa

SEQ ID NO: 309825 - DNA, 4290 bp, Proteus mirabilis; identical to SEQ ID NO: 32493

SEQ ID NO: 309826 - DNA, 183 bp, Proteus mirabilis
atgatgccgatgccaaaaggcgttgttgctgttcaaatcgatcgcaataccggtaagttggcgggagatggaccatcaatgaaagagtattttattgaaggcactcagccaacagaaaaagcaaaaagtgaagtgggtacacggatctttgaggataatggcgaatctaacgagctattttga

SEQ ID NO: 309827 - DNA, 189 bp, Proteus mirabilis; identical to SEQ ID NO: 303174

SEQ ID NO: 309828 - DNA, 663 bp, Proteus mirabilis
atgacaatcacctgtaaaggctttctttttgatttagatggtacattagtggattcattgcctgttgttgaatactgttgggcactatttggtgagcgagtaggggtatcaacacaagaaattaataactatatccatggaaagccggccattgagtcgattcgccattttatgcctaatgctacgcaagcacagattgaagagacttttcgttggctagaaaagttagaagcgacacaaacagaaggattagcccctcttccgggggctatcgaactcattaatcgcttaaacgacttagcgatcccttgggcaattgtcacctcaggcacagtaccaattgcctctactcgtcagtcagttacaggtattcctgagcctaaacattgggtgacggcagaatgtatcactcaagggaaacccaaccctgagccttatcttttaggggcaaaaaaattaggcttggctcccgaagagtgtgtggtttttgaagatgctgctgcaggtatttattctggtttagatgccgggtgtcaggttattgccgtacatgctccgatttcccttcctcgtcgtaatgaaattgatttaatcattgattcattaaatgatttacaaattgacaaagaaaatcagcaagtcgttattaagcataaatgttaa

SEQ ID NO: 309829 - DNA, 279 bp, Proteus mirabilis
atgtctgttgattacttggtggtaggtggaagtctgcaaggtaaaataataacaagagataatctggttaaaaaactagcaattactaatagtgtaatatcatcaacaagccagaaaaaatccagtcaaaatattagttataccttagatgttcatttccatagttttaatggaagtagatatgcaatcgccgttaatgggtcatttggcactgacatacttgatgagttaatagctaaatacaaaccgaacccaatacctaatgacttgataaaataa

SEQ ID NO: 309830 - DNA, 1224 bp, Proteus mirabilis
atgctcttgagtccaaatcccctctataaagcgtattgggttgctcaatgccgttatactcgcaacggtgaacaattcaagggggtgatgaccgtagcaggtacaagtcaaccacaagctattaagcagatgcgccagtactttacggctcacccaggtgaatatacctttgcggactatgacacattaatccctttaatcacccatattgaacaaagttcaaccttagaattaccgttaatacggcaagtacgtgagcaacataatgcaaaggtttcagccgtattagtggataaatgcaacctcacacacccaagaccgtcagaaaaaggcgacattcattaccgtgaggggcaacctacgtttattgaatattcgcatctctatgtcgtcattgacagtggggaataccaccgccaaaccgggcaacatcttgtaccgaaactgcatggctcacaactgccatggaaatcactctatcaaggagaaactcaagacagccttgaagataaagccccttatttggtacacattgccgccaatcaagccggtcagcggtttctggctcattacttgaatttaccacataaagcgagtctcggattatttatcaatagcctcaaaccctttaccgatattcaccggcaaatgcgaaaactcacctatttatataatcaaaaactggagagttggaatttctttcgtttttatgatgttaagcactttatcccatttattgagtctttgactcacggacagttaattaatgtggtcaatggggtaaatgcgttctacggctatagtgcacaataccccgatggggttgaaatcacctttcacccagattatctgtatgacggcagtaagcgagagccgttatttattaatacctatttatacaatcactacgcgaatatcacacagctgcaaactgtggctaaagctaaggcactgattgaacaattttctcaggtagaaggggatgagttagagggtgacgcattaatgggctactgtatacacgcagcaaattgcagttttttagacgatattcatcaatcaaaagcgttattgtacgacttgcaagcccgctatttgtgccgtcatcaaccgagaacatggcagatcgccaatgaaaaagccgcaccttataaatacaaccaagttttattgagttaccaccgttatatcgcctgtttaaatacccaaggagaaatgaaatga

SEQ ID NO: 309831 - DNA, 660 bp, Proteus mirabilis
  misc_feature (595)..(604): n is a, c, g, or t
atgacacaacaaagaattgctaaatatcgtaaagattaccgcgccccagattacaccatcactgatttgcatcttgattttatcttagataaagaaaaaacacaggttactgctattagccaatgcaagcgcttagcgacaacggtaacgccgttggtgttagatggggacgatttaacattaaaatctatttttgttaatgatgttgcttggacacactataaagaagaaaacggcaaactcatcattgaccaattgcctgaacaatttacgttaaaaattgttaatgagattaacccatcagctaataccgctttagaagggttatatgtttctggcgatgcgctatgtacacagtgtgaagcggaaggtttccgtcatattacttattacttagatagaccggatgttttagcgcgctataccaccacgatcactgcagataaaaaacagtatccttatctattatctaatggtaaccgtgttgcacaaggtgatcttgaagatggtcgtcattgggtgacttgggaagatccgcatcctaaaccaagttatctctttgcattagtggcgggagactttgatgtactacgcnnnnnnnnnnctttgatgtattacgcgatacatttaacactaaaagtggtcgtgaagttgctttag

SEQ ID NO: 309832 - DNA, 1839 bp, Proteus mirabilis
atggataaatacggtaataccattgatggtaagaatgttgagattaaaactatcagtggtaagcctaattttagtgacaatccattaaagtcagtgggcaatggtgaatatcaaacaaatgttacagcaaatacgatgtccgatattatcttaaccgctcaagctgaaacaataactatcgcagagccattgacgattaaagtggctatccctaaatctgaaattacctttgagaaacctatccaacaggaaatctacaaatcaactgtgattgatgcgttaagttataaaggtgtaccacaaaatatgcaggtaatatggtcaagctctgatcctactgttgcttccattgatacaacaagtgggcaaatctccatgaaaaaggctggtactacaattattaccttacaaaccttaggtaatgagcaatatccatcagctaaaaatagctatcctttagtgatagaaaaagcgccaccaaaactgaaagtaacctctcctcacaccatacaatcgatctggaatgatggcattacccatcaaataacagcggaatttgataatccagaggttaaaaatacccccattcatttctctagtagcgataccttggtagccaccattgatagtaaaggtaacttaaccgccattaaaccaggaaaaacaaaaatagtaatacaaagtgatgctacagataaattcctagctgatagacaaactgtagactatcagcaagaaaaagctgcactaagttattattttaaaaagaattatattgtattaacacctgattctgctgcagataaattattgatggctcaaagccctacgccagatgtccccgttgaagcgaatgcaacttggtatagtagtcaacctaacatagttgaaatcaccccagatgggattatcaaaaaccttaatattgggcaaacaacattaacacttgaggtgaaaaataataattattttcaagatcatgagcaaagctataacgtcattatacaagcatcgcctcgcatcaaaattaactcatttgagtttctatctgcgggagagagcaaatcaaatacacatttggatgatttaacttggcaacctttatacacttcagacgatcagtttattgttaaatggtcttcatcagacacacctaaagcgattaacttcgagttatttgatgaaaacggcacttctatcgccttagaagaaagacaaaactatgcacctaaatataatatacatgacccagtaaaaattcaggtaccgaaacaatatctaaccagtccaaaacaattaacactagaagtcacaacctttgatagtaataatcagccttatgtcgatcctaaaaagtataaaattaatattgactattttcctgccaataacgcatataaaataatctctcttgattataattctaaatttatctatacagatacaggtacccttgcttcatcttgtcaaaatggttggtcaaccactacaacacatcttattttaacgccaagattagtatttaaaggtgagccgaaaaagttactttatcccatttatattactacggaattatatgatgtaacattaaatccatcggataaactcatcggacatattaatgagaaattaacttatccagataagattatatttagcgagcattctaaaaaaatagctgaaatatcgccgacatcagcacactacgcattagacgaagaatgtagaattaatgattctggtcatggtacgttaaaagcaaatataaccataggtaacagatccagttatcttaaaaaagaatttcattgggatggccaaatagggggatatttttaa

SEQ ID NO: 309833 - DNA, 834 bp, Proteus mirabilis; identical to SEQ ID NO: 295273

SEQ ID NO: 309834 - DNA, 279 bp, Proteus mirabilis
atgttaattaactcgtctctatcgacagtattaattatctttcgtggtttgatatatggtctccatattaaaagcattgagcctttattattaccgttaactggtttgtttgttcctgcattaataaaagatattcttcctcctgtaattagtctcacttcatcaactgtttctaatgcagaattaaaccaaccgacagaagtatcagcaggaattaacatcacgataggctgtaattgctttttacattgctcggcggctttattaatccaaggttga

SEQ ID NO: 309835 - DNA, 264 bp, Proteus mirabilis
  misc_feature (250)..(259): n is a, c, g, or t
atgaaaagttataaaatagcggtcagctacgatatgtctgactatatttcaacccaccgtgaatgtgtcgatattctacatactgatttttctgatgttgccgtgattattatttcacttgatgacattcagaatggaaagcttaatttaattgaaaaaaatggctttgaacagcctatttttgccgttattaataaagatgaagttatccctgctaatattattaatcgattaactggtgtaattgatnnnnnnnnnnactag

SEQ ID NO: 309836 - DNA, 963 bp, Proteus mirabilis
atggagtatataactaataaacattgggccaaatatatcaagggatatatttttactggttgtgcaatccgagataaaaatattgtgtacttttgtttgcgcaaagatattccatacgaaaaggctcgaaacttatggaacagcgaaatcccctcacagttattatgtatttatttagacacaccagatgacccgattgattatattagaattgaagggttcgataatcctaaagtaggtatttgtttaaaaccgaaagaacaagggatgcttgcatctagaggcgatggtgggtttgtcaagtgtatgggcagtggatctaaatttccgctagaaaaagttatggatggtgactatgcaaaccctaaaaatatcaaatgtgttggtggatatgcttattatgttggtacttcgcgcgaaatttataaacgagtggatattggaaaatggcagagaattcaacatgggataccaggaggagaaaccaatacagatatgggattcactgatctcgatggtttctctgaacaggatatgtatgccgttggcggtgcaggtgatgtttggcattataatggcgaaatctggttcccctgtggttttccctctaatgagcaattaagtgcagttttatgtgcccctgatggttatgtgtatattggcggtgaagggggcagtttatggcgagggcgtgaatatcaatgggaaaaactttatcacggcagttcggctattttactgaaccagttgcgttggtttgaagataaagtgtgggcatgtgatgactatcgcttacagtgttggaatggtaaagaaatggtccgtcccaaggatggtgataaaaatgttatcgcctcaggtcatatggatgtccgcgatgggattttagttgtagctgatgattataatgttgatctgtatgatggaaccgcttggcataagatagtgagaccttataaataa

SEQ ID NO: 309837 - DNA, 969 bp, Proteus mirabilis
atgtctgcatcttatttaagtcgtgttaatgcgataaattggaatcgtattgaagacgaaaaagatttagaagtttggaaccgtttaaccatgaatttttggttacccgaaaaaattccactttctaatgatataccttcatggaataccttaacccaagctgaaaaacagttgactatccgtgtatttacagggcttacactgctcgatacgatacaaaatacggtcggggcaccaaccttaatgcctgatgctcagactccccatgaagaggcggtattatcgaatatctgttttatggaagcggtacatgctcgctcttatagctcgatattttcgacactctgcttaacaacagatgttgatgatgcttatcgttggagtgaagaaaatacctatttgcaaaagaaatcagatattattctgcgttattatcaagatagtgatccattaaagaaaaaaattgccagtgtatttttagagtcttttttattctattctggattttatttaccaatgtattggtcaagtcgagggaaattaaccaatacagccgacttaattcgtttaattattcgtgacgaagctgtgcatggttattatattggctataaattccaaaatcagttattaaataaatcatcattagagaaacaagatattaaagactttgctttctcattattattagatttatatgataatgaagttaaatatacagaagatctctacgactctgtcggttggacagaagatgtaaaaaaattgcttcattataatgcgaataaagcgctgatgaatttaggttatgaagcactatttccagatgaaataactaatgttagtccagcaatactttcatcactatcgccagatgcaaatgaaaatcatgatttcttttctggctcaggctcttcttatgttattggtaaaacgatcaataccgaagatgatgactgggatttctag

SEQ ID NO: 309838 - DNA, 3345 bp, Proteus mirabilis
gtggcaccgtcggctcctgtattaaaagcagaggacgatggttcggtttcagttgacttaccaacagatgccaataaaggtgatacggtagaaattacctttgaagatgaaaagggtgataagcacacggttaccttagaaaaaggggataacggttggacatctgatacaccggcgttgatcccagacagcaacggcgataaagcgactattcctgcggataatgtaaaagacaacagtgaagtaacggggattgccaaagatccgagtggcaacgaaagtgacccatcaacggtgacttcgaaaacggacggtgtcgctgatgcgcctgtactgactatcccagaagtggctgacggttatgcgaatgcggatgaactgaaagacggcttacaagcagaagttaccttgccagcgggtacggttgaaggggcggaaatcaccttaacggtcactcgcccagacaaaaccactgaaaccgtaacgcatacagtcactaaagatgaagctgctgcgggtaaagtatctgttgatattcctaaagatgcggtacaaaacggccaaaacagtgtcgatgtcagcttaactcaaggcaataatccagccaaaccaggaaacaaagtagattttgctgttgatggacaaattccgggcgatacagacggtgatggtacggtggataccacaccggtggtgaccattccggaagccactgatggggtaaatgctgacgagctaaaagatggcgtacagaccgaagtgactgtaccgggaggtagtgcagcaggtgacacactgacactcactattaccaaaccagatggatcaaccgacaccgttgaacacacactgactgcagatgaagtgacggcaggtaaagccgatgtgacaatccccgcagataaagcaactccggatggtaattattctgttaaagcagaaattacagatcccgcaggtaacacgagtggtgaaggtaaagcaacggacttcactgtagataccgttgccccatctacccctgtattaaatgctgaggataatggctctgtttctgttgaactgccaggggatgccaacaaaggcgatacggtagaaattacctttgaagatgaaaaaggggataaacagactgtaacaatggagaaaggggataatggttggacatctagtgatcctaatttgatcccagacagtcagggcaataacaccgctattccatctgataatgtaaaagataacagtgaagtaaccgcaatagctaaagatccaagcggtaatgaaagtgctccagcaacagcaacgtccaaaacagatgtgctaccgacagtgagtattagtgttgatacaacatcagtaaatgacaatggagataagattagtgctgatgcttctgtttcgggtgaaataacagaagttcctgcaacaatagaggacaaggatgatactaccggattagtatataccgttgctctagattatgttgcagcacaggatgtgaccgtaaccataaccttaacaaatgatgcaggtcatgcaagtgcgccggattattcaacgcttgcaggctctcagcatgatgggaaaatcgccctacatggggacactggtaaagtaacctatgatggagcttcaactgtaacggttgttattcctgctggatctaagagtgtttcatttatagttgatccaacaatggaagctaaccaaaatgcatttaatgctgaaggtatggagaaagttgttgcaaccattacgggaacatctaataacgctaccgctgtaactgatacagtaaataatgcaggtgcttctgctacgggggttatttatgatggcaaccctatttcattacgtaatctggacggcgattttacactgaagtattcattatcctcatcagtggctgaaaatggggactttggatataccatcggagttgatagcggtaaaaaagatcctaagctaacgacagattacaatgatacgatttatgttggttattatcaggatggtagcgaaacttcatcatacagcaatcttgctaactcgcaggataatggacctgatggcacaaaaacagatggtaatcaaagtattacaactgttgatttaggtgctggtgatgacctgatggtgatccgcggtaatatgttaaccaatacacgagtctatgctggtgaaggtaatgatacctttactatggacggcatgaatacagcattacgttctatgtatgctggtagttatctctttatggaatctggtaatgataccgttacgattaaacgtacaggggtaaccaatgctggtcaaatctatcttggctcaggtagtgatacctttactcaaggtgatgccaatgatcaaaataataccgaattgtccggtttattagatctgggtagtggtactcaagataagtcaaatatgccaaatgagtatctttctgtttatcaggatggcagtaatttaagtttaggtaatgacaataacattgatgcggtcacagatgttaatactgtcactatttatggttctgtctccggtgaaattttaggtggatatggtagtgataatatcactatcactaaaaatctgactggtaatgtttctgttggtgataatacagacactctaactgctgggtggatttatggtggtgccactgtttctatgggggatggcaatgatacggttactgtcactgaaggtgcgtataacacaactatttcactaggggcaggagatgatgtgtttgatgctactgctggtgttatgggggattctgttagcgcgacattagtgaatggtgaagatggcaatgacaccataaaattaggcacaattggtaaaaatctgacagttgatgcgggtgctggcgatgatactgtgattttgacaaaagattatgatccttcacctataggtaatcagggatatattaatgggggagagggaactgatactttagtcttatcaggtacgattacggtaaatatggccactaagactgatgaaggtattgctaatttcgaaaaagtcgatatgacggttaacagtgagctgaaagtggacaatagctctcagactattaagttaaccgcatctgatgtgttgggaatgaatgcaaattcaacgatttatatttccggtgatgctaatgataaggtggatttaggtgccgatggtgctggaggtttaggtacatttacagctactgccactacaacaaaagcaaccgcattagatggtactgaacatacttacactctttatagcagtgcaagtggtgctaatgtctatattgataataatattatcgataatggaggcgttatttaa

SEQ ID NO: 309839 - DNA, 363 bp, Proteus mirabilis; identical to SEQ ID NO: 301378

SEQ ID NO: 309840 - DNA, 711 bp, Proteus mirabilis
atgaatagcaaaatattttttttactcgtagcaccttgtcttttaaatttatcgctgtctacaaccagtcaagccgctacggtaactaatagttacgtttttattgagaataatgtagataatgaatattttattaccccaagaacaaccgatccgcgtttttcgggtgccaataaatatacgcgttattcaaaatcttcacagctcagtttaggttatatggggtataccaatacatccattcaggccaatcaatatgtcgatatttggctagaaaattctcaaatagataagccatttgtgggtaatcgatgtatgaggcgttattgtacagatgatagtggctattggcctgcgcaatatataggtaaagatggggcttataaaatagttcagacgaatactaacggtgaatcggcttatgctcgggggatatttagtgattcggcatacctgtattttcgccaattgcctgtaggcactatagagacatatagttatagagcctgtatgacaaaaacagactatgatcccagtaaaggcgaatcttgccaaagtatcggcggaagaatgcttgcatcacatgagtttaatatcactaagtctgggcatataaaactgacctcaacaggtgctttacaagaaatatttattgatagtaacggtaatcccacgattggcttaggctctcagttttgccatctgcaatga

SEQ ID NO: 309841 - DNA, 1686 bp, Proteus mirabilis
gtgaataaacagcaatcattaactccgatttatgcttttttaaatagtccaggtgaagttcgtatttatcgccaaggtaaattattaaatattcaaaatttcccgatgggtaattttgaagttgataccagcatgttgccttatggtatttatgaagtaacgattgaaaccgttattgatggcaaggtagtgacaacacaacatcaaaccattaataagtcttttggcaccgctaacggtaattttgaccaattaaattgggaaatttatggtggctatattgattttgataaacgtcattatatcaaagagggtggcgcttataaccaaactcccgaaaaaagttatttaatcggtagctcttttgcttataactttcctctgttatccggtattcgttttcaaatgtctaactatggatttgataaatttattgtacaggagacgaatatcagtgtagcggtaaataactatctttctattgcttggcaaggaatgttagagaatcatggtagtcaccgtaatattagtacgctttctattaatatcccagaaggctatggttcattatgggcatctaaagagaaaactatcgtaagaggtgatttaccgctatatgaggctgacagttactcttatggaggaactattaatttcgataagataatggatagaacgggttcatttactatcagcaataccaaagataagcgagttggtagtgattctattaattatgaatatgcaaatacattattttcgggacgttatggcacggtaggattaagagctggggttcagcgttatcattatgataatcaaaatagcactaatgaaaaatttattaatcttgatttctctttacctctttcaacgtggttaagtactgggatctcttcaaccaatggcaatgtaaaagccaatatttatgtgaataagaattttgaaaactccgtgatcactaatgcgggggtttctgtttctaagttagtgcatgataaagataatggtgaatctgacttctcaactctaggttacgcttcttatgatacgaagtataactctggtacggtgaccattaatcgccctgataataaacgactcaatggtaatttaacttctcgtggctctatagcttatagtgaagggatgatcacacccagtggtcaacaaggtaaatctggcattattatcaattcagacattaaaggtagtggcagtatgctcgctaaagttaacgggcaaaattacccgattagtggaaaaaatacctttattccattatctccttattcagattatgacatccaattaatgaatgatggcaaatcgaaagacagctttgacattatttctggccgaaataaatccgtcacattgtatccaggaaatattgccttttatcaaccggaagtgaggcaattagtcacggttttcggacgtctgaaatcccctaatggtgaacttttaaaatatgcttcaattcgaaatcatattggtcgaactaaaacagatcaaaatggtgagttttcaatggatgtagatgtccgttatccggtgatctcgttactacaagaagatcagcaaacaatctgtgaagcagacttagatcttaaaggggcacaaggagcaatgtgggttggagaggtaacttgtcaacctcagtctagtttcgtaaaaagataa

SEQ ID NO: 309842 - DNA, 288 bp, Proteus mirabilis
gtggccaactatgatttgggcgtctttcaaagtcgtgttaaaaacgcccaagattcatccagtagctactttaatttagacacgttattagctaaagctgaacaccattttaatattaatgcatctgcctacagtataggtaaatccaattccaatattgaactctatagagcaatgtatgaacgtgattttaatggattgcgttttgctatcgggttaatgagcacttggaatttacagtccttagccagcttaacagtattgagtagcagtcaagtagggtggtga

SEQ ID NO: 309843 - DNA, 1386 bp, Proteus mirabilis
atgaaccaagttccgaataatttaatggcggaacaaaatgttattggaggactactgcttgacccgcaaagtgataatgcgcaatcaattttttcactgctaaaacctgaagatttttatacccgacaccatcaaattatctatctcactctgcgagaaatgtatacccaacgtatgccaatagacatcatgacggtgacggattatctggagtcaaaagggcgaattaatcaatcaggtggttttgcctatcttgctgagatggcaagagaaacaccgagtattgctaacattatggcttatgcgaaaaaaatccgagagtgttccgcacagcgttttgttatcgaaaagacggttgaaattcaaaaactcatgatggtgccaagtgagttaagttttacggataaaattgaacaagcacaacgcttgcttgatgaagctacttcgtttggaaaaatggggagaaaaacagggttacgccgaattgatgatgtgctggatgatgtttttaccgacatttgtgatcgacaagataacccagagaaacatcgaggattaaaaacgggatttaaagattttgaccgcctattaagcccgaaacagattgttatcggttcactgttcgtgattggtgctcgtccaaagatgggaaaaacaaccgttctcactgaaatggcaaaaaatgtctcacaacaaggtaagcctgtattgctgttcagcatggaaatgacggataaacagcttgttgaacggacactagcccaacaaacccagattaattcagataaattttaccaaaagttagaggagcatgaatgggataggctttgcagtgccatcggtcgccttaaagatgagcccaatatttgggtggatgatacacctggcatgtccttacaacacattcgttctgaaagtcggaaaatcaaacgcaaagtcggtgatattgggtttattggtgtcgattacctcacgctgatgcaagcgggaaaagctgaccgtaatgatattgcctatggtgaaatcactaaggggctaaaaatattggcaaaagagctcaatacggtggttgtgttgcttgtacaactgaatcggggattagaaaacagggctgacaaacgtcccgtaccaagtgattcaagagacacaggacaaatcgagcaagattgtgattattggttaggcatttatcgtgatgcggtgtaccacgataatgcggatgaaacgctgaccgagatgattttaaggctcaatcgacacggtaaaacaggcaccgtgtatgttgatcaacaaggattgagtattacaccggttgatcaatatatggctgcttatcgcgctcaaccgaaacgagaacccaaaaaatattgtgaaaaatcgttttaa

SEQ ID NO: 309844 - DNA, 855 bp, Proteus mirabilis
atggaacttgttacgtataaaacgctacctgaatggcacttaacagcgatccctttagcattattagagcgtcataacacaaaagaaggcacttatgcgcaaatgcggatattacaagggagtatgacatttgtgctatttaaggatgatggagaacaagtgttcttagagtgtgatagcgaaaatcagcctccgcttattcaacctcagcaatggcataaaatcgataaagcgagtgatgatgtactttgccagctctcttttttatgcactcccgaagataaattttttaaagaaaatgatttgtcattacctcattcggaagtgcgttatatggcaacattgactaccccatgtaaagtgcttgatttaggcgcagggcgtggtcgtaatagcttctatttagcattacaaggttatgatgtgaccgcattagatattaatgccgctcatattgatgcaattgaagccgtcaaagctaaaaccggtttagcgatcaaaagcggcttatatgatataaatgaagcagcattaaatgagaaatacgatattattatttctactgtggttttgatgttttgccagcgtcaacgtatcgcagatattattaaaaatatgcaggagtgtacaaatccagaggggattaatgtcattgtttgtcctgttgaaacagcaaatagtggatctgctgaagttcctttcaaaaccttcttgcgccaaggtgagttagcggattattaccaaggctgggatattattaaatataatgaaaatccagggcatctacataaaactgatgctaatggtaatcgtattcaacttaattttgcgacattaattgcgcgtaaaaaataa

SEQ ID NO: 309845 - DNA, 330 bp, Proteus mirabilis
  misc_feature (312)..(321): n is a, c, g, or t
atgcctatccccatagatataaataaaattaatgaaatagcaattagcaaaagctctgaagcacttctttatggtggtggtagtagtggtggcgctattcatctatgggatgatcgcattatgacccaattacctgaaaagaccatttcaggtgccgtcacctttaatggtagtaccaataatggtaatggtggatctgcaacaattaaatttagtgaccaacaaaactgggtatttcatctttctggcgcgaccaaaagagttactcactataaaatacccacacgttcaaaagccggtgcttgctatagnnnnnnnnnnttgctatag

SEQ ID NO: 309846 - DNA, 1557 bp, Proteus mirabilis
atgaaagtttctaaccgtcttaatcctgcattttacccttatatcagcgaattttggaaaaaaaataagattgcatacgaacttgatgaagatgataaatacacttttaaagataaagattatatctcaggtcttggctatgttaataatgagcctaacgtactctataaatcaggtagctctaattttattgaacatgttagccccccaaaacattatgttgaaaataataataacgagatccctaatagctttttaaaaagtcaaagcggtaccgcatcactcacttatattaacgatgaaggatatttaggtctatctattactgattttcaaacttcttatggcgtgccgggatatgcctatcttaccacaaaaactagccgaaaaatgtataaacctgtttcggtttcaaaccataatcaacggatagatatacaaggaaaacattatcacttagcgccttttttaagagatagtgccttttattactcttattctgaatctaaagatgaagagttagtcggtcaaatagcttcatcgatatttgatactcaaagccatcagttggctttagaaactgcacattcccccctatttgatagacttactggtgcgattggggtgaatgctaatcatcgtgacctaaaaacctctggttatgatgcctatttacctagcgtattaactaaagaatatggattctattggatagaatcattagatttatcgccttttgaaatcaccgcaggataccgtcgtggctatacaagtcatcatctaaatattcctagtcattataatagcggaagaggaaaaggtgccaatccacaaaatagctcttttaatacaagtgccaacaccttagcgctctcttttacacctattgatgaatggacgttaaaattacagaaaaatatagcttatcgtgcaccggaaataaatgagctctatacccatggcccccattttgcttatttaattgaagagcaaggcgatggtaaatttaatacagaaaaaagtaacagtattgaattatcatcggtgattgaagtcggtaatttctctaataaaataagtgtgtataagacagattatcgtgattttaaattccgacgtcttacaggcgtaagtcgtggaggggtaaccgtcatggagtgggatgaaaccgatctcgaaacaaaaggattagaatatgaatttaaatatttatatgaaatgccacgcgatcatcatctcacctttacaaatgaaaaacatggtatcaacattcattatcagtatggcgatttaactgcttttggtcgtgccatttactataaaaaacagaaagaaagtggtggtttattgcgtggtggtgatttaattttcccttcttataccctcgttgatgccgggatcggaaaaaaattcccgttggataaacttactgtttctgttgatgtagtgattaataatctaactaatgtcgaagcaagacccgctagctctcaattaaaatatttagcacctctaccaggtagaaattatggattaaacgttaaagttgatttttaa

SEQ ID NO: 309847 - DNA, 1170 bp, Proteus mirabilis; identical to SEQ ID NO: 301490

SEQ ID NO: 309848 - DNA, 741 bp, Proteus mirabilis; identical to SEQ ID NO: 190889

SEQ ID NO: 309849 - DNA, 663 bp, Proteus mirabilis; identical to SEQ ID NO: 103791

SEQ ID NO: 309850 - DNA, 549 bp, Proteus mirabilis; identical to SEQ ID NO: 296659

SEQ ID NO: 309851 - DNA, 510 bp, Proteus mirabilis
atgtttgattatcaggtttccaaacaagcgcactttgataatgcatgccgtgctttcgcaaatacccataaaggggatttagtgcaaatagctgaaagcatcggcatgaacgcccaaatgttgcgtaacaagttaaaccctgaacaaccgcaccagttaacgtgtgttgatttaatgaagttgactgatgcaaccgaagacgcatcgattcttgatggtgtgttagaacagatgcaatgtcagccgtcagtgccagttaatgaaatgagtgattctaatgtgcccgcttatttattaacggcagtcggtgaggttggaaagttagcaacaaatacagtttcaggcggtaatttaaataatgcacgtgtcgctgactttaaacgttctgttaatacagcaattcgttgtttaacgttggcaggcataacactatcggcaagattacatactaatccggcgtttgcctgtgcagtggatgcagtcgctaatcttagcccatcaatgatgtga

SEQ ID NO: 309852 - DNA, 567 bp, Proteus mirabilis
  misc_feature (505)..(514): n is a, c, g, or t
atgtctactgcaacaaatctgaatgaactacaggaacaagttcgctcccgctataatggattaagtaaaaggctacagcaggttgcacattatcttttggataataaaaacagtgtagcatttgatacaatcgcgatccttgcagataaagcaaatgttcctccatcaacattaatccgttttgccaatgcatttcatttcaaaggatttaatgaaatgaaacttttatttcaacgtcatttaatgggtgaaatggataatgaaaaattaacctataagcagcaatacaaaaaggaaccaccaaacttaaatgagccagattatattctgcaagagtttgcacaagccaatagccacgctttgcaacagttagctcatcaaacccataaggatatgttaaataaaactatacaactacttgagtatgcagaaactatctatataggtggttttcaccattcttttagtgctgcgagctatttttttcacgcgctttctcatctgnnnnnnnnnnttttcacgcgctttctcatatcccttgtgaaaccgtctttgttaattgcctag

SEQ ID NO: 309853 - DNA, 285 bp, Proteus mirabilis
atgtataaagaacaacttaggaatattacacatagagatgtgctgtttggcatccatttccacccttattcagaagaaatgcaaaaaatgtgtgagattgctgcttataaagaggctaaacaaattattgtaacagatagccccataagcccattagcaagtctaagtgatgtttgtttaactgtaaaagaagcacaaataaaaatgtttcgttctcaaacctcaacattatgtttactacaagcactttcagttgcattcgcttttagaaaaaagagccattaa

SEQ ID NO: 309854 - DNA, 786 bp, Proteus mirabilis
atgtatgaatgggatgaaatttttacaatgaaattaattccagaaacatcttactataatcaaaaaatttataaccttgttcactcttggtacaaacaaggaagagtgcgatttattactcaagctaagtgtcttaatcaaaaagcaattgatttatatggcttagataaaaatgttccaatcgattttgttccaaacccaattgacattgactataaattcgacgttacaactcaccctaaacaaaataatgttgtttttttagggcgcattgcatccgttaaacgaggttggattttctgtgaaattgcaaaaaaaatacctgaatacaatttctatgttttaggtaaaatatttagagctgatgacaaaaatcatgacatcatgtctgaatatgaaaacattcctaaccttcattttgtaggacatgtcgaaggtgaaaagaaaaataaatatttacgcgatgcaaaagtactagtgaatagctctattcatgaagcactacctgtttcattccttgaagctctatcttttggtacattacttgttagtaatagaaatcccgacgatttaacatctaagtttggtatccatgttggtgaggtgctaggtaatggttttgataaagtagacctatttgtgaatgcagttagagaacttattgaggatgatgaaaaaagaaaattattatcaatggaagctattgattatgttaaaaaagttcacaatgttgataatttcataaagcacacacatgctatcatcaaagatgagttaacaaaataa

SEQ ID NO: 309855 - DNA, 435 bp, Proteus mirabilis; identical to SEQ ID NO: 296269

SEQ ID NO: 309856 - DNA, 138 bp, Proteus mirabilis
atgtttagtccaatagtatttttacgatatggcatgatggcttgtgaagaacgattagttttaattccggcaatgccattcgtatttacaatagcaaaagtattacctaagtcaggtgccaaagttactccactttga

SEQ ID NO: 309857 - DNA, 459 bp, Proteus mirabilis
atgtccatgataccatttaaagactatccaagtgctgacagatatttagcaactgcttattccttagctgcaagaaaagataactatcatacaaaaaatattgatacgcagcgtgcaagattacatcttttagtttctcttacaaaagctggcaatgaagcattccttgagtttgaggcgggtgacaaccttattcgtataataccaaatgacatttataaataccgtcaggtgcgcagatatcgtgaagtatatgagaaggtttatccaacatttaatgctaaacaaaaggtattttacgagcacgctgtaaaacgtattataaaagaatcagaaagccctgaattggttgaggatttgacttataaaattggtacttattggcttaacaagttgcgtgacaatttaaaattaatagtggaaaacatacaggaaaaaagatctaaaagtaaaaaataa

SEQ ID NO: 309858 - DNA, 264 bp, Proteus mirabilis
atgattaagactcgctctatggggtattttcataatacaaacatacgaagctacatagaccctgacacgtgggatgaagtttggacattcaaaagatatagcgagcgttatgtcttgattgatgatgtgggagggttaacatttgagtatcgatacgagttcttaggagaagaggatggctggataagtatgcctccgagtcgagaaggttctggattaatggaacaagggcttatgatagacgtttcaatgttagaagattaa

SEQ ID NO: 309859 - DNA, 489 bp, Proteus mirabilis
atgtcttttttattagttgctcaaggttataaaaacttgattgttacccgtacattttcaaaaatttatgcattagctggattaagggtaggctatggtgtggcagtccctgaggtaattagtgaagtagatagtttcgtttctattgataataccaatactgccggtgctgttagcgcattagcctcgttaaaagatcacgcttttgtggcatatagtcgcaagtcaattgatgtatcacgacaaatggtggttgatactttaaacgccttaaatatcgagtatgcaccttctcacgccaactttatttttcataaagtcaaaggtgatgtgaaaacttatcaagagagaatgaaagcggcaaatattatggtaggacgtgagtttcctcccgcattaggttggagccgtttgaccttaggaacccctgaggagatgagttattttgtcgcgacgttaaaagagtttagaactaaaggatggatataa

SEQ ID NO: 309860 - DNA, 162 bp, Proteus mirabilis
atggttgaaagtcatttagaagagggcaatcaatcattagaaagtggtgaacctttggtatacggtaaaagtgtcacagatgcttgtattgggtgggatgatacagaaacgttattacgccaattagccgatgcagtcgctactcgtcgtaataaatcataa

SEQ ID NO: 309861 - DNA, 246 bp, Proteus mirabilis
  misc_feature (231)..(240): n is a, c, g, or t
atgccctctcaattgatgaggacaagtgccgtcttcgctttcttgatttcactactctttactggtgtgagttttgcctctaccagtaccggcagttcccgaatgctgcaggcggatacattcaaaagcacgacaacctcgttgccagatttgaaaaaatatccctcgggaactcagcgtaagaaagcgtttttaaatgtcatagttcctattattgataacattaataannnnnnnnnncattaa

SEQ ID NO: 309862 - DNA, 195 bp, Proteus mirabilis
atgcttaaaagtttagttttagaacattttgggggaacggtaaaaacagcttcggcacttggagtttctcatagcgctgtttgtcaatggtcgcttattgttcctgaaaaacaagccttgaaaatagatagattaactaaaggagctcttaaatacagtcccgaattttatacaaacaataacaaaaccgtttaa

SEQ ID NO: 309863 - DNA, 648 bp, Proteus mirabilis
atggaaacagtaggagagagaataaagcagcgtagacgacagttaaaaatgactcaaaaagatatagctgaacgtgttggtatatcagcgtcagcggttactcaatgggaaagtgacaacactggtttatctgcagaaagtttattaaaactatcatccgttttgaattgtaatccaacatggttaatgttcggaacaggacttcctgaggatgatgttaaattacaagctgctatttataagtctatacctatcattagttgggtccaggctggagtatggactgaaacatactgtgaatcagatcctagtgattacaaatatgttgataccaacttaaaattatcagataaagcatttgcactaatcgttaaaggtcaatcaatgactacatacaacggggagttgagtattcctgaaggagcggtggttatagttgaacctgattatggttatctagatgatataaatggaaaaatagttatagcacaacaaaaaggtagtgatgaagctactattaaaaaacttattattgatggaccaaacaaatacttagctcctttaaatccacaatttaaccctattcaaataaacggtgactgcgttatagctggtaaagttaaacaagtcattataaatctagactga

SEQ ID NO: 309864 - DNA, 204 bp, Proteus mirabilis
atgaccactgaaccggtaatcataccgccagccaatttcactgatgcagatgttgttgattggatgaaagagaagctatcgtctatcaaagtcctcggtgagttaaacgcaagacgtgaagagctggtggataaactagcaaaactggatgctgaaatagcagagtacacaaataaaagtgctattcagatccaaattaaatga

SEQ ID NO: 309865 - DNA, 159 bp, Proteus mirabilis
atgacgaattcgatggattctaaatatccaactagggctgatttagcaaaagccaacccttacactgagcgcgataaattgtcagaagaagagcgtgaagaaagaagtcggaagtttaatgattctctatttttcggtaatgggtatttcaaactttaa

SEQ ID NO: 309866 - DNA, 462 bp, Proteus mirabilis
atgaaatacgggaaactctatgccgtcattgcgatggtaggcatcattgtgggtagttattgggtgattaactggcaagctaacaggattaattcactgacagataccaataaaaaactaactgtggctctcgaagaacagaggtctattaatactgactatcaagcacgcatagcgcgattaaatcaattggatattcaatatacacaggagttagcgaatgccaagaatgaaattagtcgcttgcgtgatattagcgagcgtcatcctgagcgggtgtacatcaaagccgagtgtcccaaagtcaaaaccactccctccaccagcttggcttatgcaaccaccgcccgacctacagacaccgctatccgaaattattggttactcagagagcgaattgcagagtcagaacagatgattaaagggttgcaggattatatcaaacaagaatgcatggaataa

SEQ ID NO: 309867 - DNA, 423 bp, Proteus mirabilis
atgaaaatgataaataaagtattaattattattactctgttatccttatcaattaatactcaggcattaatggaaagaactctagttataacggcaacatatgaatcttatgttgcatgcgttgcagcgaaagaaaatatagagtttgataatgtttatcttttaatgcataacaatagaaataaagtaaacagtgagggggatcaaataccattatcttttaatcctagatttgatactgagttacttcaacattatcatttaatttatgagcttacaaaagatgagagaatggtggattgtgatatgtttgcaagcattatttatgattctttgaaagatgaatttgatgtttgtgatatgggagaatattcacctatggataaaaactatgaggatgttgtgttatctttattaaaatag

SEQ ID NO: 309868 - DNA, 1203 bp, Proteus mirabilis
atgtcaagtaagctggtgctggtactgaactgcggtagttcttctcttaagtttgcaattattaacccagaaaatggtgaagaattcctttcaggcttggctgagtgcttcaaccttcctgaagcccgcctgaagtggaaaatggatggtcagaaacatgaagcggctttaggcgctggtgctgcccacagcgaagcattaaactttattgttaatactattctggctgaaaaaccagaactttcacaacaaatcgcagcaattggtcatcgtattgttcacggtggcgagaaatttactaaatctgtcgtcattactgacgaagtcattaaaggtattgaggcggctattccatttgccccattacataacccagctcaccttattggtattgaagaagcgcgtaaagccttccctcatttaattgataaaatggtggcagtatttgacactgcattccaccaaacaatgccagaagaagcttatctgtatgctctgccatacagcttatataaagatcacagcatccgccgttacggtgctcacggaactagccatttctttgtttcccgtgaagcagctaaaatgttaaataaacctgttgatgaactgaacgtaatcacttgccatttaggtaatggtggttctgtttctgctattgttaacggtaaatgtgttgatacttctatgggtttaacaccattagaaggtttagtcatgggtactcgtagtggtgatatcgatcctgctatcgtgttccatttacatgacactttaggtatgagcgttgaagatattaataaactgctcactaaagaatctggtttattaggtttaacggaagttactagtgactgccgttatgttgaagataactacgaaacaaaagctgatgctaaacgtgcaatggacgtttactgccatcgcttagcgaaatacatcggttcttattgtgcactgatggaaggtcgtttagatgccattattttcactggtggtatcggtgaaaatgcagcaatggttcgtgaattatcactgaaaaaactcgctctattaggttttgaagttgatcatcagcgtaacttagatgcacgtttcggtaaatcaggcaccatcactaccgataacagccgtcttgctgttgttatcccaactaacgaagagttagttatcgctcaggatgctagccgcctgaccgcttaa

SEQ ID NO: 309869 - DNA, 219 bp, Proteus mirabilis; identical to SEQ ID NO: 297174

SEQ ID NO: 309870 - DNA, 369 bp, Proteus mirabilis
  misc_feature (352)..(361): n is a, c, g, or t
atgccaaatagcgccctattgaaaggtgatcatattgtcatcttgctattgatatcgctatgctctttttctgtttctgcaaaaaaaatcattcaaggcattactcaagatagtgaaaatattgttgttgctaaaggggatattcccactcctgaaaaatttacaaccaatattcttaactatcggcagaaagctgttgatcagttgaccttagttgaaactgcattaaaaaatgtcattgttaacagtgaaaaaaatcaactgactgatgcccagctcgcctatcaacaagcgcattatcactatgaggtgatccgcccgattattgcattgtttggcgctactgaacgcnnnnnnnnnnttcagtag

SEQ ID NO: 309871 - DNA, 1476 bp, Proteus mirabilis
atgacattatcatttgctcgattacgcaaaccagtttattggtggataattggttatgcggttttatggattatcgtcagctatttatttgatcccaccgtaccttatgatgccgtagaagcggttaactggggtactaatggcggttggggctcacctaaaaacccttggtttgttggttttattatgtggccagccatttatggtggtattgattttagcttttattggtattttatccactttgtgatgatagccatcggcttattaggtgtttggaatttagcctataagttaaccaaaaattatcacctagcttggtttgccatgttaggtttaaatttatcaggaattattaatttcgatatcattccttataacgataattatattttagtgggttgctggccttgggcgctctatttctttttatgcgctatcaatgacaaccccaaatattggtgtggattcgctgcagtgatgggggtggctactatggggaaatactcctcattagccctgattggtgcggtattcttattaagcgtattagtacctaaagttcgtcaaagctatcgctccccttatttttactttgcaatagctatctggctggcgtttgtcatacctaattttatttggttgtggcaaaacgactttgccgcctttaaatgggtcgactcacaaatagaagcacgttttaatttacgtacgttacgtgccgctttaacggttttctatccagtgctactaatgtggggaattgtacgtctttatggtgggcgagttagttggcgtacttctcaagatagtcaattattgaattttattttgctattcccattagcgattatttttatttggtttagtttccatgaagggggacgtatcactgagtggttacaaccttttatgtcagtggctaccgctctttttgtcggctcaattagtgtcatacctaagcgttcattacgtggtgtgttatatggtttagcggtttttggtatgttagtggtatctggttatacggtagtacaagctgctaatgtgcgtaatgcgggtcaaaagtttattggtgttaaaacctttgtacaagatgtcgagaatgcttggcatcagcattatcatcagcctttatcttatgtagggggtgagtatatgcatgagtgggtcactttttatggcaaagatagaccgctatcagcccaaccctggattgtcgagaaagatgttcagccccctaatatttataaccgtcatattacgttggcgcaattagaggacaaaggtgtcttattgattggcccggtggggtattactgtgataaagcccatttcgatgcgggattacaatattggccgagtttaaaaatagcagatactcaagaagtcatgtttcgctctgagcctgatgcactggcagagccggtatgtatcgcttttgtctcgcctaaacagcaatcagagaagttgtaa

SEQ ID NO: 309872 - DNA, 411 bp, Proteus mirabilis
atgcgttatcagcaagaaaatacgcctttagccattattgccggtaatgaatatggatcaggctctagccgtgactgggccgccaaaggtacacgattattaggtgtgcgagtggtgatagccggatcgtttgaacgtattcaccgttctaatttgattggtatgggagtattacctttagaatttcctaacggtgtatcacgccagactttagggctcaaaggtgatgaaaaaattgagataacggggcttaattcgctaacaccgggtcaagatgtcgctgtcaatattacttttgcagatggtcgccaagaaactattatggctcgttgtcgtattgatacgcaaactgagctggcttattttgaacatggcgggatcttgcattatgttattcgtaatatgttgtaa

SEQ ID NO: 309873 - DNA, 201 bp, Proteus mirabilis
atggataagagctttcaaggtgaaattcccgcagaattattagatgatggcgtgagtgctgttatccttaattatatggctaactttattaaaaatagaacgacaggtgattattcaagccataataacaactttttcttgaatcttaatggtggtgtaaatataggcccttggcgtttaagatcagcgttcttcaagtga

SEQ ID NO: 309874 - DNA, 1029 bp, Proteus mirabilis; identical to SEQ ID NO: 295605

SEQ ID NO: 309875 - DNA, 741 bp, Proteus mirabilis; identical to SEQ ID NO: 295604

SEQ ID NO: 309876 - DNA, 1152 bp, Proteus mirabilis
gtgttttctataaataaactcaaaataataacgtttgttattttaggaggtgtattatttaattcacatgcaaactctttaaagtatatattaaataattcattaaataatgcgcctgagttattagaagctaaagctgatatagatatagccgttgcaaaagttaatcagactagagctcaacattttcccgtaataagcgtaactggaaataaattattaggacaatatcatagagataaaagcgactatgataataatagttttattccaggattaagaggtgaattaaatatctattctttcggtggaatagaaaatgatgttgaacgtaatgaaaaagaacaactctattatcaatttaaatatagcgaaacgaaagaaaatgtcgcttacaccatatcagatctatatttaaaagcattgctagctaaagaatctattgcggtaaagaaaaaaagtttagatagacataataagattatatctgaattaaatgtgatagcccgtaatgatgaagggcgtgtttctgaatatgttcaggcagaagcaagaaaaatattagtagaacaagatattaactattatgaaaaagaattaatgacaacgttaagtacgttatcaaaatatacgggtttccccgttggtgaaagcgatcttgtcaatccttttgatggaatgacggtcagtgatatgtatagcgaattcactgcggaaaataataatcaaaatccagcttatctcgtgagtcaggctgatatcgatgctaaaaaaatgggcgttaaagtagaaaataaaaaacaattaccaagaattaatttaactggaaatataactaaagatgatcgtcagataggcattgatgtgacatgggacattattaatttttcatcattatattctattgatgaaaaagtaagtcagttaaacgcggcacaacagagaatggagagagtgattagagatattgaagaagcaagacgtttatcagtaattaatatccaaaaaagtactcaaaaattgaagatattagatgcacaaattttatcatcgacaaaagtagtcgatttttatcaattgcaatttaatgttgcacgccgttctttgttagatgttttgaatgcagaaaaagagttacacgacattgagtga

SEQ ID NO: 309877 - DNA, 804 bp, Proteus mirabilis
  misc_feature (783)..(792): n is a, c, g, or t
atgagtgatcgctatgttattgaagctttattgcgtccagcggtcgaatttaataccgctatcgtgacagcgtgtgcaagttatctttgtattactgcaccttgggcaatggctttagcaccatctgttagttatgtcacggcatcagggtttgctattttatcaataaggcgagttattcaaggaagtcgcgttttacgttatcgtcgtaatattcgtcgtttaaaacgttatgtgatgtcgagtaacaatatccctgtaagccatcatcaactcttcttaggaaaagggttcttatgggaacaaaagcacacacaacgattattagatacgttacgacctgaggttgctaaatatattcgcccacctaagctgtatcgtgtggcacgtcaatttgaacaacgctatgaatatcatttcccttcactatgttcattattagcatccgattcgatatttaatcctgttcgcccattaccacccgttggcgggaaccctgcaatacatgggattgagttaaaagaggtaaatgtctctataaacttaagtgaacgagtggggcatatgttggtattaggaacaacgcgagtgggtaaaacacgttttgctgagttactgatcacccaagatattcagcgaggtaatgtcaccattgtttttgatcctaaaggtgatgctgatttattaaaacgaatgtatgccgaagcgcatcgagctggacgagataatgagttttacgtttttcaccttggatggccagatatcagtgctcgttataatgcnnnnnnnnnnagacagttataa

SEQ ID NO: 309878 - DNA, 276 bp, Proteus mirabilis; identical to SEQ ID NO: 297101

SEQ ID NO: 309879 - DNA, 333 bp, Proteus mirabilis
atgagtgcatttgaaagggatgctattattcaaaatattatgcaggaattaagatatcaatatcaaatttgctcaacgagccatattaaattgatggcttttgagcaagccgttagttccgctaagttacaattaaatgcaacacgaaaaagctatattggtggtcagcgaacgatggttgatgtgcttaatgcggaagagcttttatatagagcgcagcaagatttaatcaaagccaaatatgattatattcaagcttgggcattattacatcaatataccaatactctagatattgaaaaaataaaaattattgaaaactattttcagtag

SEQ ID NO: 309880 - DNA, 492 bp, Proteus mirabilis; identical to SEQ ID NO: 305263

SEQ ID NO: 309881 - DNA, 849 bp, Proteus mirabilis
atgcaacaccaaaatactcaaaagaaaatactacgtactatttgtccagatgcgaaaggacttatcgcaaaaattactaatatttgttataaacatcagctcaatattgttcaaaataatgagtttgttgatcatcgcactggccgcttttttatgcgtactgagctagaaggcatttttaatgatgaaacctttttagccgatttagatgatgcacttccacaaggctcacagcgagagcttaatactgccggtcgccgccgtatcgtcattatggtcactaaagaagcccattgtattggtgacctcttaatgaaaagcgcttttggtgatctggatgttgaaattgcagcagttattggtaatcacgacacgctaaaacaccttgttgagcaatttgggatccctttccatctcattagtcatgaagggttaacccgtgatcagcatgatgaaaaactgatagcacaaattgaccaatacaaacctgattatgtggtattagctaaatatatgcgtgtattaacccccgcatttgtacaacattacccaaatcaaattattaatattcatcattctttcttaccggcatttattggcgcccgcccatatcatcaagcctatgaacgtggtgtaaaaattattggcgccacagctcactatgtaaatgataatttagatgaaggccctattattactcaaaatgtaataaacgtagaccacactttttcagcagaagatatgatgcgcgcaggacgggatgtagagaaaaacgtactaagccacgccctctattgggtgctctcgcaacgtgtttttgtttatggcaacagaacaattattttgtag

SEQ ID NO: 309882 - DNA, 534 bp, Proteus mirabilis
ttgactcccaaggaagtcagtgccctactcacagctgcatggtatgagcaatggaaaaatttattccaatttgccattaatactggattaagaagctctgaactatgtgcattaagatggagtgatataaattttttagagaatattgtacacgtacagtccgccagcgtcgtcggtattattaagaaaaccaaaactaaagccggcaccagaaaggttgagttgaacaatgaagccataaatgcccttaataaccaaaagcaattcacgttcatgaaggatggcgtaattttcgaagacccaaaaacaaataaagcatgggtaccaacgctgaagaaggcaggtattcgatatcgtaatccttatcaaactaggcatacattcgccacacgtcatataagccaaggagccaacttgttttggctagcaggacaaatggggcataaaggacccgagatgttgtttaggcactatgggggatatcttaaggagtatgatgggaatgttataattaatgctaaagagcatgcctaa

SEQ ID NO: 309883 - DNA, 948 bp, Proteus mirabilis
atggctaatttatataagtacatgagtatggacgttgctgatgtattattagtagatgataataattttagcattaaattttctcatcttcacgagtacaatgacccttatgagttttttttaactattagctatcaaaggtctgcacaagaattagctttttataatgaaatgattagtatgatccaaaagcaaccagtaagctgtttttcaaaaagccctataaatattcctatgtgggctcattacgcaaataattccgcaggttttgtcatcgaaatcgatgaagaaaaactcatgtctcatatatcaagtataggttttgaaaacgtcagcagtattaatgatgtgcaatattacgacactccaagtgaagaaatagagcaatatgtacaacgtgcatatcatatatgtaaacctcgttacattgcttacttgcagagattaattcgtatttctgcgtaccttagaaaaaaaacatgttggaattatgagctagaacgacggttaatattgagcgatgatgcgcttataaaaccaaacgataagttaatgattttagcagtccccttaaactgtataaaatcaataataattgggccaaaagctgattctgaattaaaaaataaacttactaaagtaagcaaactagctcaatgcaagatatatcaaatgattattggtaaaagtacatccacgccttattttattgatgataaaaataaaactttaatattcaatggacttgctattaaaaaacagaaaagctcatgcaaaaaatgctttgagcctgtaagtccagagcaaaaaatttgttcatggtgcagtatcacacaaaaggaaagaaatgatgctgcatatcgtaattcatttagaatgctcgatagagcaggaatattagaaagctacttaaaaaatcatggtggaataatcagaaagacaccttaa

SEQ ID NO: 309884 - DNA, 423 bp, Proteus mirabilis
  misc_feature (20)..(29): n is a, c, g, or t
ttggttgggagacacgccgnnnnnnnnnnccgtgttcctattcctgaatcacaacaaaacaagttaggtacgatttctcatcaatccggacaaaaatctcgcccacgaatgttattaggggaaaattttagtctgggctcacacatatatgactgcaatggaaaatgcaccatcgaaatcagtgaattaagtttagaacgctatatgcgttttttacctaacggcagtgatttcgcaccattagttgcctttgtttcttacatttttcatgagcaattagcttgggatttacgtcttagcattgctgaaaagcaagccgaagggttccgtttgggtcaccaacaacacaaccaattaggctggcaaagctttttaggtcaacccgcaaagaaaccggatgtcaccattacggtattggaataa

SEQ ID NO: 309885 - DNA, 675 bp, Proteus mirabilis
  misc_feature (648)..(657): n is a, c, g, or t
atggccagcacaaatcaaccagcacatactgaagtaatcgatcgttggctggaacaagctggctcatcggtaacagagtataatttttatcaactcgttgaattgttaaataaaataattcatcaagatgtcaactcgatggaggatgacagcggtattcttcgctttaaatcttattcaaatattgcatttccgacgcgagatgtcatttccattgaaaaaaataatgtcgaacaatatgaattagaagtcgcttttttgggcttacaaggaagtcagtcccccctaccaggctattatctggatgagtttgcttgggaagatgcacaacagatagaaggtatctccgcttttctcgatatcttcaatcatcgtctgatagcgttactttatcggatctggcgcaaatatcgttactacatttgctttgaaaatgaaggtcaggattcattttcacaatatatgttttctctcgttggattaggtaatggagctaatcgcggtcggatcaaaatcaaccatagcaaaatgctcgcttatgctggtcttttggcgagtccaagtcgctcttctgatgtgattagtagtcttatatctcactgtttcgacttagaaaatgtaaaagtaattggttgggagacacgccgnnnnnnnnnnccgtgttcctattcctga

SEQ ID NO: 309886 - DNA, 1626 bp, Proteus mirabilis
gtgggctcggagatgtgtataagagacagtcctgatacttcgcggattatggatgggctatcttatttatcgggtaatttacgccagcaaatagatagacaatttcctgagttaactaacagtttagccaatatgctttggccaaactacgcgcgccctgtgccaagcatgacgattgttgaatatcatcctaattatgctcagtgccaacacgcaacaaaaatttcagcaggacaaccttttagtgccactccactttatgtgcaaagtgaggaaacaaaccacgagacgttatttcaatgtcgatttagtcaaagtcgcgacctctggttaatgccgacaaaaatcagtaacattttgcagcaaacaaccgccattgaaataacatttgagttagcaacaaaacagccacttgccaatattggcttagataaattgtgtttttacttaaatggtgcgccatttactacaaatcagctctattttttattaagccagcatgtgcagagtgcctctttagtcacagatgtacatacgctacctcttactcacttttcagttacgcctgttggttttcaaaagcaggatgccttacttccatacccgaaaaatagctatgatggctatcgtatactgcaagagtttttctgttttcctgaagcctttctctttctagatattcatggtttggatgacattcctttggctatcgaagcagagcaattcaaactggtgatcaattttgatctagaaattcctgatggcgttattctttacgacgacagtattaaacttaattgcacccctattgtgaatttatttcctattgatagtgaagcaataaatttgacggggaaaagtgaggagtatgttttaagtcctaattaccaacttactgaatgttttgatattttttcgattaatgaggttagagggttacgttatcctaatgatgctaaaccttatccgatcacctatacagcatttgaaagtttttatcatcaaaaccatcagactcaaaatcatggctattaccgtttaaagataagtcaaaatgaacagttatacggctattcccatcgactttcttttgttcgtcagcaagagcctcagttacaacagtgtgaagaaaccgtttctgttgcactcaactgtactaaccgctatatcgcttcccagttatcgacgcgttctatcgatttagatagtgcatcaattccttatggggctttatctgctaagaatttattcgcaccaacactgcctttatatccattattagataaaacattatattggtctgaactctatgctttaccgtctgtttataacacacaggttgcaaggcaatcacaaaaacgcctagatgcattagttgatttacattcagagcatattgagcatatctacaaaggccttcctgttcgcggtctgaagacaacgttagttgttcatcaaaatgcgtttctttcggaaggaagtttattcctattttgtaccgttatcgctcaatttttcaccttatataccagcattaatatgtttcatgagttggaagttattaaccttgataataaggaagtttatcgatggccagcacaaatcaaccagcacatactgaagtaa

SEQ ID NO: 309887 - DNA, 300 bp, Proteus mirabilis
gtggagacatcaaatccgaaagagtggtatgaaaacccgtttaatatcgatggtgtgaccaaaggcatgtacaaggggattaaacagattgatccacaatgggtaacacctgatttaacggacgccaatgttcaagatcctgccagcatggatttctacgaaccaacctattatgtgattggtgggcgcaagtatcacaaatctcactttattaagtttgtaccgtttcctgtgccgaatgtcttgaaaccaatgtacaactactttggtgtttctgttcctgagcgcatttatgagtga

SEQ ID NO: 309888 - DNA, 942 bp, Proteus mirabilis; identical to SEQ ID NO: 297431

SEQ ID NO: 309889 - DNA, 150 bp, Proteus mirabilis
atgaacacgcttcccatttattatgttaacgcttttacttcaacacctttttccggaaatccggctgcggttattttgttagataaatggctacccgatgacacactacttaaattgccaatcatattcgctggtttacgcctaaagtag

SEQ ID NO: 309890 - DNA, 423 bp, Proteus mirabilis
atgtcccgcttgcctttgcgttcaatcttgcccgattttttaacttccgttgctcgtgtacttctaggtacactgcgcgacggcttgaaaaaatcgaccaaccttgttagcaaattcggcgctattttcggtgatgttcttacatcactcagtgcgaggcacttgagtgatggggctcctactgcttgtacgtacacggtttcaggttctttttcactcccctcgccggggttcttttcgcctttccctcacggtactggttcactatcggtcaatcaggagtatttagccttggaggatggtccccccatattcagacaggataacacgtgtcccgccctactcgtcgagttcacaataacagcatcttcagatacggggctatcaccctttactgccggactttccagaccgttctcctga

SEQ ID NO: 309891 - DNA, 186 bp, Proteus mirabilis
  misc_feature (162)..(171): n is a, c, g, or t
atggaacttacctttttaggcactaatgcaggcgtaccttctaaagatcgcaacgtcaccagtatggtgcttgatttacaaaataaacaaaaaagtctgtggatgttcgattgtggagaggcgacccagcatcagatcttacatagccatgtaaagctatcnnnnnnnnnngctatcacgcattaa

SEQ ID NO: 309892 - DNA, 423 bp, Proteus mirabilis; identical to SEQ ID NO: 298890

SEQ ID NO: 309893 - DNA, 387 bp, Proteus mirabilis; identical to SEQ ID NO: 301411

SEQ ID NO: 309894 - DNA, 717 bp, Proteus mirabilis
ttgcaaacgattaataacaaccccgatgatcggccggatgaactgattgcgtatcgtatttatattaatggtcaaatgattatttcgagccgacatcgtcgcgttaattccgttgattcggtgatccactctttagaagtgggtgatggtccagaaaatagtggtagttggttgatcactatggccgatgcagtgacagatgaaataggtgattttgttgaaacacttcatgaccaattaattgagttggaagatatgatcctcgatcagcaaattccggctcgaggtgaattggcattgctacgtaagcaactgattgtgttacgccgttatatggcgccacaacgtgatgtattctctcgactctctatcgaaaaattaccttggatgagcgacagtgatcgcattagtttggttgaaatatcagaacgtctctcgcgtcgattagaagatttagatagtagtatttctcgtacagccgttattgctgatgaaattacttcaatgatggcagatgcgatgaacaggcgcacatataccatgtcattaatggcgatgctatttttgcccacgacctttatgacaggactatttggggttaatttaggggggatccccggtaatgagtttccttatggctttgctatattttgcttttcactgtttttcttgattgtgattgttgcttggtggttaaagcgtagtaggtggttgtga

SEQ ID NO: 309895 - DNA, 264 bp, Proteus mirabilis
atgtctgataaagcggtgatcaataccctgataaaattaaaaggtattggtatttggacagctgaaatgttattaatttcatcacttaatcgtcctgatattttaagttggggggatttagctattcagcgtggtatcatgcgtttatatcgccatcaaagcttagatagaacacgctttgaacgctatcgtaaacgttattctccttatggttcaacggcttcactctatttatgggcattatctaaagaaagcgcagactaa

SEQ ID NO: 309896 - DNA, 150 bp, Proteus mirabilis
atgttacatcaagatatgatcaataaactcaatgaacagctgaatcttgagttttattcagctaacctttacctgcagatgagcgcttggtgcgatgataaaggatttgatggcgctgccaaatttttaaaagcacattcccgtatttaa

SEQ ID NO: 309897 - DNA, 138 bp, Proteus mirabilis
atgtctattgcaaaacgcaccaaagacaaacgtattgcgttaggtttaacacaatctgagcttgctaccttggcgggtacaacgcaacaatcaattgaacagcttgagaggggtatcgttatcccattcactgactga

SEQ ID NO: 309898 - DNA, 153 bp, Proteus mirabilis
atggcacaagtggcgcatcttctcgcgatgataaatcgtgatccgaaaacgtctccaccggaattgatggattttatgccgatgtggaagaagaaaatcacggaagaagagctgtgggataatgtcactgagagtgtattagctaatcgatag

SEQ ID NO: 309899 - DNA, 639 bp, Proteus mirabilis
atgtcatctacctattttcactctagcctattagcagctacactgttttcagttacgttaacagcacctgcttttgcttctgaaaatacgcaaaacacacctcagactattacgacaaaaaaacctcagccagcagagaacactttctcagaaaaaaatgaggaaagctattggggaaaatttaaacgtaatcttacccaaacttgggataatgaccaatataactactatttaccggtatggacttggcataaccgttttacttacgataaagaaaaaaccaatcgttataacgaaacgccttggggatttggtatgggtaaatatcgttatgataatgagggtgattggcatggcttatatgctatggcctttatggattccaataatcgtgtacaacctattatgggctatggttttgaaaaaatgtggtatcccggtggagatagagagggttttcgcatgggggcgggctttaccttaagtgtgactgctcgtcatgagtataactatattcctatgccattacctctaccgctagtgtcagtcggttatggacacttatcattacaggcgacttatgtaccaggaacctataataacggtaatgttttatttgcttggttacgttggcagtga

SEQ ID NO: 309900 - DNA, 684 bp, Proteus mirabilis
atggagcagatcaaaatagccgttgctaacaataccgataatacaattgaagcaaataatattattaatcaatctactgacattgttatggatggcgctaatgtcatgaaagaagctgtattatcgatgaagaaaatagaacaaggtgcagtgaaagttggggaaattaatgatgttattaataaattagccaatcaaactaatattttggccttaaatgctgccgtagaagcagcaagagctggcgagcaagggcgtgggttcaccgttgtggccgctgaggtacggaacttagccgcaaaaagtgctgaagcagcaaaagagattagccaagttcttaaagcatctatcaatgatgttacctatggtacaaatttagtgaataaaagcggtgagtacatgcaagagattgtctcttccatttcaaaagtaaacaagatcatgcaagggattagtttagcgtcggaagagcaacgtcttggtgtcgaacaaattgcagtagcaattaatcaaatggatacggtagtacaacaaaatgcctctttggtcgatctcgccgcctcttctaccatgatgttaaacgataaagcacaagtgctgatggataatgtcgcagtctttaatattgacgatcttgaaaaagagccagagcagaaacaagagttaatcaatgaacaagaataa

SEQ ID NO: 309901 - DNA, 351 bp, Proteus mirabilis
  misc_feature (279)..(288): n is a, c, g, or t
atgtcaattttacctgagcaaaggaaggctcatttattatcgcgcgtagcggaatatggaaagttaagtaagaagtctcaattcggcggttatagcttaatggttgatgaggttatctttgcgattactgctgataatgaattttatttaaaagggagtggttttgttgaaacactctataaagcaaacaacatggatgcatacgtctatctaaaaaaaggtatccccattacattgcgctattatcgtattacgcaagcaatatggcgtaatagcgcnnnnnnnnnnatagccctaagctcaatcaatatatcggttttgcatatcactatagtactcaggagtttttag

SEQ ID NO: 309902 - DNA, 1212 bp, Proteus mirabilis
gtgaaaaatcgcactataggcagtgtatttattgttgcaggaacaacaattggtgcaggaatgttggcaatgccacttgctgctgtgggtattggctttagtaccatggtgttattgctggtgggcttatggctattaatgagttacaccgcgcttttattagtggaagtctatcaatacaacgatccccatacaggccttggctctattgcgaaacgttatctgggtattggaggacaagtcgttacaggtttagctttgctacttcttatgtatgctttaacaacggcttatatcagtggtgcgggtgaactattagcttcgactttatcttcttggattggtcataagataaccatcacacaaggtatcattatctttacagttattggtggtgcggtagtcggtattggtaccacttctgtggatatgattaaccgcttactctttacagcaaaagttattttcttaatttttatgctggtagtcatgttaccccatgtggaaaaagtcaacttaacctctatgcctatcgctcagggactcgttctttctgcgatcccggttatttttacctcttttggtttccacggtagtgtacctagtattgtcagttacatggatggcaatatcaaaaaactacgcctaatatttatcgtaggtagcgcaatccctcttattgcttatattttatggcaattagcaacattaggagctattcccaccaccacctttatggggattttagcccaagaatctggcttaaatggtctactcaccgctatccgtgatgtggttgctacaccgcgagtcaatattgctgtcaaccttttcgcagcccttgcactcgccacctctttcttaggcgtagcattaggattatttgattatctagctgatttgtttaaacgcagtaatcgcgcatctggtcgttttcaatctggtttattaacctttgttcccccgctattctgtgcgttatttttccctaactttgtgcaagccttagcctatgcagcaattgctttatctattctcgcactattattaccagcacttctggtatggaaagtaagacagcaaaagcagactacagagcattataaagttaaaggcggtaagccagccttagccatcgtatttatctgcgggttagtagtgattggtattcaaattgcgattacctttaatatattgccacaagtgggttaa

SEQ ID NO: 309903 - DNA, 1041 bp, Proteus mirabilis
atggataaaaaaattaaaaaaagcctagcacgcgtgatcaccattattgtttttttgataacgctcattttattatggcaaagtattcatatatcggcattaaatcctcttagtgaagatgccatcattgatgcaaataaaattaatatctcagcctcggtgcctggacgcattgctgctgtttatgtcaaagaaaatagtaaagtcaaaaaaggcgatttactgtttacacttgatcccacaatgtacgcactcagggtagagcaagcaaaagagcaactacagattgcacaagcgacattaagcaataagcaacgtattattattgcggaaacatccaattcagaagtggcacaagagcaaataaaacgtgcgcaggtcaatttatcattagccacacaatcattaaatcgattagaacctttattagcaaaaggctttgtcacagcacaacaagtcgatgatgctcggacgttaaaacatgatgctgaagtgacattaaaacaagcacagaaacagaatgtggcatctgaagcacttattaataataccgattcagaagaagcattagtcaagtcattaaaaacatcgcttgccatggcagagtgggagttaagtaatactgaggtaagggcgccaagtaatggatatatcgcaggggtcgttttatctcccggtgaatttattttgtcagggcaatctgtttttaccttaattgactctgatacttggtttgcttcggcctattttaaagagacagatttaaataatataaaaattggtagctgtgtggtgatttactccatgattgataatcaacaccccattaaaggtaaagttgaaggaattagtcggggagtcatgtcgaccgatctgattaatattccaagagacttaccttatgtacctaaatcattaaattgggttcgggttgagcagcgttttcctgtcaaagtcattattactgaaccaccagaagcactcatgcgcatcggtgccactgctactgtaaatattgtacctaacgatgatgactgttaa

SEQ ID NO: 309904 - DNA, 2460 bp, Proteus mirabilis
atgcgagtgttaaaatttgggggaacttcagttgccaatgcagaaagggtgctgaatgttgctgatatcgctgagaaaaaacgagagcagggacaagtcgctctggtattatcagcacctgccaagataacgaattacttggtggcaatgattgaaaaaacggcagaaggagaagaacctctcactcaagtacgagaagcagagcaaatcttcgctaatctattgcaaggtttacgagaaaatcaacctggttttgattaccaaggtttaaaagacaaagttgagcgtgagtttgctgagattaaacatatcctgcatggtatctccctattagggcaatgtcctgatagcatcaatgctgcgatgatttgtcgtggtgaaaagctttcgattgccattatggagtcggtgttacaagctagaggatataacgttaccgtcattgatccggttaaaaatctccttgctcaaggtcattatctcgaatcgacagtggatattcctgaatcaactcgccgtatttccgcccttaatattccgaaagatcatatgatcttgatggcaggtttcactgccggtaatgaaaaaaatgagcttgtggttctcggtcgtaatggctcagattattcagccgccgtattagccgcgtgtttacgtgcacaatgttgtgaaatttggacggatgttgatggtgtttacacctgtgatccacgcctcgtcccagatgcacacctattaaaaggcatgtcctatcaagaggcgatggaactttcttactttggtgccaaagtccttcatccacgcactattgcacctattgctcaatttcaaatcccttgtttaattaaaaatacaggcaatccagaagcaccgggtacgttaattggtgatggtcaaaaagatgacagcacgccggtaaaagggatcactaacctgaataatatggcaatgatcaatgtatcagggccgggtatgaagggaatggtgggtatggcggctcgtgtcttttccgtgatgtcgcgagcaggaatatcggtagtattaattactcaatcttcatctgaatacagtattagtttttgtgtaccgcaaaaagagctaattagagcgcaaaaagcactgtcagaagagttctatctagagttaaaagatggcgtacttgatccgttagatattatgaacaatgttgctatcatctcggttgtcggtgatggtatgcgcacccttaaagggatctcagcccgtttcttctctgctttaactcgaggcaatattaatattgttgctattgctcaaggctcttctgaacgctctatctctgcagttattgctaatgatgcagcgacgaatgcggtgcgtttatgtcaccaaatgctctttaacactaaccaaatcgtagaagtctttattgtcggtgtcggtggtgttggtagcgcgctaatcgagcagatccatcgtcaacaagcatggttaaaaaacaaacatatcgacctacgtgtttgtgggattgccaattcacgtgcgatgctaaccaatatgcaaggtatcgatttagataattggcaacaagcgctacaagcagctaaagagccttttagctttagtcagcttattcgcttagaaaaagagtaccacttcctcaatcctgtgattgttgattgcacttcaaacgaaatgattgcacagcaatacgccaatttcttacaaaatggctttaatgttgttacgcctaataagaaagccaatacgatgtcgatggattactatcatcaaattcgccaatcagcggaagcatcacgtcgtaaattcttatatgacactaatgttggtgcgggtttacctgttattgaaaacttacagaacttgcttaatgctggcgatgagttggtgcaatttaatggcattctttctggctcactctcttatatttttggtcagctagatgaaggaaaaagcttgtctgaagcgacactttctgcgaaagaaaaagggtttacagagccagatccaagagatgatctctcgggaatggatgttgctcgtaaactgcttattctcgctcgtgaagcgggctatcaattagagttgagtgatattgatgtagagcctgttttacctagttcatttgatagtacaggtgatgtcgagagtttcttaaaccgcttacctcaagtagatgttgagtttgatgctaaagtcgaagaagcccaaaagtcagcgaaggtattacgttatgtggggatcatcaatgaggggaaatgccaagtcaaaataatggccgttgatgctaacgatcctctctttaaagtaaaaaatggtgaaaatgcgctagccttctacactcgctactatcaaccaattcctttagttttacgtggatatggtgcaggaaatgatgtcactgctgctggggtatttgcagatgtattacgtacactatcatggaaattaggagtttaa

SEQ ID NO: 309905 - DNA, 930 bp, Proteus mirabilis
gtggttaaagtttatgcaccggcgtcaattggcaatgtgagtgtcggttttgatgtgttaggagccgcagtttcgcctattgatggtcaattattaggagattgcgtaaccgttgaagcggcgcaagaatttcaacttcacagcaaagggcgctttgttagcaaattaccttctgatgctaagcaaaatattgtttatcaatgttgggagctattttgtgaaaaattaggtaaacaattacctgtctcgatgacacttgaaaaaaacatgccgataggctcaggattaggatcaagtgcttgttctgttgtggctgcactcgttgcattaaacgaatttgctcacaaaccatttagtgaaagccacttattattaatgatgggagagctggaaggccgtatttccggtagtgtgcactacgataatgtcgcgccatgttatttaggtggtctacaacttattttggaacaaaacgacattatttgtcagtctgtgccagcttttgacgattggtattgggtgatggcttatccggggatcaaagtctcaacggcacaagcaagggctatcctccctaaacaatacgataaagctgatattattaatcatggtcgttatttatctggatttattcatgcttgtcatacacaacaaccaaaacttgccgcaagcttaatgaaagatgtgattgcagagccctatcgaacacagttgctccctggttttgataaagcgagagaggctgcattacaaaaaggcgcgcttgcatgcggtatttcaggctcagggccaacgctgttttctattactgattcattggctattgcccaagatgtggcgcaatggttacaacaacattatgtacaaaacgatgaaggctttgtacacatctgccgtttagatactcgtggcgcaagagagatagggtaa

SEQ ID NO: 309906 - DNA, 1299 bp, Proteus mirabilis
atgaaattatataatttaaaagataaccaagaacaagtcagctttgctcaagcggttaaacaaggtttaggaaaacagcaaggactcttttttcccaaagacttgccttcattttctcaagcagaaattgatgcgctattaaaattagactttgcaacacgcagtagccgtattttaagtgcttttatcggtgatgaaattcctgctgatgtgttagcaaaacgtgtgaatacggcatttgcttttcctgcgccagtgacacaaatagaagaggatattagttgccttgaactcttccacggaccaacgctggcttttaaagactttggtggccgttttatggctcaaatgttatcagaagtcgcgggtgaccagcctgttacaatattaacggcgacatcgggtgatacaggagcagcggtcgctcatgctttctacaagttagataatgtccaagtcgtgatcctctatccccaaggaaaaatcagcccattacaagaaaaactattttgtacattaggggaaaatattcatactgttgctattcaagatgactttgatgcttgccaagcattagtcaaacaggcatttgatgatgaatatttaaagaacaccatgcatttaaactcggctaactcgattaatattagccgcctactggcacaaatctgctattactttgaagcggttgcacaaattccagctgaaaaacgtcaacaattagtcatttctgtaccaagtggtaattttggtgatctcactgcaggattactggctaaatctatgggattgcctgttaagcgttttattgcggcgaccaatgtgaatgataccgttcctcgttatttagatagtggtaaatgggaaccacatcggacaatagcaacactttcaaatgcgatggatgttagccagcctaataattggcctcgtattgaagagttatatcgtcgcaaaggttggctgttgtctgatctttcgcatggggctgtgagcgatgaaacgacggaagaaactgtacgtgaactggcacaaaaaggctatatttcagagcctcatgcggcggttgcttatcgtctattacgtgatgagctacaagaaggagaatatggggtatttttaggtactgctcatccggcgaaatttaaagaaaatgtcgaacgtattttaggtgatacattacctttaccaaaagaattagctgagcgtgctgataaaaaattactatcgcatcttttaccggcagatttttctcaattaagagcatttttgttagaacgagcacctaaattaatataa

SEQ ID NO: 309907 - DNA, 2535 bp, Proteus mirabilis; identical to SEQ ID NO: 300680

SEQ ID NO: 309908 - DNA, 3201 bp, Proteus mirabilis
gtgtctgaaaaaatagacttttattcaggtaaaaacatttatatttcaaatgtaataattaatgaatcaaatgaaaaaagtttatcagcattagagaatattaaaataaaacgtgatgagtctttatttttcaatctaatgccaacttttagagatgaacaatatattccagcgtttttatttaatatggggctttggaaaagtaagaataatataagcttgatggctggtaaagatattgttagtcagggaataaaatattatagtaacaaagaaataacttttaatgcaggacaagatatttttcttgcctcaaaattaataaaagaagccgctccttttttcagtgatattcattacccccaactacaatctaaattattttcagataataaccttattttaaatgccgcgcgtgatattgatttaagttcaacagtattaaattcaaaagataaagttattgtattagcgggtagaaatataaaactgggtgcaaatgcttattccgccatcaaagatccccacgaagatgcgcaagacattcaatatgccaccacatccattatgggaaataaaggtatttctattgcatcatcaggctcactcacaacagaaggaagttcacttaaatcagagggggatattgctatttccagtggtggcaatatccaattgggatcagtaagaacacattttcgtaaagagtcggactcagagttagaagaacttcgtaaacaagtcagtactgaaattaatagcggtaatcatctaacactattatctgagggcagtattttatttcaggcctctcaattggctgctaataaaaagatggatattgctgctaaaggtggatttctttatgcacaggcaatggaagaatccagttactatgaagaagaaaagaaaaaatgtaattggtggacactgtgtgcgactaaaaagaaatataccaaaacatttaataacacaacgaataaagttaccgagtttattgctaatgacgatattaatttaattgctaaagatgatatcactttagaagcaagcaaattagagacagcaaagaatgccaaattaaccagtaaaacaggaggcattaattttaaagcggtgaaagatactgcttttaaacaagttattactcgttcaaaagatatatatatcactcaacgtaatcagggatacaccaagggaacatggctattacctgaactctatattggcggaaagctgactattgatgcgccaaaaggcatatctgcagatattaaagccaaaaaagagcaatctttagagcaggcattaactgccttaagtaacacaccagaatatgcttggcttaatgcgctccaacgtcaagaaaatattaattggaatttagtgaaagacacttattccagttgggatgataaaacccagcagttaaatccagttgttggtgcggttattgccatcgcggtaggggttgcaacttatggtacggcaacagctgcctcaataggaggaatggcaagtaatgcaactattgctgcaggagcctctgcgggggttgcgtcaacggcatcagttgcggcacaagccggttttgcttctttagtttcgcaagctgcggtctctttagccgaaaatcaaggcaatatttctaaaacatttggctccttaagtcgcagtgatacggtgaaatccattgtcaccagtatggccgttgcaggcaccttgcaaggtcttgaccaatttatgggttgggatcaagcaatacaggggggaacattaccgacaacaggcaagttgcttgcgacggataatgccacatggactcaagttgctcaacgcgttgcctcacagtcagtagtgagttctacactgggcacagccattcaaggtggcagttttattgataattttaaaactgcgctattaagccatatcggcagtcaatttcacgctgaaggtgccaatctcattggtgataacggtgcgatattagggcatgcaggaaaggttttaagccattctgttgttgcaggagtgagcgctgaaattgcaggaggcagtgtaacaggtgcagtagccggcgccttggcagcagaaatagcggcaatatcgctacaaagtaaattatttgagcctagttatttaaatgaaactgacagacaagttgcattaattcaagaggcactacatggcaatgaaggaaaaacacagctcactaaattaattggtgcactgacaggcgctattgtgactcataagcctgagggcgtattttctgcggctaattctgcggagttagtttatcgacataattacagcgaacatatgctttcaaagctagcactagaaaataataaggacataattgcagcgtcaaaaggtgatgttgcagcagcagaaagagttgtaaatcgacaaaatgcagggatgattgcgattgctcttggtttaggaggaagtgcgagtattattggtggtcacactgttattgcagcaacaccagaacttattgctattacgcaagctgcatttagtacatgtaaaactaattgggtttattgtgctaatcagctaggtattaatattgctgggatatcagctccagaagctgcaatcgctggtgtcaccgttggtactggttataaagtattagctagttcagaagaaagtgctaaagctttctctagcatgttagctaatagttcaaagtctttaatgacttcaggaaaattaaatataactgctataaaaccgatagtagatcaagaaaagttatttatagcagcaaataaacgtgtaatagatgaaattaataaaatatcttcaaaaaataaagctaaagatatagctacaatggtagctgcatatgatattaaaacaggaactattatagtaagaggaagtgttggttctgacattaaaatagaaatgcttcataaagatactgtggttctactaaaaaataaattaggtgatgttaaagttggaacaaaaacagtacattgtgataatattgtaggaggatgcggtgaagtattagccgcagatcagctgattcgaaaaggggtcaaacctcaagatatcagaatttctcaggcatatcgccccagaaaagcttacggatatgatttatctactatgccagaagaagcatttgttgatacatgtaaaaattgtattaaagtttttttagatgaatag

SEQ ID NO: 309909 - DNA, 228 bp, Proteus mirabilis
atgcttatagaagggggaataaattcattcattttttcactagagttaatttttatatttgatggtttaaataaagctaccgcactgggtttacggcccccagagcgccaaaaatttctcgccaatctcttatctatctgtaatataagagttttattatataagtatactttatcagtacgcaaaaccgctctgagattagactcttcaaacccgcgggtcaagtaa

SEQ ID NO: 309910 - DNA, 984 bp, Proteus mirabilis
ttggcggctcagctgactgcatgctttacgcttaaaggggattgttggtactacacttatgatgcttttggtcgacgtctaagtaaaaccaaaactgttgacagtgacttagcccatattgacccattatttccgcagattaagcctaaaatcaccacgtggcgctatttatggtcgggagaccaactgatagaagaaacgccgatatatgccgatggcactcttgctaatgcgcaacaagttcaatggctgtatcaacccggagaaataacgcccaccgcgcgttatcaacagggcaaactgcactatgtggtcaccgaccaccaaggcaccccgcgagagatattcagtgaaggcggacaagccagttgggcaggaaggttgaatacgtggggccaaatgcagttttggcgttaccgcgacggtaaagcggagaatgaccctaattataccgaatgtccttttcgctttgcggggcaatatgaagatgaagaaagtggcttgtattataatcgctttcgctattatgatagggaaacaggacagtatctttccccagaccccatagggttattgggtgggctgaatccgtatgggtatgtgcattgtccgacggggtgggttgatccgtttgggctggcgtgttgtccaccaccaaaaataaaagctacacaaatcggattaagaaaccctaaacagattgatggtatgaaaaaagatatgcttgacggcacttttgatttttcacttcccaaaaatcaagttggtggctttgtagattccaatggaatttattatatgggggaagggcatcatagaatggttgcagctcaagaaatatataaagaaacaggcgatgctaaatatattaataaattaatagaaaatggttcatggacaagaacaaattcaccaccaactgatgccagagctatgccatccagaagtttctttagtaatttaagaaacaaattaggattttaa

SEQ ID NO: 309911 - DNA, 675 bp, Proteus mirabilis
atgcctttttcattaaccaaagagcaattaaaagagatccacgggcaattgatagataagaaccatctgcatgaaggacttatctatttacaagtcactcgtggcgccgattcatcacgtttttttgatttcccgtcttcatcagtcgctcctacattggtgctatttgttcaacactcaacggtggtaaatcatcctaatgcaagcaaaggaatttctgtcgtaagtgttgaggatattcgttggcaacgctgtgatattaaaacggtggcattacttgctgcatgtttagctaaacatcatgcgcatcagcaaggtgctgatgatgctatttttatcaaagagggttatatcaccgaagggagttcaagcaatttctttattgttaatcagcaagatgaaattatcactcgcccattaagccaagatattttaccggggatcacgcgacaagcgattattcagttagccaaagagcaaaaactcaccatcattgagcgtttatttacactcgaagaagcgaaacaagccaaagaggcttttattagttcagcgacgaccttaatttggccggtgatctccattgataatgaaaaaataaatcaaggtaaggtaggggcgttatcacaacgcttaagagagatttatcttgagaaagccggtgttaaaccatag

SEQ ID NO: 309912 - DNA, 156 bp, Proteus mirabilis
atgtctgagattgtgtatttaaataaccaatttgtacctaaagaacaagctaatatctctgtttttgatcgaggtttcttatttgctgatgccgtttatgaagttaccgctgttattaacggacaattaattgattatcaatgcctttttcattaa

SEQ ID NO: 309913 - DNA, 1368 bp, Proteus mirabilis
atgatccaaattcttgcggtcttaattgtcgttattattgtcgctagaatgatcttaaaaggatataaagccgagccggttttgttagttgctggtttaatcttaatggcactaacaatgatatttggttggggagatattctgcctaaaaatgtcaaaacaaccggtattagctggctagatccctttgaggttatgcgtgatctctttagtagtcgtgctgcagatttaggtctgatgatcatggcactcatgggattcgcccattatatggatcatattggtgctaatgaagctgttgtacgtgttgcaactcgcccattgaaaaatatgcgctcaccttatgtgttgctatttttctcttttttactcgcgagtattttgcaacttgctattccgtcagccacaggattggccgttctactaatgggtaccatgttccccattatgataggactaggtttatctccagcatctgctgccggtgtcattgcaacttcattaggcgttgcttacacgccaacagcgattgatgctattcgaggtgcaaaagcggttgacttaggcgtggttgagtatgtgctttactaccaagggcctgcggcgattgcaactgtattagctgttggtattacccatatcttctggcaacgccattgtgatcgcaaagcgggttttgtaccccaattaggaaaaatagcagaagaagccaaaagtgataaaaatatccccggcttttatgccctactgccaatgttacctattattatggcagtaagttcatcaagcctatttgttgaaggtattcaccttgatgtcgtcactattgtattaatttcaatggcaatttgtatgctgattgaaacattacgcttacgtgattttaaatcagtgtgtgcaggcttccaacattttctaaagggtatgggttctgcatttagtaatgttgttgggctattagtcgcagcgggtgtttttgctcatggtattaaagtcagtggtgcaatagacagcctgatcgttatggcggaatctgttggtctaccaccatttgccatggcattagtgttcgctatcgtgacattggctgccgcaattattatgggctcaggtaatgcacctttccttgcattcgttgaacttattccacaaattgcccatagcatgggggttaatccaattgcaatgattttacctatgcagcaggcatcacatatgggacgcggcatgtctcctgtggctggcgtgatcattgcggtttccagtggagctaaattgcaaccctttgatgtggtaaaaagaactgctgttcctcttatggttggttttgttttccactgcgccattattgctatattttattattaa

SEQ ID NO: 309914 - DNA, 1254 bp, Proteus mirabilis
atgaacattgttgatcggtttatttcttacaccaaggtgaatactacaacaaatagagaaaatggcgcagcggggattatgccttcatcggaaggtcagcgagtcctcgctttacaattagtcgaagagttaaaggcgttaggtgttgaagatatcaaaattcgcgataccgccattgttaccgcgacactaccttctaaccttgattatgaggttcctaccgtggctttctttggtcacttagataccagtgcagaacaaactaatgatactaaagcacaaattttaccttataaaggtggcgacctttgcttaaacaaagaacttgagatttttttacgtcaaagtgaattccctgaattagaaaactatattggtgacgatatcatcgtaacagatggtactagcttattaggcgctgacgacaaagcggctatcgcctctattatggatatgttgcaatattttaaacaacatccagaagtcaaacacggtacagttaaaattggttttgtacccgatgaagagcaaggtttacgtggtgcaaaagcctttgatgtaacagaattcggcgcagactttgcttatactttagattgttgtggtattggtgaacttgtatatgaaaattggaatgccggtgatgttgaaataacctttatcggaacctcagcacacccgatgtcagcaaaaggtaaattaaaaaattcactgttaatggctcataaatttattgcgatgttaccgggtggtgaagcaccggaatataccgaaggtcgtgaaggttattattgggtaaaacaactggcgggtaatagcgcacgtactgtattaaaaatggatgtgcgtgatttcacagaagcaggctacgcccatcgtatggcatttttaaaacaactttcagagcaatgtgaagcgttatggggtgaagggactgttgtttgtaagcaagccgatcgttatgcaaatgtctttaatagtctacaaggtgaaaatcgatatcctatcgatattgctattgatgcttataaagccaatggtattacccctcgtccaatccctatgcggggtggctatgatggagcagcattatcgcaaaaaggattaccttgccctaatatctttaccggggcgcacaatttccactctatttatgaatatcttcccgttaaatcgctttatgctgccagcgatgtattgaaatctgtcgttaagatcaccgcagagcgttttgcccccggagctaaagcatga

SEQ ID NO: 309915 - DNA, 417 bp, Proteus mirabilis
atgaaaaatgaaactaatattcgccgtggcagacattgtgtattcctgatgcacgtccatttggtctttgtcacaaaatataggcgaaaaatatttgatcaggatgcaattgaaaaattgcgaggctactttgccagtgtttgtgctgattttgatgttgaactggttgaaatggatggggaacgggatcacgttcatttactgattaattacccgccaaaactggcgatatctaatctggttaacagccttaaaggggtatcgagtcgattacttcgacgtgatcgtcctgatattgcccaacattattactacaagggggttctttggtcgccgagttatttcgcggggagttgtggtggcgcaccaatatccattatccgccagtacattgagcaacaggaaacacctagttag

SEQ ID NO: 309916 - DNA, 849 bp, Proteus mirabilis; identical to SEQ ID NO: 305026

SEQ ID NO: 309917 - DNA, 1749 bp, Proteus mirabilis
atgggtgtgggactctatttcatcgtccaagaaacgcaaaaacctaccgattatcaaggtgcattactggttgatttaaaaggcgttattgttgaccaaacagctaaccaaaatcctttagggcaaatgagccgagagcttttgggtgtttcgggtagccagttacaagaaaattcgttattcgaagtcgttgataccttacgcaaagcagcgactgaccccaaaattaaaggaatggtactaaaacttgacgaatttgctggggcagaccaaccttcactcaattatgttggtaaagcgctgactgaatttaaaaaaacaggtaaacctatctatgcgattagtggttattatagccaaccgcaatattacttagcctcttatgcagataaaatttatttagcatcacaaggtgctgtgggtatttatggtttaggttttagtaatctctattacaaatcgctattagaaaaacttaaagttaatacccatatattccgtgtaggaacctataaatcagctgttgaaccgctgatgcgcgataatatgtctgatgaagcccgagccgcatctagtcgattagtttccgtactctggtctaattatttaacgcaagttgcagaaaatcgtagtattaccaaggaagatgttttccctggtgcaaaagagatgatagttgagctgcgtaaagccgatggcgataatgctacttatgcacttaatcgcaaattggtcgatactgttagctcttatgcccaatttgaagcggatatgaaagagacctttcaatgggatcatgaagctaagcagtttaacaatattagtatttatgattatgctgataacctcaccgcattcgccccagaaaacgaagacggcaatattgcggttgtggtcgttcaaggcgcaattattgatggtgaaagcattcctggctccgcaggtggttcaaccattgctaatcaaatccgtcaagcgcgtttaaatcctaatattagagcattagtattacgagttaatagccccggtggtagtgtgtctgcatctgagcagatccgcagtgaaatagccgcctttaaacaagagaaaaaacatgtcgtggtttcaatgggcggaatggctgcatcagggggatattggatctctacacctgcgagtaaaattatcgctagcccttcaacattaacaggctctattggtatatttggtgtcatcaatacctttgaaaatagcttagaatcaataggtgtgcatagtgatggcgtgagtacatcacctcttgcagggctttcggtaaccaataaattaccagaagatttttcagagctattccaacttaatattgaaagtggctataaaacattcctgaaattagtagctgaatcacgtaataaaacaccggcacaagttgatcgtattgcgcaaggtcgtgtttgggttggcgttgatgctaaacaagtaggattagttgatgaatttggtgatttcgatgatgctattaatgcagcagcaaccatggcaaaaatcaaacaaccagtcattgattggatgaaaccggaattaagcttatcagagcaaatattaatgagcttatcggccaatgcaaaagccattattcctgatccattacaagcctatttacctgcaccggtatttaaagaagttaaaacacaaactgagttttatcgtaatatgaacgatccgcaaaaccgctatgcgtattgtttatcttgtggtgatattcaataa

SEQ ID NO: 309918 - DNA, 1413 bp, Proteus mirabilis
atgtcctaccctcgttctttaataaattcgttgttgcttctatctttcttacctttttctttcgttcaagctgccgataagcctgaattggtagagaatgggattaatccattgtctgtaacccgaatagatgaccgtttgaattatatgttgtcggttaccaataataacggaaaaacagttcagcactggcgatcaattgattgtaaacaaggcaaggctgagcttctatacaaagattttcttaatgatgatggagtaactagtgctcgttattatgggaaaagttatgcccgctatgcgcccgcacaaattgataagcagatgacagaagaggaaatccgtgctgtctgccagttacctataaaagagatgcggtgggaaaaattatcgacgacatctcaagatattataactaatcttgttgatattaatagtattcatgtcactggtgacactttatcggtacgaatgggatatgatatctcagagattacttgggagccaccttacgatgcaccactagaattaaaggtcgagcactatttatataactgtaaaacacatcaaggtaatgctgtggctgcaatgaattttgatagcgagggtcgcgtgacagactcactgatcactgcggatattattcgccgcaagagcagtttcaaaattgatactcaaatgacacagctcttcgatcaactttgcgagttaccagaaggaaaatcgttcacagcaaaagggctatttgtgcctgctaagaataagcctgcatcaacactgatggggccttcaatgcctaatctgagtaataataatccgcagtggctgaataaatttccgctttcctcttcgattgagagccaagcgcagttattgatcaaacctttgatgcctcctcgttttaaacagattaactatacggaagtcagcgatttcggtaaggtcaatatacagcttgatgcacaaccggatggctatatacgcaagctagaagattatgacatttggacagtacaacgtttaacactggcaaatcagttacaattgaagttcgccatgtctatcagcaatgatacctcactgcttagcaagttacagacagatctgcattttccgttagcaataggtcaacgatatcaggcgcaatgggaaaatattgacactaataagaaggtaacagcgtcatcattattctgtgatgttaccggagaaggagatgctcaaagtattgccgccaaatttagcggaaaatatttattagttgaatgtcgtatgacgactaaagggcagccgaatagcggtactaaactcgcttggttgcaagatttcaacatttttgtcccagtcgctatgcaagtgggcgataaacctgaaagtccagtcaaactggaacatgttaatgtaatacgttaa

SEQ ID NO: 309919 - DNA, 1353 bp, Proteus mirabilis
atgctttcaacaaaagacatgctagtccttggaatgatggtttttgctcttttccttggcgctggtaatattattttccctccaatggcaggtttccaatctggaaaccaatggtttagtacgtcattaggatttttggttacgggtgtcttactcccttttttaaccttagtcaccgtagctattcgtggacgtggtgaacgcctttctatcgacttgccatcatggtttgcggtgttattttggattgcactttacctgattgtcggttctacctttgcaatgcctcgggtcacgaacaccgcctatgagatgggatttttacctcttggtcttattgaaaaaaataccacgacacatctgactttcgcattaatatttaacctattaagtatgttctttatgcttaaacaaggtacgatgatcagtgccatcggtaaattcatgaccccagcgctcttaatacttctggttgtcgttggtattgctgtggtggctaaaccgctttcccctattgaagagcctaccggcctttatgcggtaaatggcttcttctccggtattattgacggttatcaaaccatggatgtgctatctgctatggcttttggcgggatcgtcgcccgtgcgttatataccaaagggatcaccaatcctaaacaaattggttttatcaccataaaagcggggatgatttcggttttactcttagccgccctttatttatgtttattctatttaggtgccacaagtcacgcagtatctgtttttgctgatccggcactaaatgccactaacggtggtcaaatcttctcacgctacgtagacgctttatttggctctatcggtacttggttgatgggcgggattgttttattagccagtatgacaaccttagtcggggttactagtgctgcggcagactactttgcgacattccatcatcgtttaggctatcgcttctgggttgtagtatttacactgttaacgacgttagtctctacttttggtcttgataccttattacgtgtcactattcctgcattattaatgatttatccaacatcggtgacactagtcttactacaatttgttcgccataaactaaaatcaccgcgttttacttaccgctttacaatctgtgtcattgttttaatgagcctacttgacacattaaaacagttaaaatggctaaatggagatttattacaactatttagttacattccactgtctgagtatggcctaggttggttattaccgggtattattgcattcgcaatttcattactaattagtctcagttttaaagaaaccgacacagaaattgctacacctaatacagtaaaataa

SEQ ID NO: 309920 - DNA, 1461 bp, Proteus mirabilis
atgtcaaaaggcggttcaaataataatacaagtcagaaattaggactgcttgcactggttgcaattgtaattagctcaatgataggtagtggtgttgatggattaccacaaaatatggcagcaacatctgaaattggtccggttattattgcttggctgatttgtggttttggtatgtattttattgcgcgaatttttatggtgctgtcagatattcgacccgatcttcaatcgggtatttatatgtatgctcgtgaaggctttggcgcatttgttgcttttattgttgcttgggggtattggttaatgaccatttttagcaatgtagcgtttgcgattatggtgatggataccttaaattatttcttacccggagattttaaaggtggcaacaatattccttctattattggtgcttctatccttatttggggattcaattatcttgttttatcaggtaccaaattagcaggtgcgattaatattattggtacttttgctaagttaataccgttaagtatttttgtgtttattctagtctattttttaaattatgaagagttgactaataacttttggggaaattccgccacaatcccagcagataatctaggtcccatacctgcacaaatattagcacctttagatattgccctatggtgttttatcggtgtggaaggtgcggtggccttatcaggtcgagcgcgcaataagaaggatgttggtaaagcaacattaataggatttattgtctcattgattatttgtatttttatctccgtattaccttttggcgtattaccgcagaaagcattgagtacaatacctacaccatcaacagcgggaatattgaaaacagtcgtcggagattggggagaatggttaattaatattggtgtattagtttcggtattaaccagttggctagcttggacgatgatttgtgctgagataccgatggcggccgctcaaaatggtacatttccaaaagcgttttcagtgaaaaataaaaatggggcggcgtctacgtctctgtgggttagtagcctctttatgcagttagtggtctttgttgtttatttttccaataatgcttggttaacaatgttagctatttctgcattaatggttttgcccgcttatttgactagctcggcttatttattacaactttgtttatcggataattttgctaaatacgctaataaaggaaaaacctcagctttaattagtggacttattgggctaactttttgtttatttatgttttatgcctgtgaaattaaatatttatctatggtgcctattttactgacattaggcattcctctatttatttggtcgagatatcaagaaggacaagaactatttagtcctatagaacgtatattatttatttttattattgtgctggatatattaacagtttttttatacctaaatgattatattaaattttag

SEQ ID NO: 309921 - DNA, 1371 bp, Proteus mirabilis; identical to SEQ ID NO: 309360

SEQ ID NO: 309922 - DNA, 1131 bp, Proteus mirabilis
gtgattgaaaaacgcgccaatgaattattggaaaataatttattgggggttaaacgtctttcttatgatgatgcattagcgagtggttatattcacgagcaagatttaattatgccttatgttaaagcgttaggtgacgttgttgatatgaaggcaattaaaaaagcgggtttaaaattaggtgtcgatccactgggtggttcaggaattgaatactggaaacgcataggtgaatattacgaacttgatcttgagttggtaaacgatcaggtggatcaaactttccgctttatgacattagatcatgatggtgtgatccgtatggattgctcatcaccttgggcaatggaaggtttattgcaactgcgtgataaatttgacttagctttcgccaatgaccctgattacgatcgccatggtattgtcactccttcgggcttgatgaatcctaaccactatttagcggcagcgattaattatctttttcgccatcgtcctcagtggtcaaatgaggtaaaagtgggtaaaacactcgtctctagcgcgatgattgaccgagtcgtggctgatttaggtcgtgaacttgttgaagtacctgtcggctttaaatggtttgtgcaaggtctattcagtggcgagtttggttttggtggtgaagagagtgcgggggcatcattcttacgttttaatggtaaaccgtggtcaacagataaagatggtattatcttatgtttactggctgctgaaataaaagcggtaacaggtaaagatccacaacaacattataacgagttagcgcagcgttttggctctccaagctataatcgtatacaagcatctgcaactcatgagcaaaaagcgttgttgtcacgattatcaccagaaatggtcaccgcaaataccttagcaggtgatcctattactgcgcgtttaactcacgcatctggtaatggtgctgctattggtggtttaaaagtgatgaccgattatggttggtttgccgctcgtccttcagggacagaagaagcgtacaaaatttattgtgaaagcttccgtggctctgagcatcgcgaattaattgaaaaagaagccattgaaattgttaataatgtttttgccagtaaacaataa

SEQ ID NO: 309923 - DNA, 231 bp, Proteus mirabilis
atgattacagttttagattatttattagtaagattaaaagagttagaaattaaaactatttttggtgttcccggcgattataatttaccttttattggtgttgttgataatgataaagatattcaatgggtaggcgcatgtaatgaattaaatgcatcatatgcttgtgaaggatacgcacgatcaaaggtttttctgctctgtgtacaacctatggagtgggggagttaa

SEQ ID NO: 309924 - DNA, 945 bp, Proteus mirabilis
atggttatgcaacatgctaaaccaggcagggtggcacttgccgttatgggcgcattgcttgtaactgcactacctgcgaaaatgtcttatgctgaaggatttattgatgactcaaccctgacaggggggatctattactggcaacgtgaccgtgatagaaaagagttaacaccaaacagtcctgattacggcaaatataaagcaaatttacaccactctacctttaacgctaatcttgatttttcttctggttatctgggtgatttttttggtattgatttagctgcttttggtgctgttgaacttaacaacagtgggccagctgcacctaatgaaataggatttagtgatgcaaaaagtcgctgggatgaaaaatggacaggtgatcgcagtggcgtgagtatttataaagctgctgctaaatttaaattaggccatttctgggctcaaggtggatatattcaacctaaagggcaaacattattacgtcctcattggagtttcttacccggtacttatcgcggtgcagaagcgggcgctgtatttgatttcgataaaaatggtgaactctctttctcatatatgtggactgatgaatataaagcgccgtggtatcggaatatgtacaatttccgtaaggcagacttagagacaaatatcagttatttacactcttttggtgccaaatatgattttaaaaatagcttagtattagaagccgcatttggccaagctgatggttatattgatcaatattttggcaaagtttcttacgatttccctatcgcaaataatacattaaaaacctcttatcaattctacggtgcaaaagataaagtcaccggagggggaattaacgatgtttatgatggtttggcatggttacaagcattcactttaggttatacctacaatgtatttgattttaaagttgaaggtacttga

SEQ ID NO: 309925 - DNA, 393 bp, Proteus mirabilis
  misc_feature (359)..(368): n is a, c, g, or t
atggcaaataatacaaatctttctgaaacgttatttaaacctcgtgctaaacatgcggaaacctcaacgttaatacagtacacacaccctaaatctaatattgattcgtactctgtacttaatgggatgagccagcaaaattggtatcgcacaattcaacgtctacagtggatctggcgaggtatttcccccatagagatcgaagaagtattaagtcgcattgctatttttgatgcgccacgcagtgatgataaatttattgatacagtcgttggttatcgacgtggcaactggtcatttgaatggtctcatcaagcaatgatttggcaacaaaaagcgttacgagagatctcagaggnnnnnnnnnngattttcttgctgatcaagcggtag

SEQ ID NO: 309926 - DNA, 264 bp, Proteus mirabilis
ttggtagttaattgtttctatgctgaagctctgaaaagtagcttgttatcttgtggcgcaaaacatagggatatagcaaagaaaagcattagtgagttacacgacttaacaataaaaaaatataaaatagattactccaaagtattaggagacttatgtcacaggatagaagacaaaacattcaaagctagctatcaagaaacatcaatggcttgggttgttatttcttacttttttgaagagtgcgatataggaattaaatag

SEQ ID NO: 309927 - DNA, 372 bp, Proteus mirabilis
  misc_feature (330)..(339): n is a, c, g, or t
atgattatatttatcaccggtgcttcagcaggttttggagaagctattgctcgtcactttattaaccatggacacaaagttattggtaccgcgagacgtcttgataaactgcaagctcttcatcaagaactgggcgatctattctatcctttacaattagatgtcaccgataaaaaagcagtcagtgaaatttatcaccaattaccagaacaatggcgctcaattgatgtattagtcaataatgcaggactcgctttagggttaagtaccgctgataaagccaatcttgatgattgggatactatgatcgaaactaataataaaggtttnnnnnnnnnntgtcactcgtgcattactaccctcaatggttga

SEQ ID NO: 309928 - DNA, 390 bp, Proteus mirabilis
atggttgaacgcaatgtcgggcatattattaatatcagctcaacagcggcttcttggccttatatggggggaaatgtgtatggtgcaaccaaagcctttgttaagcaatttagcttaggcttacgtgccgatcttcaaggtaaaaaaatacgtgttactgatattgaacccggtcttgtggggggaactgagttctcattagtacgctttaaaggtgataccgataaagtagaacaaacttatgcaggagcagatgcgcttactcctgaagatgttgcacaggcggttttttggacggcaacattgcctgcacatgttaatattaatacgcttgagatgatgcccgtcagtcaatcttttgccggattaagtgtgcaccgacaaaattaa

SEQ ID NO: 309929 - DNA, 639 bp, Proteus mirabilis
atgactaaaatatttaaaatcccctttgcaacgcaaggggataaaacagttgtgcctgttgagatccaaacagatggctcagtatcttatactcaaggttacggttatgattatgagcgtgaccaagtcactgatccggcggcaaaagatattgaacgtgaaaaaatgaatagcctatttcacgatatcaccgagtctattggtgaaatgcaattacaaggttttgctaaatggtcagaagcgggcaaaccctatgctattcgtagtgtggtttatcataacaataaggtatggcagtctaaaattgagaataataatattgagcctattgccggtaatgcatgggctgagctaaaagctgatatcaccgcgaatgaagtgggtgcttataacaaagctgaggctgataagcgttttcagccggtgggtaaatatcaagcggaaggttatagctatgcaaaagcggaatctgatactaaatatcaacccaaaggcaattatgctcctgcgggaaattatgcgaataaaggcgatagttataccaaagcggagtctgatgggaaatatcaatgcctaaaggcacatctaaaatacgcgcccagactgctaacccaaagtcgttggcggtatcaatattaa

SEQ ID NO: 309930 - DNA, 327 bp, Proteus mirabilis
ttgagattctccaaaagcacactacgccgctatggcgcttcaccacaaaatgtgatctgtttttccgtctatggtgatagtatgtctccggttattccaaatggttcaacagtgaccgttgatacaggtaatacgcggattgtggatggcggtatttatgctatcgaacaagattcattatttagaataaaattgctctaccgtcagccaggcggaaaattaattattcgtagctacaataaagatgaatttcctgatgaatttgcagaaattgactccgttaaaattatgggacgcgttattcactggtctgtgatggcttggtga

SEQ ID NO: 309931 - DNA, 519 bp, Proteus mirabilis
atgctctctaatatgaaaacagtaagaatccctatcgccttagtgcaaagtgttatgcgtacactgcgtgaaaaactgcaacaggccaataaatatcttaatacagattacccagaacccactctacaatataaccagagaggaactattgcaggcagtgcctattatgcaaattgggagatccgccttaatcctacattattgattgaaaataaacagaattttattgaagaagttattcctcatgaattagcacatctgctagttagtcgccattttggtcgtgtggcacctcatggcaaggagtggaaatggatgatggaaactgtgttacaggtgagtgcgaaacggacccatcattttgatatcagcaatgtaacagcaaaaacgtttagctatgcttgtcgctgccaagaaatacaccagttaactcttcgccgacacaataaagtacaacgaggagaaacccagtatcgttgtcgtcattgtcaggcgattttacaattaattaaagagtaa

SEQ ID NO: 309932 - DNA, 192 bp, Proteus mirabilis
atggtatctcagtctgatcattccgatgcgttgcgcatcttaaattcaacacaagccgtatttaaatctcatggtgccatgtgtgaaccggcaacacatcgccgttgggcattaagtattttaactagagcaaaactgtatggcattattcccaattcaaaaaatagtgttcaacgatttaatacaccataa

SEQ ID NO: 309933 - DNA, 225 bp, Proteus mirabilis
atgacggtactctccattgtggctatgatcttaatgacacgcaaattggtagaaaactggttaatttggtctgttattaatgtcattagtattgttatattttataaacagggtgtttatgccatgtctattgaatatatcatcttattggctatcgctattaatggctctcgtttgtggatcaaatcagcaaagcattcaaataaaaataattatctctcataa

SEQ ID NO: 309934 - DNA, 201 bp, Proteus mirabilis
atggtaagaacggctctattgaaaattaaaaatttgattatttggctttatcatcagtttagcgatctgctccatatcgcggtgacttttgtactctgttatttttgctttcttttatctcccacacttaccattgccgttataggcgtcgtgattattgttgtaaccatgtttttattaagcctatttgttttgccctag

SEQ ID NO: 309935 - DNA, 369 bp, Proteus mirabilis
atgattgcgaccggactttgttataatcagcttgggcaacgttttgaaaatcatcaacaacagatccaagaaatgttaagtttaggggcaacccctaaaattgcttcaatggctattattcgagatagtattaaatcgtcgttaattccgaccattgacgcagccaagaccgtggggattgtaagcttacctggaatgatgtctggattaatttttgccggtgttgatccactacaagcggttaaataccaaattatggtcacctttatgttgatggcaaccgccagtatttcaacaattattgcttgctatttaacctataagaaattctttaatcaacgccatcaattaatgacgtttaatcaataa

SEQ ID NO: 309936 - DNA, 336 bp, Proteus mirabilis
ttgaaagaagccgattttgttaactctttaattttggtcgcaaaaaataatgaaaaatattgtggttttgttcaactcaagtttaatgataacgcaggacaaggggagctagaaaagctatttgtcgccccctcttttattggccaagggattggtaaaaccttgtatgaacgagctgtggaacatgcacgaaagatgaatgtaaaagagctagtacttgatgcagatcctaatgctgaaaatttttataaaaaaatgggcgcaataacgatgtacaatacaccttcagagtcaatccctggacgatttataccaaaaatgaaaataacattataa

SEQ ID NO: 309937 - DNA, 186 bp, Proteus mirabilis
atgccagtgccgatgatgagtgtttattggaaaggggatgaaattagtcctaaagaggattcgcagctcattgctcgctcttctatggatggcgatatagtagaaataaaagaaaaaccactttataaagggcttgaacaggcattaactaaaagtgcagattggatctatgctaaattaatataa

SEQ ID NO: 309938 - DNA, 675 bp, Proteus mirabilis
atgccagaatcaccggagattttcgaaaaggcgctggaaagtttacccgcggaatattctccacaactgttatttttagatgctgatagaaatacgctgatccgccgttatagtgatactcgacgcttacaccctctttcaacgaaaaacctctcgctagaaatggcgattgatacagagagtgatctgctcgaacctttacgatcacgggctgacctgattattgatacctcagagatgtcagtgcatgaattagccgaaatgctacgtacacgcttactcggtaaacgtgaacgcgaattgaccatggtatttgagtctttcggttttaaacatggtattcctatcgatgctgattatgtctttgatgtacgatttttacctaatccccactgggatcccaaattacgcccaatgacggggttagatcgtccagtcgcagccttcctcgatcgccataccgaagtgcataactttatttatcaaacaagaagttatctagaactttggctaccgatgttagagacgaataatcgtagttacctaactgttgctattggttgtactggcggcaaacatcgttctgtttacgtggctgaacaactggctgactatttccgctctagagggaaaaacgtacaatcacgccatagaacacttgaaaagcgcaaatga

SEQ ID NO: 309939 - DNA, 333 bp, Proteus mirabilis
  misc_feature (266)..(275): n is a, c, g, or t
gtgcgatatctattttcgctgttttttgcgttagcggtgttggtcaccgctggctgcggttttcacctacaaggtaaaacccaagttccagctgaattaaaaacgctttacctaagctctggtgacccatacgggccactgtctcgtgtaatgcgtcaacaattgagattaagtggagttcaactggttgaaacgccaaaagcagatattcctgttctcaaaattgttggatcttcagaaaataaagagactgtctctgtgtatcnnnnnnnnnngcgtcagatgtgtatcaagacggtaaatcggctgaacgtcagctcacttttgtcctag

SEQ ID NO: 309940 - DNA, 303 bp, Proteus mirabilis
atggcaaaaacagtagcagaacgtaaagcagaacaacgtaaacggcagaaagaattaggtgtaaccaaaattgaattacttgtagataatcaagaattggaaatgttaaagcgtaattgtgtattacgcatgcctggtcgagaaccgtatgacgttgttgaatacttacaaatgctcgagaagttatctaagcaaaagtgtaaacgatgtggtgagcaattacctgttcaacaatgctgtttgtctggtgattcacaatgttgggtaaccaaaggatatcatgaggtaaaattgagtatataa

SEQ ID NO: 309941 - DNA, 861 bp, Proteus mirabilis
atgcctacattaacgaagatagcgtggataaaaccagggatggcgacaaatcaacgtaaaatagcggattatattttagaacaccctgaaaaaatcgtgactttatcatcacagcaattagccgaaattatgggagtcagccaatcagcaatagtgaaatttagtcaaaagataggatttaaaggatttccttctttaaagctggctatcagtgaagatttaggccgaaaaaatgctaattcagaaaaaaattccagcatattacataaccaaatagattcagaggatagcctggttgttattgcgcagaaattagcacaagaaaaaaataattcaattcgggataccacacgtcaaattaattatcaccagtttgaacaagtgatccaacagattgatgacgcctctcgggtacaaattataggtattggtggatcaggtttagttgccagagatttaagttataaattacagaaaataggtattacgactttaattgaaactgatcaccatgtacaaatttctgttgctcagatgttaagccctcgggatttacaaattgtgatctcttacagtggcaaaagaaaagatatgctggtcgctgcatctgtggctaaaaaacaaggtgctaaaattatagcgatcacaggagaaaaacattcaccactaggtctgatggccgattatatattagaaactattgctgatgaaggtgagtggcgtagtgctgctatttcttctcgcactgcacaaaacaccattaccgatcttatctttatggcattattaaagaagcgtgatgaaaatgcgaaggctttagtattaagctctcaagcactaattaatagtctggatgattaa

SEQ ID NO: 309942 - DNA, 693 bp, Proteus mirabilis
atgacgcctattttagaaatcggggagatggttatctctactgataaaaaggattacttatttagaccatcgctcatcaatatgacaagaatcggtgagcctaaacagattgtgaaagcctacggtcaattaaatggcgctgaggtgcaagagttaattgcacgcgccgtaatgagctacagggttattcctgagtggttaataaaagccattagcaagccaacatacggacgcaatatcctacaaactgcaatgatggtgatgcaggcgtgttgtgatgatgattgttcagaaattattggtgaatggagatcgggtaagcgaggtattgtctataaaaacggcaagatgccaatcgctgacattatcgtcattgctcgagaattattcactcacggaattatcggtaaagcgaagatccgcaaacttcaacgcaatgagggcaaaaacgaattctcagatgagtttatggcaattgactacattagctcagctcgtgctcattttggtatgaatcgtgatgaagccgaacagttaactatgactgaatttcagatgatgctcaaagctaaataccctgatgagaaaggattcactaaagaagaatatgacaacatcatgaagcaagatgataaacgtaatgatgagttaatcagtggtaagcgtcgattggttagcagaaagagaaagtag

SEQ ID NO: 309943 - DNA, 309 bp, Proteus mirabilis
gtgaggaaactattaattgcatctattggggtgttatcttccttggctattttatttagtgctaactctattgctaaagaaaatagaaagttatcagatgtcgctgaaatggtttgcgccaatcatgaagataaggattcatgcgaggggtttgttaatacatcaataattgttgcatttgagcaaggtagggttagtggaatatgtgatttaatgaaagaatatggtgaaaaaatacctgacgatcaaaaagatagatgtagtgaatctaaaaaggtattgcaagatgtacgcaatataaaattctag

SEQ ID NO: 309944 - DNA, 297 bp, Proteus mirabilis
atgagtaataaatttttagatccactaaaaccatctcacgaacaacttgatattgccatacctaaattactagatgcaaaatcagttcttgatgaggtgttacctttttacattgcctttacagcaaaaacatccaaagacccagaagctttttacccattaataatgaaatgcttagaggctatttttggggttgataaaaccaaaaggaatataaaagataacgagatagcagactacgcctactcattggaaatgaaatcaaaacaaattttcgataagataaaagatatttaa

SEQ ID NO: 309945 - DNA, 804 bp, Proteus mirabilis
ttggtttttattaacaaattagacttaaatttaaatcttgttatttatcttataattgtattgttattatctatttctttatatattttagtagaaaaaaagagagattatggatatggattaattatagtatatctaattgttttcttatttggctttttggtatcaatagatggtgttaactcaagagtaaatcctgattttcagattactagagcagagtttaggaagaaattcgaaggccatttaggtatgcctcaaagtagtggtgttcaatattttaatagtgatgaatctgattttgattatattttaattggtgatagtcatgctagacatttcttttcttatataaatggtcataatctaaaagttgctagtctagcattagatggttgtacttcaacaaaaaattacttttcatcatataataaagcaatgtgtgaaggtagatatgatttagaggttgattttattaaaaaacaccctaataaaccagtgattatatctagatattggcctggattatttcctagtcacataataaggaataatggtagtactataggtaaaggtgatttaaaccataaaataatcaaagagttagattacttttattctgatattaatagaggtcaagatatatatatattaggtgatacaccaggaagtgagaaaataatatttgaatgtttagctaaagctgacttaccaataaataaagttattaatttttcaaggtgtaaggagacacaaaaaagaaatgttaataacttatatagatacatactcatttttatgtga

SEQ ID NO: 309946 - DNA, 456 bp, Proteus mirabilis
atgagtaaattaacatcgtgggttccaatagttttatttagcatcatgctagcttctttataccttgttactaaatcagtaatagagctaaagaaagaaaaccaatcactcactgaacaactttcacaacaagtcgaaatcaacaaagactatcaagcccgtatcactcgattaaatcaactcgatattcgtcactcacaggagttagccagtgcaaagaatgaaatcaacactcttcgtgatgctgttaactctggttctaagtgggtgtacgccaaagctgagtgtccagcagccaccaagaattcaaccgaaagcggaagcaatgaagccaccgcacgacttaacaaagcagttgaacaagattatctacgtctcagagaaatgatagtcgagaacgaacagcaaactttgtatttgcagaattacatcaacactgaatgcctcgctcaatag

SEQ ID NO: 309947 - DNA, 531 bp, Proteus mirabilis
atgaataatacaatcgttatccctgaatttaatttccaaaagatggttatggcatctgatgggcaagtattaacaacaagtaaaaagattgctgattatttcggcaagcgacatgacaacgttttacggaaaattagacaggtcagagatgagtgtcctgatgattttgcccgcctcaattttgaggagactgattttattgataaaaatggcgatgtacagccaatgtttaaattaacaaaagatggttacattttggttgttatggggtttacggggaaaatggctaccttaattaaggttagatacatcgaagcatttaactggatggcagagcaaattaatcgctggaaagttttaggtgaagaggctcagcatcgtcatgcattaaaagcggcaaagtcagaattaaaaggtcgactgggtagtcagttaatgaataaacggaagaaagagaagaaagcactgcaattggaatatgagcaaatactctcactgactcaacccaaattattatttgtagatgaatag

SEQ ID NO: 309948 - DNA, 1419 bp, Proteus mirabilis
atgagcaagagtaaaaaaacacaacagcctgtcggaaaacaaccgttcaggattaaagatattgatttagaaaaggcctccgcatcaggtgaggaaaagaaatatgctcacttcgagcgatatgagccattgcctggtgtaattcctgaatctaaaaaggaagcagcatttgcaatggatgccacgccatacgacatgcttaatacgatgtcgattggtgatgagtattcagggtttcgtggatacccacagttagcggcaatgtctcagcaagttgaatactctaatatgcacagcgtattcgctgatgagatgacccgtaactggattgaggttaaaagtcgtaaagagggcgatcctgatattgagctgatggaaaacgcactcgttaaatatgatgtaaagcgattaattcacgatgctgttaagcaagactctcagtatggtgttgctcatgtttacattgatactggtgcaaagacagatgatgagttggagaagcctttattcttagacccaaggaagataccaaaaggatcactaaaaggccttagagttgttgacccaacttggatttatccagccatgtacaacacgcagtggccgttggctgatgatttctataaaccaagcgcgtggtttgttatgggcaaaacagttcatgaatcaaggtttatggatattgttagtcgcccagtgccagatattctcaagccgtcctacaactttggcgggttatctctcactcagttaatggaggattacgttgttgactggcgtgatgctaagaaaaacgtaattaagatactccgcacattgaggatgagggcgcttaaaactgatatggacgcgcggttacaaatgccgggcgagttcgataagcgcatcaagatgtttacgcaatatcaggataacttcggtgtttgggtaatagatacaggagaagatttaattcacatgcaaacttcgctaagtgaattatccaatctgctatcaaactatcaggatcaactatgtattccttcgcgtattaccaatttaaaactcctagggaacgctccagcaggtttaaatgcctcgggtgagtcagagttatctacatggcatgaaactgtgtcagggtatcaggacggaaatctaagacgacccttagagaatatcttcaagattatccaactttcagagtttggagaaataaaagaggatatttactttgagtttaggcctcttgatgagattagcgaaaaagaacgcgctgagatcactaagattcgcgttgatgctgtggcagttgctgctgacagtatgttggttaactcagaggaagctagggatgctctcaagggtatagagggtgctggtttcgaaaacttggatggtgattatgagccggaagacaacgaggctgaggtctattaa

SEQ ID NO: 309949 - DNA, 807 bp, Proteus mirabilis
atgagccggaagacaacgaggctgaggtctattaactataatgctggcaatatcaagtggtatcaaaggcagttgctagccgaaattagagaaatgaacgacgaggttagacgcgaaatagttaacgctattcgcagtaatcctctcgctcaagatgctaatttagccatggatgctaatcctgttacttttatcaaaaggctacttgattctctagcaaggaaatgggttgaccgattcattaataaggcacttccaatatcagatgagttaatggataaaacgcaagatgcagtcgatagaggtttattggctgcagctaggcgcgaatctatggctatcaacatgcaatggactgacgccatgttagagaagcgtgaggcgatcattgctgagaatgtttctcttatccgctctatccctgagaaatactttactgaagtagaaggtatggtatatcgcgccgttgctcgtggtggtgatagaaaaatgcttgctgatgaaatagagcgtaactttggtaagcgtcacggtatcacgcggcgaagagctgagtttatcgctcgcgaccaaacacgcaaggcaacaagtgcgttatcggcagcaaggcaacaagctgctggtatcgttgaggctgagtgggtgcatagtggcggtggcaataaaccccgtcatagtcacgttaaagcaggtcgggaaagaaagcgatttaagctatctgaaggctgcttgattgatggcgaatatattatgcctggtcaattgcctaattgcggttgcgtgtggcgacccgtgctgccgttctaa

SEQ ID NO: 309950 - DNA, 1161 bp, Proteus mirabilis
atgaaagatgtgaaatttgcctttgataaagcaagcgtcaggacttacgacgaagatgggatgatgcacgttgcattaacaccgatcagtaaatccaatgtctgcatctactatggcaaggaaataccaaactccgaagagttaggtttagaaccaaataaagcctatcgactactacgtgatccagaagagctcaagaaagccgtcagtacattcaataataagcctgtactcaataaacacatcggcgtaaccgtgattgacccaccaaaagacgcaattgtcggctctactggagagcgtgcagagttcgatggtacttatcttaaaaactcaatggttatttgggatctggactcaattctcggagtggagacggagaagcaaaaagaaatttcctcatcttatcgttatcgacttgatttgacagcgggagagtatgagggagaaacatacgatggcgtaatgcgtgacatcgtttgtaaccatgtggccatagtgccaagtggtcgggcaggccccgacgtatttgtttatgactcgaaaccaataggaatcaaactgatgtcaaaattagaaaaactttgggcgtatttgctacctaaattagctagcgatgcagatccagatgaagttaaaaaagaagtcggaaatgtcattaaagatgaagctacacaagctgaaaaagataatgagtccgaagcagagcgcttaaagcgtgaagagaaagaactcaaggagcgtgaagcgcgagaaaacaaagatcgcgaaaaagaccgcaaggcagcggataacgacaatagcaaagatgataagtctaataaaaccgctaatgacaacgatgacgacaaaaaagccaaagacaacaaaatggctatggatgccgccattagcgccgtagagcgtaaatttatggagttacgtcaagctgagcgtgatgttcgtccagttgttggagagctggcttgtgatagtgcagaagatgtttatcggacagctttaaagcaaatgggctgtgaagattacgcatcaatccctgcatcagggctgcgttctgtttttaatgcctactcaaaagtgcctacgatggctcaagactccgcacctattgcggcatcctctcgcgataatgttcgcaagttctttgatggagataaataa

SEQ ID NO: 309951 - DNA, 489 bp, Proteus mirabilis
atggcatttcaatcaagtgttcccctttactctggcgtaggtcaggaaggtcaaccagcatctaatagcccaattgttgcagcggcaggcggtgcaggtgcgttcaaggcaggtgatgacggccttaatatgtgtcgtttcgcttggcgtgacgcgaaagaccctaaaaaattaaacaataaaggtactggcaaaccagttggttttgtctacaacaatgctaatgccaccattgattatttgaaaagcaatagcttgttaatcccgaaaggtcgtgaagcatctccgattgttggtggtgatttttgggctaaatcagcaacacaagcgattgttggtcagaaagtatttgcagtattagcagacggcacaatcaaaactggtgatgctggcgcaactgttgatggcgcaatcgaaaccgaatggtatgtagcaagcgatgcagctgttggtgatttattcgtaatttctacatggagcaaagcataa

SEQ ID NO: 309952 - DNA, 1026 bp, Proteus mirabilis
atgtcacaattaacacaggctgatttctcagcatttaagaaggaagcagaatctcgcggtttttacttaccgccttctgtgactaaattcgctatggacgcggaagttcagccatcaatgccagcgaacggtggtattcctgctatcgtttcaacctttattgatcctgaaattgtccgcactatctttgctaagcaaaaagcaactgacattttaagcgagagaaagaaaggctcatgggcacaagataccatgatgatccagcgcgttgagcagtctggtgacgtggtcgcgtatgatgattacagcgaacaaggtgcaaaccaagttacaaacgcatgggaaaatcgtcaagtgttccgttatcaaacaatggtaacttacggtgagttagagcaagagcgatatggtttagctatgttgccttatgtcgcagaaaaacaacgcgctgcagcttggactatgaatcaggagcagaataagttctacttctatggtgttgaaggtttgcttaactacggcattctgaatgaccctgcattaccagcgccaatcacccctgctacagttgatgggaaaacgcagtggaaagataagcaaattatcgatatctataacgatatcctgtcactttatgcagacctgattgctcgcactaatggtgccgtgggtgatggtgttgatatggcatctccattagttcttgcaatgagccctaaagcttccgtttggtttaaaaaatcaaatgaaatctttggcaactctgttgaaaaaatggttaaagatacgttcactaatctacgcattgaagtcgcgccacaatacgacactgatgctggtgagttgatccagatgtttgttgaaacagcccaaggtcaaagtgctggttattgtgcgtttagtgaaaagcttcgcgctcacccagttatcacaatgtcctcaagctggaagcaaaaatattctggcgcaacttacggtgcggtaatcactcagccgttcttatttgctcaaatgctaggggtgtaa

SEQ ID NO: 309953 - DNA, 327 bp, Proteus mirabilis
gtggctaaagtttcaagttatgttattggttgtaaattacctaatgggatcacctttaagcatgaaggcaaagatatcacgctattgggcgccaactcatccgctcttctgaatgggtttggcatcactcgggatgttcctgctgatgcttgggaatcttttgagaagtcatttaaagaccagaaaatattccttaatggcattgtgtttgctgtgacggattataaatctgccgaagatgcctcaaaagagcgcgccaaacagaaaacgggattagagcaagccagtgctaaatctgctggggtggaaccactaaccgaggattga

SEQ ID NO: 309954 - DNA, 405 bp, Proteus mirabilis
atggcaatcgtggaactgaataaatctacgttccgcgccatgttcccagagttttccaatatatcagacgatttattacttttccttttcgaccaagccaccgattacctcgataacactgaattctcattggtctatcagactgataagcgagagagattgctctacttgcttatggctcatttggcatatatgagatacggagataaagacggtaaaggtggctcgggaatggttgggagagtgtcgtctacaagtgagggaagcgtgtctgtatcttctgaacttggtgcgattgagtttagaaatgcatggtacacgcttagcccttacggaatggattactggcaggccacaaaagtttatcgaatggctaactactatccggggagcatttatggctaa

SEQ ID NO: 309955 - DNA, 459 bp, Proteus mirabilis
atggctaatgggctagaaaaatacctaatggatttagctgcgagactggatgcaacggaggttaaggcagggtttattgatggtactacctatcctgatggtacgagtgtagctgaggttgcttataagaacgagtatggggttcctgaaaataatcagccgcccagaccattctttagaaatgccattaatagtaacaaggaggagtgggttagagggatatcgagaggattggcttctggtgtcagttccagagatgtccttgaggtaattggcgcaagaatgaaaggtgatattcaaacatcaatttctgagctggttgatcctccactatctccaactactttaaaaataagaagaattagaaaggttatgcctaactcatcaaataagccactggtcgatacgcgggtaatgattggtgatgttaactacgaggtgattgatgatcaaagttag

SEQ ID NO: 309956 - DNA, 495 bp, Proteus mirabilis
atgattgataataaaaaacgtccgggtaaagatcttgatagaatagaccggaatattctaaatgagcttcagaaagatggtcgtatctcaaacgttgagctgtctaaacgcgttggtttatcaccaactccatgtttagagcgtgtacgccgattagaacgccaaggatttatttctggttatactgcgctattaaacccccattacctagatgcatctctgttggtatttgtggaaatcacattaaaccgtggtgcgccagatgtctttgaacaatttaatatggctgttcaaaaacttgaagagatccaagaatgtcatttagtttctggtgactttgactatctgttgaaaactcgtgtacctgatatgtctgcttatcgtaaattattaggcgaaacgctattacgtcttcctggtgtaaacgacacccgcacttatgtggtgatggaagaagtaaaacaaagcaatcgcctagtgattaaaacacgctaa

SEQ ID NO: 309957 - DNA, 1632 bp, Proteus mirabilis
atggataaaactaaacaaaatgaattggttcgatggctgaaacagcaaagtgctccagcccgccgttggttacggctatcaatgattttaggggtagtcagtggtttattaattattgcgcaagcatggttattagccattctactacaagcgttcattatggatgggctaagtcgtgatacacatacgactactttccttatccttatcagcatctttattttacgcgctgtcgtgatggcgatacgcgaacgtgtaggctatcgctgtggtatggcggtcagacagcaaattcgcaaaatagtacttgatagacttgaagcgctaggccctgtatgggtcaaaggcaagcccgcaggaagttgggcaacgattattctagaacaaatagaagatatgcaagattactatgcgcgttatctgccgcaaatgtatctcgcctctattgtacctttgcttattcttattaccatttttcctattaattgggccgcaggattaattctttttgtcacagctcctcttattcctttatttatggcgttagttggcttaggcgcagcagatgctaaccggcgtaattttcttgccttaggtcgcttaagtggcaacttccttgatagattacgtggtttagatacattgcgcctattcaaccgtggtgatgcagaagtaaaacagataacggatgcaacggaagactttcgtaagcgaaccatggaagtgctacgtatggcatttctctcttctggcgtattggaattctttaccgccgtatccattgcggtcgtcgcggtctattttggtttttcctatcttggagaattgagctttggtgattatgggttaggcgtgacgttattttctggttttttagccctgatccttgcccctgagtttttccaaccattacgcgacttaggcacctattatcatgctaaagcacaggcggtaggtgcagctggctccttggttgagtttttagaagccgaaggtgaacagccccaacctacgggtaatcaaactattaataccgaccaaggtattgaaatagttgcccagcaattagaaattttgtcacatcaaggagccaaactggcaggccctcttaactttaccattcatcccaaacagcgtattgcgctggtcgggcaaagtggcgcaggtaagagctcattacttaatgtattgttaggttttttaccttatcgtggctcgttaaccgtcaatggtgttgagttaactcaactctctccacaggcatggcgccaatgtatcagctgggtgggacaaaaccctaacttaccagagcaaaccctgctggataatattcgtttaagtgatccgaacgccagtgaaacgaagataaataaagctattgaaaaagcttatgtaaatgattttattaacgaattaccggatggtttaaacaccattattggtgataatgcagcccgtctttctgttggtcaagcccaacgtattgcggtagctcgcgcccttttatcaccttgtcactttttattattagatgagcctgcagcaagtttagactctcacagtgaacagcgcgttatgcaagcgcttaatgaagcttcattaagcgcttgcataacgcgctgttcactgtga

SEQ ID NO: 309958 - DNA, 696 bp, Proteus mirabilis
atggtattggtgattagtgggcctattaacctaaatcaggctaaaccaatgatcgaacgttggatagcaacgctaccgacacgttcatcgcaacgtctattttgggctgatccggcgattaatcccaaattaagctcatttaataaaacctaccctattgccagtagcgataagagtatgatcagtattcaatacgcagccaaagcccaatggtcacaacagcaactgttagcacttaacttgcttgataccgttgtcagccaacgtttaagacttaatcttcgtgaacgagcgggcgggatctactcgctaggcttttctgagtcactaaccaagctgccaagtagtttttataccggacgtttaaactttaccgcatcaccacagcgggcagatgaattaattgcacttgcgcgtaaagtggtcaatgacgtaaaacaagcgggtattaccgataaagaattacaagaggcaaaaaatatttggttaactgaatatgggcaagccaaagagagtgctagctattggactgatgcacttgctcaagtggcaacagatgaccaacaatatcaacgactattaactgagactgcgattgtcaacggaataagtgtcagtgatgttaatcaagttgctcgtcagtggttgggtgaaaatgaaaaaatcttcaaactaacaccaccaacaaagcaataa

SEQ ID NO: 309959 - DNA, 411 bp, Proteus mirabilis
gtggatgaaatagttaagtggattattgcaaatactgaaagaattatatcaatcgttgcaataattgcatcatactttattggtgtttattcgaacagacgtaacgacaggcgcaaagagtttaattcagttgcagaccaactacatatacggtttattaaagcgaagaaggatctggaatcagggttttgtattcaacgctctttggtcaatgaagatgaaatattaaccctttctatccacatgaaagaaagggaaagagaaaaactgatagttgcttacagggagttttgtgttgcagtatcaatgatcaaatgggataagtatcacaaaccaactttagaagacgatgtaagacagcagatagtagaaagcatcaagcctcttatagacttaacaaaacatagataa

SEQ ID NO: 309960 - DNA, 135 bp, Proteus mirabilis
atgcctaacttggaagccaaaatcattgaattggaaaaggcgaatgcagtattacaaagccagtatggaaacctattggccatttgcattggacttatcgtagttatgtttatagccatctataggttaaaataa

SEQ ID NO: 309961 - DNA, 249 bp, Proteus mirabilis
atgaaaaaatgcgaatcaaacggaacaaaatacgcaagctatctgtgtgactttatgcgcaaagcggcaaagacaaaatcgccacacggtaagactagagggatatttaaatactcagccatcgacacatggactggagatagtcttggtgaagcagtttattacgatgaagggaatggaaatagaacgcatttaaacttctgtccgttctgtagtggcaagttacatagcgtagatatcggtgattaa

SEQ ID NO: 309962 - DNA, 318 bp, Proteus mirabilis
atgaaaggaacaacgttaacagagctaatccgcacatgggaagatttcaagggtatcatttctagacgagctcatatggcggcaggttaccccgataggaagcgctggcgtgaaataatgagagttcacaaaagaagattagtaagaggtaaagcaataaatagagcttaccgcgtagcaaagaagttagatcatcttgagtatttacagtggatgaatgatattcgcggaaaaaaaggcttacctaaaatgatttatacattcggcaattcaggcacagcaaaaagccaacgggaggcatctaatgcagggaactaa

SEQ ID NO: 309963 - DNA, 801 bp, Proteus mirabilis
atgtattcgatagttgcttctgatcttgatggcaccttgttatcacctaaccacttattaactccctataccaaagaaacgttacatctgcttattgaaaaagggatccattttgtgtttgccacaggacgtcatcatatcgatgtggcacaaattcgtgatgggcttggtattgacgcgtatatgatcacttcaaatggggctcgagtacacaatacgcaaggcactcttattttcagtcaagatcttgaacctgaaatcgtttatgacttagccctaatggtgtttgatcacccagatattgcaacgaatatttatagcagtgatgactggtatatcaataaagaaacgcctgaattaaaagaattttttaaagaatcggtatttaattaccgtctatttgagaaaacaggctttccaacaacgcaggtgtgcaaagtcttttttacctcagaagatcatgaattgttagttgagttagaaaagaaaattaatcaacgttggggcaataaaattaacgcaagtttttcattgcgtaattgcctagaaattatggcgggtggggtatcaaaaggagaggcactacaaaaagtcgctaagttgatgcaacattcagtaaaagacgccattgcatttggtgatggtatgaatgataaagagatgctacagatggcgggtaaaggctgcattatgcaaaatgcccaccagctactaaaagatctattaccggatatggaagtgattggctcaaatgttgatgatgctgttgcacactatttacgtaagttgtatcaggtttaa

SEQ ID NO: 309964 - DNA, 1722 bp, Proteus mirabilis
gtgttagaaagtgttccttatcgtggtattaaattagcctcagatgaaagcatgttgccacaaagtcagcgtggctttgctcctgttgtaagaggaattgcacaaagcaacgcaatggtgactattcgccaaaataatagtgttatttatcaaacctctgttcctcccggtgaatttgaaatatcagatctctatcccacctcttatagtggtgatttacaagtgactgttgaagaagctgatgggagcaaacgtacattttcccaacccttctctgcagtccccatgatgcaacgagctgggaacttaaaatatagtctcgacttggggaaatataatgctgatagcgcagagcgaaaaccgacctttttacaagcttctgccatttacggcttaccttataatttttccctttatggaggtacgctactttcagcagattatcaagcttatgcgataggtgccggcgtaaatatgggttatttaggggcgatttcagccgatataactcatgcaaataccacgcttatcgataaccataaagcacaagggcaatcttatcgtgtccagtattcaaaatatttaccggataccaaaacaggattttcattagcgtcttatcgctactcaactaaagattattatgatttttcaaccacgaatgaacgcttttcacagctttatcgtaagaaaaaacagtttcagatctcagtatcgcaagcattaggagagcttggttacctctctttaaatggttatcagcaatactattggtatcaagatagagtcgatcgcaatatcaacctaagctttaactctaattatcgctcactcagttatagtatttcttatgcctataataaacggcaagaaagtgaattaaccgatcaaattttatcgattaactttaacctgccgttcaatatgaccagcaataacaattggttaagttatcgttataacaccagtaaacaaggtgattcgataagttctgtaagtttaagtggtactcgtctcgaagataacaatcttcagtatgatatttcgcaaaactataaccatactcgccaagaatatagcggtgctatcaatggtagttatagtgcttcgggcggcgaaatcagtgctggttataactatgataaacgtttccagtcagtgaattggggagcaactggcgcgttattaatccatcaagatggaataaccccatctcgcactatctatgactccgctattttaatcaaagcggaagatattgatcatttgaaaattagcagtgcacaaagtttatataccaatgctcaaggttatgccgttatccctaacgtttcccgttatgaacgcaatagagtaacggttgatcccgcttccttaaagggaaacaacgatgtggaactcacttcaacaacagtgatcccaacgaaaggcgcgattgttttagccgattttaaagctcgcaagggtgcaagagtattagtgaacctctcttataacggtaaacctttaccattcggtagccaagttgaaattagccaagatggacaagtgatttccagtgggattgtggctaatgatggtgaggttttcctaaatggtgtacctgcaagtagtcaactacaagccaaatgggggaatagtgctaccgaacagtgccaagcaacattaaacgccgatctatcgctcgagaaaattcaatttttacaactggactgcagatag

SEQ ID NO: 309965 - DNA, 393 bp, Proteus mirabilis
gtgggggagttaagtgcgataaatggtgttgctggcgcatttgcagagcaggttcccattattcatattgttggtgcgccttctcagtcaaagcaagagaaaggaaaaacattacatcattgtttagcgacgggtaggtttgatgcctttgaaaaaatgtatcgtcatatttcaaaaacaacggctgtattaacatatcacaatgcgacggaagaaattgatagagtattagaaacattgtggcgttatcgatatccggtttatttattaataccagaggatgtcggcgtgatgaaagttaataaaccaaagttaccattacaattaacattacctcaaagtaatcccgacgatttaaataaaattattactcttcttgaaaataaaatttag

SEQ ID NO: 309966 - DNA, 363 bp, Proteus mirabilis
atgatcacttggttacttcttgctttatctttattattattagggttccatcgcaaacttgcacttactactttagctataaccaccattagcgcatttataacaggtgttatcacttggtatgtacttccggttatattgagcttaattttactctcttatgcatatcgccattacaaaacaaatcgtcttattgccactattgttattcttgcatttatcgccattattattgggttaacttttcattttattcctggttttaataacttacgctacattaaacatgttccattagggcaatatagcccccctttctctttttatttcaatgccgataaagcagtatcccttttattttaa

SEQ ID NO: 309967 - DNA, 189 bp, Proteus mirabilis
atggaaattacgattttgtgctcgtcagctgattgtagctctggtgttggagtcatggaggtaaaggtcaccgatgtggctgatatttcaattccagagtggtatcaaactgaaatactcagaacagctattagtgaagaaaatataatcaagtaccttaaaagccaaggttatttggttacccgttaa

SEQ ID NO: 309968 - DNA, 681 bp, Proteus mirabilis
atgggaacagcaacgttaattattggtgagtctggcacagggaaaagtgccagtttacgcaatataaaaccagaagaaacattattaatacagacggtaaggaaaccgttgccgtttcgctcaaatgcatggaagccatggaacaaggaagatcctaaaacatcaatatttgtatgcgatagatgggaattaataacagcatttatttcaaaagctagtgaatacgataagaagataatcattattgacgattttcaatacttaatggctaacgaatttatgcgtcgttctgacgaaaaatcctttgataagttcacagaaataggcgctcacacatggaatgtgattaacgcatctatcagtggtacacctgatgatgtgcgagtttactttttagctcataccgaagaaacgcaaatgggaaaggtaaaaatgaaaaccatcggcagaatgctagatgaaaaaataaccgtggaaggaatgtttactatcgtgcttaaaacactggtcaaggatggtcagtacctattctcaacacagaatagcggtaacgatacggttaaatcaccaatggggatgtttgaatcccacgaaatagaaaacgacttaaacgcagttgataatgcaatttgcgaatattacgaaattgaaaaaactaaagaaatggagaatatagcatga

SEQ ID NO: 309969 - DNA, 585 bp, Proteus mirabilis
atgaatgggaatgtgatttttacatacaatcaagatgatgccttagctgctggacaaggtggttttatcaatgagtctggagcttatattattactatctcagaagcaaagttaggcatgtcagaaagcggggctagatttattgaattttcaggcgaggaagatgatggacgaaaggttaattatcttagtatctacagcacaaagagagatggggaagtaaataaatttggtcataacctaattaatgcaattatgggttgctctggagtacagcaattaactcaagttaaagtgggagaaaatcattttattgcaccagaatttagcggtaaacgtgtagggcttgttttgcaaaaagtattaaaaacaaaaacaaacggtaatgaaacatatagctttgatataaaaattccattctttgctgatactcgccaaacgttagcagaaatgattgataatgcacctgctgtgaccatcgacaaaattcttgcctcattaaaagataaggatgagcgcagacagcaatcacaatcaaatcagagctacggatatccacaatctactgatgatgcgccattctga

SEQ ID NO: 309970 - DNA, 201 bp, Proteus mirabilis
atgactattacattaacaacaaagcaaataatggctatggctgattttgctggcttaaaagtagaactgcacggtttacaaactgatgacgagacagaatacacgctagatgatgagcataatttaggctgtttcgataagtcaaagcctgttttttactgcactgaatatccagaagaaggcgccattcagctggactaa

SEQ ID NO: 309971 - DNA, 174 bp, Proteus mirabilis
atgagtaagcagatggttttagttgcaagaacaaacaaggttggatctgactctgaggtcggtttaggaatgaccgaagaagagtggaacaaattaaccaattctgagcagggtgtaattattggtgatggattagaaacacttgttgattattgggtgcaaccagaggaatga

SEQ ID NO: 309972 - DNA, 294 bp, Proteus mirabilis
atggataaatcaagacagcagtttgaagcgtggtttaatgacgaatataaaacaacaatgaaagactacgatgagccattaattgagttcgttatgaagcaactatttattgtatggcaagcatcacgcgagagtgccgagccagaaattaaacatcaacaactaagagagcttgttaataccgcaagagatacggcaattaaatatcaagggtgtcaatgcttacgttcagcgttatcaacagcaataagacactgcttaaccagcaatggggtgaaaataaaagatgaataa

SEQ ID NO: 309973 - DNA, 462 bp, Proteus mirabilis
atggctgatgagacggcaaataaggcgacaatcactaacagcgaaaataatttgagattatttggcacactatttattccccctccttgtgtgatccaaaacaatgacatgattgatgttaattttggtcaccaactgggaacgagtcgcatcgatggcattaattatacaaagaccgtcaattacacgttgcagtgtgaagaaaatgcaaaaggttgggcattaggtttatccattatcggctctgcaagccaatttgatgcggctgctttacaaaccaatataacggatttagccgtacatctcacgatagatagtgagccatttattttaaataaacggtttgttattacctctgataaaccgccgattattttagctgtgcctgtaaaaaaatcaggaagtaccttaacaaaaggtgcatttgaggcaacagcaacgctacttgctgaatatcaatag

SEQ ID NO: 309974 - DNA, 273 bp, Proteus mirabilis
atgaaaggttatattcaaacggtaacgggtccggttaaaaaagcggatatggggctgacactacctcacgaacatttatttaatgatttatctggcgttgttgatgaacctttttatgaattctcacacgttttagtagataaaaaagtcagtgcagatattcagtggggactaaaatacgatccatattgttgttgcgataatatggataaaaaacccattgaagacgttatttttgaattaaataattttaaagagcttgggggcaaataa

SEQ ID NO: 309975 - DNA, 1596 bp, Proteus mirabilis
  misc_feature (1582)..(1591): n is a, c, g, or t
atggaactgaagtcaaccccaatgggacaacgtttagctcagcatccttataacagggtaaaattgttaaatgcgggtattgaggtcagtggtgaaaagcatcaatatttaattccttttaatgaattgatcgacattttttgtaaaaaaggcattgtgtggggagagttagagtttttactgcccgacaataaagtggttcgtttgcatggaacggactgggaagaaacgcaacaattttaccgctatctttatcaaacttggcaaatatggagccaagagatgagtgagataacggcgcaagtacttgaaaagcaactctcttctatccaagatataattcaaagcgataaatggataaaacaaaaccagttagccggtattcaacaggctatccaagaaagtttttctgctattcctcttcctctggaacgacttgctcaatttgataactgtaaggtgcattatcaacgctgtttacagtggttacagaaaggtaaggcattaattgtgcaagaaaatgagcaatggatcacccgtatgttgacagagcatgcggagttttttactaccattgaaacatcgcctttaaatgaatcgcaatgtaaagccgttatcaacggtgaagataatatattggtattagcgggtgctggtagtggtaaaacgtcggtactagtggcaagagcggggtggttgttacgtcgtaaactagcaacctctgaacaaattctactattggcttttggacgtaaagccgctgaagagatgaaccaacgtttatctgagcgcttaaacgctgatattacggcgaaaacctttcatgcattggcattatttattatccaacagtcaactaaaaaacaacccaagatcagcgaattagaaatcaatagtgaaaagagaagaacactattgttaacgcagtggcgtgagcagtgtcagcagaaaaaagcacaagcgaaaggctggcgtgagtggttatctgaagagctagcatgggaaatccctgatggggaattttggcatgataaaaaattagaaaatcaagttgccgtaaggttagagcggtggatcagtttattaagaatgcaaggtggtagccaaaaaacaatgattgattctgtgcctgcagaatatacggatgcatttaaaaagtgtttaaaactattagcaccactgttaaaggcatggaaaaccgcattaaaagaagagaatgccattgatttttcagggctattacatcaagccattaatctgatagaaaaagggcgtttcgtcagtccttggaaacatattctggtggatgaattccaagatatttcaccactaagagcagcactattaaatgcgttaaaacaacaaaatacacaaacttcattatttgcagttggtgatgactggcaagctatttatcgctttagtggggctgaattattactaacaacagcgtttcatcaatcttttggtgatggtgctgagtgtgcattagataccacttatcgttttaattcgactataggtgacgttgccaatacatttattcaacaaaatcctaatcaattagctaagcctttaaatnnnnnnnnnngctaa

SEQ ID NO: 309976 - DNA, 363 bp, Proteus mirabilis
  misc_feature (266)..(275): n is a, c, g, or t
gtggttaaagtttatgcaccggcgtcaattggcaatgtgagtgtcggttttgatgtgttaggagccgcagtttcgcctattgatggtcaattattaggagattgcgtaaccgttgaagcggcgcaagaatttcaacttcacagcaaagggcgctttgttagtaaattaccttctgatgctaagcaaaatattgtttatcaatgttgggagctattttgtgaaaaattaggtaaacaattacctgtctcgatgacacttgaaaaaannnnnnnnnntgccgataagctcaggattaggatcaagtgcttgttctgttgtggctgcactcgttgcattaaacgaatttgctcacaaaccatttag

SEQ ID NO: 309977 - DNA, 129 bp, Proteus mirabilis
atggaagtcagccctgattacgtcattggtgcagataccagttgtttaattaatattcaaggccgtttaagtcgtgaaaagcgtcctgtcaaagtgctgcatattgcacaagttttaatgagtcaataa

SEQ ID NO: 309978 - DNA, 819 bp, Proteus mirabilis
atgtctttatatcagggagataaggctctcgaagcactatcattaggcaaagaaacacaataccacacacactatgatgcgagtctattacaaggtgtgcctcgtcgcttaaatcgagattcactctctttaactgctgacaatctaccttttcatggtggtgatatctggacaatgtatgagctatcttggctcaacagccaaggcttaccccaagtggctattggccatgtggaattagatgcaacgacagaaaatctcatcgaatcaaaaagctttaagctctatctcaatagctttaatcaaactcgttttgaaaattggcacatcgttgaagaaacattactcaaagatttaactgcttgtgctaaaggcagggtgcatctaacgctttacccactttcccattttacctcacagcctattgtcgattttgtaggagagtgcattgataaccaacctattgaaattgataattaccaattcgatagccaatggttaaacggctcaacaacagatacactggttgaggagacgcttgttagtcatctgctaaaatcaaattgcctgatcacgcaccaacctgattggggatctgtgatgatccaatataaaggcaaaaaaatcgaccgtgaaaaactactacgctatcttgtatcctttagacagcataatgaatttcacgagcagtgtgttgagcgaatattccacgatattatgacattttgttcaccagacacattaacggtttatgcaagatacactcgccgtggttatttgcccatgcacaaacaaaatatcgcgcagtacagcaaatag

SEQ ID NO: 309979 - DNA, 198 bp, Proteus mirabilis
gtgccgctagcaaaagctcagttacctgaaaaaatggtattaatcttaggtcaagagaaggatggcttaagtgatagcacgttaaaacaaggggatatgagcatttacattggtggtacaggccatattgaaagcttaaatgtctctgtggcttctggcgtgttattggctgaatggtggcgtcaacatcacggctaa

SEQ ID NO: 309980 - DNA, 645 bp, Proteus mirabilis
ttgagttttaaagaaggtgaggttgaatggaagacattgggggatgttactaaaaaatggtattctggcggaactccaacagcaggcaaccctgaatattatgtaaatggcaaaattccatggttaagaactcaagaggttaaatttactgatatttcagcaactgacgttaaaataactgaagctgcattgaagaattcatccgcaaaatggatccctaaaaactgtgtcattatagcaatttctggagctacagcaggtagatcagctattaataagataccattaactacaaatcagcactgtggctgtttagaaatagatagtaaaaaagctctataccgctatgtatttcattgggttagttttaactacgaaagtattaaagtacttgggcagggagctagaggggatcttaactccacaatcataaaaaatttcaaactaccgattccttatgccactaatcctgaaaaatcactacaagaacaagcaaaaattgttgctgtccttgataaattcgacgctctaacaaactcaatctccgaaggcttaccccgtgaaattgagctacgacagaagcaatacgaatactatcgggatttattatttaactttcccaaaccaaaacccgtaaccaactaa

SEQ ID NO: 309981 - DNA, 3129 bp, Proteus mirabilis
  misc_feature (927)..(936): n is a, c, g, or t
atgcaacaaacaaaaacgattgccgaatccaataattttattgtgctagataaatacatcactgaatgggatgcgaatgatcgctatcaaagtgaggcagagttagagcgtgaattgatccaagatttacgcaatcaaggctatgagtttgtgcctgatttaacatcacaatcggctatgttggcaaatgttcgggttcaactccaaacactgaataatgttgtttttacagagagtgaatggcgacgctttactgagcaatatctcgataatcccagtgatacgattgtcgataaaacacgaaagatccacatcgattatatttgtgattttacttttgatgatggccgactagaaaatatctaccttattgataaaaaaaacctgcttagtaataaggtgcaagttattcagcaatttgagcaaacaggctcacacgccaatcgttatgatgtcactatattagtcaacggtttaccactggtacaaattgagttaaaaaagcgtggcgtagcgattaaagaggcatttaaccagatacaccgttacagcaaagagagttttaactccgataattccttgtttaaatatctgcaagttttcattatctcaaatggtacagatacccgctactttgctaataccacaaaacgcgataaaaacagttttgattttactatgaactgggcgcgctcagataacaccctgattaaagatctcaaagactttacggcgacttttttccaaaaaaacacattattaaacattttgttcaattacagtgtatttgatattagtaataatctgctaattatgcgcccttatcaaatagcggcgactgaacgcattttgtggaaaattaacagtgcctaccaagccaaaagttggagtaataaaaatagtggtggatttatttggcatacaacnnnnnnnnnnggttcaggtaaaactctgaccagttttaaagcagcacgactggcgaccgaactcgacttcattgataaagtattcttcgtggttgatcgtaaagatcttgattatcaaacaatgaaagaatatcaacgtttttcccctgatagtgttaatggttctgatagtactgcggggctgaaacgtaatctggaaaagaatgataataaaatcatcgtgacgacgatccagaaactgaacaacctgatgaaaggtgaaacagatttacccgtctaccaacagcaagttgtttttatttttgatgaatgtcaccgtagtcagttcggtgaagcacaaaagaatctgaaaaagaaattcaaacgattttatcaatttggtttcacgggtacaccgatttttgcgggtaaaaatgccttaggagcagaagatacggcaagtgtcttcggtactgagttacactcttacattatcaccgatgctatccgtgatgaaaaagtgttgaaatttaaggtagattacaatgatgttcgtccacagtttaaattgatagaaaccgaaacggacgagaaaaagctcagtgcggccgaaaacaaacatgctctacttcaccctatgcggatcagtgaaattactcattacatcctgaaaaactttcgtaaaaaaacacatcgtgctttttctggagcaaagggatttaatgctatgtttgccgttagcagtgtagatgcagcaaaagcatattatgagacttttaaacatctccaacaggctgctattgagcaagataatcattataaaccactcaaagtggccaccatcttttctttcgctgccaatgaggagcaagatgctatcggtgatattaatgatgagagttttgatgttactgcgatgaacagcagttcacgggaatttttagaatcagcgattgcggattataacgctcaatttaaaaccaacttcagcaccgatggaaatagctttcaaaactactatcgagatcttgcaaagcgggttaaagcacaagaagttgacttactcatcgttgtaggtatgtttttgaccggctttgatgcgccaacactcaataccttatttgtagacaaaaacctacgctatcatggattaatgcaagcattttctcgtaccaatcgaatttacaatgccacaaagacctttggtaatattgtcacctttcgtgatttagagcaggctaccgtcgatgcaattactctgtttggaaaaagtaataccaaaagcgttgtaatggaaaaaagctacaccgagtatatggaaggttttacggatagcctaacaggtgaagcacgacgtggttttatggatattgtaggtgaactagaaaatcgtttccccaaccctgctaatattgaatccgagaaagagaaaaaggccttcgtcaaactatttggagaatatttacgtgctgaaagtgttctgcaaaactatgatgaatttacctcattaaaagccttacaaactattaatcttgatgatcctgatgcagtaaaagcctttaaaaccgaacattatttggatgatgagaaattcgcagaacttcaaataatacgtttacccgcagatcgcaagatccaagattatcgctcaagttataatgatatccgtgaatggcaacgccgtgaacgtgatgctaatgctaaagacaaaaatactgttgactgggatgatgttgtttttgaggtagacttactgaaatcacaggaaattaacctcgattatattttagggttaatttatgactacaataaaaacaacaccgataaagagacgctcaaagaagaagttaaacgtttaatccgtgctagtttaggcaaccgagcaaaagaaggattagtcgttgattttatcgaacaaacaaactttgatgatataccagataaaacaagtatcattgaaacgttctatacctttgcacaacaagcccaacaacgtgaagcggatgcgttaatcaaagaggaaaatttgaacgaagccgctgcacgacgttatatcagtacctcattgagacgcgagtatgccactgaaaatggcacagaattaaatgagactctccccaaactcagtccgcttaatcctcagtataaaactaaaaaacaaactgtatttcaaaaagttgtagattttattgagaaatttaaaggggtgggtggggacgtataa

SEQ ID NO: 309982 - DNA, 228 bp, Proteus mirabilis
gtgattaagcgcaacacgcaaactccggtattaattgttcaaacattagatgatatcaatgtagatgtggctgcattccatcaattatctcaagagataacgcaacctaatgtgacatttattaaatatgataaattaaatcatggtttttataatcaacaaggtgagcgattaaccggaaaagtcgttcaagatatacagcaatggtatgcgcaatataataaataa

SEQ ID NO: 309983 - DNA, 210 bp, Proteus mirabilis; identical to SEQ ID NO: 299942

SEQ ID NO: 309984 - DNA, 1533 bp, Proteus mirabilis
ttggcaccagatgacctagtattatttgatcgtaataatcacaaatcaaaccatcacggagcattaattcaagcaggagcaacgcctgtttatcttgaagctgcacgtaacccatttgggtttatcggtgggattgatgctcactgttttgaagaaaaatatcttcgtaaactcatcaaagaagtcgcccctacacgtgcaaatgaaaagcgccctttccgcctagccgttattcaattaggtacctatgacggaacaatatataacgcacgtcaggtagtcgataaaatcggacatttatgtgactacattttatttgactccgcgtgggtgggctatgaacagtttattccaatgatgaaagattgttctccacttctacttgaactgaatgaaaacgatccggggatcttagttacacaatctgtacataaacaacaagcgggattctctcaaacctcacagatccacaaaaaagatcgccatattaaaggtcaaaaacgctatgtaaatcataaacgtctcaataacgcctttatgatgcatgcctctactagtccattctacccattatttgcagctttggatgtgaatgccaaaatgcatgaaggtgagtcaggtaaacgtttatggatgaattgcgtaaaaacagggattgaaacccgtaaattactcctgcaatcctgtaaacatattcgcccgtttattccagaaactatcgatgaccgtgcatgggaagattttgatactgaagaaattgccaatgatctccgattctttaattttgttccgggagagcgctggcactcatttgagggatatgaaaaaaatcaatactttgttgatccatgtaaattactactaaccaccccaggtattaatgccaaaacaggaaaatatgaatcatttggtgttcctgccaccattttggcgaactatctacgtgaaaataacattattcctgaaaaatgcgatcttaactccatattattcctgctaacacctgcagaaagcatggcgaaaatgcagcatctggtcgcacaaattgctcgctttgaacaattactggaacaagatgccccactgaaagaggtacttccatcagtatatcatgccaaccaaacacgttatcaaggatacaccatccgtcaattgtgccaagaaatgcatgatatgtatgtgaaatttaatgtaaaacaactgcaaaaagagatgttccgtaaatcacatttcccacaagtcagtatgttacctcaagaagccaatatcgcttttgtgcgtggcgaggtggagttagttgccgtggaaaaaattgaaggccgtatcgccgccgaaggtgctctaccttatccaccaggagtactgtgtgtagtaccaggggaaatttggggtggctctgtacagcaatattttctagcgctagaagaaggaattaatctattcccgggattctcaccggaattacaaggtgtatatatccgcaatgatgaggacggtcgtctgcgggcatatggctatgtaattaagcactaa

SEQ ID NO: 309985 - DNA, 180 bp, Proteus mirabilis; identical to SEQ ID NO: 306665

SEQ ID NO: 309986 - DNA, 882 bp, Proteus mirabilis; identical to SEQ ID NO: 305259

SEQ ID NO: 309987 - DNA, 681 bp, Proteus mirabilis; identical to SEQ ID NO: 306651

SEQ ID NO: 309988 - DNA, 1857 bp, Proteus mirabilis
atgagtaaaattatggagttaatcggcactatttttcgatttagttggcaggcgattaactttatcaggaaactaatcttaaacgttattttcttctttctactttttatgggtgtgggactctatttcatcgtccaagaaacgcaaaaacctaccgattatcaaggtgcattactggttgatttaaaaggcgttattgttgaccaaacagctaaccaaaatcctttagggcaaatgagccgagagcttttgggtgtttcgggtagccagttacaagaaaattcgttattcgaagtcgttgataccttacgcaaagcagcgactgaccccaaaattaaaggaatggtactaaaacttgacgaatttgctggggcagaccaaccttcactcaattatgttggtaaagcgctgactgaatttaaaaaaacaggtaaacctatctatgcgattagtggttattatagccaaccgcaatattacttagcctcttatgcagataaaatttatttagcatcacaaggtgctgtgggtatttatggtttaggttttagtaatctctattacaaatcgctattagaaaaacttaaagttaatacccatatattccgtgtaggaacctataaatcagctgttgaaccgctgatgcgcgataatatgtctgatgaagcccgagccgcatctagtcgattagtttccgtactctggtctaattatttaacgcaagttgcagaaaatcgtagtattaccaaggaagatgttttccctggtgcaaaagagatgatagttgagctgcgtaaagccgatggcgataatgctacttatgcacttaatcgcaaattggtcgatactgttagctcttatgcccaatttgaagcggatatgaaagagacctttcaatgggatcatgaagctaagcagtttaacaatattagtatttatgattatgctgataacctcaccgcattcgccccagaaaacgaagacggcaatattgcggttgtggtcgttcaaggcgcaattattgatggtgaaagcattcctggctccgcaggtggttcaaccattgctaatcaaatccgtcaagcgcgtttaaatcctaatattagagcattagtattacgagttaatagccccggtggtagtgtgtctgcatctgagcagatccgcagtgaaatagccgcctttaaacaagagaaaaaacatgtcgtggtttcaatgggcggaatggctgcatcagggggatattggatctctacacctgcgagtaaaattatcgctagcccttcaacattaacaggctctattggtatatttggtgtcatcaatacctttgaaaatagcttagaatcaataggtgtgcatagtgatggcgtgagtacatcacctcttgcagggctttcggtaaccaataaattaccagaagatttttcagagctattccaacttaatattgaaagtggctataaaacattcctgaaattagtagctgaatcacgtaataaaacaccggcacaagttgatcgtattgcgcaaggtcgtgtttgggttggcgttgatgctaaacaagtaggattagttgatgaatttggtgatttcgatgatgctattaatgcagcagcaaccatggcaaaaatcaaacaaccagtcattgattggatgaaaccggaattaagcttatcagagcaaatattaatgagcttatcggccaatgcaaaagccattattcctgatccattacaagcctatttacctgcaccggtatttaaagaagttaaaacacaaactgagttttatcgtaatatgaacgatccgcaaaaccgctatgcgtattgtttatcttgtggtgatattcaataa

SEQ ID NO: 309989 - DNA, 273 bp, Proteus mirabilis
atgaaaaaacgaacaaacagattttatactactgagtttaagcaagaagcggtcgcattagtcaccgaacaaggttatagcgtcccaaaagcggcagcttctttagggatcaccgataaattactttataactggaaagcaaaattcgacgctgaacaatcaggtagcagcttgaatgttgatgagagagccgagctattaaggcttcgaaaagaaaataaagaacttaggatggagaaagaaatcctaaaaaaagcagcgccctccagctaa

SEQ ID NO: 309990 - DNA, 213 bp, Proteus mirabilis; identical to SEQ ID NO: 296742

SEQ ID NO: 309991 - DNA, 894 bp, Proteus mirabilis
gtgttgccctcaggcgcattaacgggcgatgaacagccgattttaaacaataagcacatcattcaatttcttaatagtaaaaaagtgatccacaccatcgataaagtggcaccgatggactcttgggttattagtaatatcaaatactgtcagattgataacgatgaagataattaccatcaccatgagttagtgacgacttttcacgaggctggggtgatccgcacctgttggcatcatgataaccatattagaaattcatctgctgggtgggttgctgaattagctcataaaaaccgtattaattggatgttagacactattcgttttcggttgagattagatagtagccaccagctaacgatacctgattttttcacctttgcggttatgcataacgttatcgatgaattaccagaagcgatattgcgccagattttaaattggtcagataaacaagaagaacgcagagttcacggtggttttcctgaatctgacattatcccaagcaacgtaaccgcattatccgcaatgaatgaacgtttagatgcgataaagccggttattaaagtatctgtcgatccggagccaccagtatcatttcttcttaaaccaaaaatgcaacgttgggaaaatatcaactggctccaatgggtgaaaactcaaccgtgttgcgtgtgtgggcaacaggctgatgatccgcaccacatcataggtcatggtatgggtggtatgggtactaaggctcacgacttattcactattccattgtgtcgcattcaccatgacgagttacaccgcgacccaaaacaatgggaagccactcacggcaatcaactcgaattgttatttcattttttaaaccgttcattaggcatcggtgcatttatttaa

SEQ ID NO: 309992 - DNA, 294 bp, Proteus mirabilis
  misc_feature (259)..(268): n is a, c, g, or t
atgcagaattctcaaggggttaactctgttgatatcgcagtgactattttagagtttttagcatctcaaggaggtgctgcacgctcttctgagatagctaaggcatgctcactatcaaaaagtcgtctacataaatatttagtgtctctttgccgtagtgacatgctctatcaagagagtgaaggagggcagtattgtttaggtagcaaaattataatgctggctgaggcaacacacacaaacctctctttagttgatnnnnnnnnnntcgtcggcagcgtcagatgtgtataa

SEQ ID NO: 309993 - DNA, 339 bp, Proteus mirabilis
atgataaatacgttaactaagaaacaagcaacaaggactctgctattttcactatttcttggtttatccgtgtcttctttttcttctgttgcagcttcaacaaatgtaaccattaatggcaatggctatgataatgttttagataaagagcaagctcgacaaatgaaagaagattgggatcaaaaacgcgatctccgtaataaaatcaaccaacgcgaaaaaactgagtttaataatgagcgtgatgcttgtttaaaaagcgccaatatctatgcttactgggagccagaaacacgtcgctgtttagacagtaatactggtcgcccaattaacccttaa

SEQ ID NO: 309994 - DNA, 159 bp, Proteus mirabilis
atgctccttggattagcaacttactttatgacacagcgagaacagcggaaacgaacagcgttatttgctgaattagttcatcgaaattgttctagcgatccgcaagacatagaaaagatagttggcgagatgctgactaaagctaaaaaggacatttaa

SEQ ID NO: 309995 - DNA, 471 bp, Proteus mirabilis; identical to SEQ ID NO: 306659

SEQ ID NO: 309996 - DNA, 597 bp, Proteus mirabilis
atgctatcaacaattattgctgcttcttttgctacggctgctaatgcagatactcgtgttgcacaagcaaccgcgacttggcaagcaactgcaattaaagatacaaccagtatgttagttgtcactccattaaaaagtctgacttttaattatgctgaaggccaaaaatcatttaaccaacaaaatggtgcatttgatattgctattcaaggccaatctggcgcaactgattttaaattatcatcaaaactgattgctaatacgttagcaagaacaactgatgattcaacattaacagttggtgttaaatggaatggggaagacctttctaaaacaactgatgtcgtgttaattgatacatcaaaagggttaacctcaggtttagataatttagctgctgatggtatttacaatggctctgagcgcgctacagatcgtggtgaattcacttttgtaattgccagtgcacaagcagcaggagcaacagccgattttaaatcactggctgatggtgtctgggatggtgatgtaaaagtgcaatttactgccacttgggatggtgacttttctaccgttaaacctaatccagaaccttaa

SEQ ID NO: 309997 - DNA, 792 bp, Proteus mirabilis
atgaatgcattatcacaatttacggacgaacagcgcaaaaatggtgtgataactttttcatcaggtaatcatgctcaagctattgcactatcggcaaaattattaggtattccagctacaattatcatgcctgaagatgcccccaccgctaagatgcaagcaacaaaaggttatggtggtagagtcattctatataaccgttatacacaagatcgcgaagagataggacaaaagcttgctcaagaagaaggattaactttaataccaccttacgatcatcctcacgttattgccggtcaaggtactgcagctaaagagttattcgaggaagttggtgagttagatatgctgtttgttcccttagggggaggtggtttactttcaggttcattattatcaaccaaagccctttcgccacattgtagaatttttggtgttgagcctttagcgggaaatgacggacaacaatcattacgcaaaggtgagataatttatattgatacgccaaaaactattgcagatggcgcacaaactcagcatttaggcgattatacttttgagatcattcgcaacaacgtagacgatattttaacagcaacagatgaagaactaatttctgctatgcaattttatgctcagagaatgaaaatcattgtagagcctacaggctgtttaagtttagctgcagctcgtcaatttggtgataagttaaaaggcaaaaaaattggcattattatcagtggtggcaatgtcgatattatgcaatatggtcactttttatcacaaaaataa

SEQ ID NO: 309998 - DNA, 570 bp, Proteus mirabilis
atgaaccataagaaatacgaccttatctattgtgatcctccttgggattacaaaaataaagtttcaaacggtgctgctaaaaatcattatccaacaacttccctcttcaatctaacccatatccctattcattctatcgcatctgataacgcagttcttgccatgtggtatacaggtaattttgtactcgaggctattaaattagccgaagcgtggggctttaaagtgcgcacaatgaaagcttttacatgggttaagtttaacactttagcatggcaacgaattgataaggcgattaaaaacagtgagttatttgatcatcacgacctgcttgaactattagatgctgaaacaaaaatgaatggaggtaactacaccagagccaatagtgaagatgttttaatcgctactcgaggcaatggattacagcgcattagacagttgtacggtgatgtaaatcgcattgagctattcgctcgtgacatgtcacaaggttgggatgcatggggcaatcaatgtcctaacaacagtatcgaacttatcaattctcattttatttgtaaggaataa

SEQ ID NO: 309999 - DNA, 165 bp, Proteus mirabilis
atggttgcgccaaaagcttcactggatataccagtaaaaaccagtaacgttaatcagttttatatgatgtatgtaaatgattacggtggacacccagagctcaaatttgtatgtcagcaagatagctgcaaagtagcccctaaagatcaacaacctaaatattaa

SEQ ID NO: 310000 - DNA, 123 bp, Proteus mirabilis; identical to SEQ ID NO: 289915

SEQ ID NO: 310001 - DNA, 303 bp, Proteus mirabilis
gtgaattcacgttatcaaaatgaagatgtggcgatttgcgtattagtagatatcagcgctcgtgttaaaatggaacgctctctacaaaatatggcaacggccgcagaacaagcaaaccaagctaaatcaatgttcttagcgacagtcagccatgaattgcgtacaccactgtatggcattattggtaacttagaattattacaatcattgacgcaaaatgaagagactgccagattattaaaaacaatggataactcttcatcgctgctactcaaaattatcagcgatacaattaaaaattga

SEQ ID NO: 310002 - DNA, 135 bp, Proteus mirabilis
gtgtttgtaataaacacaaaagatgaatttattggctcatttaataatgtaagtgattggttcggtgattatgcttcacaatttatgaaagagagtggtgcgttattacaaaaagccaatgatagccggatttag

SEQ ID NO: 310003 - DNA, 273 bp, Proteus mirabilis
atgggattaggattatttccaaataaaagtaatatttgttttgatcgctctgatttagctgttattgctgccgttaatcattccggtgtcgcaatgggacgtaaacgcttaattcaaaaacaactcgcaaataatgaattaatagtcccttttgataattgtgagtttttttgtgcacaacgctattatctggttacccgcgatgaaaagagtaacgctaaagtacaactttttattcaatggctgaaaaaacagatcttacaagggatgtga

SEQ ID NO: 310004 - DNA, 474 bp, Proteus mirabilis
atgttaaaaaagcttcttgtaactagtattcttccacttcttatcacttttcaatcgaatgctagtagtaagccaaattcagaaaaaaatatagaatatagaccactcactcaagaagaagtcactctaattaaggaatcggtagagggaataataaaagatcctgatagcacaaagtatattttagaggacagagttatatccatcggtggtaaagaagaggttcgctattgtggtgtgataaacactaaaaattcttatggcggatattctggatggttgccatttactagtatgatgatggtaaataaaaataatgaattaattgtacttagctacattgggcaaatcgctaatgtaaacgatttggctcaagtatccaaagttggttattcaagcaataaaatgattaaagaatgtaaaagtgtgggttattttcatgataattttatagataatcatacatatagataa

SEQ ID NO: 310005 - DNA, 1743 bp, Proteus mirabilis
atggataacaaatacataaagcccattgaaaatctctctatcgggaaaattattgaagtagatggctcgcgcattatcgccgagctcgaccctactatttcagacttgtcccgagtatttgctggcgaaaactatccaattgggcaatttggctcaatcattaaggttcattttggccgccgctctatttatggtttagtcagtcgattacgaatgaaggctgactaccagctagaaaagggcttgcctgtcgcatcttccgatgaacgaattattgaagctgacttgtttggagagggagagtggcgtaggaaaggtgaaaatgagcttgcccttgagtttgaacgcggtgttactacttatccactaccgcagcaaaccatttacctgacacccaaattagagcttaggtttatttacggtgacgccaaaggtgccgttattcaacttggcgagcatgttggctctggcggtgcaccttgttacgctgagttgaatgaattgttaggtaagcatactgctattcttggctccactggtgctgggaaatcaggtacagttgcggcagttattcatagtattcttgagcgtggtcagatcgcctctcatgagcgctggcacccacaaattattatccttgatccacataatgaatatggcaaagcgttccccacacaccaacgtttatcgaccgatgaaggttcacttaaacttccgtactggctactcgatttagaagagtcattgagcttgtttatcggcaagactgagtttgcagcaacctcacaatcaaacattgttaaaaatgccctaattgcagttcgagagcaggcggctgaacagcttgggtttgataagaatcaattaacggttgattcccccgttccttatattctgggagatagtagtggacttgatcatttaggaaaaaaagatggtgaactctatactgaaggcttaattggagctatcaacctacaaaggccaacaggaatagacaaaaaagctcacgaggactttagcaaagtaattcgaaagattgattcactgctaaaagatggccggctcaaatttatgatgaaaagctgggatggaactgaagatccactaccagcaatcatcaatcagttcttaacgcagcaaaccactgtgcaaattgttgacttgtctggtgtacctaatgaagtcgctggtgttgctagcgctgcaattgcgagaatcatttttcaacttaaagtctggcaaaccgaggctgaacggcaaaatagcccagtacttttggtgtgtgaagaggctcaccgatatgttccgaatcgtggtgaagctcaatatgaggcggcacaatcagcagttcgccgtattgctaaagaagggagaaaatatggtgttggcttattgttagtttcacaaaggcctagtgaagttgaatctacagtactgtcgcaatgtaattcatggatcgtacttcgtataactaatgatgctgaccgcgagcatgttcgcagtatattgcctgattcaatgtctggcttaacaaaaatgctttcaggtctcagacgtcaagaagccatatttgtcggccaagcagcaacgttaccaaccagagtgatgattagaagcttatctgatgaacagttgcctcgctcaaatgatatagattttgacaagggatggcagcaacaggctatgacaatagagcaaattagtgatgtggctatgaagtggcgttatcaaactaagtaa

SEQ ID NO: 310006 - DNA, 1143 bp, Proteus mirabilis
atggcattcgataccaaagtttttgaacagaaagagtttagagaggcaatcaataaactcgaagaattgctctcacactcaaaagcggttctgttaggtgctggagcgagtttttgtgctggtcttccattaacaaaccagctaacagaaagagcactgataagtgaccagctatccgttgattcaaagcagatattaactgccatacaaaactcttttgcaggtgcaaatccagcttcacacattgaagattacttaagtgaactcgtcgattgtcttgctatcacggctcgtcgagcaaatcgcaatgtaacggctagcgatgtatctattggaggtactgaatatagtaatgatcagctattagcagcgataaacgagataaaactcgctatttttgacgtaattaaagttgatgtagattctgctgtacatgagcgctttgttcaggcactgcatcgaccaatgcgaccagggaaagagagcataccgagcaccatcgattatctggtgatgaactacgacacgctaattgaagactcactcgcactatcacagttgagatatgctgatggtttagagggcggtgtatctgggtggtggaatccttcaacatttgaacagaacaatctagatgcccgagtatttaagctacatggttccatcaattgggctgagcatgcttcttcatctacaccattgcgtattgctccacacttgaagcggaacaaagacaaagcggcaaaaattatgatttggcctgcttccactaaataccgtgaaacacaactagatccctatgcaaacttaatgcatcgagctagagctgttttaaacccgcaaggtggtagtcaacgtgttttgttgatcactgggtacagttttggtgatgcacacatcaacctagaaattgaacgtggtttaagggcttcaaatggaaatttaacagtggtggcctttactagcgatgctgagcctagtggcgtattgcagacttggcataaagataactccattagcgaacaattactgatctttgctgataaaggatttttccacgcagagcaaaaagcaatctcaaccaatagtattgaatggtggaagtttgaaaacctaatccagatccttgaaggaggcatttga

SEQ ID NO: 310007 - DNA, 1200 bp, Proteus mirabilis
atggagcaggttttatataaactaccagatgggtggaagtggcaagagttagcagatgttgttgttaaaacggaaaacttaaacccgttaaagcatgcggatcagctatggacatacattgatatatcctcagtagatcgtgatcgatttacagttacagacccacagaaaattctaggaaaagatgctccatcacgagcgaaaaggcatgtacagctaaacgacgtgatatttgcgacgacacgaccaaacttgaaaaacatagcgttgattcagaatgaatatagctcaccagtggcatcgacaggcttctgtgttctcagggctaacgaaaacgttttacctgcctatttgttttattttgtcacaacagattttgttcaagctcaaattgaaccctatgtcggtggtgcttcataccccgctattactgacggaaatcttaaaaaaacaccaataccaatcccgagcatcgaagaacaaaaacttatcgtcgaaaaactcgatgcacttctcacccgcatcgacaccaccatcaagcatttgcaggaaagcgtcacattggctgatgcgttatatgcgagtgaattggcatgtgtatttagttcaggtcaaggcaagtggccattaagagaattaaatagagttgctgaagtagcgcgaggcaagtctaaacacagacctaggaatgataagtcattatttggtggtgagcacccttttattcaaactggggatgttcgtaatgcacaaaagtacattacgaactattcagcaacatacaatgaaaaaggcttacagcagagcaagttatggccaaaggataccatctgtttaacaattgcggcgaacattggtgacgtggctattttggggatggacgcctgcttcccagacagtgttgttggtatatcttcctcggaattagagactgattatctttattattttctaacaacactacagcaacagcttgatagcaaagcgaatgcggccgctcagaaaaatattaatctgaaaattctctctgaaataaaaatccctgttcctactctggacgaacaaaagagcattgtcagacaaatcaacgaaattgaccgactggctgtaaaggcaaaagctgaaatttctgaaaaaataacaatgatgcagcaactaaaagcatcaattctagattccgcctttaaaggtgagctctaa

SEQ ID NO: 310008 - DNA, 1785 bp, Proteus mirabilis
atggaactaacactagcgcctaacccgctgcacgatcagccacaaaccttatatatcaaaaaagtagctactttaattggcgaaaatggcagtggtaagtccacaattttacagtcaatttttagtgaaggacttaatgatgacggtcatgctcatttaagaacggtatgcttttcatctgggcaaaatgagtctttctcaaaacactttaatgaacatgtaaagaaaatcaggcgtcgtggaaagtcgatggttttatcttcgttttactacgataagacttggtcaaaattattggtctttttagctacaactctggttcgagacggtaaaacaagagcatttttacttgaaaaagggtacgcaaaagagagccaggatatcaatagagatgatatatcaagtaagttgtcattttcttttcgtgtagataaacgctatgcacagcgtgttcaagatgcgttaaaaaaagaagaatttggagaaaaaggcactcttagacaaacacctttctaccgctcgttagaaagttttgtagaagagctgatagaccgcgagtatctgtttgaagagagactttccaccaagaaactcgaattatcatcttatgatttactctcggtaaagttcgcaaggattaatccagatgaagacttggatgaagttgattttggagacgatccctctatcagttttttaacacaagccgtcaatggtaacttcattaacaaaagaagcttcaagttaatgctcttgggcaacattgaattagatgatttaagcgatggtgaataccaactgctctttctatacgcattgatagacctttttgatgcgcctaatactctatttctgtttgatgaagcagactcacacctacattacaaaaacgtagagaaattatggtcgctattacactgcatacaaggccatgcaattactaccacacatttattggattctatttctgctaaagaaaaccgtatagaacatctgaaagttgtggaacacggacgaattaatgaagacaacaaaatcaagcaattgatcagccgactcagtatcctttcccgtgcaaaatccgttgaatttgaagtatgtggtaagttaccgagtattgccatattggacgatgagaatgactgggcaatattcgtcaagttggcggaaaggaagggacatgatatcactagaatcgcctccataaacccgttgaaaaagtcttcaagctatacgtgcgacgacgacactcttggcgaagttaaagtgaactgggtcaaagcgttaggctcatcagagagtcagatttttacacgaaagatttttttgatatgtgacagggatgaggcgaatccaaactggaagcctaatggtgtgcagttagcaggtaaaacttacggtgagctagttagctccattaagtgggcagaaggttatcgggtagatacctttttactagcatggaaaaggagagaggttaaacactacttattaagtttcactgcattgtcacatcacaaccaaataaacactgttaacaacgatcgtttagctgcggggtttcatttgaagccaaacgacagtggcgataatgatggaattagaaaactatcttcagatattgttaaagctgccactcatcgctttattaataaccttacaggtgctgaacatgaaaaagggctttgcatggaaaaactgcaagcctatatcgacctgattccaccagaagaaatcagcgaagacatcaccaatatgtacaattttattatcggaaaactataa

SEQ ID NO: 310009 - DNA, 831 bp, Proteus mirabilis
atgcaagggctggcattattatttatattattattaataggtaaatatatgagtgaattgaatgaaatatatattcttctggaaagtgaatatataaagcaaaaaaataaagctgttttacatttaaataattgttcgtttatgtcagaagcagctaagaaaaaagctattgatttgatgtcgcctgaaggggcgttagcatataaggatagggggctatatacagaatacttatatttggatgatggtcagcatttaagccctcaactttatgaaaatatttgtatggaaacccgaatactagaaaattgtatggaaacgtcaattttaggtaatagcgctaatggctatgccaaaaactattgttgggttattggtatttatgcagcttgtgctaatcacttttggaaaacagataaaaagatatctattgatgcttttatgagtgccatccgtcttttttcagggtttaattcaatcaatatctatcgtgatcttgtgaaggtggaaagaataaatcgtacaaaacgcaagagaatttcatccaaagggggagatgcgattgctaaactaactaaaattttccgaatggaatctatccgcttactcgataaacatatgtcggaaggtaagttctggaaaagtcgtcaagaagctgcagatgaaatagctgaagaattatggcaattcattgaatctaaaattaatgagggatataaaactcagcttacgcaagataccttaaatgaagcggtattgcgttgggcagcaaagaatagtgatcttgagagcgtaattgatagagctgtaaagaaagaacgaaaaaagtaa

SEQ ID NO: 310010 - DNA, 888 bp, Proteus mirabilis; identical to SEQ ID NO: 291089

SEQ ID NO: 310011 - DNA, 468 bp, Proteus mirabilis
atgcatttcaactcaattttaagaagaatcaacggaataagtacacctatttttggggtgtcatggacgccagataatcaagagtttcaagctgttcgaaaactagttacctttcttgaagatagaagagttttgtactacggggaagaaagagaaggtgctgattattgtaggatttcagtagagaaaattagagaaaagctcactgaatttttgcaagaatttgatacgaataaagatctagttaaaagtgttcgctcttttcgttctgcttgtcgtaatttttgtaatgaaattggagcaataaatgtttgtaacgagcctttgcctgtacagcgttcaattttaaatactgaattatcaaaattaagaaaggtcgctggtaaaactgttggcgcattagctatttcttatggtttagatattgaagatgagttagcggctttaattccattcaaagtagtataa

SEQ ID NO: 310012 - DNA, 756 bp, Proteus mirabilis
atgataaatgtaaatgataattatttggaatgcagacaatattatgctgttctattctgtatgctttcagaaaaaacactgtcgcctaatgagctttataaaatgacatccttctttgcctgccaaacgcgagttcgggatatgagtcgccgagagcacaccaagcacatgcttcgattacgtcgtcatgaccaaatcacaggcagtcaagtccctgaaattatcttactcaatagccatgatggctccagtagctatcaaatgttaccgggcttttttcgttatgtttgtcaaaatggactcgtttgtggcgatacctttggggaggtcagagtaccgcacaaaggcaatgtggtggataaggtgattgaaggggcttatgaagtattaagtacgtttgatactatcgctgaaaaacgtgagcaaatgcagtccttactattaccgcccccgcacaacatatctttgcacaagccacgtttaacgtaccgttatggtgaggagaatcatcccatcaccgaagcccaagtcttacaacctcggcgcatagaagataagaaagacgatttgtggactgtctaccaacgtttgcaggaaaatttaatcaaaggcggattatcgggcagaaatgccaaaggtaaacggactcgcacacgttcagtgaatggaatagatggcgacattaagcttaataaagcattgtgggtgctaacagagcagatgcatacgcatttctccggacgtgaacgcttataa

SEQ ID NO: 310013 - DNA, 276 bp, Proteus mirabilis
atgcggccgtggattttaaaaccacccgcgcctgatacttataccccgaggctctctctgcatgatacacactcgcataccgccaataactttgcctggagtgtcggtgcgggggtgaactatgccatcaatgacgattgggatatgggtctaagttatcgctatttagatgccggaaaaaccgacatcacgacagcggtaggcgatggagaaaacacctcaaaaatcaaagtgaaggccaacgatatcatgcttggtttgacttaccgattctaa

SEQ ID NO: 310014 - DNA, 363 bp, Proteus mirabilis
atgaaacattgcgcattaaataacctcccttttgtgggaattatcacagtcgtcacattggggatttattacggcaaacaacctaaacccacttatcgagattgtgtcgaactcaactcatctgctgccaatacgcttcagatttatgagcaacccgatagaacgtccaagtctatcaactatcagcccacatcaggaaaagaacaattctgggtcactaaacgaacggctgatgaacaatgggtacaactctaccatgctataacactttttgctgatttacctgaatcagctaaactcggatgggtcagtaccacgaacataaacacattggggatattcgagtgcatgactaagaattag

SEQ ID NO: 310015 - DNA, 210 bp, Proteus mirabilis
atgtcaattttacctgagcaaaggaaggctcatttattatcgcgcgtagcggaatatggaaagttaagtaagaagtctcaattcggcggttatagcttaatggttgatgaggttatctttgcgattactgctgataatgaattttatttaaaagggagtttgttgaaacactctataaagcaaacaacatggatgcatacgtctatctaa

SEQ ID NO: 310016 - DNA, 330 bp, Proteus mirabilis
atgaataaatacaccgaactatctgacttcgagattaataaaaaggttgctgaaaagttaggtgcagaatggtttgttacaaccactgtgtgggatgaattagttgtcatggtgggtggtaagtgcttcaaaccttgcgataaccctactgacgcaatgccaattattattgaaaataagatatgcatgaattatgtagatagcgatattggttggggggcatgtcattttgatggagaaaaaggtgaactggaggtttacgataaaaactattatcgcgcagctatgacttgttttttgattatgaaggatgcggagaataatcaatga

SEQ ID NO: 310017 - DNA, 153 bp, Proteus mirabilis
atggataaatacaaagccgaactaattaacggcaaactagttattttattagatggaaatatgattgaaaaaggatttatttcaattgtagatgcacaagaaaaggctgataaattaaatcaagcatcaataaaaaataaccaagtcgaataa

SEQ ID NO: 310018 - DNA, 270 bp, Proteus mirabilis
atgaaacatccatcaattatacgaattggcaacgatagtattcaaacgctactaatgaaaggggagcataccgccaacgaggtgattaattcagccattgagtctggggaaatcgatgagagcgaccgtaaattttgggaaaaatacgatgatgtcaaaatttgttactttaaagcagttcccaagcctggttattcagcgtattaccatgaatcaagcaaagatgttaaaggtgcatttttagcaacggctgtcatggtttattggtaa

SEQ ID NO: 310019 - DNA, 807 bp, Proteus mirabilis
atgagtaacccaccattagctcaagctgacttgcaaaaaacacaaggtacagaggtaaggaccaaaacaaaggatcagcaattaattcacttcattaaccagccaagcatgaaggcgcagttagcggccgcccttcctcgacacatgacaccagatcgcatgatacggattgtgacaacggagattcgcaaaactccagcacttgcaaattgcgacatgcagagttttatcggcgctgttgtgcagtgttcacagctaggattagagcccggtaatgccttaggccatgcttacctacttccattcggcaatggtaaagcaaagtcaggtcaatcgaatgtgcaactaatcattggctaccgaggaatgattgatctagcccgtcgatcaaatcaaataatcagcatatcagccagaacggtaaggcaaggcgatagctttcattttgagtatggactgaatgaaaacctaacacacgtaccgggtgaaaatgaggactcaccaattacgcacgtttacgctgttgcaaggctgaaagatggcggtgtccagtttgaagttatgacgcataaccaaattgagaaagtcagagcatcaagcaaggctggtcaaaatgggccttgggtctctcactgggaagaaatggcgaagaaaaccgttatccgtcgcttatttaaatatctacctgtctctatcgaaatgcagaaagcggtcattttagacgaaaaagcagaggctaatgtagaccaagagaatgcaactatttttgaaggagaatatgaggaggtaggtactgatggcaattaa

SEQ ID NO: 310020 - DNA, 159 bp, Proteus mirabilis
atgctaaacaaagagtttgaaaagctaattgcagcagatctacttcctattcttcaaaataaaactaatatgactgaaaattttactgcccttcatttaataaaaaaaacaagtaatagaagaataattttaaagaagaacttattcatcataaattaa

SEQ ID NO: 310021 - DNA, 273 bp, Proteus mirabilis
gtggcagataagatttggactggatcgtccgcaactatttttaaagataccttaacagcgttaactagtgaacctcaagcccaggttgataaaaacaatttaaaacttatagctggaaaagtgtttaatgcaaaaatacaaataggaacttataacgaaagtaggtatgcgtatattttatcaagaaaaaaattggcacaaaacaatatcgatttaactgatggaattgattatataggtgaagctgtttttacttttaactttggtgtctaa

SEQ ID NO: 310022 - DNA, 420 bp, Proteus mirabilis
atggtaaataaagaattaataaataagaaacacatcccagatgaattattgagtaaatttatatctactgatgagctaaaaaattcgggttggttagtaagttatgaagcaggaaaaagaaattggttaggaaatgataatttagagttcataaaaaaagataaaggatttaagttactattagaaaatggggtatctttttatgatgaaaatacacctcctcccttattatttaatagaaaagaatatgaagttcttaatagttctgaaacgcctccccctattgaagatataaacatattattaaatagtgatcatgatatatcagaagaatttgaatttaatgaacttgatgaagagtattttgataacagtgagaatatttttggcgatagtgatagtccattatatgatgaatag

SEQ ID NO: 310023 - DNA, 465 bp, Proteus mirabilis
atgatggcagcacttggggtatttgtgttcgagttacgcaccgtaccttatcaatccctacaaaaacaacaaacgtggcgacatggttttactcaacgtgtcgcacgccgaccggcacaacagtttattggccctgataccgatgtgatcaccttatcgggggcgctttatccctcattaacgggtggtaaagtttcattgttagcgttggagttaatggcagatagcggtaaagcatggtcatttattgatggtacgggcaccattcatggcatgtttgtgatcaccgatttacaacgcacccataccgaatttttccaagatggtgctgccagaaaaattgatttctcactgacattaaaacgggtggatgactccattagtcagatgttgggagatttaagcgaccaattaggcatgatggccaatggtgccggtgaagcgatgaaaggagttttatcataa

SEQ ID NO: 310024 - DNA, 387 bp, Proteus mirabilis
atgatgtctattgaaaaatttaatgctagtgttcaatacgatgattatgaaggtacaacggctgctgataaacaagatattaatgatgtttataaatacttggaaaagaagcaacaaagaaataaaaatgagtttatcgtgggtatttctttatatgcacatgatctagctttgaatcctagccatgagctatctgttagattttttttatctgatttacaaggtgaaagtgatgttccaacactaataaaatcaaaaaatccattaagtgtaaaagaaataaagattgatatgtcatatagggagtttttccaattatttaaacgatttaatttaaccttatctcctaaagctttattagaaaataaagagattgatattatttaa

SEQ ID NO: 310025 - DNA, 1236 bp, Proteus mirabilis
atgaaaaatatttataaaaccccaaagcagcaacaaaatttatccaatgacttctctcacgatttggagacagtcatgaaaaaagagcgtagtaacatcctgtttatgccaattatctttttagcgctattactgaccatttttactatctgggcatataatagtcatttggaagagattattcgtggacagggaacgattattcctagtagccgtgagcaagtgattcagagtatcgatcccggcaatatccaagaaatgtacgtgaaagaaggggatattgttgaaaaaggacaagtattactgaaacttgacgatgctcgcagtatggcgttattacgtgaaagtcaagcacgagtggagaatcttaaagccatttctgctcgtttacagggagaatcccgtaatgaattgcctgatttttcaaaaattataaataaagaattagttgagcgtgaaaccaacgcctataacgcgaaaaaaactcaacgtgaccaagggatagcgggtttacgccaaagcaaaggattattagatagagaaatttctatcatcagaccactggcaaaagaagggttagtctctaatgtggagctcctgcgtatggaaaggcaatctgttgagcttgcaactcaaattaatgagagaatgaataactatcttgcagaggctaatgaggagttagtaaaagttgaatcagagttagctcaagcggaagagacaatgattatgcgtgaagatcccgtaatgcgctcagagatccgcgcacccgttcacggtattataaaaaatattaagattaataccatcggcggagtggttaacacgggacaagatattcttgaaattatccctttggatgacaaattaatggtagaagcatatattcgcccacaagatgtggctttcctaagtccgggtatgcctgtggtcgtcaaagtgaccgcttatgactatgcgatttatggtggtttaaatggggtagtgaaattaattagccctgatacattaagtaacgacacgcgtcgcagtgaactaaagcttaatcctgatgaaacgttttaccgaattattgttgaaacagataccaattatttgctagacaaaaataatcataaaatggaaattattccgggaatggtggtgtcagtggatattaaaacgggtgaaaaaagtgtttttgactatctgatgaagccgatcacgcgaatgaagcaggcgatgacagaacgttga

SEQ ID NO: 310026 - DNA, 2241 bp, Proteus mirabilis
atgaatattattaataacctatcattagtaaccaagcgtttgggttattctctctcgccagaaattttattagcacaaacaaaacgcacagaagcaaaatcttttgattacgcatcactggttaatgtgctggactcacatcaatttgacaatcagatcattgcaattgatctgcataagatcccttcaatcgcagctcctttcataatgctactaacgaataatgaatcagtagtgataaataaaattaaagatggtgaaaatggacgctattttgagattttaacggcagaaaatctacgtcaaacattaagtgtacaagacgttgttgctaattatagtggatacagctggttcattaaacgtaatattaaatcagaaacacgctcagagattgataaatacgaaacaagtagtttttggaagattatttggcgatataaaaagtattactaccaagtaattattgcatcatttgttatcaatatattagcgttgatcagttcgctatatgtgatgaatgtctatgatagagtgatcccaaaccaagcttacgaaactttgtgggtactaagtattggagtggtactggcaatttgttttgagtttcttgccaaaatgttacgttcttatttgttggatatcgcagggaaaaaagccgatattgtgattagtgcgatactatttcatcgcgtgatggagatcagacttgataaacgtccggcttcgtcaggatcatatgccaataatttacgtgattttgaatcaatccgtgaatttatgactagtgcgagcttattagcactggtcgacctgccttttattttgttatttataggtgttattagtctcattggtggctatttagctttagtgccattgacggtgatcccaatagtgttactcaccagtattttgattcaaaagccattagcaaaagggatcaatgcatcgatgaaagaagcctctcagcgccaaggtttagcggtggaatctattgaagggatcgaaaccttaaaactgaataatgcggttaattgggctcaacagcgctgggaaatattgacggagaaaacggcattttcatctattgcagtgcgtaacctaacaaattttatggttaattttagtgctgcaatgcaacaattgaatactgtttgcttagtctttttgggtacttatttgattcacgccaatgatgtcaattcacgtattacaatgggagctttgattgcgagtgtgatcttatcggggcgtgctttagcgcctttggggcaaattgctggactagcaacacgtttccaatcagcgcgtatggcactaatgggggttagaaatatttttagtcggccaatcgagcgagaagatcataaaaaatatatttcgccaacttcggttaatggagcattacgacttgaaaatgtcacttatcaatataataaagatgggcaaccagcattaaataacattagtttagaaatcaaagcgggagaaaaggtggcgatcctcggcaaagttgggggcggtaaaagtacgctactgaaattgcttacagggctgtatgaacaacaacagggaaacattagtttagatgatctcgatatccgccaaattgatcccattttcctaagaagcaaaatagggatgctaacccaaaagccacgcttattttttggtacgttacgggaaaacttcgatttagcacgccttgatggctattccaatgatgatgacttagtcaacacacttaagcgttttcagttggataaaatcattcgccaacatcctgctggtttagatatgcctttaggggaggatggtttagggctatctggtggacaaaaacagatggtcgcgttggctcagttaaccctacacaatccaaaagtcgtattactggatgaaccaacgacgggcattgatgttgatactgaaaaattggtgttagatgcattagaagagtggactaaagaaaaaacgttgattgtagtaactcataaattgcccattctacgactagttgaccgtattattgtgttggatgaaggtaaaatattaattgatggtcctaaacaggcagtactaaaagcgctggggcaaacagaacaaccgacagatacagtatcaaattataaatcagttcctaagtcaacgccacaggtaagggttgtttctcaagttaggcatgtgatcaataaaaataaagaagaagggggcaatttaaatgaaaaatatttataa

SEQ ID NO: 310027 - DNA, 1260 bp, Proteus mirabilis
atgaaatctctaattaatagcatcttagtattatttttcgtacagatgctttctttttctgctgtggcagatgtggttgaattgaaaaacttattaaaagattcactggataatgtatcagaggttcaagaagcatatgccaattaccaagcagcgcaaagcaatgtgaaagtagcgcaagcaggacattaccccgtcatcagtttaatggggactcagcctcttgcgcagcaacacgaatatgaaagtaatgcaatggaatcggggtttcacctcggaaccaaagtcactatgaatctttatgcttggggaggaattgacgcaggtattaaccgtgaaaagtccaagaaaaattactataaaaatcaatatattctttctcaagaagatatcagtgtgcgtattagcttgctttatttacaggttttacgtcacaaagaaacgctcgatgtgattgatgaaaacttaatccgccatcaccaaattcaaaggcaattggcgacgattgtccaacatgattcgggtcgaatgagtgaattaacacaggtcaaagcgcggactttaaaagtcgaaatgagccgtgcagaaacagaaagaaacttaaatttagccttgagccaaatatcgattttaactcaacgacagttaacggtagaccaatttgttgacccatttagagcgacaaccagtgatgagattttagcgaaatttcaagagaataacttagagaataacccaagctataaagctcaagttgccgatgcacaaagcttagatgctgacgtaaaagttgccagtgcgatgagaaaaccagctcttaatttagaagtcagtgcaacgccagataatagcgaagtctttttacgtgtttcatggaatattttcgatcaagccagttattacagtcaaacacagaaagaatacgccctgtcagcagccaatgaacgtattaaaaaagtattgcgtgaaattaaagagatgagccaatcagcagccataaatatggtgcaaagtgaaaaacagggcaacattgctagagcctatattgcagaacaaaaattagtgattaggaactatgaaaagcagttcaccattaaccgtcgcactttaattgatttacttgatgcttataacgagctggcgagtatccaaactagtgcggttatcttacaaaacgatttccgtgacgcaactcttaattatctcagcgtgcaggcgaaaatgtcagcatggatgaatcaggaattagcttctagataa

SEQ ID NO: 310028 - DNA, 2967 bp, Proteus mirabilis
atgtctgttaaaaaaatatcaatcaaagttaataatagtaaagagactatagaacaatattctgttatcggtggggagaacggtgccggtaaattaaatcagccactacatattaatgcaaaaaaagatgtaaactatttattaattgatgaaagtacacaatttgcaccagagaatatcgcggttaaacgtgttgataaaaatcttactatcgcttttgaaggtgccgatatagaaaaccctgatttaataattgaaaactatttcgctgataatggtgccattggttaccatgaaggtgatgcaaatttgattattggccaatatgaaaatggtcaatattacccatatgttcccgaaagtgcggaaaaagctgatgcaatcagtcaattagcagatggacaagcgacaggtcaagctattggtggagacgcattaccaccattgtgggcatttaatccatggtggttagctgcattggttccactcatagggatccctgctgttgcaataagcagtggaagcagtggaggcggaaataaacactcaaaagttgttgatcatgcacctattgctggtgatgacttcgcgcatactaaacataatacgccagtcacaatcctcgttactgagaatgatagcgatgtagatggtgacttaaatcaaaactctatcagtattataaaacaaggctcaagaggtactgcaaccattgttgacggtaaattggtctatacacctaacgcgggtgaagtggggactgacaccattacttatatcgttaaagacaaaaatggcaatgtctctaatgaagctagcgtcatcattactatcaatcagccccctattggaggtgatgatcatggtcaaacaaaacaaggagtccctacgactatcgatgtgttggctaatgatagagatcctgatggtgaattggataaatccacgcttcacattgaacaaaatggtagcaaagggactgcggtctttgataccgatcacaaattaatttataccccaaaaccaggtgcaacaggtcaagatactgttacatatacagtaaaagataaagatggtagtgtttcaaatattgtaaccgttactatcgatattataccgacacaagtaataccagcagaagtctttgaaaaaggtttaagaatagatggtactgcggatgataaatcgccagctattgttaatggtattattgaattatccaacccaacaaataaacctacaacgctaagtgatattaaaatcattgaaccgacaacaaagttaacgtccggcggtgaacctattcaatgggaacatgttgataacggttttgtgggcaaaacgccaagtgggaaagaagtcatttctgtcaaattgattgataccccaacagtaaatggtaatacaaaagttaattatgaagtaaatcttaaggggctagttgatcaccctgtaggtaaagattctctgaatattgagtttggtgtaagcaatggcactgatgaagtgaaaacggaaatcgtggtgtatgatgataagccaaatgctacggatattgagctatctgtagaaccaccaatagacaatactttctatgctaatttgatcatttcgttggatttatccagcagtatgggaaaagatgatagtggaattcaaggtggaaatactcattcaggtatgaaaacgcgatatgacgcggcattagactcaatcgaaagtgtactaaatagttacgaagaaaaattaaatagtgcagatgcgggagaagtccgcgtcagtataaatggtttttctaaaaaagcatcagcaatcggtgcatcgaaagggtatccaatggatcaaccttattggtgttcaatcgaggatgcgagaacaattgttgaaggattgcgtggctatcaagagctacgtccagatcatcaagttattggagtagacactaactatgatgctgcattacaacaaattattagtatttttcaacagccatccagcagtagcatagatgcgctagatgccaaggatattaatggcaaactggataatacactgtttgtgatcactgatggtattccaaactttggtaaccaaaacagcagtcaagatcctgttgctggtaatggtattgcaccaacatcgccaaatggttttattcctggtagtcctgatacagatattggtgaagatagctggaaagctttcttaattgaaaaaggtattcgctctgtggcgattggtattgggcaagacatgctccatagcgtcaatggtaaaacgggcaaagattttattaagcctatcgcttttgatggtcaaaaaggtaacagcaatggtgatagtgaatttatcgtattgaaagacatgagttcgttatcaaatatcttagacaaatatgtacctaacgaaaataccataaaaagcagcttctcaaaagccggtgatggcaaggaaactttaagttttggcgctgatggcatgaactcaatcagtattgaagtggatagaattacctacaaatatgatcccaaaactcaaactattacctccgatggtaatgataaaagtaaatgggctgattttggtaatggagaagtggtgattaaaaccgaagcgggcggtgtactctctatctctttaggagagaaaaactttggtcatttagcgtatcgtcctgccaatactcgccctatcggtatagagaaagagactttcacactaacgctaaccgataacgatggtactagcggtaagtcatccatttcagtggatatcagtaagttaaaagagtcagccaatattggtttaaatgacactgatttaacctctttgaaactgttctccccagaaagtgcgatggaactacatgggggcgatattgatgttaatgctacatcaagccactcaactgggtttatgaatatatctttagatacattacaagaaactcaaaacgtcattatgtaa

SEQ ID NO: 310029 - DNA, 510 bp, Proteus mirabilis
atgaaaaatatcactagcgttgtaatgctattatgcattatgacactgactggttgtgtgcgtaatgaagggctgcatggagctaataaagaggtctggaagaataagaatattcttaaagaacatgatgagatcgaaagtaataaagcattagtgtctttctatcgaatagataatcaagctgaaggtaaaacaattaatatatttgtgaataaacaatacctcacttcattagaacctaatgcaatgaagaaaattaaattatgctcaggaaataataattttactgcatataaaacagatgtgagtgaacgttataatactaaattaaacaaacttgataataaatttttagatgctggtaagtcctatgcatttttggtaactgaaactaatggaaacatttcacttacaccaatgacagaaaaagaacttaatgattttaaagggaaagttagtgagcaagtacataccctacctcgtgtggatgtagctcagcgctgccaataa

SEQ ID NO: 310030 - DNA, 222 bp, Proteus mirabilis
gtgaatccttaccatgaacttgacgcaagggaagaacgcaaacaagaagaagcatcatggattgatgcaaaggacgctgagttaagtaatgtcgcatttaatgtggttgatggattaccaaaggatattaccagtcaatggagtgacagcgttttcgatatgacaattgatggtctttacaaggagttaaagaactatcaggaacgtaggaggatgtcgtga

SEQ ID NO: 310031 - DNA, 210 bp, Proteus mirabilis
atgacagataaactttacacatacggaaatatgccaaataaacagtttcctagtcatcgtgaggaattacgcgacaagttagcaatgtccgctatgaatggaatcttatccaaccactgcatgattgacaatgtaaccgaacaatctgcggcatgggtagctaaagaatcatatcaaatggcagatgcaatgttaaaggctagggggtga

SEQ ID NO: 310032 - DNA, 204 bp, Proteus mirabilis
atgacagataaaacaggtggagcggcttttccagttccagcaacagaattacatggcactgatactggcatgacattgcgtgactattttgcggctaaatttatgcaagctgctaaatctaaccctaactgtggatatgactttgatgatttagctcatgatgcttaccaaatggcagatgcaatgttaaaggctagggggtga

SEQ ID NO: 310033 - DNA, 609 bp, Proteus mirabilis
atgacacaaatagaaaagtggcttcaagaggcgccaactacggaatctatggagtttccagaagagtattcaccaaatggatgggtttatgttctaagaaacgactccatgcctgatatttacaaagttgggctgaccacaacaagtccgaagaagagggctagcgagttatcttcttcatcaggggttcctgaaaagtttgaaatcgtaaaggcatttatctccgaaaatcccacaagggatgagtctgctattcatcgtgaattagctagatacagagtgaatgctggaagggagttttttaaatgcccgttggaaaagattttatctgtatgtgaaagggttattcctgacggaagtgctgtaaaggtcaatgatttggtggatcgctacaaccttatttcttttgaatcattcggaaaaattccagatgcagaaataatggaaatatgcggaataacttactttggtagcgaaagtgaatgtctatcacggttagccatgtttggagctgaatttgttcgtcatttaacaaaagatggcggagcagtcgtttttaataataactcttttaccgttttattaccggagggaaccgatgaaatctaa

SEQ ID NO: 310034 - DNA, 204 bp, Proteus mirabilis
atgcagggaactaattgggttaagtgttccgacaaaatgcccgaagttggcaaaccagtaattgttaaattgggaaccatgcttcacatcatgcacatcagtgactttgatggtaaatgggatgatggagaatttttatcgggagtgggattagaaaacatcaagtattggcacgagctcccaccaatgccagagggtgaatga

SEQ ID NO: 310035 - DNA, 711 bp, Proteus mirabilis
atgaccaaatggacatttgataaaactgttgttgcacaaggaattgctgcacaaaacaattctggacgtattccggcgattgacattcaacaaggccctggtcttttgaaacgtcatcaaaggaagttgtataaaagcgcaattaacttcagcgcgccaattgagaaagacgactgtgggcgatacaaccctcccgggggaagtgtggcggtatggtatgcttctgactcggcgttaacggcggcggcggaagcatacgggcgtttgtttcatctcaaaggaaagatttcttatcctgaatcggtactttcacaacattatatgtgttctgtggatgtcgcgagaacggtgacagtgattgatgttgtggcactctgtgagttgttacatatccctttggatagcttagaaaacgaggattacacctttcctcagtggctaatggaacatctttatacgcatttcgggcgtgactatgacgggattgcctatacttcaagacataagcgctataagcgttgttatgccttttgggaacggccgggtagtacatcagcctttaccgatactcctcaggggatgtggccttatgcaagttacgtcgaaactgacgaaggcatgttccctaaggggtggcacaaagatacgatgtcaggtgaagagatgttcgaagaattgcttggattcgaaattacgccagaaccaatgtaa

SEQ ID NO: 310036 - DNA, 645 bp, Proteus mirabilis
atgattaaacacaccacagcagaaaaagaaatcaacacttcagttaagctgaatgagtaccagttgaaccttctgaaaaggattaacaacctcgctatttccctgatgcctgaatttgaagacaaaaatcaggctatggatgctatcacgctggatgacggttctttgatgcaattgctctataccgttcaactcgagcagaagacacgcgtcaacgactacgaaatgcgtaaagtgcgccgtcgtcgggaaaatttggaaagattttatcgtgagcttcaggaattgggcggtacgcttaaggtgaacgacgtggtcgatatccttggtattacacgccaggcgatcaacattcgcgttaagaagaacaagcttttagcattcaaacaaaacggcgattttattttcccgaaatttcagttcgctgataatgggttgattcccggctttgaagaggtgatggcggcattcgaaaaggatacacatccaatgttgcggttgggggtgctaaaatcaccgatagaggttaatagtgaaggcctacaaaaaacgccgattcaaatcatgctggacggtgctaaaaagtgtgaacttagtctggccatacgtgcagctaaacagttcggaaatcaagtagccagttaa

SEQ ID NO: 310037 - DNA, 645 bp, Proteus mirabilis
atgtctagattagaattattaaaccctcaaaattctgctgttgtttttatagatcaccagccacaaatggcttttggtgtggcgaatattgatcgtcagcagttaaaaaataataccgttgctctagcaaaaaccgcaaaaattttcaatattccaacaatttatacttcagttgaaactgaaagtttcagtgggtatatttggcctgaattactagctattcatccggagtcaaaacctattgagcgaacttccatgaactcatgggaagaccataagtttgttgaagctatcaaggcaactgggcgtaaaaaactagtgatggcagcgttatggactgaagtttgtttaaattttccgacattaatggctattgaagcaggttatgaagtttatattgtgacagatgcttctggtggaacttctgttgatgcacatgagcgtgctattgatcgtatggttcaggctggcgcaattcctgtaacttggcaacaggtattgctggaatatcagcgtgattgggctcgtaaagaaacttacgatgctgtaatggatttagtacgtgaacatagtggtgcttatggtatgggagttgattatgcgtataccatgcttcataaagcacctcagcgtattattaaataa

SEQ ID NO: 310038 - DNA, 570 bp, Proteus mirabilis
atgcctcataatgaacatgttacacttgttatcaagcataaggtttggcgcaataaaattgatgagtatgaaatttggttgaataagattatgccagttgcagaacgttatcctggacatttaggtgttaatattattaaacctaccgattttagtagtcagtattcaatactattgcgttttgataatattgatcatttatatatatggcaaaaatcattagataggcagcactatcttgctgaattagctacgttaattgaattaccggaaacgatggaaatccgacctggtgcagaattttggtttacaccggaaaacccaagagaatatgtagttccgaaatggaaacaatatattttatcattgtttattatattcccgatagttaatattgttaacagtattctcgaatatttatttccaggttttattatgactttgcccggtaattttttatcaaatgctattattgttgcctgtgtggtttatatttttatgccgtttgcaactcgcgtatttgataaatggttagttccctataaacaggaaatacatcatcatgaataa

SEQ ID NO: 310039 - DNA, 1869 bp, Proteus mirabilis
atgaataaaatctttgcatcaaaaatatttattaacggtgatattcatacactcgatcgtaaaaatccaattgcacaagcagttgctgtctatgacggtaaattcattgcagttggtactaatgatgaagtgatgcaatttaagaatgcagaaactgacattattgatctaaaaggtcaagtaataattcctggtttgaatgattctcatcttcatttgattcgtggagggttaaactataatcttgaattacggtgggaaggtgtgccttctttatctgatgcattagcaatgttaaaagctcaggctgatataactccgacgccgcagtgggttcgtgttgtgggaggatggagtgaatttcagtttgttgaaagaaggatgccgacgttagatgaaattaatgctgtttctcccgatactccggtatttgtattgcatctttatgatagtgcactgttgaataaagctgcattgcgtgtgatcggttatacaaaagaaacgccgaatccaccaggcggagaaattcagcgagatgagcatggtaatccgacaggcatgttgatagccaagccaaatgctatgttgctttattccgcgttagcaaaaggcccaaaattgcctttggattatcaaattaactctactcgtcagtttatgcgtgaacttaatcgccttggaataaccagcgctattgatgccggaggtggttttcaaaattatcctgaggattatgaagtcattgaggagttagctaaacaaaatcaattgactattcgtatagcttataacttatttactcaaagaccgaagcaagagttggaggattttcgtcagtggacgtctatggtatcaccaggagaaggaactgatttttatcgtcataacggtgctggggaaatgttagtgttttcagcggctgattttgaggattttcttcagccaagaccggatttgccgaaaaatatggatgtagaattagaagcagtaattcggtatttagttgagcatcgctggccatttcgtttgcatgcaacttataatgaatctattactcgcatgctggatgtgtttgaaaaagtgaatgaagagatcccttttgatggattgcattggttttttgatcatgcggaaactatcagtgagaaaaatattgaacgtgtaaaagctttgggtggtggattggcaattcagcatcgtatggcattccaaggagaatattttgcggacagatatggtcatgaggcggtgaaacatacaccaccagttgcgaaaatgttaagttcggatttgcctgtcggtttgggaactgatgcaacgcgagtagcaagttacaatccttggactgcactctattggctggtatcgggacgtaccgttggtggtatgaagatgtacgatgacaacaataagttagacagaattactgcgttagaattatggacaattggtagttcctggttttctaatgagcaaggtaaaaaagggcagatcaaattagggcaatttgcggattttattgcattatctgatgattatttccgtattcctgagcatgaaattaaagcaattgagtccttgctgactgtagtaaatggtgagattgtatatggtaatggtatttttgaatcgttagcaccgccatcaattccagttttacctgattggtcaccagttattaaggtgcctggacattattcttatttaaagcaagaaaatagagcggttgctctgagtcaattacatcattgttgcggagcatgtcatattcatggacatcagcacgatatcgctcgtaaatcatctataccagttgcagatgaaaacgcattttggggagcgttgggctgttcttgttttgcattttaa

SEQ ID NO: 310040 - DNA, 1596 bp, Proteus mirabilis
atgactaatttgcaatcatcagcttggtcgccgctacataaccgagttttttttgcattgtggatagcgactttgttttctaatattggaacatggatgaatgatgttggtgctggatggctgatgacaaatttaagttctgatccggccatggtcgctactattcaagccatgactacactgccaatttttttattagctttacctgctggagcaattgccgatattttcgataagcgaaaattacttattctggttaatattataatgtttcttactgctacattactagctgttctagtttattttaatgtaattaatataggttggttgctattaattacctttattcttggggctggcgctgcttttttaggtcctgcgtggcaggctattgttccaggtattgtggcaccgcatgaattaaaagcaggaatagcattaaatagtatggggattaatatcagtcgtgcgattggtcctgctcttgctggtgtattgatttctcaggtggggctttatcttccttttatgcttaatgcgctcagttttattgccattattatagttgtgtggtggtggaaaggggagaaatatagagaaaaaacattaccccccgagtctattgttgcagcaatgatttctggattgcgttatgctcgttatagttcggctttgattaaaactattattagagctgctgcgttttttgtttttgccagtgcatattggtccatgttgccattagttgccagagtatcacttcaaggtgatgcaacattatatggtgtattaactactagtattggcataggagcagtcttcggtgcgtttagtatatcttcgttacgagcacgtttcagtacagaaatgttagtgacacttggtactgctggcacagtaattgtgttggtgatattctcatttgctacatcgaaatatttggcgattgctggtagttttattgcgggatttagttggcttattacactctccactttgatggtttctgcacaaactgcattgccagattgggttagagcaagaggattggctctttatttgatggtattttcaggctcaatggctttaggttcattaatttggggacagattgcatcatatacatcggtgatgacagcattacttactgcggcagctggtattattattatttggttatgtgtgttaaaagtgaaaattggacatgataatattaaattacaggcttccggacatttgggattgccagatgaattacaatttcattctgagagtgttaagaaaccagtaatggtgtgtattaagtataaagtaatgcttgaacatcagatgcgattttttgaattgatggagcagttaaaacgaattcgattgcgagatggaggatattctagaggactattttctgttcctggggttcaagatgaatttttggagacttttatggtgtcatcccctgaagaacatcgtcgtcagcatgagagagcaacagtagatgattggcagcttgacaaacagctaaatgaggttattcaaagtaaaactgttgttcattatttttcttattctaccaattctaataagaaatgttga

SEQ ID NO: 310041 - DNA, 234 bp, Proteus mirabilis
atgaattccttcttgctagatagtgaagatgtatttatagatttactaacagatagtggtactggcgctgtaacacaaaatatgcagtctgcaatgatgcgtggtgatgaagcttacagtggaagctgcagttactacacattatccaaatcagtaaaaaatatctttggttatcaatatactattccaactcatcaaggacgggagcttagcaaatttacattcttgttttga

SEQ ID NO: 310042 - DNA, 972 bp, Proteus mirabilis
atggtagtgttttctaattatttcttcgaccctactcagggtcatagccaaattaatggttgtaccgtgcgtaatgtttatataaaagaagcattcgatactagcgtacgttgtgactttaaaggtaactttaatcttgaagaattagaacgcggtattgaagaaacgggctcaaataatgtaccgtatattgtcgccacaatcacaagtaattccgctggtggtcaaccaatttcactagcaaacttaaaagcaatgtatagcattgcaaagaaatacgatattcctgttgtgatggactcagcacgatttgctgagaatgcatatttcattaagcaacgtgaagcagaatataaagactggattattgaacaaatcactcgtgatttaagtacgcagatatactcgcaatgtccgcaaaaaaaatgctatggtcccaatggggggattactgtgtataattgtacgatagggaatattcctaaagagagttttaaagagattatttcctcaggaggtaatgttgattcattagtgaaatcattcttaggtaccaagcaacatggtattattgagttttgtctgttagttttttctaatttagccgtagcaagctctttctttggcgtcattcttggattatttgattatctagctgatctatttaagatcgataatacccacataggacgtttcaaaacggtactgttaactttcttacctcctatattactgtacctcatatttcccaatgggtttatttacgggatcggtggagctgggttgtgtgccaccatttgggcagtaattatcccagcgattcttgcagttaaagccagaaagaaatttcccaatcagatatttaggatttggcaagggagagggattcctatgattgttatcttgtttggtgtaactgttatactgtgctggttaggtaatatattaaatttattacctaaaattggttaa

SEQ ID NO: 310043 - DNA, 1002 bp, Proteus mirabilis
  misc_feature (328)..(337): n is a, c, g, or t
atgaaaagaataggtattaatggttttggtcgtataggtcgattggtattacgtcgtctccttgaaatcaaacttgatgttgagattgtcgcgataaatgatcttacatctcctgacattttggcttatttatttaaatatgactcaaactatggaccttttgatgggacagtttcccattctgaaaatacaatcatagtaaacggtaaagtcattaaagtctttgctgaaaagaatgcccgtaatattccgtggggagcccttgatgttgatgtagttgttgaatgtacggggttttatacatcagaagaaaaagccaatatacacnnnnnnnnnngggctagaaaagtacttatttcagctcctgcgggggatatgaagaccatagtatacaatgtaaatgatgataaactttctccggaagataaaatcatatcggttgcatcctgtacgacaaactgtcttgcaccagtagcaaaagcattaaatgatgcatttggtattaaagttggcacgatgacaactgttcatgcatatactggtactcaggctcttgtagatagttccaagggtaaagatttaagggctgctcgtgcagctgtggaaaatattattccacatacgacaggtgcagcaaaggcgatcggacttgtaatacctgaacttaatgggaaattgaaaggtcatgcacagcgtatccctgtaaagactgggtcagtgacagaattgataacggtattagagaaaaaagtgacggtggaggatgttaattctgcattaaaagatgcaacgtttgataatgagtcttttggttatacagatgacccggttgtttcatcggatattattggtatcaattatggggcggtatttgattctacacaaacagaagtaatagaatttaatggtatacaattagttaaaacggtatcatggtacgataatgagtatggttttgtaactcaactggttagagtgttaaataaatatattgctctttaa

SEQ ID NO: 310044 - DNA, 1554 bp, Proteus mirabilis
atgtttaaaaacatcagtatagaaaaaaccgttaaagttatgctggctattttatttgtacttattatgagcattatttactttagttatgatgcttcaacacgatcttatcataactttgtttcatcaaataacttaagtcagcaaatgttgctgatgggaaaagcgcgttatcaaatggcggtgatcagagcgaatattaatggcttggatgggcagttaagagtgaatgaaaaaccttctgctaaataccttcatcaaactcaagaatatataaaaatcactcgtgaagagatccaccgttgggcggatgctgaaaagttaaccatggaagggcgtcaggttgcggatgatatgacgaaacgctttgatgagcttttagatatatttaccgatgccttagctaaattacgtaaaggacaattgactacgcactctgctagtcaaaaaatggatgaactcaacgagatcaccatgacatattatgcagtcgccaatggtattgagaataattatattgatattgcgaaaacctcacaacagcgcattatgctaatggcgttagtcacagcgattattgtcattatgctctttatcattatcttacgttggttctctcatagctttatcggcaatattaaagtgcttattaatatttttagtaaaatgagccaaggcgatttaagtatgcgagtagaaaatcacggtaacaatgaatttggtaagctatttaatgaaatgaataaaatgaaagtttcattaagtcaaatgattgcttcggtaaaaaatgcagtaaacaccattagcgtcagtgcaagtgaaatagcaacaggtaatactgacctctcctcacgtactgaagagcaggctagtgcgctacaacaaaccgttgcaagcatggagcaaatcaaaacgacggttgaaaaaaatgctgataactcacgccaagctagccagttggcattaagagcgacaacgtcagcacaaaacggcgaaaaggtgatggataatgttatcgaaaccatgtcgtcgatttctgaaagtgcaaagaagatctcagatattaatgacatcattaacagtattgccaatcaaaccaatattctctcattgaatgccgcggttgaagcggctagagcgggtgaacaaggtcgcggatttaccgttgttgcagccgaagtgcgtaacttagccagtcgtagtgcagaggcagccaaagagataaatgaacttattacccattcggtaaataaagtacaggttggatcacaacaagtgaccgaagcaggacgctccatgtcggaaattgtgactaccattagtcaagttaatgattttatgcaacagattgccttagcctctaatgaacaaagtatggggattaatcaaattgctatggccgtaagtgagatggataccgtgactcaacaaaatgcagcacttgtggaagagtctgccactattactgccaatatggatgatgaagctcatcagcttgccaacttagtctgtcaatttaaagtagatgagaaagaaaatactaggcaggcataa

SEQ ID NO: 310045 - DNA, 219 bp, Proteus mirabilis
atgaaaaaaacttttataccttatgggagtgatacttcttctggagaatatatgtgcgcagattgtggatatacttttacaaagaaatccaacaaatcgcttcccgtttgcccaatgagtaacattaaagatgacattattccacacgttaaacatgggtggatttcattaagtggacagggagatgcacctaacgacccatatccagaaggaaattag

SEQ ID NO: 310046 - DNA, 405 bp, Proteus mirabilis
atgaaaaaaagaaaagtagatattaaactaataattgaaaataaagaagaaatagcaaatttagaactgatttctacagagaaaggagaatgttttctaaagatttcaattaatgatatctatcatgcagaatttagtgatacagactttttttcatgttttgtgcaactgagaaataaattcagtgatattatttttttatgtaaaggtgcaaaaattagtgtatacccatcgagtatgtctagagatatgtctttaggtatagcagcttacgatcatactttcggtaaacagactacccgagaagatttggttaatatatttgattttgaagatgaaaatgtcagggtttcaccagatgagcaacgtaaatattattatgaatgggctgattctttgaaatga

SEQ ID NO: 310047 - DNA, 333 bp, Proteus mirabilis
atgaatttaattaaattgaatatcgatttcaaaaatattaagaatgttgatgattttcatatgataatgaaaacactatttggttttcctgatttttatggaaaaaattttaatgcatttatcgactgtttaagtagcataagaatcccagaagatggtatgacttcaatacatataaaaaatgatgaatgtattttattagaaatttttaatataaactctatcgctgatgacttactttatgattttttattatcaatacaagaaataaatagaagatgtgttattttcggagaggaggcttcaatattattgcttccttctaaaaattga

SEQ ID NO: 310048 - DNA, 162 bp, Proteus mirabilis; identical to SEQ ID NO: 303541

SEQ ID NO: 310049 - DNA, 165 bp, Proteus mirabilis
atggcaagtaaaggcgtgaataaatgtattctcatcggtcacttggggcaagaccctgaaatccgctatatgccatcaggtggcgcagtagcaaacctcacactagctacatcggaatcgtggcgtgataagcagactggtgagatgaaggagaaaaccgagtga

SEQ ID NO: 310050 - DNA, 282 bp, Proteus mirabilis
atgggcgaactaacctcactgcaagttaatcagcacgcgccgttacaattaagctataacgcggtggagcaagagtatttacgtcgcagtgaagcgggatttgtcaacgccagtcactatacgtccacggggttactggcacaccaacgtgcaggacgaggctccgcgcagtttttgcaatccctacaagccaatccagcgcaaccgccgttttgtaccgatgtgcaccgcagttatcactatgaccgcgcgtataatgtggtggggattgaagaattataa

SEQ ID NO: 310051 - DNA, 255 bp, Proteus mirabilis
atggcgtttcatatagaaataattaaagaaagtgaaactgaaaataaagcgatatattcattttcttctactagttcactttatcaaaatactttaccgggtcttttagaaataaataaaaaagatggtaatataaaattagttagagcagcagaaaatgatgagagtaaagctttttttatgagggcttctcgtaagatattggttcattggcgaagtaatgaatatccagataaaacagaatgggcttcatag

SEQ ID NO: 310052 - DNA, 768 bp, Proteus mirabilis
atgatagaaagacttattcaatacgcctactatgaccctaactggtctcatagccaccaagcaatttcattattagacagaactcagcgaaaaacccctgaagactatgagcatgaaatgagaggtcatttgttctgcccttcttgctacacacctatatctattcgcccaatcaatactgaagtgacttcaaatggaagaagaagagcctttttccacctccctagctatagtgaaatatattgcccgctaagaagtagaagtgctccaggtcggcgatatgcaagtgaaaccgaggctcaacaagcaatacagaatcatcaactagccgtaattagcggatttatgaataatgagcctgaaaatcaaaatattgaggaccctgaatatacatacatatacatagctaatagtggtcaagttatacctaaattattcagagatctacttagtgatgttaatgatattgaaggtgaaattgctactccagcattttactggggaaaaattttaaggattgatagattttcaaacactgcacatatatatttcagactaaacactcaaaactcaattagtgatgttcgaataaaagttaaactggatgagctcgatagaaaaaatatcaccgataatcaaccggatcgaattgttattttctatggtccaataaaagaagtcggttctggttactggtcagatgatgttaaatggggagaatatgctttattaccagaacaatataactatcttctaattaccccataa

SEQ ID NO: 310053 - DNA, 615 bp, Proteus mirabilis; identical to SEQ ID NO: 301105

SEQ ID NO: 310054 - DNA, 1674 bp, Proteus mirabilis
atgaccatgaatgaggcagatgcccgcccaacgaactttattcgtcaaattattgacgaagatctggctaccgggaaacataatagtgtccatacccgtttccctcctgaacctaatggctatcttcatattggccatgcaaaatcaatttgcttaaattttggtattgcacaagattatcaaggtaaatgtaatttacgttttgatgatacgaatccagtaaaagaagatgttgaatatatcaactcgattcaaaaagacgttcagtggttaggtttccaatgggatggtaacgttcattactcctctgactattttgatcaactgtatcaatatgcgattgagctgattaacaaaggcttggcttatgttgatgagttgagtgctgaagaaattcgtgaatatcgtggcacactcaaagagccaggaaaaaatagcccttatcgctctcgtagtgtagaagaaaacttagcgctatttgaaaaaatgcgtgcgggtggctttgaagaggggaaagcgtgcctacgtgcgaaaattgacatggcatcaccatttattgtcatgcgtgatcctgttctttaccggatcaaattcgctgaacaccatcaaacaggtaacaaatggtgcatttatccaatgtatgattttacccattgtatttctgatgcattggaaaatatcacacattctttatgtactttggaattccaagataaccgtcgtttatatgattgggtgttggataatatcactattccttgccaccctcgtcaatatgagttctcacgtcttaatcttgaatataccgtcatgtctaagcgcaagctaaatcagcttgtgacagaaaatattgttgatggttgggatgatccgcgtatgccgacaatttctggcttacgtcgtcgtggctatacggctgagtcaatccgcgaattctgtcaacgtattggtgtgaccaaacaagataacaacgtggaaatggcatcattagaagcttgtattcgtgatgatttaaacgaaaatgcacctcgtgcgatggctgttatcgatccggtacgtttagtgattgaaaatatgccagaaggtgaagagattttaactgcgccaaatcacccaaataaaccagaaatgggaactcgtgaagtaccatttagccgtgaaatttatattgatcgtgcagattttaaagaagaagccaatcgtcaatataaacgtctggtattaggtaaagaagtccgtctgcgtaatgcttatgtcattaaagcagaacgagttgaaaaagatgaacaaggtgaaataaccaccatttattgtacttacgatccacagacgttaaataaagatccggctgatggtcgtaaagtaaaaggggtgatccactgggtcagcattccacatgctattccagcagaaattcgtctttatgatcgtttatttagcgtaccgaatcctggtgctgaagaggatttcttatcaaccattaaccctgaatcattagtgatccgtcaaggttttgtggaagcaagcttaaaagatgcggctattgaaaaagcgtatcaatttgagcgtgaaggttacttctgtgctgataagctttcgacagcggataaactggtctttaaccgtactgttggtttacgtgatacttgggcgaagatttcgaaacaaggttaa

SEQ ID NO: 310055 - DNA, 495 bp, Proteus mirabilis
atgtactattttgcatatggatctaatatgtctacttctcggttacaagaaagagttccaagtgcagaggcccttggttgctttgtgcttgtcggtcacgacttaaggttccataagtctagcaaggatggctctggaaaatgtgatgcatatttaacccaaaacactgacgacattatatacggtgtcttgttcaaaattgatccaaaggaaaagccagcgttagataaagcggaaggacttggatatggttacaatcagaaagaaataactgttacagcttccgatggatctttagtaactgcaacaacctatgtagcaacgaaaatagacgataatctaaaaccctattcatggtatgtaaatcatgtattagttggtgcgagagatgccttacttccagaacaatacattcaagaaaagatagcatcaattgaggcaatcgaagatagtaataaagaaagagacatgaagcaacgtgccatacatagttaa

SEQ ID NO: 310056 - DNA, 294 bp, Proteus mirabilis
atgttaccaaatatgatggctaattttgtaaagcaattaatttctgagacacaggatggtattgttagttggaaatattattcggatgaagataaagttgtaactgaataccaagggatgaatataatattggattatgcttttgattttaatcaagaagttggtgtccagcgtttaaatatcacacagagtgatgggcgccattttttctttgcggtaagtcaatacgattctggttatacgttattaaaacagctttataatgaggctcaagcttcggattttaaattctga

SEQ ID NO: 310057 - DNA, 510 bp, Proteus mirabilis
atgttcgaaaaaattaaagataattggattaggatagtatatgcaattatatgcctcatcattattgtatttagtaatacctaccaggttgatatagttagcccaagtacaagtatgaatttattttcatattatgcctctgtagcgacgattattgctctattaatatcaataatggaaatattatatgccgctagcattgcaaagagtataaaagtacgctctatgtttaatcttatgagattcaaacatacaacgggaataagctatgctcatgagtgtaattcattttacgaacaatgtttaagcgatttggccacaaaaaaatacccactccttgtcgccaaaatgggaatattaaacgatttggaaaaaaaaataattgcaacccgacatatcactccttctaaccctttgggtaatgctcagattaaagaaatccaagaggctttgctcgttgtaaaacaagattttcaaatgaaatatacattcagaaattcagaggattaa

SEQ ID NO: 310058 - DNA, 183 bp, Proteus mirabilis
atgatggaacacattattcgctctagcagtcgagagggtgacttagtagccgatttctttatgggatcaggagcaacactgaaagcagcactaaaacttaatcgaaaggtattaggtgtggagcttgagaaagagcgttttgagcaaaccgaacaagaaataaaagcatcaattcgtaagtaa

SEQ ID NO: 310059 - DNA, 807 bp, Proteus mirabilis
  misc_feature (732)..(741): n is a, c, g, or t
atgcaattatacaataatgatgcattagctatattaaaaacattacctgacaattatattgatttaatcgccacggatccaccgtatttcagaatgaaatcgtgtgcatgggataaccagtgggataatgttgaggcatatctgtcttggcttgatgaggtactagttgaattctggcgagtattaaaacccaatggtagtttatatttattctgtggttctaaattggcatcagatactgaactgcttgttcgcgggcgatttaatgtattaagccatattatttgggctaaaccatctgggccatggaaaaaacaaaataaggaaagcctacgcacctttttcccttcaacagagcggatactctttgctgaacattatcaaaagccaatcaccgctaaaggttctgaattttctttaaaatgccaggagttaaagcaaaacgtatttaagcccctgattgattattttagaaatgctcgtttagcactacaggtgagttctaaggagataaatcaagcaacagataagcaaatgttcagtcattggttcagcaatagtcagtggcaattacctagcgaggaagactacaaaaagttacaaacactgtttacacacattgctgataaacaagaaaagttatcgccgttatcccgccagtttaccgaattagagcgcgagcaggttacattacaaaaagactatcaagaattaataaaagaatatggtttnnnnnnnnnntgtaactgtagatgtaccttacaccgatgtgtgggattatccacctgttcagtattatcccggtaa

SEQ ID NO: 310060 - DNA, 462 bp, Proteus mirabilis
ttgcgggaggaagccattaatgcaaatcaaggggcggctgcgatattaaatgggcttgctcagactttattcgcttttgcattacgtgtttatgggcaaaaaccagatataaactcaagttggttagcattattagctgaacctcggttaagtcgtgtatttaattctatgttaaatgaaccacaaaaagggtggacacttgattctttagctaatgtcgcttcaatgtcacgagcgacttttgtgcgtcaatttaaagcaacggcgaatacgacacctggcgaagttctacaatccattcgtatgctaaaagcactttcattattacaacaaaataaatatacattatcagatatcgcagaaagagtcggataccaatctgaagctgcatttagtaaagcatttaaaagtgtatttaattgcagaccagggcagtggaagaagcaacagagtaaagtgtaa

SEQ ID NO: 310061 - DNA, 390 bp, Proteus mirabilis
atggatacgttgagccaactcttatacctttctcaagggcaattgcaattagatgtgttttgtcaaatgaaaggacatttttccttaccgcatgtttcatctgttgaacatgaaactatttttcacttagttctatcagggcagtgttatgttcagattgaaaaatcagcccctatagttttatccgaaggtacttttttaatgttaaacagaaggcaatcacataccctttggagtggagaacgagatatagaacctcccccttttttgcataaaaataatggcttcttacctgttaagtacacaaaatctgaagatcagactcaacatgttgatttgctttgcgggaggaagccattaatgcaaatcaaggggcggctgcgatattaa

SEQ ID NO: 310062 - DNA, 447 bp, Proteus mirabilis
atgctattattgttttcactgcttattattcctatgtctatactatctatctctgcattagtaaataaccttgatggtgaaatgcaattagaagaagcattcataccatttattatattgtgctttatcttatatacaattccaaacgtgatgcttttactcccaaacattgggaacataaaaaaaactgtttgcctctcactttatttaatatttttatccttcaccactaatattcttaatcttctggcttataaaacctttgactccatacatttcattaataaaaacaaaatcgaaataacatcaaaaaaatggcatgatgctgacatacctataaaatcattaaccacaaaaattgaatttattttctttaaacataaaaaaactcctcctaaatgtatatttgtcaacaatgacgaagtgagtctagttgaaaaggattag

SEQ ID NO: 310063 - DNA, 537 bp, Proteus mirabilis
gtgttacatcaaagtggaataactttggcacctgatttaggtaatacttttgctattgtaaatacaaatggcattgccggaattaaaactaatcgttcttcacaagccacgacagacaataacggtaatttaatattaccgcacatcatgccatatcgtaaaaatactattggactaaacataaattcgttacccgagtttagtaatactaaaactcaaagtaaaatcatcgtacctactttaggtgcggtagcaaaaatcaatttccctataaatgtcggctataatgttttatttacctcaaatacaccaattccttttgctgccaatgtaatggtatttgatgataataacaatctcatttctattgattctgtctatgaccacaatagaatattcctctccggaataaaagaaaccggaacggtacaagtaaaatggggagatacagaggagcaacaatgtttcttcaattataacgtaaaaaatgaaagtaaaaataattcaattattaagaaacaaattgattgccaataa

SEQ ID NO: 310064 - DNA, 213 bp, Proteus mirabilis
gtggcgattgaatcttattggcgtaaaaacacacaagagagttgtgtttattttttagataaagcaaaacagtttattcaaggacatttacagcagacgaatgcatggatatctatgtatggtcttgtcattgtttctaatgcgtcacttgaagagcagttgcctgaggctttattaacattaattcattcaaaatatgctagtctttcttga

SEQ ID NO: 310065 - DNA, 288 bp, Proteus mirabilis
atgcgattaaatcagttggatattcaatatacgcaggagctagcgaatgctaagaatgaaattagtcacttgcgtgatattagtgagcgtcatccagagcgggtgtacatcaaagccgagtgccccaaagtcaaaaccactccctccaccagcttggcttatgcaaccaccgcccgacctactgacaccgctatccgaaattattggttactcagagagcgaattgcagagtcagaacagatgattaaagggttgcaggattatatcaaacaagaatgcatggaataa

SEQ ID NO: 310066 - DNA, 678 bp, Proteus mirabilis
gtgggttacaccaatgcgggtaagtcgagtttattcaatcgtataacctgtgctgatgtatatgctgctgatcagttgtttgcgacactggatcctaccttaagacgaattcaggtcgatgatgttggtaccgtggtgttagctgatacggttggttttatccgacatctacctcatgatctggtggcggcatttaaggcaacgctacaagaaacacgtgaagcgacattgcttcttcatgttattgatgccgctgatagccgttttgaagagaacattcatgcagttgaaaatgtattagaagagattgatgctcacgagataccgacactgtatgtgatgaataaaattgatcttcttgaggacttcaccccaagaattgatcgaaatgaagataatttacctgttagggtttgggtttctgcacaaacaggtgaaggtattcctctgttatatcaggcgttgacagagcgcctttcaggtgagatcgcacacgttgaattgcgtttaccgccagaagaagcagggcgattacgtagccgtttttatcaattacaggctattgagcgtgaatggattgaaaaagacggtaaagttgggctaatcacccgaatgcctatggtagactggcatcgactttgcaagcaggagcctactttattggattacgtggtctga

SEQ ID NO: 310067 - DNA, 576 bp, Proteus mirabilis
ttgtttgatcgttatgaaggtggcgaattagccgttttagtgcacgttttcttttcgcaagaaaaggatattgatgacttgcaagagtttgaatctttggtgacatctgccggtgtaaaaccagttcaaattattacagggagccgtagagcgcctcactccaaatattatgtgggagaaggtaaagcggaagaaatcgcagaagcagtaaaagcgagtggtgcagatgtggtgctatttaatcacgcactctcaccggcacaagaacgaaatctggaaagactttgtgaatgtcgtgtggttgatcgcacgggagttatcctcgatatttttgctcaacgagcaagaactcacgaaggaaagctacaggtagaactcgctcagttacgtcatttatcaacccgtttagttcgagggtggacacacttagaacgacaaaaaggggggattggattacgtggccctggcgaaacacagcttgaaacggaccgacgtttgctcagaggcaaaattagtcaaattctaatgcgtctaggcaaagttgaacgtcagcgtgaacaaggacgacaagcgtga

SEQ ID NO: 310068 - DNA, 636 bp, Proteus mirabilis
gtgccagttaaaaaaaataataatgcctcatcgacgttttctattcctgttcctgatatgagaaaaaaaataaaaatgggaagacccgatgtaaaggaaataggttataccccagaaccatctttggataaagaatcctacaatgggattctcagtttaatacatgatgttggtagagaatttgaacgtttaccaagtctgtatgcgggcaaagaagaagagcatttaagagaccatttccttatgatgttagaacctaatttcacaggttctgcgacaggcgaaacatttaacaaaaagggtaaaactgatattttattacgttacgaaggtactaatgtctttattgcggaatgtaagttctggaaaggtaaaaaagtatttttaaatacaatatcgcaacttctaggttatctaacatggagggattctaaagcctcagtgataatgttcgtgcctaataaggagttttcatcggtaattcaaatagtgaaagatagtatttcagagcatcagaactatgtagaacatttaaatgataaagatgaaacctggttgaactatatatttcatttgaatgatgatagaaatagaatggtcaatttagctattatgctataccatattcctaaataa

SEQ ID NO: 310069 - DNA, 186 bp, Proteus mirabilis
atgagtatcgaagctgataataaaaccgaatgctatcggaattgtaaagccctttgtacgtgcagggctagaaagttacttagtgaaatccaaaaaaagaaaggcgttgcattgtcgccgtctcttatgttagccatgacctgtattacctcccagcgagcgcatagtgagaatcaaaaacaatga

SEQ ID NO: 310070 - DNA, 1179 bp, Proteus mirabilis
atgatacgtaaggtttcattcttattctcattgttcttatttagctttagcgtgatagtgagtgcatcagcgaatgatattcctcaactaaaaacagatagagtgattgatagtgcaaatttattgactgcacaacaattcaaagcgttaaatactttattggttaacttcgaaaatagtcgtaatgatggatcacaatttgttgtctatatcgttccaacgacagggaaagaaaccatcgaatcctttgcttttcgtgtttttaatcaatggaagataggcagaaaagggaaagataatggattattgctcgtggtggcaattaatgatcgtaatgttcgttttgaagtcgggtatggctatgagggagcattaactgatgtactggcaggacgaattattcgcaatgaaatgttgccattttttcgttcaaataattattatgcaggcatcgaacaaggggttaaaaatgctattcaagccgttaatcatgaaccaataagcttcactaactcacagataaatactaatacacttaaaatattccacacacattttatcctaatttatttggtaatattaggcggtgtttattggtttcagttgatattctcgacgcgaaaaataaaaaccaaaattaatcaattattagcgcctagaggaagaaaaaagaaaaatccagcagaccaaaaaggtaagttaagtataaagcaacgtaaacagttgaaaaattatctgcaatattcgtactattttcctacattttcaacgttatttttccccatgacactctgttttgcggcggtgatgttttatacacaagtctttcttgatggtattattgataattttgttttagtgataatagtcatattgtcattattatgtaattttatcgtattagtggttttatttggtattatcaacctgttatttccaatttatcggcaacaacgaaaagaatggaaagcgatttgtgtcgctagtccgtttggttcaccgtttaatcaactgccatattcaaaacgtattcgtagacgtagtggttattcaggctctggtggttattcgagttcgtcttattcatcaagttcatcaagttcatcaagctcttctagttcttctagcggtggtggcggtggttcgagtggtggtgggggtgcttcagggagttggtag

SEQ ID NO: 310071 - DNA, 240 bp, Proteus mirabilis
atgacagataaaacaggtggagcggcttttcctgcgagcgggcatccaaatatgcaatttgtagctcaggaaggtgtgaatatgcgtgattatctagctgctaaggctatgcagggcgatttagcttcacaaagcgcagaactcggtcattttccaaatgatgtagatgatgaatgcttaataaaacgcgctaaattctactaccgcatggcagatgcaatgttaaaagctagggggtga

SEQ ID NO: 310072 - DNA, 351 bp, Proteus mirabilis; identical to SEQ ID NO: 308391

SEQ ID NO: 310073 - DNA, 648 bp, Proteus mirabilis
atggccagagcctgtacgatacgggaactgatagcggatttatcccgctgcaatccggaggcattcgtcttgtgtgagatgtggttccccgatgatgttacctatgttgatgaaacggcttgtccggcagagacacgggcaacattaacgcatgttgcacatcattttgatgcggagctgggtatcaactgggacacgctggcgtgtgcgttatcgtgtgtcagagatgctgagcagaagggactcgatatttacttttatgccagtgaaaagcgtggtacagacaaaagccggatacccgcctcacgttacgcagaagcggacagcgacggcgatattgaagtcgggtatttccgtaaggttaatgcgctgtttaagtgggtgcatgaccatatcggggcttttgagaactgcgaaaaggtgctggtgacagaggcccatctgcgggctttacagcaggacttgcaggcactgacaccggaaaactgtcagacacggttcccgaccactgagggctttttctttggttcaacggcttatgatgaggcgtactgggctgatgtggaaggcgtcagacgctggctgtcagagataacggagacgtttgactttgacgcagagtcactgttttttgtggtctggtggtaa

SEQ ID NO: 310074 - DNA, 1089 bp, Proteus mirabilis; identical to SEQ ID NO: 282027

SEQ ID NO: 310075 - DNA, 348 bp, Proteus mirabilis
atggttaactttttattctatatggaaaaaggtgataatgataaaagcatgtctcaagtaataaacttttctcttttatttattttatctatagtacctgcactattagcgggttcaaccctgcatattgaacaaaagttctctatggtgattatcggttggctcctgatgttgctctgcgcaggtatctatcggtttactataggaaaagtgattacttttattgttgcagctttatggtctttaaacctctccatctcactgtttttttatcgtgaacatgatattcccttttcatcatcaatagcagaaactttcattaatactaatggaagtgaagatgtttaa

SEQ ID NO: 310076 - DNA, 1173 bp, Proteus mirabilis; identical to SEQ ID NO: 305064

SEQ ID NO: 310077 - DNA, 342 bp, Proteus mirabilis
atgagtaccataaaagagagttacgatgtttttcctattgggtatattaataaaaatatcggttacgattttatcggtcattggctaaatgatatggttaaagtggcgattattttggtttctcctgtattaattattatgtttttaagtgaagttgcattaggggtttattcattattttgtcctcaactaaatgcattttctctctctctttgtatcaaaggtattatcgcttttttagtattactgctcttttttacctcagcaatgacaaatgaattatatcatttttttaacagtagatacttttattctatttttatgagtatttatcatggctga

SEQ ID NO: 310078 - DNA, 444 bp, Proteus mirabilis
  misc_feature (398)..(407): n is a, c, g, or t
atgatttttttagatcgttctaaaaatatatttattcttttaaaatataacaataatgaatttctaatttataatctacaaactgacaatatggagacatggaataaagagagattaataaataacagtataaatcactattactatctggactttgcagaaaagcatttttttgatatcacttggtttgtcccaacctttatgaaatatcgtatattatttcaaagtgtattattttactcgttaattcttcaactgctagcacttgcctccccgattattacgcaaataattatggataaggtaattatccatcaagccctatccacgcttgatgtgttaataataggtcttatttttgtcgccgtttcagaatctgtattaaaggggataagagnnnnnnnnnnggataagagagtatatttatcatcatacagcaaataa

SEQ ID NO: 310079 - DNA, 1446 bp, Proteus mirabilis; identical to SEQ ID NO: 301252

SEQ ID NO: 310080 - DNA, 447 bp, Proteus mirabilis; identical to SEQ ID NO: 306256

SEQ ID NO: 310081 - DNA, 390 bp, Proteus mirabilis; identical to SEQ ID NO: 306291

SEQ ID NO: 310082 - DNA, 303 bp, Proteus mirabilis; identical to SEQ ID NO: 300502

SEQ ID NO: 310083 - DNA, 624 bp, Proteus mirabilis
atgttaaataaaaaaatagcatcggtgatgctatcaacaattattgctgcttcttttgctacggctgctaatgcagatactcgtgttgcacaagcaaccgcgacttggcaagcaactgcaattaaagatacaaccagtatgttagttgtcactccattaaaaagtctgacttttaattatgctgaaggccaaaaatcatttaaccaacaaaatggtgcatttgatattgctattcaaggccaatctggcgcaaccgattttaaattatcatcaaaactgattgctaatacgttagcaagaacaactgatgattcaacattaacagttggtgttaaatggaatggggaagacctttctaaaacaactgatgtcgtgttaattgatacatcaaaagggttaacctcaggtttagataatttagctgctgatggtatttacaatggctctgagcgcgctacagatcgtggtgaattcacttttgaaattgccagtgcacaagcagcaggagcaacagccgattttaaatcactggctgatggtgtctgggatggtgatgtaaaagtgcaatttactgccacttgggatggtgacttttctaccgttaaacctaatccagaaccttaa

SEQ ID NO: 310084 - DNA, 372 bp, Proteus mirabilis
  misc_feature (299)..(308): n is a, c, g, or t
atggcgccctgcttttcaaagaaaatcatttctaaagcatatcaaacatttaatgaaaataaatcagggtggggattagatttttattggcctattttatttaaagaagaaaatattaaagttggtgttatagactctacaccaatacatcatacacgaccagtagggatagcaggccatgggagtagtgataaaaccttatcgcctttaaatgaacttcatcaattattagacaagtattcacttgaaatacctacgtttgtagcaacttcacttctaacccaaaaagggaaaatgannnnnnnnnntacaaaaaggcagtttcagctattctttaagagagtttatgaaaaaaagaaaataaccctatga

SEQ ID NO: 310085 - DNA, 171 bp, Proteus mirabilis
atgacggtcgttaatcatattacggtgacaggaaatggtgacgctgtacttgctcaagcaatgaaagaagccgcacaacaagggacagaagcaggcgcacagaaagctcacgcgatgatgttacaagactttcaaagtaatggcgcagcacgcagaacattaggagtttaa

SEQ ID NO: 310086 - DNA, 171 bp, Proteus mirabilis; identical to SEQ ID NO: 307712

SEQ ID NO: 310087 - DNA, 171 bp, Proteus mirabilis; identical to SEQ ID NO: 307717

SEQ ID NO: 310088 - DNA, 192 bp, Proteus mirabilis
atgacccataaaaatcctaatgcgccacaaaaaataaatgcagattcccatccccatttagcgatgatccagacaactaaaggcatcgcaaaagcagtaccaaatttcgatccactgtcaaatagtgctgtgatccttcctctttctctatcaggaaaccatttagcggttataccactgttacaaggataa

SEQ ID NO: 310089 - DNA, 477 bp, Proteus mirabilis; identical to SEQ ID NO: 292561

SEQ ID NO: 310090 - DNA, 1218 bp, Proteus mirabilis
atgaaagatctattacaaaataaacagttagtggtgacgttggggttactttatcttgcgcaagggataccgatggggatagcaatggatgcgttgcctacttttttacgccatgatggaggcgaactgaaagcattagctttttcgccattagtcggtttgccatgggtagtgaaatttttatgggcttcgtttattgataaccattgggggaaacgtttaggtcgtcgtaaaagttggattattccaatgcaaattattgtcacgataacgatgtttgcgttaagtaccatcgggctgtcagttgcgaatgctttaccctgcattgtattgttgtttgtcgcttcatttgccagtgccacccaagatattgcaacagatggcatggctgcggagcaggtcagtggcacactgttatcaaagattaatgcagtacagatagccggggtgatggtaggtttttttattggtggcgcaggattgatgatcatgagtgaaagtttaggccaacatcttgctttgggaattttagcttgtgtaccgttattcagcttgttgtttattagtgtgtgtccattgaaagcgccaacaataacacaggaaattaatgagaaagcgagtttattaaaaaccgtaaaacgtcgtggtgctccgcgtttactgttattaactttgctttctgcggtgacggctgtttctggttttagtttagccaagttgttcctaaatgatgtggggtggtcattagcgcaaattggtaaaatgggtatggcagggggtatggtcacattagtactaggttgtggtggtggggcgtggttaattggtaaaatcggtgtgtggcgcgctttctcattcggtctgttatttgctttattatcttcattgttatggttgttgcaatccgttaatggtgtttctattacctttattgtactgtgtattacattcggttcgttatctgcggggatcacatctgtagcgataatgacagcggggatgcaatttgcgtcacgctatcagcaagcgggtactgatatgaccgcggtacagagtacccgtgatattggtgaattagccagttcgatgatgcttgttggtttaacggcagcggtaggctattcaggtggatttatattaggggcgttaattgcctttgttgcgctgttagtgacattttcacattatcgctatatgcagcgattaaaagcagagtaa

SEQ ID NO: 310091 - DNA, 1440 bp, Proteus mirabilis; identical to SEQ ID NO: 30508

SEQ ID NO: 310092 - DNA, 252 bp, Proteus mirabilis; identical to SEQ ID NO: 30507

SEQ ID NO: 310093 - DNA, 2130 bp, Proteus mirabilis
atgctttccgtttatgacattaaatcacgcagaaaattctgtttaacaccttgtacctttttatgtgcgtctgtgatggtcaatgcagcacctgtgcaaccgaaacaggatgttatattagtgacagcttcctcagcggttgatgatgactatgttgcaccgggtgtgacaacactcggcaaaatagcacttaagtcacgggaagtggcgcaatctgttagtgtgattgatagagaacaaattgaaaaacaaaacttacaaagtcttgatgatgtaatgcaacgtgcaacaggggtaaccagtgcgccttatgtgaagttaacaacagcttattatgtccgtggcttccagattgactcatttgaaattgatggtgtgccggctttattagggaacgtggccagttctcctcaagatatggcggtatatgagcgggttgaaattcttcgggggtcgaacggccttttacatggtatgggaaaccctgccgcaaccgtcaatatggtaagaaaacatgcgccaaaagaaaatatcgccaggctgagcttaagtgcaggaagttgggatcgttatcgtggagaagtggacgttggggggctactgaatcaatcaggttcagtacgtgggcggtttgttatggcatgggaagataaagactatttttatgatgtttctgaccaaaaaacccgtttgatgtacggtactgttgatatcgatgttactccagatactttactgcgtatgggagcgcatttccaaacgattgattctgttaccaatatggcaggtgttcctttcggtaaagatggcagtgatttacatctaccacgtaaaacctatttagatgtggattgggaccgcttcaagtgggacacctcccgttcatttgcgggtattgaacataaaatcaatgatgattggcaatataagcttaacgcagagtatcaacatgtaaatgcccgattattgtacgcaggagcatggggaaatatcgaccctgtaaccggtgatggcgcaatgttaatggggggagcgtataaattccgtaacgaacaaaccagcttagataccagtttaaatggtaaagtaaacgcatggggattaacccatgatgtggttgtcggtgcaagttactctcatgccagtgaaaagcaatatagcgcagatttagatcccgctttaaatgtgccagtgaacgtgtatcgttgggaccctcacagtgtaccaaaacccaatgttggcgcttatagttccgcagggccaaccaaaacgacgcaaaagggtctatacgggatgggacgtatcaaagtgatcgaacctgttactgttattgcgggggtacgtgatagctggtggaatgtcaaaacaccaacagcaaacttcactgaaaatggccgccttactccttacggtggtgtgatttgggattttacgccgcaatggtcatggtatagcagctattcaacagtctatcagccgcaaacagggaaaacgtggagcggaaaaatgctcaagcctgtcgaagggcaaacgcttgaaacgggtgtcaaaggagcgctattcaatggcggattaaacctatcaggtgctatttaccaaattgatattaaaaataacccgcaaattgaccctgcacacccaacagggggctttaataactatttcattagtggtggtaaagttcgtagccaaggttttgaactcgaaggtattggttatctgaccccattttgggatgtatcggtgggttatacctatacggatacgaaataccgtgatgacagccagcaccaaggggagtcttacaataccttaacccctcgccatatgttacgggtatggtctaactatgatttaccgtgggatgagcgcaaatggagcttgggtggtggtatgcaagctcagagtgcatactaccgtaaaggtaacggtaatgtgattttacgccagggtggatatgcgatttttaatgtccgcttagggtatcaaatcgatgaaacctggacagccgcggttaacgttaataacttatttgaccgtcgttattattcagggttgttctctccacaatggaataaccgttatggcgaaccgcgcaatgtgatgtttacattgaaggctgatttttaa

SEQ ID NO: 310094 - DNA, 873 bp, Proteus mirabilis; identical to SEQ ID NO: 30505

SEQ ID NO: 310095 - DNA, 678 bp, Proteus mirabilis
atggtcgtggcgattatattaaacgggtttatagtcagaaaggggatgttgaggaataagataaaaatgaaggtctattttattattttgtttgttaattttactttttgttttccgttaacagcgaaaactttatttttaggtgattcattaacggctgtttatgaaaagtctgcaaaatatgttttggatgaaaaaataaaaacagaatatgtttccggttcggggttaataaataaaagcaaaaaagactggatcgcttttgtgaataattttgatttgcgggaatttgataatatcattattagtctcgggacaaatgattttgttcagtatgatcagaataacagtcttgaatattatagtcgtgtgttcgaagtgattgctgaaattcaaactcaaaatctgttagcgacaattatctggatatctccgccacatttaaaaaatccggaacatgaacgttatttaatacataccagacatataattaaacacagtgcgatgttattaaatattcattatctggatattaatcagccccatattttaggggcgcaatggcaatctgttattcataatgacactgtccggaccggggatggaatacatatcacccgcaaagggggcgaacgggtaatgaatgaaatagtaaaaatcctgaataaacggggttga

SEQ ID NO: 310096 - DNA, 294 bp, Proteus mirabilis
atgaaaagaaataatctacttaattttaagatagttatatggattttattctttcctttaataggagctttgctatcaatttgcggtgtttttattgggtatgttgttgcttattttaaattgggtgtttttcctattgaaacaatctttcctaaaatagtttatgccataaagcctggcgtagttgttgggttgttattaggccttagcttatggatatggggaatagttattcctgaactcaccggtaaatttaaaccagataagaaagatgataatgatactaagaattag

SEQ ID NO: 310097 - DNA, 618 bp, Proteus mirabilis
atggcagaatatgggttgtcagcatcgacactagctacatcgatgtcaaaggataataaattaccacaagaagttaccgccgcattatctaaacatgcgaaaggcgatctccctgaaggacaagatccagccagaggtttactggttgcatgggcaccagttcctgcgattgcagccagtacagttatagcaccggtaacagcgacatatggttttttgtttggcggggcattaggtggcgcaacagatgcgacgcagcaacttatcacgatgaaaccgggcgaaacatatagttatacagatacgttgattgcaataggtacaggttctctgacacaaggtaaaggtgttatatttacaacagtagtgaatggtggcggcgcatatttaggtagttcaatcaagcatgaggatccaaccgcatcagtagcaggctcgatttttggttcagtgctgggaggaacaacgtcaaataaagttactaataaattgatagataaaggatatggttctgttacatcaggggtcgcaggagatgttgcgggggctatagtggaatcatcatctgaaaataccattaaacaaataattaaggatggtgaaaatgaaaagaaataa

SEQ ID NO: 310098 - DNA, 279 bp, Proteus mirabilis; identical to SEQ ID NO: 284196

SEQ ID NO: 310099 - DNA, 405 bp, Proteus mirabilis; identical to SEQ ID NO: 292579

SEQ ID NO: 310100 - DNA, 645 bp, Proteus mirabilis
atgagtaaatttcgtcatgccctgcaaaaccgggaccagcatattctgaccctgcgggtgatctgcggggtgctggtgctctgcctgttagtggcgtttaccggctggatgcgggcgccggataagctgaccatccataatccgccggatttgcgctccggcagtacccgggcctggtgggaagtgccgctgccgacggtgtacgccttcagcttttatatttttcagcagctcaatgcctggccgaaagacggtgaggtggattatccgcgcaagattgcacagctcagtgcctatctgacgccgtcctgccgggcctattttgagaaagaggccgcttaccgcaccacgctcggggagctgaaagggcgttcccgggtggtgtatgagatcccgggacgcgggttcagtgaagataaagtccgggtgattgaccgggatcactggatcgtgcgcctggatttggtggcggatgaatatttcagtgcggagccggtcaagcgggcaacggtgcgctatccaatgaaagtggtgcgctgggaaggggatccggaaagcaatccgtttggtctggcgctggactgttatgacgggacgcctcagcgtctggaagcggtgattcagaataaggaggtcagtcaatga

SEQ ID NO: 310101 - DNA, 528 bp, Proteus mirabilis
atgatgaataaattaagtttcgttccttgttttttcgtatttctgttggccgggtgttcaacgcaggaaatcgcagagtggaatcagaagatcagtgactttggccatcaggtcagtaataccatgaccggaggaaaacaggaacgaagtaaaaaagcgacggatatgacgattccggttgatattgataccgccgcatcccgcctgcgacgctattatggttttacggatgtgaatactcagattgcaacgcttcagcgagggaccgttaatgatcagtgggccgcagaagccattgccgctgaagggcatacatttgaagcgacaccgggcagttattataaattcgggcgtaggctgggcaacaataatccactggatgaagtgatcctggaactggaaaagaatggtgcagggacacgggtatatgtggtttatcactcttcgttcagcgggcatttaacggaggagtatgtggatccgttatttaagcagataagggatgttgcctccggcaaaatcagataa

SEQ ID NO: 310102 - DNA, 714 bp, Proteus mirabilis
atgatagatgtcgaaaaaaataatgaggcggaagatgttaccccgttgcgggcagggccgttaaaatcacaattgtcacttacgatccatactgatgttgctatccagctgtggaaagggcgtaagcgaaataataaaaacaattctgatagtgaaaatcgttggttaacacccagtgttcctttgtttctggccaccgctgcgcgtgtgactgatgatgcactgaaagggttattgtttgcagaaatgtggttatacaggctggaacaacatctgaatacaagagaagagcgaatttcttcattgattcagaaaatggaggatacgctgaaagttatccctaaaaatgtgaatatttctgagatcgcatccgttgctccggttaatttgggggtatacagccgaacgcctgttgggtatcgctgtgtctggcttttaattggtgttgatcaattagctttaaaagttcttcaggcttatcactatgggttacttagccgacagttgagggataaaacactggatgatgcctgtcatcaggtacgcagtattttagggatggcttttcgttaccggcaaattctgattaatcgtcataaccttgatattcataatgatatgtatcagcaggcggttaagttctttggtgaattagatgctgatattatctgcgggaaaaaacgttctgcttttttacctgttctcaaacattaa

SEQ ID NO: 310103 - DNA, 303 bp, Proteus mirabilis
atgatttacgaatatcttcttatagacaaacgtggctctggtgagaaatatgagtcttcaagtcttgttaatgatatattaaaaattagagctgatgctacaaaattatcatctagtaataaacctgaaaatactggtggatctccttatgataaatactacaaagtatttaaaataagcgacaatgataaggaatatttgataggtatatctgataaagttgatataaatatagaagaagataaaaaagaaatattatctctaatatttgcttatggaatacattacattcaaaataaataa

SEQ ID NO: 310104 - DNA, 204 bp, Proteus mirabilis
atgaaaatattacttaataccacagattttaataactgtgatgtatgtggagacgatatgtgcaccatcgcaacagaagatgacggaaagaaggtatttaatggcgatagcgttacttgctgtggatgttcaaacacaggacagataacggttgaagcagaagattgcgcgtatatcgaatgggataacccaagcgacgattaa

SEQ ID NO: 310105 - DNA, 210 bp, Proteus mirabilis
atgatattacgatttatattttctattgtattgttgtattcatcaatggcttactcacagcaagttgtaacacctgttactgatctacttggcagaaccgtgaatgtcaaattaccggtacagcgcgtcattttgggggaaggacgacagctttatttagtggctatgtttgataaagaaaatccagcacaaaggatagtcgcttggtga

SEQ ID NO: 310106 - DNA, 246 bp, Proteus mirabilis
atgaaatggcatcaaaaaatgcttgttaggatatttagtagcaacattcttacatttctatttcaactcattgcttggtgttcggtatcgcttttaatcgcgatagataaattaggcgagtttaatcttcatgtttatctaggttcattaccaatagtgattattcaggcgttagtgatgacatgtctaatcaggtggttgtttaaattttgtatgaaaaatattgatatcaaaggaggcatctaa

SEQ ID NO: 310107 - DNA, 927 bp, Proteus mirabilis
atgcataaatcaaaagaaatactatataggggtacactagacttagcgggttttgacatctcatgttatgtattaaaagatggtactcgtattttatctggaagagaaatgcaacgagcattaaaacttgttgatgatgataaaacttatcaagttgcagggaccagattacagcgatatttgaatcaaaaatcacttatcccattcctttataaggataaatcagaggaccactttactccgatcgaatgctacgaaggcgataaaaaaataaacggttatgaagccagcatactcgttgatatctgtgatgcattcatgcaagcaagaaaagaaatcgatttatcccctagacaatcgataatagctgaacaatgcgaaatgctaattcgttcttttgccaaagtcgggataatatcattaatagatgaagcaactggctatcaatatgatagagagagaaatgagcttcaacgaatcctaaaagcatatgtttcagaagaaattttaaaatggcaattaacttttactgatgagttttataaagaaatattcagactttggaattattcatatacgccaaataatattaagaaaaaaccacaatttgtaggaaaacttacgaataaatatatttatgaggttttacctgatggtgtttttgaaacaatcaagagcgatatgcctagaactgaaagtggaaattacaaacatagattccatcaaaaattaacacctgaaataggtagagaacatttaaaaaaacagataacagaagttactacactaatgaaaatatctgataataaagaacaatttaatttgttatttaaaaaacgatttaatacagatccacaatgtgaactagaattagtgtttaaagaagaagttaagcctagcataaaaaagagcaccaaaaaaatttga

SEQ ID NO: 310108 - DNA, 2241 bp, Proteus mirabilis
atgtctacaattccaacacaaaatccagttccaagcgaatcacctaaagacctgaaatttaactcagggaaaattgacgagtttgtcacttcacacaatcagcatttcatagaccgctttggcacaaaaagatatacaatatatggcattaactatttatcaaaacaggcaatgcttaactatggctatatcacgaagaagtcttttgaatcgggtaataccctcatcaatcctaacgatgttcttctctgggaaagtaatggcgaatactacagatgggatggtgaactccccaaagtagttagcgctggatcaacaccagattcaacaggaggccttggtgatgagaagtggaaaagtgttggtgatgcaacattaaggactgagcttgcgtctcaagatggtgctaagataattggcgttgataatggaattacgctacatgatttttattctttttataaatctcatgataccccgtcattcaaaacccagagtgacgcgtcacaatatgacggaatgtcaaatcaaatccgcgtaatggggtggaaagaatttggcgatattggggctggtatttttattattgacccgcatcaggagtacgacactcaagacaacccagatcggtttaaaaacacattaacaggtaaatactggatacgtattttagattattccataagcccatatattggattagaaaatgcgtcaattattaaagcttcagaaaagaaaaataactccccatggaaacagttagctccaattaatatccttggtgactcaataacatacggatacttctcgagttatgatgggccacaaaaaacagcgaaaagttatggtggtggtttgttttatcactcttggacaagtatttttgcacgaatgatggctgctgagaatggaagccagtgttataaagggtttattccattgccactaggttatggggatgactgggatattttttcacaggtatctaaagttgggaactggtcaataaaggatgacggacagtatgctagtaatttatataatggagctacatatcagtcttccgataacagtgctgaattagtttataaaattcctgcgacattcgatgaagttcaattttttatatgcaagcagccaaatggcggccagttaactataagcttaaatggtgaaatttggaaggtaatagatacatctaatgatgacgttactaatgaagtgataaaaacaacgatgaaatccaataaacaaggaagcatgattgttggtttcaaaaagacagacagcacaacaaatccagttggcataagtggcattggtattgataacgtaaaaacatttacttcagataccccgcgaggcggatctgttaatcaattttccatacctggcaggacattatccagtgttagtgagaatgttattcgtgactgcgcaaataacgcaagcgcattaatcttagctcttggttttaatgataaaaatattagttatgactcaccagagaatatacaaaaaagattagatttctccaagcgtattgactgggttataaaatactgcaaccaatacaacacaccacttatagttccagattttacctggtcacttgagccgtggagatttacccgcagggagctaagaagagcagcaatggaaacaggaggtgtgtatataccacttcctgatatgttaattaaaggcagaatatccacagaggatgaaagaacaaatagactcagaatgtggtttgatggtgctcatccaaacagaaacggtcagcagtggatcgcagagatgatcgctaaatatattgggttggggtgtacaacaaagaaagacgccatctgtaatcatgattactggatagctctagacttaaaagacacttggtcaaacgttaataatacccaaaactggaataatgcatcttataaagtatgcaatgggtacattgaagttagggggttgctacaaaaaactgataactcagaaatatctgtgacatcccatctaataacaaataacaatgagcttttcaggtctgaaataaaaccacctatattcctaagcactgttaataaagtgacatctttcgaaacaaaagaaacggaaaatacgccatctgtaatgtcaaggcttggttacaatggtgagttcagtataagaatgcataaatctgggaataaaggaattagtggtagctgtgtgttcgagtatagtaactatgatgcgtga

SEQ ID NO: 310109 - DNA, 1008 bp, Proteus mirabilis
atgatagagcgcaacaaaacaattgatgcattaaaagtaattggaatattacttattttatttgctcacataagagcgcctgtaggaatatttcaaattagaacgtttgatgttccgatgatggtttttttatctggatgttcttttctcgtagcaggaaaaaacaatgttaaattcattccctacttattttctagatttataagacttttattgccagtttggatatttcttacttgttattttatctttatttatttattcgatattgaatacatgcaaaagtaccttaatctagaaaaaatcatatcatcatttactttgtatgaaggatttggttatgtatggattattagggtatttcttttagttgcaatactcaccccagtttatttattcgttattaataaattcggtgagtatgtatcattctttatatttttactttctgttatttttctaagttttcttggtgaaaaaaatctaattaattataaatcatttactataactgatatcataataccagcaattagttatggtcttatgtttattactggttattgttgtgttagatctacaaataaaaaaatgttattttttatcttagttatatcagcctttttattttctttaacttgctattataatggttttcacccgcaaagctggaaatacccacctttatctcaatatatattttatgccattactattagcattattttatataaaaccgttgactttatttataataaaataaattccaatagtgctatcttaacatttattgcttcaaatactatgtggatatacttgtggcatatacctattgttgagcatgttataaaaactagaatgttcaatgattatttaattagatgggcttttgtttctattgttacaatctccgtagttgcagtgcagtatctaatggtaaaattaatattaaaatatgttaataataaaaaaatatcatcagtaataaaaaaagtttttaccggataa

SEQ ID NO: 310110 - DNA, 1083 bp, Proteus mirabilis
atgggcggtgaaattagaaccatacagtatcttagagggatagcagctttggccgttgtcctttttcattacagatttactcttaatgaatttaaccagttagacataaaaaatttaggtaacatactgttctcatctggttcatttggagtggatttatttttcatgataagtggtttcgtcatcactctttccacacaaaaaaattacggaagaaaaaagaatataattaaattttccttaaaaagattttttagaatttatccactactgataatttgtgttcttatagcatcttatatttatgatagtgatttaaaatcaattataaagtcacttattcctatacatctacaatataattacaatgctccattttttggtttgaatgtactaatggttgcatggacacttacgtttgaactgtttttttatttattgtttatgttgtctattattataaatcataagtatcgtggtattgtatgttgcttcttaattgtttctctgttttctttagtgagaattacatacactggtgaaatatcgttaatagcttataaaaccatagaatttcattatccaacaataataacagcgccactatcgttaatatcatcacctatgatattggaattctgcttgggaattatctctttttatatatatgaatacataaaaaacttgaaaatagaaaatatttcttttttaaaacctgcattgatatgttgtattttttatctattcattttgtgtttctctaaaaatgaatttacagggcatggaataatgaggtggggagtaatttgtttcttcctcttaactctttgtgtaatttatgaattattgtttggagttagcaaatttaaatcactaaattttttaggtgatatatcttactcgctttatatgacacaccagctttcagcgatattatttgcttcaatatctgcttatttatatctaacaggatttccgaaatttataaatgctaccctaggagcaatagcgatagcatctatctcatatgttattatagaaaagccatttatcagggttagtaagaaatatactagtaactaa

SEQ ID NO: 310111 - DNA, 609 bp, Proteus mirabilis
atgaaagagcgcggaattatctttaatgcggaaatggtgcgcgcaattttagatgggcgtaaaactcaaactcgtagagtaatgaacaaccagccttgcacactatcaggagaaactatttccgtacaacaggatgattttaatttcagatgggctggcgatttacataacgatactagcggttggtttccttgccctcttggcaaaattggtgatcgcctttgggttcgtgaaacgtggcgtaaatttgatttttcagatgagtgtggttgcagtgaatatccatgtggatgccctgaaaacggagctattatgtatcgcgcaacgcaagatgacggtgaatctaaatggaggccatctatacacatgcctcgtagatattcacgcattctgttagaaattactaatgttcgtgttgagcgactgaatgatatcagtaacgatgatgctaaatctgaaggttgttggtatgggcgtggaggtggcgttccagataaagctcttacacctagcgatcaattccctactttatgggaagaaatatacggagatggaagttggtcctctaatccgtgggtgtgggttattgagtttcgcaaagtagactaa

SEQ ID NO: 310112 - DNA, 363 bp, Proteus mirabilis
atgcctgccagccttagctattccagactaacccaaaacgaacttgagatatatgcatacaaaaatgttaatttcacctcaacgcttaagggtaaaccattttacgtaactaagtttgatgttgaaatctacgcgccaagtgaatacaaaggaaaaggaattgcctggcttaaagatggttgctttgtagccgttagtgatgacggtcaaaaattctatggcgggaaaatggatatcaacatgattatgcatatagcacaaaaagattcatacgcaaagggaaacatagagttcaaaaataaaaacaataaagtatatgatgctaactttattgattgggtgccagagaaatgtcctgaataa

SEQ ID NO: 310113 - DNA, 366 bp, Proteus mirabilis
atgagacaaattaaagtaagttctggttcgtggcaaaaagatttagaaatggttgtcactgttatcgatgaagataaatttaaaaaatcatgtgaacaaattaataaattctattctggtgatgaatatagagctgatatacacggtagccatgagaaagcaggttttgcaatgttctgtgctgagtgcttccagcaaatagcattcaataacttcaaggatgaagaatggcttaccgagcaattcgattggtctaaagataaaggaattgatggctatccttcgctggatgatatggggattcggattgatgaaatagaaccttggtttattgactctgacgatatagagattacaggatggtaa

SEQ ID NO: 310114 - DNA, 228 bp, Proteus mirabilis
atgaataaatcaataaatgaattaactcctaatgacgtaattaaggttggcgatagctggtatcgaattagatatttaagatatctaggatttgaaacatcaatagacttgcaaaaagaagaagatttactttcttattatcacgataagacgtgtttacgaatttcgataaataaagatttagatattgaattcaacataaaggatgcggagaatgaaaaagtatga

SEQ ID NO: 310115 - DNA, 771 bp, Proteus mirabilis
atgaattataataaattatttcttatttctttatctttaatttattctgcaaatgttttttctaatacggatagcctatcaccaatggataatctatctccatctatgacttttagcccaccagtaattagcccaagcccattaccaacaggtaacccttcacaattaggaaatggttctatggtagaatcaagtgtaggtattcccccaacatcaacaactcatctaccacaaccaccattaataggttatggcgcaccaacaataggtaatacatcaggatataggacacaatttccaaatacagatgctaatccaattaaaacaattaaagcaattaaaacataccttgacatgactgatcatgcaaccgatgatcataataatttgataggtggatacatttcagcctttatttctatttctagaccttctacatctacatcatctgaaaatactgtagtcagcctttctaaacctttttttgatcgtatgtctaaagcaatagatgttgattctgatgaagatggaagtatgttagtggataaaagtaaaaaggatatcgctcgtactatgtcttcttatttagaaaatctagaagcagactttttagaaacaatgaacgatgaaaatactagtgaggatgaaaatactagtgagataagactaacacagatggcattattacatcagatacaagattttaaaaatattgttgacgaaagtatagaaaaggtacctcttttactattgttgcaaatcaagatctag

SEQ ID NO: 310116 - DNA, 528 bp, Proteus mirabilis
atgctaacagggcgaaaaaagaaatttgcacaagccctgaaaaaagggatgacgcaacgagaagccgcgattgaagcgggatacagcgagaaaactgctcaggtaaaagggagtcagttagccaaagatccggatgtaacagcttatctaaggcgcagtattaatggtaatactaaagttaatactcatttaaatcaaaaagttaaccctacaattaatcgaaaaattaactctagagttaactccaatgttaattctgacattaacgctgttatcacggataaagagaggtcgtcacaggtacacgactatcctgatcctctggccgtgattgccgaaatcatgatgaaaaataaagacatcgaccctaaattatcgcttgatgccgccgcaaaattggcaccttatctgtgcagtaagaaaggggactgtggcaaaaaagacgaaaagaggaaagcagcgaaaaaagccggtaatcgtttttcaccaatgcctcccccaaaattaatcatcaacaacaagggttaa

SEQ ID NO: 310117 - DNA, 918 bp, Proteus mirabilis
atggtcatacgtcctaatcaacactggttttttcggttatttgattggcacggttcagtgctatcaaaaataatctttcgcttatgtcttaatattgcaatgtctattatcgctattttggtttatcaatggtatgaattattaggtattcatttaactgttgccccatttagtttattaggtattgctatcgcaatatttcttggttttagaaataatgcaagttatagccgacttgtggaggcaaggacattatggggaaatatgttaattacccatcgcaacatattaagaaatataaaagccttattaccggaagataaacaatttaatcgtgacttttccaatctacttattgcttttagttggagtctaaaacatgagctaagaaaaacaaacccaatggtcgatctctatcgcctcttaccccgacctttatttgatgagataatgaatagcccttaccccactaatcggattttattacatattggcctaaaaattggcgagttgcgagataacaaagtaataagtgatgttatctttcaatcaattaataaagatattaataacttatctgatgtattgggtggctgtgaacgtatttcaaatactcctgtaccttttgcctatacgctcatattgcaacgtacggtatatctattctgtgctctgctaccttttgcattggttgccgatctccactatatgacgccatttgtttccgtatttatctcttatacttttttatcttgggactcattagctgaagagttagaagatccattcggtgtttctgccaatgacttaccattaaatgcaatatgtaacaccatagaaaggaatttattagagatgcaagatatcactccactccccatcagagttaaacctgaccaatattataatttattgtaa

SEQ ID NO: 310118 - DNA, 243 bp, Proteus mirabilis
atggaattaggtaattcagaagcgataaaacatgctgtaatgtatgaaatggggattagttgtttatctcgccgagtgatccaagatcaaatagagagtggctctttaaaagagataaaggtcgaaggtctaaaattacaacgtactttatatttggtctatcatcgccaaaaacatgtctctgatgccctcaaaaaattactttcatattgtaatgctgaacatttaatcgacaacgcttga

SEQ ID NO: 310119 - DNA, 771 bp, Proteus mirabilis
atgaacgaacatacaatcagtaatgaatctcttattttttctctgttactggtcttagtggctatatttattagccgaaaagagaaactttcattagagaaagatattatttggagtaccgcccgagcgataattcaactctttattgttggctacgtattaacttatattttcgacgtcgaccatattatccttacatttctaatggtcttatttatctgttataacgctgcctataatgctaaaaaacgcagtaaatacgttaaagatatttttattatctcgtttgtcgctattaccacaggggcattgctcaccttaagtattttactttttactcatgctattgcctttacccctatccaaattattcctattaccggtatgatcgcggggaatgcaatgattgcgaccggactttgttataatcagcttgggcaacgttttgaaaatcatcaacaacagatccaagaaatgttaagtttaggggcaacccctaaaattgcttcaatggctattattcgagatagtattaaatcgtcgttaattccgaccgttgacgcagccaagaccgtggggattgtaagcttacctggaatgatgtctggattaatttttgccggtgttgatccactacaagcggttaaataccaaattatggtcacctttatgttgatggcaaccgccagtatttcaacaattattgcttgctatttaacctataagaaattctttaatcaacgccatcagttaatgacgtttaatcaataa

SEQ ID NO: 310120 - DNA, 246 bp, Proteus mirabilis
atgaaatggcatcagaaggcactcgtcagggtatttagtagcaacactcttacatttctatttcaactcattgcttggtgttcggtatcgattttaatcgagatagataaattaggtgagtttaatcttcatgtttgtctaagagaattaccaatagtgattattcaggcgttagtggtgacatgtctaatcaggtggttgtttaaattttgtatgaaaaatattgatatcaaaggaggcatctaa

SEQ ID NO: 310121 - DNA, 201 bp, Proteus mirabilis
atggtatacggtattgatgaaccttttagaggattaaataattcagaaatacattctttagcgatgtttttttatcatctggtaaagctaggtaaaatggttattattgccgatcatgaagatgctagttttaaatattttcaataccatattgaattaaataatatacaggggagattagttggccaacagatcagttaa

SEQ ID NO: 310122 - DNA, 285 bp, Proteus mirabilis
  misc_feature (193)..(202): n is a, c, g, or t
atggatgcacaactgtataaagagtttaaaattatagaaaaagcgttttggtcagagatatgtgaaaacaatattcgtattggtgatcatacccactgctttatgacaccgatggacgcgcctatttttaattttatctaccttcgccaaggcgctagcgaaaatactttccaacaagcaagtacgctgtacnnnnnnnnnnagcaagtacgctgttctcctcgcaaaaaaaaggtcacatgctggttctgccggaatctctgttgcctgaatttgaagagataa

SEQ ID NO: 310123 - DNA, 570 bp, Proteus mirabilis; identical to SEQ ID NO: 310038

SEQ ID NO: 310124 - DNA, 138 bp, Proteus mirabilis
atgatatttgtcggcaaaatgggattagtagtgcgacttattatatctatggactacctccgttttgcaagtacagaatctgttttttggggtgttgcttacatcaatccggcatcagaaaaacctgtgcccaaatga

SEQ ID NO: 310125 - DNA, 201 bp, Proteus mirabilis
atgaaatttttagtcgtagactgtgggttaacaggggctgtaattagtcgccatctagctgatgctggtcattgcatcacgataatagaccaaagatcacatattgctggtaattgccatacagaacgagatagaaataccggtattatggaacatgtttatggtccacatatcttccacactagcgatgaagtggtatag

SEQ ID NO: 310126 - DNA, 576 bp, Proteus mirabilis
gtgtctacaataaaaaactttaaaagaacagtattgttagcgatgatggtgtatgcagtaaactgtcaatccgcaaataatggtactctcaacttttctgctaatgtaacacgtggcacttgtgaatttagcgatagtaatgagctgagtaaacatgtctcatttgaacagttttttactattggtgatgcagaagacacaccaataaaggcgcctattaaagggagtctcggcactaagcaatttacttatcttatcgattgtaaagagtatgaacctgatagtgagaaaaaaatcacgattaatgtaaaaacaggcgcgaatactgaatattcagatcaggttttttatggaaaaggcgatacgacccaaaccggttttttagtaaaaggctgtcttgaaggtgaaaatgcgagttgccaaattctagaaaacaataaaaagttatctttttcttctcactctaattcagcgataagtattaactacatcgtcgattttgttagacgtaacaataataaaatgacacctggtgattcaacggcgactattttatttgaatatattcaggattaa

SEQ ID NO: 310127 - DNA, 699 bp, Proteus mirabilis; identical to SEQ ID NO: 296367

SEQ ID NO: 310128 - DNA, 795 bp, Proteus mirabilis; identical to SEQ ID NO: 306723

SEQ ID NO: 310129 - DNA, 2061 bp, Proteus mirabilis
gtgattattatttcacttgatgacattcagaatggaaagcttaatttaattgaaaaaaatggctttgaacagcctatttttgccgttattaataaagatgaagttatccctgctaatattattaatcgattaactggtgtaattgatttaaataaaaaaaatagtgagttatataataaacaactagaaactgcagcgttaaaatatgaagagagtctattacctccttttttcggcagcttaaaaaaatacgttgaacaaggaaattcagcttttgattgtcctgggcatcaaggaggtgaatttttccgccgtcatcctctaggtaaccaatttgtcgagtattttggtgaaaacttattccgctctgatttatgtaatgccgatgtttctatgggtgatctgctgatccacgaaggtgccccatgtgccgcacaacaacatgcagcaaaagtctttaatgccgataaaacttatttcgtacttaatggtacatcttcctcaaataaagtcgttcttaatgccttattggcaccagatgacctagtattatttgatcgtaataatcacaaatcaaaccatcacggagcattaattcaagcaggagcaacgcctgtttatcttgaagcagcacgtaacccatttgggtttataggtgggattgatgctcactgttttgaagaaaaatatctacgtgaactcatcaaagaagtcgcccctacacgtgcaaatgaaaagcgccctttccgcctagccgttattcaattaggtacctatgacggaacaatatataacgcacgtcaggtagtcgataaaatcggacatttatgtgactacattttatttgactccgcgtgggtgggctatgaacagtttattccaatgatgaaagattgttctccacttctacttgaactgaatgaaaacgatccggggatcttagttacacaatctgtacataaacaacaagcgggattctctcaaacctcacagatccacaaaaaagatcgccatattaaaggtcaaaaacgctatgtaaatcataaacgtctcaataacgcctttatgatgcatgcctctactagtccattctacccattatttgcagctttggatgtgaatgccaaaatgcatgaaggtgagtcaggtaaacgtttatggatgaattgcgtaaaaacagggattgaaacccgtaaattactcctgcaatcctgtaaacatattcgcccgtttattccagaaactatcgatggccgtgcatgggaagattttgatactgatgaaattgccaatgatctccgattctttaattttgttccgggagagcgctggcactcatttgagggatatgaaaaaaatcaatactttgttgatccatgtaaattactactaaccaccccaggtattaatgccaaaacaggaaaatatgaatcatttggtgttcctgccaccattttggcgaactatctacgtgaaaataacattattcctgaaaaatgcgatcttaactccatattattcctgctaacacctgcagaaagcatggcgaaaatgcagcatctggtcgcacaaattgctcgctttgaacaattactggaacaagatgccccactgaaagaggtacttccatcagtatatcatgccaaccaaacacgttatcaaggatacaccatccgtcaattgtgccaagaaatgcatgatatgtatgtgaaatttaatgtaaaacaactgcaaaaagagatgttccgtaaatcacatttcccacaagtcagtatgttacctcaagaagccaatatcgcttttgtgcgtggcgaggtggagttagttgccgtggaaaaaattgaaggccgtatcgccgccgaaggtgctctaccttatccaccaggagtactgtgtgtagtaccaggggaaatttggggtggctctgtacagcaatattttctagcgctagaagaaggaattaatctattcccgggattctcaccggaattacaaggtgtatatatccgcaatgatgaggacggtcgtctgcgggcatatggctatgtaattaagcactaa

SEQ ID NO: 310130 - DNA, 669 bp, Proteus mirabilis
  misc_feature (648)..(657): n is a, c, g, or t
atgagtattagtcgtcgttcttttattaaggggatgggtataggatgtgttggttgtacgatgggaagtttaccaccaggggccctcgcacttaatccagtaacatctcttaagggtcaatctaaattaacaccaagtttgtgtgagatgtgttcttaccgttgtcctatagaagctcaggttgttaataacaaaactgtctttatccaaggtaaccgaaattcaccacatcaaaagactcgagtctgtgcgagaggaggcagtggtgttagccttatttatgatccgaaacgcattgtaaagcccatgaaacgcaaaggccctagaggtgccggagaatgggaagttattagctgggaacaagcttatacagaaattgccgaaaagatggcaagcatcaaacaacattatggtgctgaaagtatctttttttcatcaaaatcaggctctctctcctctcatttatttcatttagcggcggcatttgggtcaccaaacacctttacgcatgcatcaacttgtcctgcgggcaaagccattgctgcatcggtaatgatgggtggtgatttaaaaatggatctcgcaaattctaaatatattctttcttttggtcataatctttatgaaggaattgaagttgcagaaacnnnnnnnnnncctatgaattaa

SEQ ID NO: 310131 - DNA, 1716 bp, Proteus mirabilis
atgaacataaaaaataaaatttactgtatcattggaattatcattttttatagcttctttttgccaactcaagcggcagaaggaaaggttatttatacacatcaggttaaaaaacctgatgtttttgttgcggtaaatacacatattgaacagtttttcctagtgctatcagataaattaaataaaccttttattctaagcagcgcagtaaaaaaagagcggatcagtggaaaatttgatatttcttcacctgaagacgcctttgaattaatggtaaagcgtttgtcattactttattttaatgacggagaatctatttatatttatcgcgataatgagatacagcaacagctatttcaagtgaaaaatatcagcttgagtaaactgaaagagtatctacaagatgttggattatatgatctccgctacccattacgtgcaggtcacgatcagcgtactttttatctctcaggtcctcctatttatattagcttagttaaggctgctgctgagcttttggataatgatgtacaagaacaaattaatgaaaatatcaataatcaagttccaaccggaagctctcgttatggcgatgagtttgtgcagatatttccattaaaaaacacttttgtacaagatagaacctatatattacgtgatgaaaaagtggttttaccaggtataacaacggttttgcaacagctatttatgccatcgggagagaaagaaaaaacagtcagaagagcgcgtgagattatcgaagataatgataaatatcaggatgataaaattaccaacgatatacaagatactcattcaccgattatcactcaaatgggcaaatataatgttgaactcgttcctttacctggatcaaatagcctgttggttaaaacgagtcgagaaggtttagctttagttagctcacttatttcacaattagataaaccaaaaagacaagttgaattgtcattatggataattgatatttctaaaagtaaagccgatagtttgggggtgaattggcaggggagttatggctcgggtaaaaatacatttttctttaataccgctagtttaagtgctgtatctggttttagttttttaagtaaaatcaaagcactcagtgaggaaggggaagctaaaatggtttctcgtcctattttgttaactcaagaaaatacccccgccatatttgataataacaccaccttttatacacaaattaaaggtgagcgagttgcttcattagaatctacaacattcggcactatgatcagtgtattgcctcgtattagtaatactaaccaagagattgagatgattatcaatcttgaagatggcgccgagaaaaaaagtgatgatgaagatagagaagaagggattgaaaaattacctgttattaatcgcacaaatatcagcaccgtggcccgagtttttgaaggcggtagtttattaattggtggatatacacgagaagataacataaaagcagaaaacaaaattccttttttaagtgctatacctttagttggccgagcatttagctatcagtcagataataataaaaaaatggtgcgtatttttatgttacaaccgcgtttattagataaaactgatacgcacggattggactctttaactgaacacccatttttaccgatggataaaaaaacatctcaagcgctaaaacaaattcaggcatttatgaggtga

SEQ ID NO: 310132 - DNA, 804 bp, Proteus mirabilis; identical to SEQ ID NO: 304112

SEQ ID NO: 310133 - DNA, 777 bp, Proteus mirabilis
atggtccttttagaaaaaggaaaaggtgagtctaaatataataatgctgcaacttttaatgcttttattccacgagcaagtatcgcttggcttccaaatgaacaaaatcggatatggtttggcgttgggcgtggttttaaacccggtggatttaataaagaagggacagataaattagcgctggcttcttataaatcagaaactgccactgaaatggagttagggtggaaatggcacagttttaataacaatcatcaggccgaaattactctataccaaatagatagtaaagacgttcaaggatatgtgggtgtcataggttatcaagcattatctaatatgggagattcaagaagtcgaggaatagagtacctttggaaatcaaagattaactctaatcatagtatttcactaggggggatgttcaatcaatctgaatttactagtggagaatataaaaacaaaagacccgcttatactcctcgttatagttcattaatagcatgggatggttcatatggagctgagcaaaagtggtcgtctcggattgcagtcaggtttaatggaccattttattttaatgagcaaaacgatctagaacagcgtcactatactattgttgatgcatctatatcatggcatccaacaaaacaatatgaattaggtgtttatgccaagaatattggagatgctttgtatagaacttatgcttttggtaataaagctcaactaggtgaaccaagagaaataggcgttcaagctaaactccttttttaa

SEQ ID NO: 310134 - DNA, 1200 bp, Proteus mirabilis
  misc_feature (1165)..(1174): n is a, c, g, or t
atgttttttgtaataacagcaacagtaacagtaaactctgaagctaatccagaaaaacataatcattccgctgataatacaattactgtcacagcaactaagcgtattcaaagtagttttgaggtgactggtaatgtgaatgttcaaacagaagaacaattaaataaagcatcagttaatcaaactgatgatttaaatgcagtttttcctgaattgttatctgcaaaccgaagttcacgcatttataacaatatgacccttcgtgggcaatcttcggctgattttttctctccgagtttagggctatttgttgatggaactcctcaactttctcaatcatatgcacaatcgcttcaaggagtagagcaagttgaactgcttaaagggccacaaggagttatttatgggcgtggcacattgggggggattatcagtattattacaaaaaaaccgagtaaccattctgaagcatggttagatggtcaatattttggtcgaggagggagaattaatacagggggtagttctggctatatggaaaatgggtgggcccttcaaggaaatgttagcttcgacagaaataatggatctttggataatcctgcatgggataaaaaaaatatagatagccgagatataaaaacaggatggctatctgctagttatatttcccctgatacattattcgagtctaattttaaaataggtggggaaaattaccattctcatgaagaatattttgttcctttctcacctctttcacgttcaaacgttgatactgaatggttatatgaaacccccgatcttaaacgtaaattaaagaatatctcatggaatacaggttatgactttaatgaaaattggaaattaaaaactatactttcttatcaacatatggatatagatagattatttatggatggaacattgcaggaggattctcaggatctactatattcagaagtaagaaccaattatgaaggagatagattaagcggaattgttggtatatcatttcaaaaaatgggatatagacacgataatttatctattggtcaagtaggtatgggaggaaagaaatctgataatgatatttacaattattctggatattttgatggcgcttatcgaataaatgactattgggaattaggggcgggagctnnnnnnnnnnagcaaaaactagaatggtccttttag

SEQ ID NO: 310135 - DNA, 1497 bp, Proteus mirabilis
atgaataaaactattagtgaacatgtagatgtcgcgctcattggtgctggcattatgagtgcaacacttggcacacttctgaaagaactagagcctaatttaaaagtcgcaatgtttgaaagacttaatgattgtggtcaagaaagctctaactcatggaataacgcgggaacaggacatgctgctaactgtgagctaaattatacgccaccaaatcctgacggcaccgttaatatcagtaaagcgttagaagtgaacaccgagttcgatttatcgcgccaattatggtcttatttagtaacaaaaggaaaaattgccgatccgcgtgattttattcatgcttgccctcatatgagttttgtttggggtgcagataacgttaaattccttcatcaacgctatcgccaaatgtctgccaatcactgttatgaaaatatgcaatacagtgaagacaaacagcaaattgaagattgggcgccattaattatggaagggcgtgatccgaatcaacagcttgctgtcacccgagtagctactggtactgatgtcgattatggcgcattaacacatctattagttaagcaactttctcaacaagataattttgagttgcactataaacatgatgttattgatatcaaaagaaatgagactggtggttggaatatcgaagttaaagatctcaccacccatgataaatacctcattacagctaaatatgtatttgttggtgccggtggacgcgctatcgatttactccaaaaatcaggtattccagaaggtaaaggctacggtggtttccctgttagtggtatttggctacgttgtgatgaagataaaatcagctctcgccatcatgccaaagtttatggaaaagcagatgtaggctcaccaccgatgtctgtcccccatcttgatactcgtattattgcaggtaaacgctccctactctttggcccctatgctggtttttcaagtaaatttttaaaacacggctcctatttagatttatttgaatcaattcgccccagcaatattgaacctatgctagatgtcgcgaaagataactggtcattaactgaatatttaattggtcaagtattacaaacgtcagcacatcaatttgaaatgcttaaacagttctatcctcaggctcaacatgaggattggcaagaagctgttgcaggtcaacgagtgcagattattaaacccgcagctaaacatcatggcgtattagagtttggtactgagctaattagtagcgcagataaatcattttcagtgttattgggggcatcacctggcgcttctacagcagcatttattgccatcaatatcattaaatcttgctttaaacagcaacttgaaaatgagggttgggaagatcgtcttaaaacgattattccaacttatggtattgatctcaaaatagatgccgatacttgtcgtaatattcgtgcatcaacggctaagatattaaaattagaaacaccttag

SEQ ID NO: 310136 - DNA, 219 bp, Proteus mirabilis
gtgctaacgattatcggattactcattattatttctattgtgacattactaatgatggggaaaacaagcccaattattgcaatgtcggtcataccattaattggtgcgcttgtcgcaggttattcatttactgaaatatctactttttttgaattaggtattaaaaaggtgagtagtgtcgcaacgatgtttttatttgcgatactttttttagcataa

SEQ ID NO: 310137 - DNA, 1329 bp, Proteus mirabilis
atggatacaaccaaagctggttctatcgcacagggtaatacccaaagtgattacaaaacatggcgtaagtcagacacagtatggatgctcggtttgtatggtacagctatcggtgctggcgttctgtttttacctatcaatgccgggattggtggcttaattcctctgttgattatgttagtacttgcttttcctatgaccttttttgcacaccgtggtatgtgtcgctttgtgctatcaggtaaaaatccaggtgaagatattactgaagtggttgaagaacactttggtaaaacagcaggtgtattaatcactctgctctatttctttgctatttatcctatcttgttggtttacagtgtcgctatcactaatacggtagaaagctttattgttcaccaaatgcatatgacagcaccacctcgtgcgattttatcactggtactgattgtcggtattatgtgtatcattcgctttggtgaacaagctattgttaaagcaatgagtgtcttagtattcccattcgttgccatcttgatggtacttgctttatacctcattcctgaatggaatggtgccattcttgatacgctctcttttgatcacgcatcaacttctggtatgagccaaggcttgttagtaaccttatggttagctatccctgtgatggtgttctcttttaaccactcacctatcatctctgcttttgctgtggcaaaacgcgaagagtacggtgacaatgcagagaaaaaatgttcacgcatcttagcttatgctcatattatgatggtgatcactgttatgttcttcgtgtttagctgcgtatttagcttaacaccagaaaatttagcagaagcaaaagagcaaaacatcagtattctgtcttatcttgctaaccactttgaagcacccgttatcgcttacattgcacctttcattgcctttgttgcgattactaaatctttcttaggtcactatttaggggctcgtgaaggtttcaatggcttaattatcaaagggatgcgcggaattggtaagaatgtcgaaaaagatcgtttaaacaaaatcacagctctgtttatgttggttacaacgtggatcgttgcaacattaaacccaagtatccttggtatgattgaaacactgggtggcccaatcatcgcaatgttactgttcttaatgcctatgtatgctatccgtaaagtaccagcgatgaaaaaatatcaaggccatattagcaacgtatttgttgttatcatgggtctgattgcaatctcagcggttttctacaccttaggtaatactttcattaattatttctttaactaa

SEQ ID NO: 310138 - DNA, 1365 bp, Proteus mirabilis
atggttagcgtttttgatatttttaaaatcggtattggaccttcaagctcacacacggtaggcccaatgaaagcaggtaaagaatttgtcgatttacttgctgagaaaaaccttctctcctctgtttcccgcgtagtcgttgatgtgtatggctctttatctctaacaggtaaaggtcacgcaacagatatcgcgattattatgggattagccggtaatttacctgatacggttgatattgacgctatcgcaccttttattaaacaagtcgaaaataccggacgtttgatgttagctaatggtgctcaagaggttgatttccccgcggttggaggcatgaattttcataaaagtaatttacctcttcatgaaaatggtatgactatcagcgcctataatggcgaacaacttctgttgaaaaaaacctattactccattggtggcggctttattgttgatgaagagcattttggtcaacccgaagagaataaagttgaagtaccttatccttatcaatatgctgccgatttgcaacgtcactgtaaggaaaccggtctctctctttctgcactggtgatgcaaaatgaacttgcattacgcagtaaagaagagatctcagcccattttgctgccgtttgggaggtaatgaaatcaggtatcgagcgcggtgttaataccgaaggcttattaccgggaccattacgtgttcctcgtcgcgcatctgcgttacgtcgtatgttagtgactgaagataaaaccaccaccgatcctatgacagtagttgattggatcaatatgtttgcattagccgtaaacgaagagaatgcagccggtggacgtgttgtaacagcacccactaatggcgcatgcggtattattcctgccgtactctcctattacgataaatttattcgcccagtcaatgaaaactcttatacacgctttttcttagtggccggtgttattgggtcgctgtacaaaatgaatgcctctatttccggtgctgaagtgggttgtcaaggtgaagtcggtgtagcctgctcaatggctgctggcgctttaactgaactgctagggggtagtcctgagcaagtctgtattgcagctgaaatcgcaatggagcataacttaggtcttacttgtgatccggttgcaggacaagtacaggtgccttgtatcgagcgtaacgctattgctgccgtacaagcggtaaactcagcacggatggcgcttcgtcgtgtcagtgatccacgtatctgtttagataaagtcatcgagaccatgtatgaaacaggtaaagatattaattctaaatatcgtgaaacatcacaaggtggcttagccattaaagtctcttgcgattaa

SEQ ID NO: 310139 - DNA, 1671 bp, Proteus mirabilis
atgaaatcagatattgaaatttcccatcaagcaccgcttttacccatccaagatattgctaaaaaaataaatgtagaccaagacgatattgaattttatggcaaatacaaagccaagtttagccagagtatttggtcaaaaatcacctcaaaaaaacagggtaaattggtgcttgtcacttccattaatcccacaccagcaggtgaaggtaaaaccaccgttacggtaggattaggacaagcccttaatcaattaggcaaaagtgccattattgcattacgcgaaccctccttaggcccttgttttggtctaaaaggaggagcggctggcggtggatattcacaagttgtaccgatggaagatctcaatcttcattttaccggtgattttcatgctatcacctctgcaaataatttattagcagcgatgttagataactcgctttatcaaggtaatccccttaacattaatcctaaaaagattatttttaagcgctgtatggatatgaatgatcgcgcactacgtcatttagtgattggattaggtggcgacaaagatggggtggttagagaagatagctttgttatcaccgttgctagcgaaattatgtctatcctttgtttagcaaaagatattaatgatttaaaacagcgcttagcacgtatcatcgttgcatataactatgaaggcgagcctgttagtgctgaagatctcaacgctgtcggcgctatggcaaccttacttaaagatgcccttaatcctaatttagtacaaacgttagaaaatacccccgcgattattcatggtggcccttttgccaacattgcccatggctgtaatagcctaagagcgactaaacttgctcttcaactggctgatatcactgtaacagaagcgggatttggcgctgatttaggtgcggaaaaattctttgatatcaaatgtcgcataggcgacttacaaccagactgcgctgttttagtcgttaccactaaggcattaaaatataatggtggcttaggcaaaacacagtgggatcacgaaaatctcaccgctttagcaacggggatcgaaaatctaggtaagcatattgaaaatctgaaaaaatatggtgttccggttattgttacagtaaatgcttatgtgacagactctgctaaagagcatgaatttatcgcccaatattgccagcaaagaggatgtcgttttgccattagtcaagtatgggagaaaggtggcgcgggtggtattgaattagccaatcaggttattgatacactagaaaatgatgcaccacagtttcaattactctaccctgataatatgcctttaaagcaaaagatagagaccattgctcaagaaatttatggtgcaaaaggggtgacttacaatgctaacgcccaagagatgctaacaaaaatcgaggatatgggctttggccatttccctatttgtatggcaaaaacgcaatattctctatcagatgatcccgcattacttggtcgcccgactgattttaccattaatatccgggaagtgtatgtcagtgctggtgcaggctttgttgttgcattaacgggcacaataaatacgatgccaggattacctaaaaaaccggcagcaatggcgatggacgttgatgatcatggggcaataaaaggactgttctaa

SEQ ID NO: 310140 - DNA, 1203 bp, Proteus mirabilis
atgaaaacaaatcttccatccgtattggctaaggttaccgcgggaatgggtttactgctaattatttctagtcctacttttgcggtgaataatcctgtgccgcctcaaattgaggctaaatcttacgtattaatggattataacagtggaaaaatacttgcttcagagaagcctgaagagcgcctagatcctgccagtctaaccaaaataatgagtagttatgtggtaggacaagcgataaaagagggacgtatgtcgcccgatgatattgttattgttgggcgcaatgcttgggcgacaggtaatcctgttttaaagggctcatccttgatgtttttaaaaccaggcgatcgagttaaagtgatcgacttaaatcgaggtatggtgatccaatctggtaatgatgccagtattgcgttggcagagcatgttgccggtagccaagaaacctttgttgatcttatgaatacctatgccgcgaatttaggtttaaaaaacactcactttaaaacagtacacggtctagattctgaagggcagtacaccacagcacaagatatggcgttattaacagctgccatgatccgcgatgtaccttcagaatatgatattcataaagaaaaagaatttaccttcaacaatattcgccagccaaatcgtaaccgtctattgtggaataaaaatatgaatgtcgacggtgtaaaaaccgggcataccaatggggctggctataaccttgtctcttcggcaaccgaaggaaatatgcgtctgattgcagtggttttaggggcgccatcagataaagtgcgttttgctgaaagtgaaagattactcggctggggtttccgcttttttgaaaccgtgacacctgtaaaagagaacgtgcccctgactacgcaaaaagtatggtatggcgataaaggtgaagtggctttaggtgttgctaaagatgcatcaatcaccattcctaaaggagagctaaagaacttaaaagcctcttttacattgactaaccccgaattagaagcaccattaacacaaaatcaagtagtaggaacagtgaatttcttactaaacgatgaagtgattgagcagcgcccattagtggtaaaagaagcggttgaagaaggtggtttctttagtcgtatctgggactttgtggttaaaacagtctctggttggtttaatgcgctttttggttaa

SEQ ID NO: 310141 - DNA, 1137 bp, Proteus mirabilis; identical to SEQ ID NO: 297737

SEQ ID NO: 310142 - DNA, 180 bp, Proteus mirabilis; identical to SEQ ID NO: 309673

SEQ ID NO: 310143 - DNA, 585 bp, Proteus mirabilis
gtgatccatcctgaaaaactatttcgagatttattagagctttgtggtgaactacagacattcacgaatacttcacgtttacctgaaaatattgccaaatatcaacatgctaaattaacagaaagttatattccattaatagccagtatccgcgaagcactcagtgttgtcttaacaccaagagcgatcccaatcccgctacaagttcaagagcatggtattcgtgtagcaaccattcatgacaaacaactgctacaacgagctgaatttattattgcggtgaaatcacaaatgccgcaagagcaactacgtcgccaattcccacaacaaactaaggtgacaacaatcaataacattcgcagcttggttagtgtgcaaataccgggtgttcctttatcaccactttcggctgcaccaagacagttaccttatcactcgggatataactatttccattttgatcaacaaggcaatgaatggaaagggatccagcaggatggcaacatcgcattccacgtttcaggaaacttccccgatctcgatattcagttatgggcaataagagatggagcactctatgactga

SEQ ID NO: 310144 - DNA, 1458 bp, Proteus mirabilis
atgggacttgcagccatcaaaaccaaccaactgatcgccggtgaaatagcacaatcaggtggtgtagaaaattatttaaaaacacaacagaacaaagggttattacgttttttaacctgtggcaatgttgatgatggaaaaagcaccttaattggtcgcttacttcatgatacgcggcagatctacgaagatcagctctccaccttacaaaacgagagtaaaaagattggtactcaaggtgaaaaattagatctcgctttgctggtggacggtttagcggctgaacgagagcaagggatcactattgatgtagcttatcgctatttttcaacagccaaacgaaaatttattattgccgatacgccgggacatgcacaatatacccgcaatatggcgacaggagcatcaacgagtacgctttctattctgctgatcgatgctcgaaaaggggtacaagagcaaactcgccgccatagttttattagcacactccttgggatccgtcacttagtggtcgcgattaataaaatggatctacttgattatcaacaagagatctttgagtcgatccaacaagattacctgcactttgcacaacaattaccgcgcgatctcactatcgaatttgtgcctatctctgcactggagggggataatgtagtatctccttcattaaatatgccttggtatacaggaaaaacactgctggcattacttgaagatgcgccggttaaatttaaattaggggctaaatctcaaagattgcgttttcctgtacagtatgtgaatcgtcctgatttagattttagaggctacagtggcacagtttcatcaggctctctttatcaaggacaacaaatcaaagtattaccctcaggacagcgttcaaccattaaacgtattgtgacttttgatggcgatctgactcaggcgcaagtgggtcaagcgattacactggtgttagcggatgaaatcgatattagtcgtggcgacattattgttgatgctaacgataccactgctaatgttagcaatcatgcgttggtggatatcgtatggatgtcagaacaaccgttagtacagggacaaacccttgatatcaaagtagcgggcaaaaaaagtcgtgccaaaatagagaatattcactatcaagttgatgtggataagctcactcaacaagtgaccgaaagtttagcgctaaatgccattgggcatgttgaagtgttatttgaagagccattggtgctggataactatcaacttaatgcacaaacaggagggcttatttttattgatagattaagcaatgtcacggtgggtgctggtcttattcgagaaattcgcgacaacgtgcaacccacaacttcccaatacgatgcatttgaaattgaactcaatcagttgatccgccgccattttccgcattggggcgcaagagacttactgggaggaaaatag

SEQ ID NO: 310145 - DNA, 765 bp, Proteus mirabilis; identical to SEQ ID NO: 309537

SEQ ID NO: 310146 - DNA, 285 bp, Proteus mirabilis
  misc_feature (265)..(272): n is a, c, g, or t
atgagcaacgtaggtcagcgagaacgcatcacccaaaatcgtatcgttcagttttttcaaactgacttaggttatcgctacttaggtgattggcaagatcgcgtcaataataaaaatattgaagttgagatccttgttgattggttaacaaaacgtggtgtaagtgaagcgctgatcaatcgcacaattcgccagctagatgcagctgccgcgctgggtgaagggaaaaaactctattacgctaacaaagaggtttatcgcttannnnnnnngtgtgaaagataa

SEQ ID NO: 310147 - DNA, 348 bp, Proteus mirabilis
  misc_feature (334)..(343): n is a, c, g, or t
atgaaagtattatttgcattaatgttaataccagaaatcgccttaggatcaagtgtattcctggcaaataatacaataaaaataccgagtgaatttaagcaatatttttataactcagaaattgtttctcaagtgtatcttaatgattctcccctttttgaagctgtcttttcacttcatgaaaatggacaaattaatctcttgagaattttagatgaagaacctgatattaaaccgcaagttaaaaatgaatgggctgagattttacaaaaaggcatctcattaggtgcttgtgatgcttcctgccccgcaggactcgtctctgctgaatatnnnnnnnnnngctga

SEQ ID NO: 310148 - DNA, 258 bp, Proteus mirabilis
  misc_feature (244)..(253): n is a, c, g, or t
atgaactctcgttatgtgcgtgctctcacgttgttatcattaattcccacttctgtcttcgctcttgagtatcccgtaggtcaaccaatcattaaaaatggcatggaaattcaaggtgtctatctacaacctatcacgatggacacagaggaaggccatcatgcaatgaagcacctacctgctgataaagctgatatccatttagaagcagatattcatgctgttgaagataatccgaatggtnnnnnnnnnnggtga

SEQ ID NO: 310149 - DNA, 573 bp, Proteus mirabilis
  misc_feature (515)..(524): n is a, c, g, or t
atgaatagtaagctttcaaaaccacaatcttcagaagttgataaagggcatttcgacgatttttatctaaaacagaacgatgaaatcgatctgtttgagttattttctgttctttataaatcaaaatttgtcattattgggatcacacttttatttgctatcgtaggttttactgttgcgagctttctgccccagaaatggacaagccaagctgctattacaaaaccaatgttagatgagatgaagcagttaagagcaaccttaaatgatttaagcttggttgatgttgatactggcgtaaatgcttcttctgtttaccaaaaatttatcaataactacaattcccgtgtattacgtgaagaatatttagtcaatacggattactataaaaacttattggctaagatggacgatcctacgccattggataaacgtaaattaatcgaaactattgttactaaagatattaatttaaaagcatcagacagtaaaaatagtgatgaagaatttagtgnnnnnnnnnngatttgctgtcaggttatattcgctttatttctactaaagtacgggtag

SEQ ID NO: 310150 - DNA, 1491 bp, Proteus mirabilis
atgatacccgttattgccttagtagggcgccctaatgtgggaaaatccacattatttaaccgactaacacgcacaagagacgcattagttgcggattttcctggacttacccgtgaccgtaaatatggtcgtgcagaattagacggtgaagaatttattatcattgatactggtggtattgatggtgcagaagagggtgtagaaacccatatggcatcacaatcactgcaagccattcaagaagccgatattgtgctatttttagtcgatgcgcgagcaggattaatgccagccgaccaaggtattgctaaacacttgcgtggtgttgagaaaaaaacctatttagtggcgaataaaacagatggtatcgatattgataccgctttggctgatttctactctttaggattaggggaaatattccctattgctgcctcacatggtcgtggtgtttctcaactgattgagcaagcgttgttacctattgtgggtaaagtcgtcgaagaagagaaagaattaacagaagaagaagagaatgccgcttattgggctgctttagaagcagagcagaaagagcaagaagaagaggaagaagaggatgatttcgatccgacaacacttcctgttaaattagctattgtaggccgccctaatgtaggtaaatcaactctgactaaccgtatgttaggtgaagagcgtgttgtagtttacgatatgccaggcactacccgtgatagtatttacataccgatggagcgtgatggtaaggagtatatccttattgataccgctggcgttcgtaaacgcggaaaagtaaaagaaacggtagaaaaattctcagtgatcaaaacattacaagcgattgaagattgtaatgttgcactacttgttattgatgctcgtgagggtatttcagatcaagatctctctttattaggttatattcttaattctggacgctctttagttattgctgtcaataaatgggatggtatgacccaagaagatcgcgaacaagttaaagatatgcttgatctcaaattaggttttgttgattttgcccgcgttcattttatctcggcattacatggtagtggtgttggtaatctgtttgagtcgattcaagaagcctatacttgcgcgacacgtcgtgttggtacatcaatgttgacgcgcataatgaagatggcagaggatgatcaccaaccccctcttattcgtggacgccgtgtaaaaatgaaatatgcccatgctgggggatataatccacctgtcgtggttattcatggtaaccaagtgtctgatctaccggatagctataaacgctatttaatgaattatttccgtcgcacactacaagtgatgggaactcctatccgtattcaatttaaagaaggggaaaacccttatgcggataagaaaaataaattaacagcttcgcaaatacgtaaacgtaagcgtttaatggctcatttaaagaaatcaaaataa

SEQ ID NO: 310151 - DNA, 240 bp, Proteus mirabilis
gtgccgacaaaaacacgagtaccagagacggttaaaccaccggaaagtaatgctgattcattagagcaagtgaaaagtaaagcatgggatggaatgaaaaattatatccgtggtgatgtattagcgaaaaaaggcgataacgcaggtgcagccgccgcttatcgtaatgcattgaatgatgaaaatgcaggcgctattcgctcattggttgaacttaaactcaataatttatccaattaa

SEQ ID NO: 310152 - DNA, 1983 bp, Proteus mirabilis
atgaaagcaatagtatttgcctatcatgatattggctgtgttggtttaaaagcacttgaaaaagcgggtttcgatattcaagctgtatttacccatactgacgatcctaacgaaaatcatttcttctcatccgtagcgcgtgttagcgcagaaatgggattaaccgtgtttgctccagaaaacgttaatcatccattatggattgagcgtattcgtgagatgaagccagatgtcattttctctttctattatcgccatatgctaagcgatgagatcctgaatttagcacctaaaggtgcatttaatttacatggctctttattacctaaatatcgcggtcgtgcacctatcaattgggccattgtcaatggtgaaactgaaacaggtgtcactttacataaaatgacggctaaagcagatgctggtgatatcgttgcacaagaaaaagtaacgattgaagatactgatacttcattaattttacatgaaaaagtcagagaagctgcggcgaaattaatggctcatacgttaccgcatatcgcctcaggtaactattcaacaacagcgcaagatgaaagccaagcaacttattatggtcgtcgttgtgctgatgatggtttaattgactggaatgcagatgctaaaacggttcataatttagttcgtgccgttactgaaccatacccaggtgctttcactttcttaggtgagcgcaaaatgattatctggcgcgcacgtccagtggcagataaccaaggtaaacgtccgggtactgttatttcgactaagcctttagttatcgcatgtgcgaaaggtgcaattgaagttatcacaggtcaaagtgaaaatggtctttatgttcaaggcagccgtttagccactgaaatggggatcgtgacagatgtacgcgttggaccaaaagcaacagcacaagtcaaacgtcgtcaacgtgtactgattttaggtgtcaatggctttattggtaaccacctaaccgagcgtctattaaaagatggtaactatgatatctacggtatggatatcggttcatcagcaattgaacgctttattggtaaccctcgtttccactttattgaaggtgatgtcagcattcatacagaatggattgagtatcacatcaagaaatgtgatgtgatcttgccattagtagcgattgcaacaccgattgaatatacccgtaatccattacgtgtatttgaattagattttgaagagaacttaaaaattgttcgttattgtgttaaatacaataaacgtattattttcccatccacatcagaagtatacggtatgtgcgatgataaagagttcgatgaagataattcacgcttaatcgttggtcctattaataaacaacgttggatttactctgtttctaaacagttattagaccgagttatttgggcttatggtgctaaagaagggctgaaattcactttattccgtccatttaactggatggggccacgtcttgataacttaaattcagcgcgtattggtagctctcgtgcaattactcagttaattttgaacttagtggaaggttcaccgattaaactggttgatggtggtgagcaaaaacgttgtttcactgatattaatgatggtattgaagcattattccgcattattgaaaatcgtgataacaaatgtgatggtcagatcatcaatatcggtaacccaactaacgaagcaagtattcgtgagctagcagaaatgctgttagattgctttgaaaaacatgagttacgcggtcacttccctccatttgctggcttcaagaaaatcgaaagtagcagctactacggtaaaggctatcaagatgttgaacaccgcaaaccaagcatcaaaaatgctgagcgtctgttagattggaaaccaactatcgaaacacgccaaacggtagaagagacattagacttcttcttacgtggtgcagttgaagagttaggtaataagtaa

SEQ ID NO: 310153 - DNA, 2169 bp, Proteus mirabilis
atggcgactcaacaaaggatacaaacctcatctgagaaatcaccggtattccagttttcagtacgtcccgataaggtcggaattatcaccattaatgttgtagatgaaaaggtcaatacactgaaagctgcttttgttgaacagtttcaaaatgtattaaaacaggctcagcaacattcaggtgtaaaaggattaattatcacctcaggtaaacctgataattttattgctggtgctgatatatcaatgattgcagattgcaaaaccaaagaagaggccaccgcattagcaaaagcaggacaagatctttttactcaattagaaaattatcctttgcctgtcgtcgcagccatcaatggcgcctgtttaggtggaggattagaactagcattagcctgccatgggcgaatttgctccgataacagtaaaacacgtttaggccttcctgaagttcaattaggattactaccaggttcggggggaacccaaagattaccacgtttaataggggttacgaccgctttagatatgattttaactggacgacaaattaatgccaaacgggctttcaagcttggcttagttgatgacgttgtaccacaagctattttattagatgttgcagcccaatggattttaacagctaaaaaagctgctaaaaaacagactattatggagcgtttttgggcaaataccacattaggaagaaatatcctctttgatcaagctaaaaagcgcactttagctaaaaccaaaggtcattacccagcggcagagcgtattcttcacgttattgaacgaggcttagagaaagatattcaaacaggttttaaagaagaagctaatgcgtttggtgaattagccatgaccccggtttcatctgcattacggcatctcttttttgcctcaacagcattgaaaaatgaaacaggatcatctgcaaagccagataacttacaccatataggtattttaggtggggggttaatggggggcggtattgcttttgtgacagcaacaaaaggtaatttacccgttagaattaaagatattagtgataaaggtattgcgcaggcacttaactatagttggaaagcgttatcaactaaggtcaagaaaaaacggctctctgctcgtgaacgccaacgacaaatggggttattatcagggacattggattatagcggtttccatcaaactgaccttattgtcgaagctgtttttgaagatttggctttaaagcaaaaaatggtggctgatattgaagccttaggtgaaggcaagatcatctttgcttcaaatacgtcttctcttcctatccataaaattgctgaaaaagcacaatatccagaaaaaataattgggctgcactattttagtcccgttgaaaaaatgcccttagttgaagtgatccctcatgaaaaaacggatgctaagacaatcgccacaaccgttgcttttgctaaaaaacaaggcaaagttgccattgtggtaggagataaacccggtttttatgtcaatcgaattctcgccccttatattagtgaagccttaacctgtttggttgaaggggaaacgatagagaatattgacaaagcattagttcaatttggctttccagtcggccccattcaacttttagatgaagtgggaattgatattggtactaaaataacgcctattttagtcaatgagtttggtgagcgttttgcatctcctcccgcggtggatgcgattattgcggatgacagaaaagggcgtaaaaacggtcgtggtttttatctctataatcagcatgccttacctttctctttaggaaaaaataaaaagcgtgcagatccgatgatttatcgcttattacaggttaaacctaaaaatcagttatcggcttcagaaataaccgaacgttgtttattgcttatgcttaatgaagctgttcgttgtttagatgaaaacattattcaacaacctagggatggtgatattggtgctgttttcggtattggttttcctcccttctttggtggaccattccggtatatagatagtatgggaacaacaaaaatagtcgataagcttaatcaattaactgaaaaatacggtgaaaagttccagccatgtgagcgattagcagcaatggccaagttaaatgaacgattctatagctaa

SEQ ID NO: 310154 - DNA, 246 bp, Proteus mirabilis
gtgacaattaatagctgttatcgtgtaaatagtgctatcttagccaaagctgccgtattaaaaggtttaggttttgctattttagctgaacattgttgccttgatgcgataaaggcaggcaaattgcgagctatttcttttcctcaacagcccgcatcaattagtttagtcgcgatatatgcaagtcgtcgttcgctttcacgtaatattgaacattttcttgcatttttaactcagcgtttataa

SEQ ID NO: 310155 - DNA, 960 bp, Proteus mirabilis
atgaatggaaaatcaaataatagtttaataaataatgatagtaataaacaaatagctaaaccaataattccgccaccaactgctaaccctactttaagttcacaaatggagacaggagatggcaatgttgctttagatttagttgtggtaatagatacaagtggctcaatggctgatgaatcttctgatttaagtcaacaaatagatgatgctgttcaaaaggcattaggacgttgcccatcaagtttaagagtcacttttttaggaatagaaggtacgtgggataatactaagttcgatcgctcagtgactgactatttaatgacacaaggtgtatctgctcacaaattacaagcaagagcgccatttaaagaggctgatggacgagatcatgctggaaataaagaagatttatgccgagccgtcattgatgtgtgtaaatatttcgattggcgagatggcgctcgtcgtgcaatttttgtcttaggtgatgaaggtatggaaggtggcggaggtgtattaacacaagccgctgtgcttaaaaacaatgaggcaatagtggttgctagaagcgaaaaagtaaaagtatatacttatcagggaacgcctaatgatgatccctctaatgtggatcgctttcctactattgctgatagagataacatcacgaaagagtatgtgcgcttagcgcagatgacgggaggacgctcttatatatacacaacaggtatcgctaatttttctttagttctgcaagaaattctatgtgacagtttaacattacctaaacttcctgatctgaataaagataattcaacgtgtcgtcatgtttgtgaagagctctctactattatatcaacagttaatacccttgcagaaataatgcataaagcgattgattcatgttgtaaagaagattggggcacacgcgaagtgtttaagcctcattgtgattgttaa

SEQ ID NO: 310156 - DNA, 684 bp, Proteus mirabilis
atgattgagcaagctgtacgtgatgttttggaaaaaggtttagtattccgtatcgatgaagcatcgcttaccaatagcagtggcgcaagcaagctaaactttaagttagatttaaatgcgttcaatgctgatgcactgaaaaaagaaaacaaggcgccttcagttctgtttaatgaattgtttaataatatcgattttaatatcgatctttctgtaccaatgctaacggagttccgtagtaccacacaataccttgatgttatgcgttattctgaaaaaggcttaacagacgaagataaagctgaaattcagaaaacaaccgctaacgacatggcacagttaaaaactgaattacagcaaaatatcaatcaaatttctcaagacgagaaagatgctctgccattgatgctgttatcacaagacggtaataaactgtctttaaacctgaactatgctgctgataaatttactatgaacggtaaaacttacagctttgatgagtttatggaagtaacacaagcccctcaaatgttaggtttagcggctatgttatttggtgcaggtgcttcttcttatgattatgatgactctgattatcctgaatattcagaagagccagatcaaaatgatgcaatagaagagccacaagttgaaatcccagcggcacctgctgaaaacaattaa

SEQ ID NO: 310157 - DNA, 906 bp, Proteus mirabilis; identical to SEQ ID NO: 298390

SEQ ID NO: 310158 - DNA, 189 bp, Proteus mirabilis
atgcataaaaaacaacgttcgcccttctctttacgaacaagatttttacttgccaccagcgccattattttagcactgacactctcttatggtttggttgccatagtcggttctattgtcagttttgataaaacgacttttatgctaatgcgtagccaaagtaatctctactatagcttagcgcaatga

SEQ ID NO: 310159 - DNA, 780 bp, Proteus mirabilis; identical to SEQ ID NO: 298344

SEQ ID NO: 310160 - DNA, 1590 bp, Proteus mirabilis; identical to SEQ ID NO: 301797

SEQ ID NO: 310161 - DNA, 1026 bp, Proteus mirabilis; identical to SEQ ID NO: 306663

SEQ ID NO: 310162 - DNA, 561 bp, Proteus mirabilis
  misc_feature (549)..(558): n is a, c, g, or t
atgagcacattattatctacacaaaatctctcttttcataataatcacggtatattgctgagtaatatttctttggcactcactaaaggtgagaaaattggtttaattggctacaacggttgtggaaaaagtaccctattaaaacttttatcacaccaattaataccaacagatggttctattactatcgccaatcaagtcattatggcttatgtcgaacaacagttaccaagtgagctacagtcaatgcgtctcattgatgcggttcttcataaattacctgaagagctacgcatatctgaaagttggcgcagtgaattattattaagtgaaatgggatttaaagccaatgaaatcaatctattagtctcacaattaagtggtggtcaacatactcgtttattacttgcgagagcattgattttacaaccagacttactgctattagatgagccaagtaaccacttagatctaccgactatcttgtggttagaaacatttttaacacagtggcgaggaagttttattcttgtttcacatgacaatagnnnnnnnnnntga

SEQ ID NO: 310163 - DNA, 1233 bp, Proteus mirabilis
  misc_feature (20)..(29): n is a, c, g, or t
ttgtttcacatgacaatagnnnnnnnnnntgacaataggttgttagataaagtgaccaattgtacgtggatcattcgtgataaaaccctatctgtttttcgcttgccctgctctcaggcaagacaagagcaagaagcacaagatatcagtgcgcaacatcgttgtgatgcacaacaaaaagagatagatcgtattgcacaaagtgcgaagcaactggcgatctggggaaaagtgtatgataacgaaagtttgtcacgtaaagccaaacaaatggaaaaacaaattgttcgtttaaaagacgaacaagtcgatgtaacagaaggcaatcaatggacgttacagttatcaggaacaatattacgggcagatagattgcttgagctgcatcagctttcagtgatccctgcgccagatgcaccgattttatataccatcgataatcaacggatcaaaagtggtgatcgagtcgctattgttggtgctaatgggacaggtaagtcatcatcattaaaaatgatttggtcatcatttcatggttcaaccacatcaacagaaaatatgatcaggcttcatcccagagttgagttaggttattacgatcaaagcctcgcacaacttaatgataatgatacccttgccgatgcactaaagccctttgcaccgctattagatgagcaaaggaaaatggcattaataaatgcaggttttgtttattctcgccataatcagcaagtaaagtcattaagtggtggtgaacgagctcgtttactttttattggtctcagtttggcaaaatattcattattaatgctagatgaaccaacaaaccatcttgatatggaaggtaaacaggcattagctgagcaaattcaacgattttcagggggaattttactcgtcagccatgatagagaattgatagagaaaagctgtaatcgtttttggtatattcacaatggtattcttagcgaacatcatgatattgaaacaatttatcagcttatttctcaacaagatatgtcatcggtctctaatgagcaaaatggccatcatgctccatctgttgaaatagtaaaacatcataatgaagatgaattgctaatgaaattgatagcacttgaagataaattgaatgctgatttagcaagaaaatctgctcatcaaaagcctatattacaggctcaatggcaagcagaaatagagatcttaaagcaacaacttgatttagcttaa

SEQ ID NO: 310164 - DNA, 1242 bp, Proteus mirabilis
atgtcagaagtcacatccattgctaaacgcccatctatactcggtggtgcgatgattattgccggtacggcggtaggcgccggtatgttctccatccctattgtgacttccggtgtgtggtttaccggctctatctttttactcatttatacttggttttgcctatttatgtctggcttaatgatcttagaagttaatcttcactaccccctaggatcaagctttcatactattaccaaagatttattaggtaagggatggagtaccattaatggtctttctattgcttttgttctctatattttaacttatgcctatatttctgcaggtagctccatcattgtgcaaaattttgctaatgtggttagcttgccacaagccgttgcaggcttagtatttgcccttgttgttgctttcttcgtttggttatcaacccgagccgttgatcgcttaagtaccatattaattggcggtatgattgtggcttttgtatttgctatcggtggattatttaccgaagtgaaaatgccagtattatttaatacaacagaaagccatgccagttatttaccttatgcactagccgcattaccttatttattaacctcctttggttatcacggcaatattcctggattagtcacctactaccgtaaagacggtaaagccgtgatgaaaagtctattaattggtaccttgatttcgctggctatctacattttatggcagtttgttgtacaaggtaatattcctcgtgaaggctttaaacaagtcattgctgaaggcggaaatattggtaacttactggcacaaatgcgtatcaatacagcaaatacttccgtttcattcttattagacttgttctcatatatggcattagcgagttcatttttaggcgtatctttagggttatttgattatttagctgatttctttaaattctcaaatactgggacaggacgtttaaaatcggccatcgtaacttttgtaccacctactattttagcgattatttttcctgatggcttcttgtatgctattggctttgcaggacttgcagccacaatttgggcggcgataattccagcattaatggcaaaagccagtcgtcaacgtcatcagcaacaaagctttaaagcacctggtggcacctttatgattatctttgtgatcttatttggtgcaattaatgcgattgcacacatattagcaaactttaatctcctacctatttaccgctga

SEQ ID NO: 310165 - DNA, 420 bp, Proteus mirabilis; identical to SEQ ID NO: 302445

SEQ ID NO: 310166 - DNA, 939 bp, Proteus mirabilis
atgtcctcttcttttccccaattaagtattgtggtggcggtttttaatggtgaaaaatttttaccacagttttttaattgtttacatgcacaacaactggaaaactgggaacttattttagttgatgatggctctactgataactctcgtcagatcttagataaatgggaaaaacactttcccaatgtcactattttaacacaagaaaaccaaggtgtttccgttgcgcgtaatacaggatttgctgttgcaaagggggaatacgttgcttttcctgatattgatgatgtgatagataaacgcatgtatccccgattacttgaaattgccaaggccgataatttggatgtggcaacctgtaatgggaattatgtttatgatgataaaaaccgaccaacacgccctatctttccttcaacgcgtttaacaaccacagaggtattaaccgggcctcaatggcttgaacgtgctcttgaatcgaaaaagttcttacatgttacatggctaaatatttatcgacgtcagtttttattggagcatggttattactttgagccgggtttgcatcaccaagatattccttggacgacagaagtgttattaacggcgaaacgggtaaaatatatcgatgagcgttattacgactattttattcattctggctccgtgtcgcatacgacacccgatgatcgtattcatgtaagaacaatttataactatatgaaaatacttgagatgctggatgctattaccaaagaacgtttaggtattattcattctattgatgcgattagttcaccagaaaccaaaaaacagatagttaaggtattttttgagcggggaatttgggccttaatttggaaaaatgcgaaagattttagattaaaatggcgtttaggccggcgttattttcgactgaaaaaaatattagcagaataa

SEQ ID NO: 310167 - DNA, 291 bp, Proteus mirabilis
atgaaaggcttaaataaattagaagttaatgaaagtcatcttcgtgaagagttagatagcaactgggaagttcttgctgaaccaatccaaacggttatgcgtcgctatggtattgaaaagccttatgaaaaacttaaagagttaactcgtggtaaacggatcacggcacaagatatgattgtgtttattgacggtttagcgctaccagaacaagaaaaagcacgcttaaaagcgatgacacctgaaagctatattggttttgccagtcaacttgttgataaattagattaa

SEQ ID NO: 310168 - DNA, 498 bp, Proteus mirabilis
atgcggatcttaattattgaagataatatcttacttcgccatcatttatctgtgcagtttcgcgatgcaggacatcaagttgatgcagcacaagatgcgaaagaagccgatcactttatcgcagaaagtacacctgatgtcgccattgttgatttaggtcttcctgatgaagatggtatcagccttattcgtcgatggcgggaaaataatattactattcctattatggtattaacggctcgagaaagctggcaggaaaaagtgaccgcattaaatgccggtgctgatgattatgtgacaaagccttttcattttgaagagatcgtggcacgcgttcaggcattaatgcgaagaaacatgggcattgcctcacaaatactgactattgccccttttgagttggatttatcacgtaaagagttcatgatcttaggtgagcaaatcaagctcactgcattcgaatatactattttagaaacattaatgcgtaatcactaa

SEQ ID NO: 310169 - DNA, 906 bp, Proteus mirabilis
atgccgatcacggctaatagcatagcaagtaatgaaaggcctttttgggttcatctcgattatcgtaaacccaaaagtgatcagtggattaatcagactgagttacttcctcctatcgcaaaagatgtgcttttagctgaaaatgttcgacctaaggcacagcgtatcggggaaggggttattattaatttgcaaacgattaataacaaccccgatgatcggccggatgaactgattgcgtatcgtatttatattaatggtcaaatgattatttcgagccgacatcgtcgcgttaattccgttgattcggtgatccactctttagaagtgggtgatggtccagaaaatagtggtagttggttgatcactatggccgatgcagtgacagatgaaataggtgattttgttgaaacacttcatgaccaattaattgagttggaagatatgatcctcgatcagcaaattccggctcgaggtgaattggcattgctacgtaagcaactgattgtgttacgccgttatatggcgccacaacgtgatgtattctctcgactctctatcgaaaaattaccttggatgagcgacagtgatcgcattagtttggttgaaatatcagaacgtctctcgcgtcgattagaagatttagatagtagtatttctcgtacagccgttattgctgatgaaattacttcaatgatggcagatgcgatgaacagacgaacatataccatgtcattaatggcgatgctatttttgcccacgacctttttgacaggactatttggggttaatttaggggggatccccggtaatgaatttccttatggctttgctatattttgcttttcactgtttttcttgattgtgattgttgcttggtggttaaagcgtagtaggtggttgtga

SEQ ID NO: 310170 - DNA, 690 bp, Proteus mirabilis
atggtggttttttctgaaggagcatcagccagtgcattaggaatagctacattccaaacagcattaatttcagcactgttattatcaggtttattatgtgaccgctttggtataggtgtggatgagaagaaatacttcaccccatatcgtgtattaggtgccgtattagctgttgttgctactctttttgtcgtttctccacagtggcattcaacctcttttatttacttagctattctaccttttttagcgggtttattagcgggatggcaaccagcaggtaattcaaaagtggctgaagcaacaggttcgatgatggtttctattacttggaactttattgttggatttactgttttaacgattgcgttagtagtacgtatggcgttagggcatataacactggagcttcctgctacatggtggatgtatttaggtgggcctttagggttaatgtctattgcattaatggctattttagtacgaggcttagggttactgatgttaggtgttgcatcaactgcgggccaattactgggttcggtattaattgacctattattaccttcgttaggaaatactgtttatttagtcacaatcatcggtacgttatttgccttagtcggcgccattgttactaccattcctgagtttaaagcgactaaatcagtaaaaagagcaggggcataa

SEQ ID NO: 310171 - DNA, 510 bp, Proteus mirabilis
gtgccacctgctgccgtcagacaaggggcctatattgctcgtaatacggttctaatgccttcttatgtcaatattggtgcttatgtggatgaaggaagtatggtggatacatgggcaaccgttggttcatgtgcgcaaattggtaaaaatgtccatttatccggtggcgttgggatcggtggcgtattagaacctttacaagctaacccaaccattattgaagataactgctttattggagcacgttctgaaattgttgaaggtgtgattgttgaagaaggctctgtcatttcaatgggtgtttatattggacaaagtaccaaaatttatgacagagaaactggcgaaatccattacggtcgtgttcctgctggttcagtggtggtttctggtaatttaccgtcaaaagatggtcgttacagtttgtactgtgctgtgattgtaaaaaaagtcgatgctaaaacacgtgggaaagtgggtattaatgaattgttaagaactatcgactaa

SEQ ID NO: 310172 - DNA, 558 bp, Proteus mirabilis
atgaatgaattttcgattgtctgccgtctactaggtacattatttcaacgagcaccgagtgatgctattttagcaccgatcataaccatgatagcggaagataaactaagccaattatggccattagagcaagatgaactattcaaaacgttaaaaagtagcgtagctgatttagcagcagtagaagctgactaccaatcgctttttgctgacccaatacccgcagtatctctttatgcacatgattacggtgatataaaagagcaagatattcgtcaattcttagtcactcgaggtatgcctgtcaccggatcagcgacagatagctttggtgcgttgttacttgccgcttcttggcttgaagataatgccgcacaagatgaagtattagcacaaacacagctatttgataactatctattaccttgggcgggaacctttttaggtaaggttgaagcgcatgctaaaacaaatttttatcgtactttagcagcaattacgcgtggtgcactttctgcattacgagaagaattatcagatgaagaaaacgaaaaataa

SEQ ID NO: 310173 - DNA, 267 bp, Proteus mirabilis; identical to SEQ ID NO: 305845

SEQ ID NO: 310174 - DNA, 198 bp, Proteus mirabilis
gtggttgagcaactattaggtcttgaatctcaaccattaaaagtgcttgaatggatcaatttacatatgaaccctgagttatcgaatagaatgaagcaaactattcgtgctcgaagaaagcgttattttaatgctgaacatcagcatacgcgtaaaaaatctatcgatttaacttttaaggtttggcaacgcctatga

SEQ ID NO: 310175 - DNA, 150 bp, Proteus mirabilis
atgaactgccaatcatgcaatagacagctaacagatgaagaaatttatgtgtgtgctcagtgtgctgatgaatacgctcatttggaagtgatggataaaatcaaaggagagggagatggcgaacttacgcaaagaagctcgaggccgtga

SEQ ID NO: 310176 - DNA, 138 bp, Proteus mirabilis
atgaagaaattaattatttttatactatcaagtttattcgctaaagataccagcactgttaatcagtattgtcaacataatagcaatacccaacaatctactcgctgtgtttggcccccttgtgatgatgagtggtaa

SEQ ID NO: 310177 - DNA, 516 bp, Proteus mirabilis; identical to SEQ ID NO: 297175

SEQ ID NO: 310178 - DNA, 798 bp, Proteus mirabilis; identical to SEQ ID NO: 297257

SEQ ID NO: 310179 - DNA, 1746 bp, Proteus mirabilis
atgataacaactaaccaaaagcaacgagtgaagcatcgagtgttgattgctaacagaggtgaaatcgcagttcgtattattcgtgcttgtcaggattatggtgcaacgtccattgctatttatgcagatgatgatatagatgcattacatgtgcgtcttgcagatgaagcctatggtttaaagggtaactcaccgaaagaaagttatttagcgatagataaaatcattgaaattgcccataaaagcaaagccaccatgatccaccctggttatggcttcctttctgagcgagctgatttcgctaaagcggtacagcaagcgggactcctttggattggcccagatccacagactatcgaagtattaggggataaagttcaagcgcgtaaaattgcacaatccgtaggtgcaccattggtgaatggtactgctgatccggttagtgatgctaaagaggttctggattttgcgaaacagtatggcttgcctatcgccattaaagcggcatttggtggtggtggacgaggcctaaaaattgcccatcatatggcagaaattgaagagctttaccattcagcggtaagagaagcagtaaccgcatttggtcgtggtgaatgctatgttgagcaatttcttgataagcctcgccatattgaggcacaaattattgctgataaattaggccatgtcgtggtagttggtacacgagattgttcattacagcgccgtaatcaaaaacttattgaagaggcccctgccccttatttaactgatgaacaacggcaacgtattcatcaatcagcaaaagatatttgtgctaaagcaggttatatcggtgcggggacggtagaatttttattgagtgcgaacgggacaatctctttccttgaagtgaatacacgtctacaagtagagcatccggtgactgaagaaacagccggtattgatttagtgattgaacaattgcgtattgctgagggattaccgttaagtattaatgaaacccctgagcctcgtggtcatagttttgagtttaggatcaatgcagaagatccggcaaaaggttttttacccacccccggtttaattagccaatttagtcaaccggctgggccgggcgttcgtgttgatagtggtgtggcggaaaatgaccaagtatcacgtcaatttgattcaatgatggcaaaacttattgtaacaggggcaagtcgtgaacaagccattgcgagagcgcgacgagctttagctgaatttaacatcgcaggcgtagccagtgtgttaccttttcatcgcgaaatgatggaacatcctgattttattgataacttcagtgttcacactcgttggattgaaagcgattttcaagcaaaaaacagtcattttcctcgtagtataccagcagaaaatgaaccactagtacgtacctttattgaaatagatggtcgccgtcatcaattagcgctaccagcacaattactttcactctcggccgttatacccacggctattagcgagcacaaagagtgtcaggtgcgggaaaatgcggtcactgcaccgatttcagggatattacatagttggttattatccgatggtgataaagtcaatcaaggggatgttattgccattatggaggcgatgaaaatggaagtacaggtagttgctacctgtcatggtgtattgcagcaaaaggcgaaagccggtgactatttttcagcagacagtctattagctgagattaactag

SEQ ID NO: 310180 - DNA, 1632 bp, Proteus mirabilis
atgctattacagcagccgctcgatccgttattggcaataaaagggaggcgtattttgcgctttttacctgttaatttatctcacatattagttgagttgacttcattaaaagagacattggcgttttatgaagcaattaagcaagccaatattgctgagatagaagatattgttccagcggcaaaaacactattgatccaatatgtaccttggttaattacggcgaaagagttagtggcaatattgcgcaatatcgagataaaagcgatcgcgatgcgtcaaagtcacttattaacaatccccgttcattatcaaggagaagatctgcatgaggtggctgaattattggggatcactgcaacagaggtgatccgcagacacacagaacaaacttatcaagtcgcttttacggggtttgcaccgggatttgcttatttaattgctgataaaactgagctttatgttcctcgacgtaaaacaccacgtacacgtatccccgcaggctctgtaggattagcgggagaatttagcggtgtttacccacagcagagccctggtggctggcaattaattggtactacagagataaaaatgtgggatctctcacgtgaacagcctgcatttttattacctggtgatactgtacagtttgttgatgtacaaaaagcgccagtgacggtttcattacctgagaaaaaacaatctattaatgctttgtcctttaataaggataaagggctatatgttatttccgcaggtctacaaaccttatttcaagatgaagggcgtttaggtgctgcatcaatgggggttagtgcatcaggagcacttgataaatgtgcgttacatgcagcgaatcgcttagtgggaaacccgccttcattagcagcattagaaataacacaaggtggattaatactaaaagcgcaacaagactgtgtcatagcgctgtcaggtgcagattgtacgatcagcttaaaacaaacgaccggagatatagcctttttttctacctatcaaactattgatatacgtagtggagatgaaatcacagtaggaatacctacagcgggggttcgtagttatctggcagtgagagggggttttgaattaagcccagtgttaggtagttatgcgtttgatactttagctcagattggccctcgagccttacaaaatggcgatattcttcatctaaacgatgataacgcatcaacgggcattattagccaagagcaaccgagtttcagtttaccaaagcaagaggatatcgttacccttgatattgtgttagggcctcgtacggattggtttacagaagatgcgataaaaacattaacctcacaattatggcaagtgacaccacaatctaaccgtatcggattacgtctattgggggataaatcgcttgaacgtcagcaacaacaagagttatcgagtgaaggaacttgcattggcgccatacaagtaccgattaatggtcaaccggtattatttcttcatgatcaccctctcactggaggataccccgtaattggggcagttgccgaataccatctgtcattggcggggcaaatccctattaacgctaaaattcgttttaacccaattactttatttcaagaatattga

SEQ ID NO: 310181 - DNA, 1047 bp, Proteus mirabilis
atggttgagttttctatctactcaacaattatctcattaattattttattaattgttttgtactttgtgcttcattggatcaataaaacctttgtttctaatcttaatacattgtctgagatattaaataaagtaggtaatgctgacttggttttttctgtaccacaagtaaaaaatgatgagtttggtaaacttttttctcgtgtcagtgatatgcaaaaagcattaacctcgacaatcttttctgtcaaaaaagaggctatggatataaaagggggcgcatttaaaattgcttctggtaatcaagagctttcatctcgtacagaagaacaatccagtgcgttacaacaaaccgctgccagtatggagcagatcaaaatagccgttgctaacaataccgataatacaattgaagcaaataatattattaatcaatctactgacattgttatggatggcgctaatgtcatgaaagaagctgtattatcgatgaagaaaatagaacaaggtgcagtgaaagttggggaaattaatgatgttattaataaattagccaatcaaactaatattttggccttaaatgctgccgtagaagcagcaagagctggcgagcaagggcgtgggttcaccgttgtggccgctgaggtacggaacttagccgcaaaaagtgctgaagcagcaaaagagattagccaagttcttaaagcatctatcaatgatgttacctatggtacaaatttagttaataaaagcggtgagtgcatgcaagagattgtctcttccatttcaaaagtaaacaagatcatgcaagggattagtttagcgtcggaagagcaacgtcttggtgtcgaacaaattgcagtagcaattaatcaaatggatacggtagtacaacaaaatgcctctttggtcgatcttgccgcctcttctaccatgatgttaaacgataaagcacaagtgctgatggataatgtcgcagtctttaatattgacgatcttgaaaaagagccagagcagaaacaagagttaatcaatgaacaagaataa

SEQ ID NO: 310182 - DNA, 303 bp, Proteus mirabilis
gtgaaaattaaatttaatgggcagccagagccagagatgggggctgaacaacaaaagtaccttacactttcttctggcgttaataaaagtaagttagccattggattaattgatatagatggaaaccaacgtattactttaggtgaaaaccataacggtggaaatggaactcaacttaacgatggcacgatgttgctaacctttaatgcatttgttgaagcgacaccaaaagcaatacaggaaaaaagtgttgtacctggagtttataatgccacggtagaatttgaggtttcttatgaataa

SEQ ID NO: 310183 - DNA, 441 bp, Proteus mirabilis; identical to SEQ ID NO: 304318

SEQ ID NO: 310184 - DNA, 261 bp, Proteus mirabilis; identical to SEQ ID NO: 296448

SEQ ID NO: 310185 - DNA, 1683 bp, Proteus mirabilis; identical to SEQ ID NO: 299118

SEQ ID NO: 310186 - DNA, 225 bp, Proteus mirabilis
atggatgcacaactgtataaagagtttaaaattatagaaaaagcgttttggtcagagatatgtgaaaacaatattcgtattggtgatcatacccactgctttatgacaccgatggacgcgcctatttttaattttatctaccttcgccaaggcgctagcgaaaatactttccaacaagcaagtacgcggtcacatgctggttctgccggaatctctgttgcctga

SEQ ID NO: 310187 - DNA, 408 bp, Proteus mirabilis
gtgcctcaccctgttccaagcaatagtgtaaaatcctttccagctgaggtaaaaaaagaattaccaggattatttatttcagaagatgaaatggaaataaaattcaagaatgatataaaatactttaatgcatttgaatccattaatttgttagataaagaagtaataaaaaacagccaagaagagataataggttatcgctatagtccaacagctgaaggtaaaaaatatttagagaatgataaaagtcgttatttttgtgctggtaattatgaggttacaagcattgttaaaataaatccgccgattgaagaagcgtttaagaaggttgaagttacttatacctataaagctataaatatttcaatattaatacttcgaggtaatgtgtggacagtcattaattaa

SEQ ID NO: 310188 - DNA, 270 bp, Proteus mirabilis; identical to SEQ ID NO: 297227

SEQ ID NO: 310189 - DNA, 462 bp, Proteus mirabilis
atgaaatacggaaaactctatgccgtcattgcgatggtaggcattatcgtgggtagttattgggtgattaactggcaagctaataggattaattcactgacagatatcaacaaaaaactggccgtggctctcgaagaacagaagtctattaatactgactatcaagcacgcataatgcgattaaatcagttggatattcaatatacgcaggagctagcgaatgctaagaatgaaattagtcacttgcgtgatattagtgagcgtcatccagagcgggtgtacatcaaagccgagtgccccaaagtcaaaaccactccctccaccagcttggcttatgcaaccaccgcccgacctactgacaccgctatccgaaattattggttactcagagagcgaattgcagagtcagaacagatgattaaagggttgcaggattatatcaaacaagaatgcatggaataa

SEQ ID NO: 310190 - DNA, 579 bp, Proteus mirabilis; identical to SEQ ID NO: 297499

SEQ ID NO: 310191 - DNA, 240 bp, Proteus mirabilis; identical to SEQ ID NO: 301282

SEQ ID NO: 310192 - DNA, 468 bp, Proteus mirabilis
atgattatatttatcaccggtgcttctgcaggttttggagaagctattgctcgtcactttattaaccatggacacaaagttattggtaccgcgagacgtcttgataaactgcaagctcttcatcaagaactgggcgatctattctatcctttacaattagatgtcaccgataaaaaagcagtcagtgaaatttatcatcaattgccagaacaatggcgctcaattgatgtattagtcaataatgcaggactcgctttagggttaagtaccgctgataaagccaatcttgatgattgggatactatgatcgaaactaataataaaggtttagtgcatgtcactcgtgcattactaccctcaatggttgaacgcaatgtcgggcatattattaatatcagctcaacagcggcttcttggccttatatgggtatggtgcaaccaaagcctttgttaagcaatttagcctag

SEQ ID NO: 310193 - DNA, 123 bp, Proteus mirabilis
atgtatttatcaaggatctcaatagactattctgctgattatttacactcactattagcgaataagttgccggacggatatacaattcatcagttattatggcggttgtttattttaaaatag

SEQ ID NO: 310194 - DNA, 519 bp, Proteus mirabilis; identical to SEQ ID NO: 296778

SEQ ID NO: 310195 - DNA, 2172 bp, Proteus mirabilis; identical to SEQ ID NO: 296779

SEQ ID NO: 310196 - DNA, 624 bp, Proteus mirabilis; identical to SEQ ID NO: 295906

SEQ ID NO: 310197 - DNA, 258 bp, Proteus mirabilis
atgaatatagcaagtcttcttgaacaaattgcagataaaggttggtgtgtatgggatgatttccttacaccagaggcggttaaacaattgcgtgcttgttttggtaatgatgcacaacaagcacgtataggacgtcatgaaaacctattagcagaaaccacgagtttgaatatgaagctcatttcgcttgttatgaaaaaggtgctttctataaaaaacatcttgatgcatttaaagaaaatgtcacaagacgtttaa

SEQ ID NO: 310198 - DNA, 1470 bp, Proteus mirabilis; identical to SEQ ID NO: 299209

SEQ ID NO: 310199 - DNA, 2226 bp, Proteus mirabilis
atgaaaacgacgggagttaaagtaacgcttttgtcgctggttgtcagttattcctgcgctttacaggccaaaaacgtgtcactgggggacacggccgtggccacggggcagcacagtacggctgtcggtgagggcagtatggcgctggggaacaatatgacggcggaacaggcgcaggcggcgatgaaagcccagaatgccctgttgcagaacagggcgcaggcgcatgagcagtacatgcagacgcaggccctgtttgacagtaaatcgctggcgaacagcaatattctggagcgtcaggaagcgatgaaaccgttgttgcagcaacaggagaccctggcgggtcagcgtaccgcgcaacagcagcaggtgacacaggcacagcaggtcgctgaccggatggcacagatttatgaacgcaatctgggggcggtttcacagattgtggatgagaattttgtggcgttgtggcagcaggggcaggctgaccgtctggctcaggaagtgaaaaaacgggttgagcaggatacgtcggtcagtaatgacacgcagttttatgtcagttatgttaatgcctatattgaagcgaaaaccagaagtgctctggttaatgaaaccatcaaagagaaaaccggttctcagattacgaccaactatcagggtgtggccctgtccccggtactgagtgccggccacagtgataaagcgatgctgtggtcggatgcggtcacggacagcgagcagaagaaacaattatcccgtttacacctgaataccgcggccctgaagggcgttgccggttatcaggaagagctggccaaaatcgccctgatcacctctgcggacgggaaaaagaatctgtatcaggcttatcagaaaaatgcccggcagcaaattgagcaggggctcaccggggtgacagaggccgggaagcagatcctgtcagagctgtatctggataacatcgatgaaggcacctttaatcagatggtcagcggtattttcacccgctatgagaatcagctgaactacctgatccagctggataaggtcaacagtttatcgccggacagcccggattatgccaaagagttacagcaactgctggtactggaaagccgtccccgggataacaccgtcgggctgaataccaacccggaggcgctgaaacaaaaagtggatcagtaccttcaggacaatgcgctcagtcacacacaggccatgtcgtcacaggccacacagctgaaacagcagttatcggcggaaaaagccgtcaccgatcaggcactgaagcaggcagaaacgcaactctcccggctggaaaaggatctctccgcactggatacaaagttgtctgatttgcgtccgacgcaatccgagctggaaaacatccgggatctggagaaggtgaaagccgaactggcgcagaaacaggcggaatatcaggcggcggataaagccctgaatgaggcgcagagtacgctgagtcagggtaaacaggctgttgcggtcggggataagagtctggcgctgggcgaaaaatccgtggcactgggtgtggatgcccgggcgctggcgaaaaacagtgtggcactgggggacggcagcctggctgaccgggataacagcgtgtccgtcggccgtgaaggtcaggaacgttttctgacgcatgtggcggccagcattgcaaaaacggatgcggtcaacaaagggcaactggatgaggagcgggatgcgcgtattgccggcgataagcagacgctgaaacaggccatggactacaccgatgtgagcattcagtacagtgaggcgaagacaaacaagcggattacggaagaacagcaggcccgtattgagggggaggaacagaccctggcggccgcaaaccgctataccgatgagacgttcgggcaggtgacccacacggtgctggacaatgcccggcagtataccgaccagcgtttcagtcagctggacaataaaatcagtcaggtggagaaacgggccaatgcggggattgccggggtgaccgcaatatcttccattccgtatgtgaacagtgagcgtttttcgttcgggatggcgatggggcattaccgtgatgcacaggcgatagccaccggggtgcagtataagccgacggccaataccaatgtgcgcctgaatgcgtcatggaataacggcggcgataccagtatcggcgccgggtttgcggtgggctggtaa

SEQ ID NO: 310200 - DNA, 441 bp, Proteus mirabilis; identical to SEQ ID NO: 103771

SEQ ID NO: 310201 - DNA, 975 bp, Proteus mirabilis; identical to SEQ ID NO: 306073

SEQ ID NO: 310202 - DNA, 462 bp, Proteus mirabilis; identical to SEQ ID NO: 298454

SEQ ID NO: 310203 - DNA, 291 bp, Proteus mirabilis; identical to SEQ ID NO: 297184

SEQ ID NO: 310204 - DNA, 1062 bp, Proteus mirabilis
  misc_feature (1016)..(1025): n is a, c, g, or t
atgaaattaagcagtaacaatgctgaaactatggagagccttcgcagtgagcggaatcaatatcgtatacttgtcgatattacaaattctgtattagcgcatctagacatggatggcctcatttctgaagtatctaaagaaatacatcgttttttcggacttaatcatattagtctgatgttatgtcgtacttcatcacaaaatagtcatgaaggtattctttattctagtcgttatcagacaggaaaatctgtcattcgtcaacaacgtaagttcagtagcgccaataacaaagccgaagaaattattcatcaaaacaaacccgttttaatcgatatcaataaagaagatcaagacgatgttttgattaaacgtctcgtaaaacaaaatatgcagacggctttgttattgccactggcttttaaccgtaaaccgctaggtttattaatcctagcgcatgaaataagtagtgtttttactgaagaaacttgtcaattattgcaacaaattgccgcgcgcatcgggattgcaattgaaaatgccgccgcttatgaagagataactcaccttaaagatagccttaagaacgaaaatatttggcttaatgaacaaataaatagaaatggtagttttagcgagattatttatcaaagcgatgccatgcataatgtactagaacaaattgagttagtcgctcaaagtgacagtactgtacttatcttaggcgaaacaggtactggtaaagagttaattgcacgagcgatccatcgtttaagtcatcgtaaaaataagacgatgataaaaatgaattgtgcagcagtaccttccggtctgttagaaagtgacctttttggacatgataaaggcgcttttacgggtgcaacacatgcccatgtgggtcgatttgaaatggcagataaaagtacgctttttctcgatgaaattggcgatatgcccattgaattacagccaaaactattacgggttctccaagagcgtgaaatcgaaagattagnnnnnnnnnnggtggtaataaagttattcctgtggatgtacgcttaa

SEQ ID NO: 310205 - DNA, 579 bp, Proteus mirabilis
gtggatgtacgcttaattgcagcgaccaataaagatttatgtgaactgacggatgaaggggaatttcgagaagatctctattatcgtctgaatgtttttcctattattatcccgccattacgggagcgacctgaagatatccccttattggcaaaatattttacgcaaaaaattgcccgccgcatggatagaaaaatagactgtattccaacacatgctttggagcaattaacccattatccttggccgggaaatgtacgagagcttgaaaatattattgagcgcgcggttattttaactcgaggctctacgctaaatttgcaactaaaagagttaaatatcaataaaccatctcgtttaaaacaagtgctttcgcaaccatcagccatagaaaaaaagatgcaaactagcgcacctgaaagtgatgatgaagagcgtgagcggataatacaagcccttagagaaactaacggtgtagtggctggtgccagaggtgcggcattaaaattaggattaaaaagaaccaccttattatcacgtatgcaacgcttaggtatttccattcctgaaattctttag

SEQ ID NO: 310206 - DNA, 162 bp, Proteus mirabilis
atgcgctttggtatcgatatgaataccgaccatacattggaagaagtgggtaaacaatttgatgttacccgtgaacgtatccgtcagattgaagcaaaagcgttgcgtaaattacgccacccaagccgttctgaagtgctacgtagcttccttgatgaataa

SEQ ID NO: 310207 - DNA, 405 bp, Proteus mirabilis; identical to SEQ ID NO: 297821

SEQ ID NO: 310208 - DNA, 1311 bp, Proteus mirabilis
atgaaaaattggaaaacgctggttatcggcttaatgatcacggttggtgcagccaccagcacaaccacttttgcagcacaagaactcaaccgcgtatcggctatcgtcaataacggtgtcgttctggaaagcgacgtcaatagaatgttacaaacggtgcaaatgaatgccaaaaatgccgggcaagaaatgcctgatgagcaagttttgcgccaacaaatcttagagcgcttggtgatggataacatcatcttgcaaatggctcaacagatgcaaattgatattcctgaagctgccgttgagtcaaccattcaagggattgccgcagaaaataacctgacactagagcagttaaaaaaacgtcttgctgccgatggcattgcttataacgattatcgtcaagatattcgtaaagagatgatgttagcagaagtgcgtaataacgaagttcgtcgtcgtattacgattttgccacaagaagtggactcattagctaaacaaattgaaagccaagcaagccaaagtattgatcttaatcttagccatatcttaattccattatcagaaaatccatcacctgcagaaattgaaaaagcacagcaagtggtgaaccgtattaagaaccagctaaaaaacggtgctgatttcggaaaattagctgccacttattctgccgatccacaagcacttaatggtggtaatatgggatgggcatcaattgatgagttaccgacaatctttgctaaacagcttgctaatgcacaaaaaggtgaaattgtcgggccactgcaatcaggtgttggtctacatattattaaagtcaatgatatacgtggtgcttcaaaaaccgtttctgtgactgaagtaaaagcacgccatatcttactaaaaagctcgcctatcatgaatgatgagcaggcttatgccaaactacagaaaatttccgccgatattcgtagcggtaaaatcagttttgcggatgcggctaaagagtattctgaagatcccggttcagcattacgtggcggtgagttaggatggtcaatgcctgatatttatgatccagctttccgtgacgcgttgatgcgtttaaacaaaaatgaattaagccaacctgtgcgctctaattttggctggcacttaattgaacttgaagatacgcgtagcgttgataaaacagatgcagcgaataaagaacaagcttaccgcttactgtttaaccgcaagtttaatgaagaagtgcaaaactggatgcaagagttgcgtgcaggcgcttatgtgaaaataatgaacgagaataatgcaaactaa

SEQ ID NO: 310209 - DNA, 228 bp, Proteus mirabilis; identical to SEQ ID NO: 300768

SEQ ID NO: 310210 - DNA, 519 bp, Proteus mirabilis
atgtccgcaaaattaacccgcaaaaaacttgcatttatcggggtaattattgcccttattgccgtctattttctctttattcaaaaacccaaagtggaatatctccccggtaatttacatggttttaatcatgtgaagggaacttcggttaattggtttaaagttaatggtaattatggcagaggggctatgggaacttgttgcattatggtgccaagaaaatggacaccgaatcaaaccgtattagtggaatgggaagtcgaccctagtgcctatcccacagattcgcccagtgtaaccgatcctaaatttgatgcctatatggaaaaacacaaagccaattatcgccattacagtaaagttgttgaaattccccaatatgacgaaccttgtagcgtaaaggtccactttctgccttgccaagaagtgaaaattactctttcttgttatgcaaccaatcaccctgattaccctattaaagagccaagttttatggaggagcctgcaatatgtccataa

SEQ ID NO: 310211 - DNA, 417 bp, Proteus mirabilis
atgaaaaatgaaactaatattcgccgtgtcagacattgtgtattcctgatgcacgtccatttggtctttgtcacaaaatacaggcgaaaaatatttgatcaggatgccattgaaaaattgcgaggctactttgccagtgtttgtgctgattttgatgttgaactggttgaaatggatggggaacgggatcacgttcatttactgattaattacccgccaaaactggcgatatctaatctggttaacagccttaaaggggtatcgagtcgattacttcgacgtgatcgtcctgatattgcccaacgtgattactacaagggggttctttggtcgccaagttatttcgcggggagttgtggtggcgcaccaatatccattatccgccagtacattgagcaacaggaaacaccgagttag

SEQ ID NO: 310212 - DNA, 1764 bp, Proteus mirabilis; identical to SEQ ID NO: 295603

SEQ ID NO: 310213 - DNA, 366 bp, Proteus mirabilis
ttgagagattatattgaacaatcaagaaaagattcaattttagttgcaaatcagtataccaatgagaagattaagaatatttttattgataacaaagccgcgcttaaaaatatggataataagatagataaagctgacaaaagagcaagtgcgggtgttgcttctgttgcagcgatggcaaatattccttatgtcactgatcgcacctttagtttaggtgttggtgttgggaattatcgtaacgccaatgcactggcaacgggagcacaatatcaaattatcgacaatgccgttattcgtgtatcagcatcatggaatacggaagatagagctgtagttggtggagggatctcttatggttggtaa

SEQ ID NO: 310214 - DNA, 456 bp, Proteus mirabilis
atgccggctaaaatatcgtatatttcattatgtttaagtgttttattttattatctcgaaatggtacatgagttttttttcaggctgtatccaagagcaataaatacagtacctttttttcaacatcaaaccttattgagtatcgtttttgctatttatcttttatctatagctccattgttctttttttgtattaaaaataagatgaacaatcgttatcgattattattttatatagttctaccgtacatactctctgtaattacatggtacattaatatttatattgatattccgactcattacttcaaaaatggttcaatcacaggagtacttagtcatatgtttatgacatcttatataatacatggggtatttttgatccctattgttgcatatatagctgattttttacttcgtaaaatgttgagtaacttgtttgttattaattcataa

SEQ ID NO: 310215 - DNA, 807 bp, Proteus mirabilis
gtgaatgtgccttttagcgtatttgataatactttttattataattttaatgcgaatagtaacaataatagttcaagtacaggaagtgtaggtatatcggcatctcagttaaataatcgactaaattggagtgtgcaacaagcatttaccaatcaagatcaaggatcttctggaaatatcaatgcatcctacaaaggccaactaggtgatattacgggggggtacagttatagcaaagataatcataatctttactatggtgtgagcggtagcgtcgttgctcattctcagggagttgtttttggacagcaactgggagaaaccgcggcaatcgtagatattcctaatgcgggtgatattacgatattaaatcaagcgggagttaggactaataactcagggtatgcattagttccttatgtcacaccatatcgtaaaaatactgtcgagatcgatacattaagattgccagagaatgctgaaatggaacttaccagtcagacggttttaccgagtcgaggggctttagtaaaagcgaatttttcagcaaatgtaggctatcgtgtattaatgacgataaatttggaaaacaaaaagccagtaccatttggcgctcaagctatttttaaagacaatagtcagttaaatagtattgtaggtaatgatggagaagtttatttatcagggctaaaacagaaaggaaactttactattaaatataacaatgaaagctgtcaggtaaattatgatctatctgatattccagattatttagggctctataaaactactgtaacttgctattaa

SEQ ID NO: 310216 - DNA, 936 bp, Proteus mirabilis
atgcaattatcaacagatgatgagatgtatccagaaagtttaagaggctatgcgcctatcattagagggattgcaaaaagtaactcgcaaataaccatcaaacaaaatggatatactatttatcaaactgaagtggcagctggcccttttgaaattaatgatttatatccatcaggtagtagtggggatttatacgttacgattaagggtgctaatggtagtgagcaacatcaaatcgtacctttcgcctctttacctgtattacagcgtgaaggtcatttcacttatagcgtaacgggcggtgaatatcgtgcttatgataataatgtagataaaacgaagtttggtcagtttacattagtttatggtttaccttatggcactactgcttatgggggaagtcagttgagtcaaaattatcaatcttactccctaggtgttgggaaaaatttaggctcatttggtgctgtttctgttgatgttacacaggctaagtcaacttttaatgatggaaggaagcaacaaggtcagtcttatcggtttagatataataagaatttgaacaatataggaaccaatattgctttagcaggttatcgctattcaacgagtggcttttatagtttatctgaagtgtttgatagttttcgtcgtactcattatagccctgaaattgagcaacgccgtcatcgtgcggagataacacttaatcaaaatttaggtgataaatatggctctttagctatcggatatatacaagaggattattggaacagcaaaagcaaaaaacaatcagcaacacttggttataataatagctggcaaggtatcagctatggaataaattatacctacaataaaaatacagttaatcattcttatattgctgatcagaaaagacaaaatgatgatgaacatttgttggcttttcggtga

SEQ ID NO: 310217 - DNA, 198 bp, Proteus mirabilis
atgtgtgagattgcagcttataaagaggctaaacaaattattgtaacagatagccccataagcccattagcaagtctaagtgatgtttgtttaactgtaaaagaagcacaaataaaaatgtttcgttctcaaacctcaacattatgtttactacaagcactttcagttgcattcgcttttagaaaaaagagccattaa

SEQ ID NO: 310218 - DNA, 792 bp, Proteus mirabilis
gtgtcgggacttttgtgggaacgacataaatcatatcttgataaatttttagaattagctaaaaaagaagggtataatatccattttcaaggaacgattaatgctaaagattatggtgttcctcaaaaccgaaaacgagtatttattttaggtataagagctgatttaaatattgaaatgatggagttccctccaaaacagactcatttttcaccatcttctggtaaatacccaacttggcgaccagcttcatccgtttttgaaaaaatccctaaagatttgtatgaaagatattggaatgattatttttcacgaaaaacatcattaacaaaagttgaaactttttcacttttatctagtttagaatcaggttcatcaattcttagtgatgatacatcaaatatacatatgaatccgagtgaaatgatgaaaaataggttcatgaaaataggactaaatggaagtagagaagatcttggtgtggatgggcaactaaaatgccattcagatggttataaaggacataaagatgtatatgggcgaatatttatacatcagccaagtaatactataaccgcgggatgtaataatccatctaaagggcgttttgtacacccatggaataatcatggaattacattacgccatgctgccagattgcaatcatttaatgatgattttatattttgtgggaatgcatcagaacaagcaagacaaatcggtaatgcggttccaccaactcttggtgagatattaattcgaaaagtttgtgaagaacttaaactatattaa

SEQ ID NO: 310219 - DNA, 123 bp, Proteus mirabilis
atgaatatccttgacgttgctatttttaaactatcttataagcaattaaataacctatgtacactcaataaaagtatcatcctaactatctttctcagtaatttatctaaaccttttaaataa

SEQ ID NO: 310220 - DNA, 939 bp, Proteus mirabilis
atgagtgaacagcaagatttgttaaaaacgatgatgaaaaaatatagagacattttggaggaaaaacaacaacaaaaaaacaacaaaaagataaaacaaaaaaaacaagatgatatcaatcatcattatataccgcagtgttatctaggaaatttttctgatgaaaattccaacatacatgttttaaataaagaatatggaaatatcaaaggatttaagtcatctcaaataatgtatggcaaggtgttatatgatgtttattatatgaatgagcattttcaaggccttgaaaaatatttcaaattttttgaagacagaatgccttatattttaaattcagtcaaaaatatggcaatggagaaaaatggggtgaatagagatgataaaaaaaaattagcattttttgcagcgatacaatattgcaggaatccacatgctgaaattcctagtatgattgagatctgtaaaaatttagtaaattatcataaaaatctgaaaaaattcccttttaaattattattgcctgacattcggaaaaagcatctaaaaatgatatcagatgcgattaaattatcggttaaaatgtatggggaagaagaaactatgcctcttgtttggatggctaggatatattttttcccttatatattatttaattatgaaaattcaaataatataactgtaatttttaatgcaaatgaaaaagtgagtccattgataactaacgacaacccagtaatggttaaatcatttgatttatttagaggctttagatggttttactatccactgtttaataatttggcaataattcaagggattgaagggcgtacagtggaaggattaaacaagatggcatatgaaaatggggttaaaagagtaatttctggggataggagttatataagtaaaataaagaacaggtattttaaaaaatag

SEQ ID NO: 310221 - DNA, 669 bp, Proteus mirabilis
atgatgatctctttgaaagttatttctctgttattggattatcccagcgaagatctctgggaacatcgtaatgagatcattgatgcattgcaggaagctgacgagcttcctgtcacgcaagtcgcaaaattaatggcgtttattcgtgaactcacgcaacaagatctgctggatgcacaagcgaattacagtgagatttttgatcgaggtagagcgagatcgctattgttatttgaacatgtacatggtgaatcgcgtgatcgtggtcaggcaatggttgatctgcttaatcagtatcaacaagcagggatcaccttaagtagtcgtgaattgcctgattacttacctacttaccttgagtatttaacgctattgcctaccgatgaaagtattgaagggcttaataatattgcccctattttggcattgctgagtgagcgtttaaaacagcgaggcagtgattatcacgctctttttgatgtattgctttgtctctcacaaagtgagttagacgcttcacaactggcggctcaagtagaaaaagagcctgtagatgatacgccggctgcattagatgccgtatgggaagaagagcaagtgacgtttctaggtgaaagtgcgcaatgtggtagtaacaatattagccagcatcagcgacgttttgcgtaa

SEQ ID NO: 310222 - DNA, 1554 bp, Proteus mirabilis
atgaaaattcgttcacaagtcggtatggtactgaacctcgacaaatgtatcggttgccatacctgttcagtaacctgtaaaaatgtttggaccagtcgtgaaggtgtggaatacgcttggtttaataatgttgaaactaaaccgggtacagggtatccccaaaattgggaagatcaagagaagtggaaaggcggctggatcaaaaatattaaaggtaagttagtaccaagaatgggtaaccgtgttgggctattatcaaagatttttgccaacccagatgtcccagcattagatgattattatgagccatttgattatgactatgagcatttaaaaaatgccccagaaggctcattacccaccgcacgtcctcgttcgttgataaccggtcagcgtatgaccaagatcgaaaaaggcccaaactgggaagatgatttagggggcgaatttagcaaacgtgctgcggataaaaacttcgccgatatgcaaaaagagatgtatgggcagtttgaaaatacatttatgatgtatttacctcgtttatgtgaacactgcttaaatcctgcttgtgtcgcgacctgtccaagtggtgcgatttataaacgtgctgaggatggtattgtgcttatcgatcaagataagtgtcgtggttggcgcatgtgtttaacagggtgtccatacaaaaaaatctactttaactggaaaagcggtaagtcagaaaaatgtattttctgttatccgcgcatcgaatcaggtcaaccaaccctatgctcagaaacctgtgttggacgtattcgttatcttggtgtgatgctgtatgacgcagataaaatttcacaagccgccagtgctgataatgaaaaagacttataccaaagtcaattagatatctttttagatcccttcgatcctgaagttattaaagctgcagaagagcaaggtattccattaagtgtgattgatgcagcccaacgttcgccggtttataaaatggcggtggattggaagctggcattaccattacaccctgaatatcgtactttacctatggtgtggtatgtgccacctctgtcacctattcaatctgcggctgatgcaggagtgttgccacatacgggggtattaccggatgtagaaagtttacgtattcctgtccaatatttggctaacttgctgaccgcaggcgatacagcgccagtgttattagcattaaaaagaatgttggcaatgcgccattataaacgcgcagaaacggtagaaggtaaaaccgatttgacagcattagagcaagtgggattaaccgaagcacaggcacaagagatgtatcgctatttggcgattgccaattatgaagatcgctttgttattccttctagccatcgtgagttagcaagagaagcttttcctgagcgtaacggctgtggttttagttttggtgatggttgtcatggcagcgagagtaaatttaatctgtttaatagccatcgtattgatgccatcgatatcacttccaaaacccctcaagatgagcgccgttctgaggagaaaatatga

SEQ ID NO: 310223 - DNA, 903 bp, Proteus mirabilis; identical to SEQ ID NO: 307754

SEQ ID NO: 310224 - DNA, 441 bp, Proteus mirabilis; identical to SEQ ID NO: 296325

SEQ ID NO: 310225 - DNA, 231 bp, Proteus mirabilis
atgaacattaaagtcggcgatgagtttttggtttatatggcattgggtgaagagagctatatgaaggaatattatcgtgtgttggagttagatagcgcattatcacaagtgaccggtaaattgctaagaaggacgacggcagatgataaaaatattgggttagggcgttgtgaattagaaggtgggattgaacaatttgcgttagaagatatttatccaatagagaagtga

SEQ ID NO: 310226 - DNA, 549 bp, Proteus mirabilis; identical to SEQ ID NO: 299166

SEQ ID NO: 310227 - DNA, 309 bp, Proteus mirabilis
atgaatcttgaacccgttgggtgggctaaaaaaaattgggataatttatatatctcacctgataaatatatagaaaatctgaatcttgctatcaacatggctgatattagtcaattacctatagctttatttaattatcctttatgtcatttacctaatagtttatggaaatatactattcaatctatttctgattggaagaattattatccgaatgaatgtgaccaatgtaaaatgaagagtcattgtggtggatattttagttcttcatatggaaaatatcatcaaacagcgagggcgatattatga

SEQ ID NO: 310228 - DNA, 135 bp, Proteus mirabilis
atggaaaataaaaaatttattcgctcggagataaaaagagaaaaagcaactatcactatagagatattaataacgaagaaaatcaacatagccttatttatcgttggccattactcaacacatttaattcaataa

SEQ ID NO: 310229 - DNA, 159 bp, Proteus mirabilis
atgaatatcacgtttaagaaaattggaacaatgtgtgtcgcttctgttctgcttttttcagccataggtggtgcaattttaacagatggtagtccattaggaaccattggcggcggtgtattaggtggtgttattggccatcaagttggcaaaaaataa

SEQ ID NO: 310230 - DNA, 573 bp, Proteus mirabilis
  misc_feature (554)..(563): n is a, c, g, or t
atggcattacaatctttaatgctaggtttagggggatggcttgctattgataatactatcagtcctggaatgatgattgccggttcaatacttttaggtcgagcattagcccctattgagcaagtgatcaatgtatggaaaagttgggatagtagtaaagcagcctacaatcgattgacaactttattaaaaacataccctcaagaaaataaaaaaatggccttacctaagcctcaaggccaattacttgttaatatcgatgaagccgtgtatccacacagtgacagaatattactaaataatatcaattttgctctattaccgggagatatactaggtattattggtccgagtgcttctggtaagtcttctttagcaaaatttattgtcggtatatggcaggtcaaaaaaggcattgtgcgattagataatgcggatatctttcagtggagtaaagaagaaattggtccacatattggttatttacctcaagaaatcgcccttttccccggcactatcgctgaaaatattgcacgctttactgaggttgatcnnnnnnnnnncaaaaagtga

SEQ ID NO: 310231 - DNA, 300 bp, Proteus mirabilis; identical to SEQ ID NO: 309887

SEQ ID NO: 310232 - DNA, 441 bp, Proteus mirabilis; identical to SEQ ID NO: 304318

SEQ ID NO: 310233 - DNA, 564 bp, Proteus mirabilis; identical to SEQ ID NO: 297513

SEQ ID NO: 310234 - DNA, 123 bp, Proteus mirabilis
atgctaaaatctaaaactatatgttttaatttatatatctttttaggtacatgcttttctggtgtggtgtatgcggatagtttttttaatcctaacttaatttcattcagcgataaaaaataa

SEQ ID NO: 310235 - DNA, 390 bp, Proteus mirabilis
atgtctaaatcggcaaaaggtacgacagaacggcctggacggaacgtaaaagctaaatctggtttaaaccgcgcaatactggagcagggctggtatgaaatgcgccgtcagcttgagtacaagcagctctggcgaggtggtcaggtagtggcaataccccctgcctacaccagtcagaagtgcgcttgctgtggtcatacagcaaaggaaaaccgacagtcacaaagtcaattcgagtgccttgaatgtggatatacagcgaatgctgatatcaacggggcacgtaacattttagcggcaggacatgccgtgcttgcctgtggagggagggtgcagtcagaccgcccgtcgaagcaggaacccgccgagttgattcagacatcagtctga

SEQ ID NO: 310236 - DNA, 639 bp, Proteus mirabilis; identical to SEQ ID NO: 296489

SEQ ID NO: 310237 - DNA, 1092 bp, Proteus mirabilis
atggcacaagtcattaataccaactatctatccctggtaactcaaaacaacctgaacaaatctcagggaactttaggaagtgcaatcgagcgtctgtcttctggtctacgtatcaacagtgcaaaagacgatgcagcgggtcaagcaattgctaaccgtttcacttcaaacgtaaatggtttaactcaagcttcacgtaatgcgaacgatggtatctctatcgctcaaacaactgaaggtgcattaaacgaaatcaacaataacttacaacgtatccgtgagttaactgttcaagcgaaaaacggtactaactctaattcagatatcacttctatccaaaacgaagtgaaagaacgtttagacgaaatcaaccgtatttctgaacaaactcagtttaacggcgtgaaagtactgagcggtgagaaatcagaaatggttatccaagttggtactaacgataatgaaactatcaaatttaacttagataaagttgataacgatacattaggtgttgctagcgataaactgtttgatgctaaaacagagaaaaaaggtgttacagaagcaggtgctgcaatcgatgcgaaagatatcggcgttgctggtgcaacttcatacgattcaggtacagtaaaagaatataaagtagatggtgttgtttctgctgataaagtaattttcaatgatggtgctaaagattacctcgtaaataaaagcgatttcgcactggaaggtgctgacaaagctaaatttactggtgctaaaacaactgaatttacagcagatgcaggtaaagacgttaaaactttaaacgttaaagatgacgctttagcaactttagacaaagctatcaacaccattgatgaaagccgttctaaattaggtgcgattcaaaaccgttttgaatctactatcaacaacctgaacaacactgttaacaacttatctgcttcacgtagccgtatcttagatgctgactatgcaacagaagtttctaacatgagccgtggtcaaatcttgcaacaagcgggtacttcagtacttgctcaagcaaaccaagtaccacaaactgttctgtctctgttacgttaa

SEQ ID NO: 310238 - DNA, 168 bp, Proteus mirabilis; identical to SEQ ID NO: 298470

SEQ ID NO: 310239 - DNA, 633 bp, Proteus mirabilis
atgtcacacaaaactgcagaccaagagtggctggtagaacaactaaaatatattgcacagggcattggtaaaacattatcgcctttttgtgaagttgtacttcatgatctgaccgatagtgaaaataccattatggtgattgaaaataatctatcaggtcgaaaagtgggggatagagcgactgagctaggtatggcaaggattgaatcgtctgattttccacaaattgttgcaaactatcctaatcagtttcctgatggtagaacagctaaaagtacatcgataggtattaaagataaacaaggcaattatgttgctgctttatgtttaaatattgatatatcgatgattaaaggtttacaaatggtattaaatcaattttcgactctcgaagagggaaatcatatcattgaaacttttagctcagtaacagaagattcgttgaaaaaacgtattgatgaattttctgcaacttattcagtgacaccaagagcattgaaaccacatcaacgacgcgaattgctattgtgtttacaggatgaaggttatctttcacttcgcaaagcaatggaaattactgcgcaatacctcggtgtttcaagagcaacagtgtataacgatttaaaagaatga

SEQ ID NO: 310240 - DNA, 480 bp, Proteus mirabilis; identical to SEQ ID NO: 309516

SEQ ID NO: 310241 - DNA, 1023 bp, Proteus mirabilis
atgcaattatacaataatgatgcattagctatattaaaaacattacctgacaattatattgatttaatcgccacggatccaccgtatttcagagtgaaatcgtgtgcatgggataaccagtgggataatgttgaggcatatctgtcttggtttgatgaggtactagttgaattctggcgagtattaaaacccaatggtagtttatatttattctgtggttctaaattggcatcagatactgaactgcttgttcgcgggcgatttaatgtattaagccatattatttgggctaaaccatctgggccatggcgacgacaaaataaagaaagcctgcgcacctttttcccttcaacagagcggatactctttgctgaacattatcaaaagccaatcaccgctaaaggttctgaattttctttaaaatgccaggagttaaagcaaaacgtatttaagcccctgattgattattttagaaatgctcgtttagcactacaggtgagttctaaggagataaatcaagcaacagataagcaaatgttcagtcattggttcagcaatagtcagtggcaattacctagcgaggaagactacaaaaagttacaaacactgtttacacacattgctgataaacaagaaaagttatcgtcgttatcccgccagtttaccgagttagagcgagaacaattcaccttacaaaaagattatcaagaattaataaaagaatatggtttattaagacgaccattctttgtaactgcagatgtgccttacactgatgtgtgggcttatccacctgttcagtattatcccggtaaacacctttgtgagaaaccatcggccatgatggaacacattattcgctcaagtagtcgcgaaggggatttggttgctgatttctttatgggatcaggagcaacactgaaagcagcactaaaacttaatcgaaaggttttaggtgtggagcttgagaaagagcgttttgaacaaacagagcaagaaataaaagcgctaacttgtaagtaa

SEQ ID NO: 310242 - DNA, 363 bp, Proteus mirabilis
gtggcaggtgttctaactgtttgttatggacatacaggcaaagacattattcaagacaagagatacacacaacaagaatgtgatgcgttattacaaatcgattttattaagacacaacagcaagtcgatgcattaatcaaagtatcactcgatgactacaccaaagctgctttatattcctttgcttttaatgtgggtacaaccgcatttgctcgctcaacattactcaagaagctaaacgctggtgatagagcgggtgcctgtgaagaaatgaaacgttggatatatgcaggcggaaaggtctggcgagggcttgtcagtcgtcgagaggcggagtcagcactatgtcatggaaaactttaa

SEQ ID NO: 310243 - DNA, 468 bp, Proteus mirabilis
ttgtccaaattaagcaaacaattaaccacattagcaaaacaaggaggaggaagttttaaaaccgttgcggatcgctttaaaatagcctctcgcattgcggatagaatggcaaaactgaatattcaaattcgtgatgtaaaacatatcaaaacaaatcatatcgagctttatatcaaaagccgtcaggaagaaggcatttcaaaaagaacacttcaaaacgaaatggcaggcattaggaatattttagcggttgctggcagaacaaagcttgcctcgcctcaacatgaaaaactcagtaattatgcgcttggtttatcaaatgcgagccgtgatggtacgaaagtggctattagcgaagaacggtatttaactgctttttatcatgcagaaaagcaagatatgggggttgcaatgaccatgcaaatagcacgttatttcggattacgtactgaagaggcaagtcattaa

SEQ ID NO: 310244 - DNA, 711 bp, Proteus mirabilis
atgattacattatcagaaagaattaaaagcttaattttttggatatcaatatcattaatatttttaattatatttggcatcttcattattgatatatttgccactgatgcacaagataaagaaaagttaagcattgttttttcttatttatctacagtatttgctttcttatccgcattgggtttatttacaacaattattatttacttcagacaaaggaaagacttggaaattttagaaaaaatcaaggatagaaaattaacagaagcatattttaacatattcaaaaattacactgaaaaattaataataataacaaagcaattaattgaatttaaaaaattaattaatgatgaaaattgtagatatgttgatgttattattggtgaaaatatatatgcatttgtagcattagattcaaaaaatgaacaaataagcaatgcaacaatatacgaatttgatatagactcactatctctaatatatgcaaactcaacatcatcaaacccaataatatctttaaattattattatttatatgattttagttcaaaatcaaaaataatgattgacaatttaattattaaaataaaacaaagaaatagcaagaaagacgcaacggagttcttaaacacaataaatttagaagactctctattattcttatcagatatagagaatgactttaaattatatttcgacgaattataa

SEQ ID NO: 310245 - DNA, 1194 bp, Proteus mirabilis; identical to SEQ ID NO: 303024

SEQ ID NO: 310246 - DNA, 399 bp, Proteus mirabilis; identical to SEQ ID NO: 295455

SEQ ID NO: 310247 - DNA, 426 bp, Proteus mirabilis
atgagtaacttcgggtattgcgaaggagacacctgtttgcgtaatgggtgccaaggaaccatagagctacatccagtgaataattgttcttgccatttaagcgctccttgcagtgcatgtacagcacctagcggatattgcgatgagtgcggatgggaagaatcagaagatgaaatcattaatgactatgttgtcagtacagacaaagctactggagcttatcgctcatgggagcctagaaaattagacccgacaaaattggattactacagcaagccacactcaagctgctcaatgattaaagaaggtgtttatccagaaggaatggataaagaagaagttaggaaagaagtcattggcacgtttggcggtaggtttgagcactttggaaatggaaaatttaaatttatagcctacacggattaa

SEQ ID NO: 310248 - DNA, 243 bp, Proteus mirabilis
atggagcgcattccagaagttgattttgaagatatggaacatggaaagacatatctctggtatcgaaatacaaacgatattgattttgcttggttgagtgacgatggaaagcacttaattacacctgaatatttcaatgacagcgctcctgactattgggaattaagcgctggtctggttggcgtattatatgggccagtaaatattgaaactgcaatcaagccagatgaaactgaagaataa

SEQ ID NO: 310249 - DNA, 225 bp, Proteus mirabilis
atgaactggattaaacgaagtgatgaaacaccacagaaagacggcaaatattttacattcggatctcatggccggactaccgcatggtggaaaggtaatatcagcaattttcaaaatgctgaatctggagaaaatgaggggatgcaggacatggatggtgaagtttacattgtcacgcattggatgaacttaccagaaaagccagagccaccacaggagagctaa

SEQ ID NO: 310250 - DNA, 393 bp, Proteus mirabilis
gtgagcaagtttagattaagtagacgcagtgaagaaaacctccgtggcgttcatcctgatttggttaaagtagtacatcgagcattagaaattaccgatattgattttatggtgattgaaggtaagcgtaacgaagcccgccaacggcagttagttgcaagtggtaaaagccaaacgatgaacagtcgtcacttaactggtcacgctgttgattgtgctccgctggtaaataatcagattccatggaacgattggtcatactttaaaaaagtagctgatgccatgatgcaagcggcgaaagagttaggcgtcgatatcgaatggggcggtaactggaaaacatttaaagatggtcctcatttccaattaacccataagacatatccagcatga

SEQ ID NO: 310251 - DNA, 243 bp, Proteus mirabilis
atgaaaaaacgaacaaacagattttatactactgaatttaagcaagaagcggtcgcattagtcaccgagcaaggttatagcgtgccaaaagtggcagcttctttagggatcaccgataaattactttataactggaaagcaaaattcgacgctgaacaacccggtagtagcttgaatgctgatgagagagctgagctattaaggctgcgaaaagaaaataaagaacttaggatagagaaatag

SEQ ID NO: 310252 - DNA, 261 bp, Proteus mirabilis
gtgagtgcttatggcgttcaaaagctaatggctcagcttggcctagttgtcactcagcgcattgcttacaaagtcaccacaaaacgcaaatacagtgatgccgtagccgataatttgttaaatcaaaatgttaatcctcacgcacctaacgaagtgtgggcgggtgatgtgacctatttaaacacaggggaaggctatcgcctttatggcgttcttacagcgaagaatttctggaaggtatggtttggatgctggaagtaa

SEQ ID NO: 310253 - DNA, 555 bp, Proteus mirabilis
atgctggaagtaaccagtgaaaaattaggtcctgaagtgtggcatatgcatccactgatttttttggatcaatttattcaggaaaatatagttataggaaagattactggtaaaaaatttgttgagtatgtttttgaacaagcaaaaataaatgaaaaaacatcgaatattccagcagcaataacaacagcacaagctattttagaaactggatatggtaaatctgttcctgcagacataaatacgggaaaatatagttataacatattcggtattaaggctcacggtgatcctaattatgtagaggtgtatacgcatgaggtcattgatggaaaaagaataaagattattgataagtttcaagcgtattcatcttatgaggaaagtataaaagggcgagaaaattttttcattaaaaacaaaaggtatcattttttatttaatactaaagatctaattgagtgggctaatggcttacaaaaagcaggctatgcgacagaccctaattatgctaaaacactaattgctattatgaggagtcaaaacttattatga

SEQ ID NO: 310254 - DNA, 369 bp, Proteus mirabilis
atgaaaataaaatttatattattagtctctttgattatattttccactaagatcttagctaatgagagtttatgccaaaaatttaattatatatctgataaagaaaagattttaattgatagttctcaatctggttataaggttattggtaaggataaagcttacttttattctgctcctaactttaactgtaaaataaataaattattcttaatcgaaggtgatcttgcgaacgcttattttgactatagtgactttacttttattatgtacttagataaaaaaggtaaaattatcgaaggttggatagaatcaaatcggttaacgcccacaggaactgggatagggccttcagataaaaacaaataa

SEQ ID NO: 310255 - DNA, 756 bp, Proteus mirabilis
ttgccacagttattagttggatctatttatgacgcttatgcgtatttaaagggaaatcttggtatcgacgaaattcaaataatatcaagggataatatttcagtatacaatttaaatagaacttttaatggtggtgtatcagatgtaaatccgatagatgagattcgaaatatcgattcaaatacagagcgtaaaaataaagtaataaactgtattacagcgttattttttgctaataactttaagtttaaagatgcagtcgccgaaattgaaaaaaattttcgtgaaattttagatgaagatataaaaagaaaaaaagcattagatagtctttttacacttacggcgaatcgaagtaaatttgaagaaaaaaatatttacgaattttttgttttcatcaaggaaaatatacacagctctatttcaaaactcacagatagaggaatgcaaaaacctgtatatgaacgcattttgtacaaagatattataaatcaattatgtactgacggagaggtggggaacataaaaaccatacataaaactaaaggcgatgattttgataatgtgttagtccacttaccagatgaaaaaatactcgattttttaataaatccagatctagaaaacaatgaagaacatagggtttattacgtagccgtaagtcgagcaaaggatggattgtttatatcagttcctactctaaagagaaaagataaagaaaaattatcatctttattcaagatagttgatttataa

SEQ ID NO: 310256 - DNA, 2259 bp, Proteus mirabilis
atgtctacaattccaacacaaaatccagttccaagtgaagcaccgcgcgacctgaaatataactcaggcaaagttgacgagttcgttacgtcaatgaaaaacaaatatatagatagattcgggcaagagcattttacaatcgaagggttacgctgggttgctcaacaagcaatatctcaattcggctatatcacattagactcattccaaaaaggtgcagaaataacactgccaaatcaagttttacgcgatgaggtaacaggagagtattatcgttgggatggtgagctacccaaatatgttcctttaaattcaagccctgaaaatacaggtggggtaggattgggtaaatgggtaagtgttggtgatgctagtttaaggagagatttatctaaaaatagtggttcatcattaattggtaccaaaacaggtaatacagttgaagaaagattttcatcaattgagcaagaggtgaaggaatctacagggaaatccttatcaaatattaaaatttttgcagagctacctcttagacctgcaggatatggagatatattagaaaaatacaaatacaaatatatatacccgcaaggaatatgtttttttgatgatgataatgaaatatatataacatgctctggggttggtggggataataattgggcttggatatatgtctatgatagaggctctctatctttaaaatcgatattctcagctggtgatactaactcagagggattatatgtaacaaaaatagatggtgagaaatatctttttattcttgattattattctggttctggcaatggtaaaacaggagtatataaattacctaatgatatatcttcagttaatatgacaagattaactgcatataatgtttgcaacacaaggcagtattttcaaattgctggatataataatcaaataataattgcggttaataatggagaatcttctcctcaagcgctacaaagaagaacaaaatttaattattatgatgcgagagacttgctggaaaatatagaacctactcctattggagctatatctgttgataaaaatatcgaaaagataggtaaaagacaaggtatcgcaattactccaaatggactaataacatcaggtggagcatatactccatacggtggtgatgttaatgatgaaaatattttttcattcagaatgttaactttttcaggtaatgagacaggttctttattatgtgatcccaataagttgtgtgatcagataagcccacacttaaagcaaaaagcaacaagaatggaaaatgaagggtgtgcatatttagatggtattaactatacgttaaatattgttctaaatgttaatgatgagcaatctcaatttggtggattagttatatttgaacataaagcatcagagcacgaaaaaggaacaataaattgttctgaatcattatctatcaattgcatggataacaataatgatacaaatattgatatatctacaactccatacgataagttgcaaaacaagaggctaacaacactaaggcaaatattagacagaatgaaccgtgatggagttcaggtttatcagttttataatggaaccgctccatatgtgactgatattaacggtatggaaataacaccaagctgctcagtaactataaagaattttaattcctattcttatcttgttacagtctcaggaaatagaactaactatcaaatgtttgttacaggagatataggcggcccatacactcagcacatggacacgttaatatcatcaccatacgaaaaagtaagacctgagtttttatctagaccatcaaaaatacaaggagttaatggattaccgtgcgataactactactctaactcaaacactccacttacagtagccagatactactctggagataattcatcaccagttataacaggttctattattgttgacggaggctcaggtagaacatcgttcaatacaacatcggacgaaaggttaaaaattgataagggagaatatatcgatggtttagataagatattgaaactgataaacaataatgcattaaggaattttgaatggaagcataatggtaataatcagtatgggttgatggcacaaagagttagtgatgtcatccctgacgctgtatcttacgatgaggatacagacacatacatggttaactatagcgccatcatcccagatataatttcagcaatatctgaactttacaataagattaataagtaa

SEQ ID NO: 310257 - DNA, 870 bp, Proteus mirabilis
atgaacaagacgtttattatgagcgctcacagagttacagaaccaatgaagtggtgtgttgagtacctttcatcatttaaagaaaatactttcataatacattacgataaaaaatccaatattgatgatgtgtctcacatgaaaaaagaaaatgtaagaataatcacaaacagagttaacgtagcgtggggtgacatttctcaggctgaatcaacactaataatgatgagagagtttcttaccttagactctgaatattgctttttcatatcaggtgatgatgttccacttgttagcaataatgatatgaatgaaatactaacaaaaaataacggggttgactttatcgattatatgtatagtgagccagataacactgtccctatttacagatctagctataattttatcaatagtttcttcataaaaaaaccaaagttatcggatgtaataaaaaagaaattgtttattgtttttaaagattttctttataagaacaaaagtttcctaaaaaataaagaaataatgtttccatcaggtatgtacaagggtactaactggtttaccctacatagggactccgtgtcctacataataaaatgggcggctgaaaatgatttgtctattttaaatagatcgctgtgtattgatgaagttctattccatagcatattaaagcctagatatgaattaatagataaaaaaaataaatcaagcttgaggtatatagattggactactggcccagactaccccagaactttagatgatactgatatagcaaaaataccccaaaaaagccttttttttgcaagaaaaataaaaaacgacgtccgtgtcgtaaatgaatataaaaaatttacttattaa

SEQ ID NO: 310258 - DNA, 354 bp, Proteus mirabilis
atgaataaatacaccgaactctctgacttcgagattaataaaaaggttgctgagaatcttaaattaaacacaattgcatacgaacgcactgaaatagttttatttgatgatatggatgcaacgcctttcgacccttgtaataatcctactaacgcaatgccgattattattgagaataatatctcattgcacgcccctcgcttaagggaaggctggatggctgagtataccggcagtggtgacgatgttaatgacgggtttcaggctgattattttgattcacacaataaaaacccactacgcgcagctatggaagtatttttgaggattaaggatgaggagaatgaagtctga

SEQ ID NO: 310259 - DNA, 150 bp, Proteus mirabilis
atgaagctatttgtactgttattaatttggcagggatatgttacgcctgtaaccgatacattatacacacagcaagaatgcgagaaccgtgcaatgcaaataatgcaggtgcgggatgttgagatagtttgtggggaggtgtggcgatga

SEQ ID NO: 310260 - DNA, 162 bp, Proteus mirabilis; identical to SEQ ID NO: 301407

SEQ ID NO: 310261 - DNA, 348 bp, Proteus mirabilis
atgattaatagaaagaatagtcatagtatgttaacaaaagaacaactcaatactgataaacaacttaatgaatgggcaaatggtatggcacaattggacgcattaagtcaacgcctagatcgttttgatggtgatccgaaaaaatatattacaggttcagaattaaaatctattatttttaaaacgaaacaacactttaaccaggctaaaccattagaagaagagttgcgactacttgaaaagaaatctatagaaaatagcatttctgattatgactatcagcaagttgattatcatttcaaacagttattaaatcgatatgctttactaaaaagtcaatctaaataa

SEQ ID NO: 310262 - DNA, 279 bp, Proteus mirabilis
atgagagaagacttttactttgtgttacctgacaaaaaagatgcttatattgaagttaaggctgacaaggcgttgatagaaaaaatagaaagattaatgcaggattactgtttctttattgaggtagtggatcaaggtaaggtagtttttggatcaatattaaattatttatatgagtattatttcaatgattataactatgatattcccagaaaaattttaaactctttacatgaacaaatctataaaaaagcattactctatagaaagttatcataa

SEQ ID NO: 310263 - DNA, 462 bp, Proteus mirabilis
atgttatttgagatatttttcaattcaaaaggcgagttgagagatagctttaaaacgtcacaatttaatgaggtttttgagtatcagaaatattcagagtttgatgaatcgtttaaatttatatcagatatattggcaatatatccaaatcgattccacataattccaggtaaaaacagggacgtatcggttgatgtagaaaccaaaagaaatgctaatgatgaatacaaggtaattggtatatacttgggtggcgtgaatattcttagggaagatgaggattacagtttctacgaagaggatgggaaagttccatatgaagcaatcagaaaatcagcttttgagtggagattatctgaagaaatgctagtatcgaaagcaaggttgactattaattttgactttgtggcagatagtaaatcaaaaatattgtttccatatgggtatactgtatcgaagtaa

SEQ ID NO: 310264 - DNA, 1059 bp, Proteus mirabilis
atggaaaatcaacgttcctacagtctattaacgattaaatcagtgaatgaaaaagacagagaaatcgtgggcatggcgacaacaccgtcaactgatgcttatggcgatattgtcgagccagaaggtggcgtatttacactaccgcttcccttgctatggcagcacaacatggaacaacctattggcgaagttatcgacgcgaaagtcacaccacatgggatcaaaattaaagcaaagatagcccaaatagccagtccaccgggattatctgcacgactcgaagaggcgtggcaatccatgaagtctgggctggtgaaagggctttctatcggatttaaaccgttggaatatgcttttttagatgagggagggatccgatttaccaaatgggtgtggacggaattatctgtcgtgacgatccccgccaataaggattgtcatcttcaaacccttaaatcgatgtttcaaccgccggctgcgtctggctcaaggcgagttgtccatttatcttctcaattatccgctggtgtttcagcaaaaaatgcatttaataaggaacatacgatgaatattgccgaacaaattaaatcattcgaagcgaaaagatcggccaatgatgcggcacgattagatatcatgaacaaagcagctgaagaaggtcgtactttggatgtggaagaatcagagcagtacgataatttaacctcggaaatcaaggcagtagatagtcatttagtgcgtttgcgtgaaatggaagcctcccaagccaaacaagctaagccgattgatgttgagcaaaactcatttcgtgaagcctctcaattgcgaggcgggattataaaagtagacgaaaaattagcgccaggcattgaatttgctcgttatgtgaaatgtttagccgcctcaaaaggtaacacaacaggcgttggaaattgcaaaatcacaatacccagagcaaccccgcatacagaatgtactcaaagcggcggtaaacgcagggacaacgaccgatccacaatgggcggggacattgacggactatcaacattttgcgggtga

SEQ ID NO: 310265 - DNA, 156 bp, Proteus mirabilis
atggtaaacaagttattcgtatggctattttatattcgtcctcaagaagaaattaaagttgatgtaaaagaaaagttaacagaaataaaaatatcacctttaagtcgttatggatttaaattagcaggtgatattaaaatgaaagttaataattaa

SEQ ID NO: 310266 - DNA, 540 bp, Proteus mirabilis
atgtccgataaaataaaacaacgcgtcgcccgcggggtacttgctgggggacttagtatcacgctactgcttacgggctgtgtcggcgcttttagtctggcacccaaacctcaaccccttgccgccggtattcaaggatttaaccacacccaatacagtattaccggttttacgattaacgaaggctacggcagtatcgggggcaccgtctgttgtgtactgcttcccgaacaatggcgacctgatttagtcgcccatatcgaatggagaaaagtcgatgcgagtaaacttccctctacgcctgatatggaccaagtcgaagccatcaagaactggaggcaacaacttcgtgacaacacctcgcgccatgaagcttgggtatcgatcccgcaatatgatgaaccttgtagcgttaaagtccattttctgccttgtaatgaagtgaaaatcaccacctcttgttatagctacggtgatcctgaatacccgattaatgaaccgcataatatgaaggagccggctgtatgtccgataaaataa

SEQ ID NO: 310267 - DNA, 363 bp, Proteus mirabilis; identical to SEQ ID NO: 301378

SEQ ID NO: 310268 - DNA, 363 bp, Proteus mirabilis; identical to SEQ ID NO: 301378

SEQ ID NO: 310269 - DNA, 363 bp, Proteus mirabilis
atgggcatgggtttagaaatatatgatgagaaagggcgactcattattggagaagacactattataccgcgccacttggggcaatttgaccttcctttgtcccaatatggatctcttactattcctgagatttccttaggaggtgaggttgtttgccatttctggctacggtatcgctctcgatttagtggtgagtttcatgtagataaacctaatgagagaacagaatactccatatctggaaacacgttaaactaccgcgttgattacaatatctatcgctgggagaataatggctctggtggtgggcagacacaaacgcatgactcattctcaagtcatgttgtcgtatgggtggtatga

SEQ ID NO: 310270 - DNA, 390 bp, Proteus mirabilis
atgtctaaatcggcaaaaggtacgacagaacggcatggacggaacgtaaaagctaaatctggtttaaaccgctcaatactggagcagggctggtatgaaatgcgccgtcagcttgagtacaagcagctctggcgaggaggtcaggtactggcaatacctcctgcctataccagtcagaagtgcgcttgctgtggtcatacagcaaaggaaaaccgcccgtcacaaagtcaattcgagtgccttgaatgtggatatacagcgaatgctgatatcaacggggcacgtaacattttagcggcaggacatgccgtgcttgcctgtggagggagggtgcagtcagaccgcccgtcgaagcaggaacctgccgaggtgattcagacatcagtctga

SEQ ID NO: 310271 - DNA, 225 bp, Proteus mirabilis
atggctctatactttgggttaatacaggagataaatcaggagaacaaaagttattatcaagagtatcaggtttttctaattgttgtatttgagttacaattaaattttgtaaataatcaaatcttactaaatgctttatttctaatgattgaagttgattatttatattttttaattgttcttcaatacgatataacagagccagatctttatataaaaacgtag

SEQ ID NO: 310272 - DNA, 336 bp, Proteus mirabilis
atgaacattaaacaattacagcaacaaatccatcaacaaaataaatctgctggatggtgggataacccacgcgaaaaaggaacgttactctgccttattcattctgaaattagcgaggcgatggagggtgagcgcaaagacttaatggacgatcacttgccacatcgaaaaatggcagaggttgaacttgctgatgctgttattcgtattttggattatgccgaagcttttgattatgacattgaaagcgcaataactgaaaagctcgaatacaacaaacatagagcagatcatcagcgtgaaaaccgtatcaagaagggcgggaaaaaattctaa

SEQ ID NO: 310273 - DNA, 558 bp, Proteus mirabilis
atgagcgaaattaaatcactagcagatggtgatgaattaaataacgaaacatggaataactttattgagcggcttaaatatcacaatcaaggtgaaggtgttaattatcatgcaaccgcttaccctatcttcactgtaagagagaaagcaaccgttactggcagtgaagatgataacgtgggtatttgctgtgaaggtgaatacttcgatgatgttaatgatgcgctcgactggctagatgaagaaacaaaaaacacactgaaatctaaatccgaagaagatgctaagtgctcatggagcaatttaagcgactacgacaaagctaactcaatcattgatgttgttgacgactcatatatttactactggaaatgggattacagaacagtaaattcgcatctaaccaaagaagccgcagaacgatttattaagcgcaaacagcacgactacggcaagttatcaatatatgttgaatctgcttattggtgctgggaattgcgaacaataatagacgcaatgatggatggtaaaattaaatacgttggtgatgaacaatga

SEQ ID NO: 310274 - DNA, 327 bp, Proteus mirabilis
atgaataaatacaccgaactctctgacttcgagattaataaaaaggttgctgagtatcttaaattaaacacaattgcatacgaacgtactgaaatagttttgtttgatgatatggatgcaacgcctttcgacccttgcaataacccgtcagacgccatgccgattattatcgatgtaaaattatcaattcatcctgatttttataacgactgtgaatcgtgggttgtaagaactgtacatgttcccccagtcaaagatgagagccttacaagagccatttgcattgcttatttattaatgaaggatgcggagaatgaaaaagtatga

SEQ ID NO: 310275 - DNA, 894 bp, Proteus mirabilis
atgaaaaaattaaaactttggtgttatcttaatattgagaaccctctcgttgcttgggaggtcgcaattggaagaatagcttctgcagaagcattaccttcttttcaaggaaaagagaagcgatggtttttgacccaatggcaatactctcggctaaagaatgctttttacaacgatccagcaaaagaaatcccattaattaatgaattcagaatagaatccataaggcatcagctttataaagataaagtatcaaggcttcgtgggtgtttctttttcaaaaacaaggaagatgctataaatatagtcgattattatggttggaatggttttaatcctaatcatctttcggaagtagaagtctattataaaacagataatgatataagttactatgattcaacatggttcacaatgaaagcaagcgatattatggctacagaagatattaagtcttatctcgccaatgagaattattggggaatacatggaaaccctgctactgaagtactagtctatggattaggatttattcttaataaagaattgattagaaaagcctataatatagtaaaacaaacacatcctaattcaatgtgttttgtcgattctgcacgtataatgcttgatctatgtaaaatgacaatagatagagggcaaccaaattgggaattatatgaagcaggatttgcttgtagtttaaatacttatcaaaatggtaatgaacattgtgaagttatctatattatgcgtgatgaaccatttaaaaaatatggtattctccaaaatggatatcctaataaaattagtacacctgatttcaaaaatttgaattacgcatatcccaaaaaagacttattaaaggttatgaatgaatacctcctgtctgtttaa

SEQ ID NO: 310276 - DNA, 981 bp, Proteus mirabilis
gtgaatagagctgtgtactttgatttatgtgagaaaaaacttactttgttatgctatagtgttgaggtaagagggaaattaaatatactggactataatattcactgcgaagacttttatgtaaatttctttaatttgttatttggatattctctaaaaaatactaatcaggaaaatcataactttgaaggaatagacctaattgatggcgataataaaatagttttacaagtttcatcaactgcaactaaagtaaaaattgaatccgccctaaaaaaggatttaagcttatataagggacataaatttaaattcatatcaattgcaaaagatgctagcaaattaagaaataaaaattacgttaatcctcatgctttgattttcataccgaatcaagatattcatgacataaagacaattcttaatatcatcctgcatctcgatgtaacaaaacagaaagaaatatatagtttccttaagaatgagttacaagaagaacagaatcaaactctaactgaaactaatattgcagctgtgataaatatattagcaaaagaggattttactaattttgagacaacagactttcctcaaccattcaatgtagataataaaataacatttaataatttaaatgcagccgcatatcttattgaggattacaaaatccatcacgggaaggtttctcgtatttattcagaattcagtaaagtgggaaaaaatacaagcttttcagttttatctgcttttagaactatatttataaaattgagcacacaatacagtggagatgagctattttttaaaataatagaaagctcagttgaaacggtcagaaagagtactaactttacacaaataccattagaggaactggaactttgtgttagcatactcgcagtggatgcgttcatacgctgtaagatttttagggaccctaacggagttaatgatgttgttaccaaaggacattcatcctaa

SEQ ID NO: 310277 - DNA, 900 bp, Proteus mirabilis
atgaattatagtataaaatatcaatataaaaatgaaagatattataatgacaatcatttttctttaaattttaatattccactaacaaatagctctcaatcctatcattgggtaagcaatcaatttgattatcatccaaacaataaaggttatataaatagtacgactataggtggaagtttattagaacactatcgcttaggctattctattaattaccgacaggattttagccacccaaatgctggctatcatacttcagtaaatactcagtataaggggagatatcaatcttattctattaatgcaaataaatcatctaataataaaaccaatttaagattggggattgatggtgcgatagtgttacatcaaagtggaataactttggcacctgatttaggtaatacttttgctattgtaaatactaatggcattgccggaattaaaactaatcgttcttcacaaaccactacagacaataacggtaatttaatattaccgcacatcatgccatatcgtaaaaatactattggactaaacataaattcgttacctgaatttagtaatactaaaactcaaagtaaaatcatcgtacccactttaggtgcggtagcaaaaatcaatttccctataaatatcggctataatgttttatttacctcaaatacaccaattccttttgctgccaatgtaatggcatttgatgataataataatctcatttctagtgattctgtctatgaccacaatagaatattcctctccggaataaaagaaagcggaacggtacaagtaaaatggggagatacagaggagcaacaatgtttcttccattataacgtaaaaaatgaaagtaaaaataattcaattattaagaaacaaatttattgccaataa

SEQ ID NO: 310278 - DNA, 333 bp, Proteus mirabilis
atgaatggattaacttacctaatattagccattatatctgaagttattgcaacaacggtgttaaaagcatccgatggctttagtcgattatatccatctattgtcgtcgtggtggggtattgtttttctttttgggcgctatctcaagttgtgaaagtcatgccactgggtattgcatatgcaatttggagcggattaggtattgttttagtttctgttgcggctgtttttgtctatcaacaaaaactcgatttacccgccatcgtcggtatgacattaattattgctggcgtcttagtgattaacttactttccaatagcacctcacactaa

SEQ ID NO: 310279 - DNA, 885 bp, Proteus mirabilis
atggcttcaacatcgaatgataacggtagagcatttgagtattgcttaactaaatacattttagacaactcatctagtaagatagatattgataatgaaacaaaaaatcaacaagctagagatgaaagtaaatatgaaaatctatcaccagaattgaaaatcctttttagtaacgcatcgaaaagatattttgaattactgcctacaactatattttcgttaaaaagattaagtgataacgaaggtaaagatgggaatccaacagacattgagctaattttcatagaaaatggtttaccaaaaactaaaaatatctctctgaaaaacaatcataatgcagtaaagcatcaaagaccgggctctctaatatctcaactaggtatatcagataaaaatgaagacaatctttacagggaatgtataaaatcattagaaagaacatttatatctagtgttgagtctctaggatttaacactagcaacgaactactattctccgatataaaatcatgttcagaacaagttattttagacctatataacagtttctgctctcttactgctagtgtaatcaataagtttggttctattcatgccggtgattacttccattttttagtatcaagaactgactttgaaaaactaatcgtttacccaaataaaataatcatacaagagtggtataaattaccaacaccatcagcaatgaccgcattcgtttctgataatagctacgtaaatgttatttttaataatggctatacattcaaaatgagattgcataatgcatcatctagattcaaaaaaggatcatctatatcacttaagtttgataccagacttgaagaatccgctaaaataccaacctctgaatttttcatataa

SEQ ID NO: 310280 - DNA, 990 bp, Proteus mirabilis
atgagtgaaattaatattgcgtctttattctccggagctggtggtctagaccttggttttgaattggctggatttaatatttcctggtcgaatgagtttgataaaacaatatgggaaacacataaaagaaacttccctaattgtatactagatcaacgttccatagtcgaagttcaaggcaatgatatacctgaaatatctggatttattggtggacctccttgtcaaagctggtcagaagcaggaagtaggaaaggaatagatgatcatagaggtcaattgttttatgaatacattcgccttttaaatgaaaaaaaacctctgttttttttagctgaaaatgtatcaggcatattacacaagaagcatgaagatgcttttaataatatattaaagtcatttgaagattctgggtataatatttcatttaaattattaaatgcaaatgattataatgtacctcaagatagacttagagtatttatagttggaataagaaaagaatacaaggatatattctttaaattcccagagccttttggctttaatttaaaattaaaagattatatttttgatataaaagataatgccgttccatctgatgaaaagaataaatctaatagaaatacattaatacctaaccatgaatatatgacaggtggattttcatctatattcatgtctcgaaatagagttcgtagttgggaggaaccgtcattcacaatccaagcaggaggacgtcatgccccaatacaccctaatgcacccaaaatgataaagctagaaacagataaatttgagtttgtgaaagaaaaagaaaaattttatagaaggatgagtattagagaatgcgccagagttcaaacctttcctgactcatttatatttgaatataattcagttgtagatggttataaaatggtcggaaatgcagttcctgttaatctagcaagagttttagccgaacaaataaaaaaacaacttttctag

SEQ ID NO: 310281 - DNA, 1368 bp, Proteus mirabilis
ttgattggttatgcgtttatctctgctttactaccagtatggctgattttagcccctcgtgattatttagcgactttcctaaaaattggtgtaattgttggtttagctatcgggattgttattcttaatcctgagttaaaaatgcccgcgatgacccaatatattgatggtacaggaccattatggaaaggggctctattcccattcttatttattactattgcttgtggtgcagtttctggtttccacgcactgattgcatcaggtacaacgcctaaattgatcgccaatgaaatggatgcgcgttttatcggttatggtgcaatgttaatggaatcatttgttgcgatcatggcattagtggctgcctctattattgaaccaggtctctattttgcgatgaatacaccgcctgccggattaggtattacaatgccaaatctgcatgaattagggggtgaaaataccgcaatgattatggatcaattaaaagatgtcaccgtacacgcggctgcgacagttagctcatggggctttgttatctcacctgatgagattttacaaactgccaaagatataggtgagccttctgtacttaatcgtgctggtggtgcacctacattagcggtgggtattgctatggtgttccataaaattttacctgcggcagatatgggcttctggtatcactttgggatcttatttgaagcactctttattttaacagcattagatgcaggaactcgttctggtcgttttatgctgcaagacttgttaggtaattttatcccatacttgaagaaaacagactcttttattgctggtgttatcggtacagcaggttgtgtcggtttatggggttatctattgtaccaaggtgttgttgacccactgggtggtgttaagagcttatggccactgtttgggatctccaatcagatgttagcggctgttgcacttgttttaggtacggtcatcttaatcaagatgaagagaacgaaatacatctgggtaaccgttattcctgcggtatggttattaatttgtacaacatgggcgctaggattaaaactgctcagtaatgatccgcaaatggaaggtttcttctatcttgctaatgagtacaaagcgaaaatcttagccggtggggcagatcttactgccgcagaaatcaccaatatgaaccacattgtgattaataactacaccaatgcaggtttaagtattctgttcttagtggttgtttacagcattattttctacggtatccgtaccgcaatgaaagcacgtaaaaatccgaaagagtcagcacaagaaacaccatatgtacctatgccaaaagatgtgaagatatcttcaggtcattaa

SEQ ID NO: 310282 - DNA, 948 bp, Proteus mirabilis
atgaataacaaagaacgctttacaaccccttatttagaatttgatagaaagcagtgggctacgttaaggaattcggtccccttaacattaacagaaacagaaattgccgaccttaaaggcattaatgaagaaatctcaattgatgatgtcattgaaatttatcttccattatcaaggttgttaaatttctatatcagttcaaatttacgtcgtcaggctgtcttagaacagtttttaggcacaaataacgccaaaattccttatatcattggtatagcgggtagcgtagcggtgggtaaaagtacgactgcccgtttacttcaagctttgctcactcgttggcctgaacatcggaaagtggatttgattaccactgatggttttttattacctaatgcggaattaaaaaaacgcggaataatgaagaaaaaagggtttcctgaatcctatgatatgcatagtcttgtctcttttgtctctgatattaaatcgggcaaaaagcaagtgactgcacctgtctattctcatttagtgtatgacattattccagacaaaaaacaggtcattgagcaacccgatattttgatccttgaaggactcaatgtattacagagtaatcaagactaccctcatgatccacataatgtttttgtatcagattatgtcgacttttccatttatgttgatgcagatgaagcattattgaaacattggtatatcagccgatttttaaaattccgtgaaggggcatttaccgatcccgaatcctatttcaataattattccaaactgagtcgcgaagaatctattgagatcgcgtcttccatttggcaagaaattaatggcttaaacctaaagcaaaatattttaccaacccgtgaaagagccagtttgattatgactaagggtgataaccattcggttaaaagcgttagattacgtaaataa

SEQ ID NO: 310283 - DNA, 1749 bp, Proteus mirabilis
atgcctaaagcatggttttttaaagttatatggcgctttaaaaagtattactatcaaatcattcttgctacttttgttattaattttttggcacttgttagttcattatatgtcatgaatgtttatgacagagtaatacctaataagtcatatcaaacactctgggttttaagtatcggggtaattattgcaatattatttgaatttacagctaaaatgctccgaggccggttaactgatattgctggtaagaaagctgatttaattatcagttctgctttatttagaaaggtcacaaatcttaagttacaggaaaaacctatatcatctggctcctatgttaataatttacgagattttgaatctgtccgtgattttatgacgagcgcgagtttattaacattagttgatatgccttttttaattttatttgtatctgtaattgcgcttgttggaggctatttagcttttgtgccacttactataattccattggttattattgtcggacttttagctcagatccctttatccaaatatattaatgaatcgatgaaggaatcatctcaaaggcaaggattagctgtagaagcgattgaaggcatagaaacattaaaaacgaataatgccatgaattgggcgcaaaagcgttgggattattacacagcaaaaacagcatcttcatcaatgaaagttaaaaacatcagtaattttgttatttattttgcagtaatgatgcaacagttaaatacgatatttttagttattattggtacttatttgattcatagcgatgatcctgcaagtaaaattacaatgggggcgttaatcgcaacggttattttatctggtagagcgttatcaccattaggacagattgcgggtttagctgtgcgctttcaacaggcttgggtcgcattaaaaggtgttaatggcattgttgagcgaccatcagaacgtgaaccagctaggaaatatattacgttaaaacaaataaatggaaatataaaattccaaaatgtttcatttgcttataaccaagatagtagcagtgtagtgaaaaatttatcatttgaaataaagtcaggtgaaaaagttggaatacttgggcgtattggcagtggtaaatcaacgactttaaaattagcagctggattatatcctgcagagcaagggagtatcacactagatgatgtcgatattcgccaaatagatcctcattatttgcgtaatcaggttttgttattagaacaagagccaaggttatttttaggtagtttaagagaaaatcttgatttagcccgtatggatggcttctctagtgatcaagatttgattgtggcactgaagcggtttggtttggataaagttattaaaaagcatcctaggggattagatatgtccttgggagaaaatgggttaggtctttctggtggacaaaaacaaattgttgctttggctagaatgacgttgagaaatcccaaaattgttttacttgatgaaccaacaacggggcttgatcaatattcagaaattcaggcattaaatgccatttcagcatggtgtcgctcaaagacattattggttgttactcatcgacctcaggtactgagtattgtcaatcgaataattgttgttgataacggcaaagttgtgatggatggtcccagagatgcggttttacagcagttagctaaaaatgaaacagaaaaacaaataactgctcactcaaaaaaccaaaatagataa

SEQ ID NO: 310284 - DNA, 1260 bp, Proteus mirabilis
atgaatgaactaaataaaaaacacctgatgccttcaagtcatactaaagaggttctttctaataaggacttagcacttctaaatgacttgcatgcagcacttcagaatgaaaaacatcataaaagttttatgatgatcacaatattgctgatctttatggttattttcgttatttgggcatggaatagtaatcttgaagaggtaactcgtggtcaaggcagtattattcctagcagtcgcgagcagataatccaaacattggatgctggcatattaaaaagtatgcaagttaaagaaggggatatagttgaaaaaggtcaagtattattaacgctagatgatactcgaacatcggctatcttaagagaaagtgaagcaaaagttgctaatctagaagcaatacgagcacgacttaaagcggaggcttattctactgagcttagctttccagaaggtttatcaacagaattagtaactcgtgaaacaacagtatacaagatacgtaaagacgcattgaaatcaggaatagacaatttacaacaaagtaaagcattgttagaccgagaaatttctatcactaagccaatagttgcacaaggtgcaatgtctgctgtggaattattaagaatggagaggcaatcagccgatattcaattacaaatagatgaaaagaaaaataaatatttaactgaagctggggctgaattagttaaaacagaagcggaattagctcaagcaagggaaaatatggctgggcgagctgatcctgttgaacgtgctttaatacgtgcaccattaagaggtattgtgaaaaatatccgtattaatacagttggtggagtaatttcagcagggcaggatataatggaaattgttcctttagaagatcagttattagttgaagcttatattagtcctcgagatgtggcctatgtacgtgcaggtatgcctgcattagtaaaattgactgcttatgattatgcgatttatggtgggttagaaggcgtcgtgactttggtaagcccagatacattgcatgatcaaaaaagacctagtgatttaaaacttaatcaagatgaagctttttatcgcgtattggtcacaactcaaagtagtcatcttacggataaaaatggaaaagagcttcctgttattccgggtatgatcgccagtgttgatattaaaacaggtgagaaaacggttttccaatatttgatcaaacctataacaagaatgaagcaggcattacaagagcggtaa

SEQ ID NO: 310285 - DNA, 1740 bp, Proteus mirabilis
atgcaattatcaacagatgatgagatgtatccagaaagtttaagaggctatgcgcctatcattagagggattgcaaaaagtaactcgcaaataactatcaaacaaaatggatatactatttatcaaactgaagtggcagctggcccttttgaaattaatgatttatatccatcaggtagtagtggggatttatacgttacgattaagggtgctaatggtagtgagcaacatcaaatcgtacctttcgcctctttacctgtattacagcgtgaaggtcatttcacttatagcgtaacgggcggtgaatatcgtgcttatgataataatgtagataaaacgaagtttggccagtttacattagtttatggtttaccttatggcactactgcttatggggggagtcagttgagtcaaaattatcaatcttactccctaggtattgggaagaatttaggctcatttggtgctgtttctgttgatgttacacaggctaagtcaacttttaatgatggaaggaagcaacaaggtcagtcttatcggtttagatataataagaatttgaacaatataggaaccaatattgctttagcaggttatcgctattcaacgagtggcttttatagtttatctgaagtgtttgatagttttcgtcgtactcattatagccctgaaattgagcaacgccgtcatcgtgcggagataacacttaatcaaaatttaggtgataaatatggctctttagctatcggatatatacaagaggattattggaatagcaaaagcaaaaaacaatcagcaacacttggttataataatagctggcaaggtatcagctatggaataaattatacctataataaaaatacagttaatcattcttatatttctgatcagaaaagacaaaatgatgatgaacatttgttggctttttcggtgaatgtgccctttagcgtatttgataatactttttattataattttaatgcgaatagtaacaataatagttcaagtacaggaagtgtaggtatatcggcatctcagttaaataatcgattaaattggagtgtgcaacaagcatttaccaatcaagatcaaggatcttctggaaatatcaatgcatcctacaaaggccaactaggtgatattacgggggggtacagttatagcaaagataatcataatctttactatggtgtgagcggtagcgtagttgctcattctcagggagttgtttttggacagcaactgggagaaaccgcggcaatcgtagatattcctaatgcgggtgatattacgatattaaatcaagcgggagttaggactaataactcagggtatgcattagttccttatgtcacaccatatcgtaaaaatactgtcgagatcgatacattaagattgccagagaatgctgaaatggaacttaccagtcagacggttttaccgagtcgaggggctttagtaaaagcgaatttttcagcaaatgtaggctatcgtgtattaatgacgataaatttggaaaacaaaaagccagtaccatttggcgctcaagctatttttaaagacaatagtcagttaaatagtattgtaggtaatgatggagaagtttatttatcagggttaaaacaaaaaggaaactttactattaaatacaacaatgaaagctgtcaggtaaattatgatctatctgatattccagattatttagggctctataaaactactgtaacttgttattaa

SEQ ID NO: 310286 - DNA, 753 bp, Proteus mirabilis
atggccacttttaaattttataatattcagcttctgcctgtggatagaaaaaaagactcagaagtaggcgtgtctggatattgcaaactttttgaatctgttgagaagcaacttgaaacgttaagagaggaaaaggaaaaattaagttccgtttctgccaagcttattggtgatatgtatttctcagcgttttcgtcatcaatatactcttatcctttggaaaatggtgagcaatacttaatccatgggtattttcttaaattcgatgatgttaacacattagttgatacagaaagtgggaagattagttatacatcatctggaaataatagtagtcgtaggtttcagtttgagtttgttttcgatcctgctttacatatccttgctattcaggataccaaaggattaccaactagaaatgctttaataaaagcattaaaggaagtattaggagcccatgccaacaatctttttccatatcatagtttagaaatcatagagttaacctctgcagaatcgatacaagattttttcttagcacctaaaaagggatataagacttataaaggggaggtaacgttttctaattcagatgagtttgattttgattcagaagatgaattaagagagttagcaggagaacttgaattagaactgaaaactaacgaggtacataaatgggaaacaagttaccgaagctttaaagctgtctcttatacacatctgacgctgccgacgaagaggatagtgtag

SEQ ID NO: 310287 - DNA, 423 bp, Proteus mirabilis
  misc_feature (378)..(387): n is a, c, g, or t
atgaaaaaatcattattttcactattaattctatctatgctttctttatcaacgcaagctattgcaacgaatcatgatttaggaagtaaaacaataaccttaactgccaaggtacttaaacgtattccatcttgtacaattagtgagatagaaccaattgagttaggtgatatttacgatgatatgattggaacacttcgtccaacggcgattagtataagattttctgactgttctaatctaggattagctagaactgtcaaccttgttcttaaaccacaaaaccaaccttatttagaaaataccattaaaaatggaaccaatgctgtagtaaaaataacggattttgataataatcgtgaaattgatttaagtgannnnnnnnnngacagaaggagcaatgctatttacttcctctattaa

SEQ ID NO: 310288 - DNA, 183 bp, Proteus mirabilis
atgctatttacttcctctattaatggaaataatgacgcttattttctatttggagcaacattagtgaaaccaacaggtgttgctgaagttacagcaggtgaattcaatgccagcttaacttttgatgcttttatcgatgatatgttaccagaaagaccaaaatcaccaggaagttcagattaa

SEQ ID NO: 310289 - DNA, 195 bp, Proteus mirabilis
atgttaaaacagtatgatatgacaacgcaggcaagttgtgtacttgaaacaatctcaaaaagtgattggcaaacagtacaagcaatttcaaatcaaactggactaagtaatgaaaattgtgagtttctattaactcagtttgaaatagcagggtttgtcgcaaagcaaggaaatagctatatgcgtacagcctaa

SEQ ID NO: 310290 - DNA, 2370 bp, Proteus mirabilis
atgtcacaatctgcaattacattagcgtttgagcgatggaaagccagcgccaccgaagcacagcaaccggttgttttagacgaattcgtgttagcaaatgtgccgaacttagatccatctaaacccattgaccgcaacgagggcttacctgatgcgaaatatattgtgcatcgccaagcggtgaataaaacgggtgtagtcaatcaaaatgcggtggcgtattcggtgaccattggtgccgaaattggtgattttgattttaactggattggcttattaaacaaacaatcaggcacggtggcgatgattgtgcatgcgcctactcaacgcaaaatcaaaacccaagcaggacaacagggcaatgtgttaacccgctctttcttgctggagtatttaggcgcaagcaaagaaaccgccattaccacacccgctgaaatgtggcagattgattttaccgctcgattaacgggcatggatgaaatgcaacgcctgattaaccgagataaatacggtgtagcttccttttttaataatggttttttagttgccaaggcggggaatcaattctatgtcacaaggggattaggttatatcgaaggcttgcgcgccgagcttgcagaaaataaaaatatcacggtaccgaatcaagcaaccaaagtttgggttgatgtgagttatcaggggaatattaccagtgattgggatgtgtatatctcaattgcggtaaaacctgattttagacattacaccgataacgcaggttttccacactttgtgtttgcggtggcgtccatttcgacaacgggggttatcacagatttacgccctaaaggtacgctcgatgcacaatactttgaagaggcattgaaagaacatgaacaatcacggaatcatcccgatgcgacaaccgcagtaaaaggttttacaaagttagataatcaggtgggtgacagtcaaataactgcattaaccccttacggcgctaaaaaagaattagaaaactatcaacccaaaggaaattatcaacctgcaggaaattatgcagataaatcgacgacagccattcaattattttctgctggcgttagagcgccgtatgtcgatgcgattcaaggtgatttatatgtagggttacgtgcttttaatgaagtgccttctctttatatttcaaataaaggcgtgggatataatatttatattccattatctggcggaacgcttgccttagaaagctatggatactcaaaaaacgaatcaaatagtttattagataaaaagatagataaatcaaaattatcacaagcaattggtgtatcacctgaacatgtcatgagtcaaaaagcctgtgttgatagctttgctcaaactaagaattttgaagcaacatcttatggtgaatgtagggtctggtcaggtgataaaaaagtttatttatttactaataataatcaaaactcaggtttgtatagtgttgaaaaagaaggctatatatgggggtttaatgctaacggagatatgctaggcggaagagtgcccgttaattgcggggggacgggtgcgagagatgtcgccactgctcaaggtaacttacaggtttatagtaaaacgtacataaatactgaattaaataagaaatttgataaatcaaaggtatctcaaggaaaaggggtatcgacagaacatgttatgagccaaaaggcttgtgttgatgcatttcagagtaaaggtaattacgcggataaatcttcggcatcacaacaaagttttgccggtgctatttcctcgccaagttcaatcattgcgacatcagaagtgggtactattgcattagacacaacaaaaaccaaaccactaatgctatatagggaagggcttggtaaatggtgtagtattaaatttcaagcaaaagatggggttgttgcatatttatctgatattgaggaagctaatatttatccttggggtgttttgatcccttggtgtggtgccaccgcacccaattgggcattagttgctaacggtagtgcatttaataaaacaacctactcaaagttaggtcaattttttcctagcggtcgattacccgatgcacgagccaacgtgttacgaggtttagatgcggggcgcggtatcgatacaggaagaaccattttatcggaacaaatggggaacagtttgttatccagtaatatctttgggggattaggtgctgaaggggataaaaattggcgtagagttatagattatattggaatttcgggtactgataacgacggtgggtatggagtctatcagcaaaaagaaggggttaacggacaagaaacccgtatgagaaatacagcagtactatggatagtgagagcaaaataa

SEQ ID NO: 310291 - DNA, 621 bp, Proteus mirabilis
atggaaaaatacagtttagaagtacaacaaggaaaaatcggcagtaacggatttgcagaaattgcagggtgggtgaaatgctatctcattgaccccattacccgtgaatacattggcgcatcaatggaaaacgtccgttttgacgtgtcgctacccgcaggcgcttatcctgatgaacctaaattaccgaaaaaagaacaccaggctatcagacgaaatgaaaacggtgatgcatgggagttagttgacgactttcgtgggttaacggcgtatatcatcgaaacaaaacaacctgttaccattgattttatgggtaagttacctgaaaccgtcacattacttgagccaagcggtgagtttgacgtgtggaacggaaaaaaatgggttgttgatgaagtagcgctaaaaaattcacaagtcaacgcggttattgcgcaaaaagaagcattatcagcagacgctgaaaatcgcattgtgcaattagagcgtaaagtccgattagacatggcttctgatgaagataagcgtttattgactgcatgggaaatttacaccgtaaaactggatgatattaatccagagttagcccctgatattgaatggccagagaaaccgcaatga

SEQ ID NO: 310292 - DNA, 1368 bp, Proteus mirabilis; identical to SEQ ID NO: 302933

SEQ ID NO: 310293 - DNA, 786 bp, Proteus mirabilis; identical to SEQ ID NO: 309821

SEQ ID NO: 310294 - DNA, 291 bp, Proteus mirabilis; identical to SEQ ID NO: 293595

SEQ ID NO: 310295 - DNA, 888 bp, Proteus mirabilis
  misc_feature (826)..(835): n is a, c, g, or t
atgacgcacaataaatggcaggcgtatagccgtttaatgcgtatagataagcctattggagcgctattattactttggccaacgtattgggcattatggatcgccgctaaaggctttcctgactggcatatcctaattgtatttactctaggtgtgttttccatgcgtgccgctgggtgtgtaataaatgactttgctgacagaaaaattgatggcaacgttgaacgaactaaaaatagaccattacctagtggtgctgtaacggagaaagagagcaagattatctttattgtcttggtgctgttttcgtttggattagtgcttacgttaaataccatgaccatttggttatctattgccgcacttgcactcgcatggttttatccttttgtaaaacgttttagtaatttgcctcaattaattttaggtatggcctttggttggtctatccctatgggatttgctgcagtttctgaaacactacctttagtatgttggttactctttttggtcaatattatctggtctgttgtgtatgacactcaatatgccatggtcgatcgcaatgatgatttaaaaataggggtgaaatcgacagccattctgtttggtcgttacgataaaatcattattggtattttacagttagtgatgttggcattattagtggcgattggcgttttgctgaatatgaaagggatctattattggtcattgttactcgtgacagccctgtttatttatcaacagaaattaattgctgaacgggaaagagccccttgttttcaagcgtttatgaataataattatgtcggttttgttttannnnnnnnnnttcaggtattttatttaattatttctaataaacatattaccagcactagctga

SEQ ID NO: 310296 - DNA, 471 bp, Proteus mirabilis
  misc_feature (455)..(464): n is a, c, g, or t
ttgtatctttatattgaaacactgaagcaacggctggatgcgattaatcaactcaggctggaacgtgcatttgcatcgatgagtgatgtgtttaaacaggtgtatggtttaattcctgttttactgcattaccaccaccctcagttgccaggctatattcaaggaaatgtccctcatggtacatgtttctttgaacctgatgacgtgcaacgtcaatgggtcaataagctgactaatgcatcatgtgatgagccaatgaatggatacaccagcggagagttacctattacgggtatctattcgatgggaagtacttcctcgattgggcaaagtcactgctccgatattgatatttgggtctgtcaccaatcttggctggaccaagatgagcgtgcgcgtttacaacgtaaatgtttactgatagaacaatgggcgggagaattaggtattgatgnnnnnnnnnngtattga

SEQ ID NO: 310297 - DNA, 792 bp, Proteus mirabilis
atggtttaccagccaaagatccaccctcattggtctaatgaacgagagcatgcatttcgtcaattagtcaccagtgaaaaatatccgggcattgtttataacggcatggatattacccaagaaaattggcaacatgcgcaaaaccgtttatccgattggatacaaacattacccccacaaacagggattattgcagtcaccgatgcaagagcgcgtcatttactgcaagtctgcgataatttaaatattaatgtgcctgaagaaataagcattatcggtattgatgacgaagatatgactcgttatttatcgcgcattgcactttcatctgttgtacaaggctcacggcaaatgggatatttagcagcaaagcttttacatcaaacattagaagggcactcaacagataaacagcaaagaatattagtcccccctgttaaaattgttgagcgtcgttcaacagatttccattcatttaacgatcctaccgttgtacaggctatgcattatatttattacaatgcttgcaaggggataaaaacggagcaagttttagatgcggttaatatgtcgcgttctaatttagaacaacgctttaaaaaggaaattggcaagacaattcacacggttatttatgaagaaaagctcaaacgggctcaaaatttattagccaccacaacacttgcgatacaagaaatatccgtgatgtgtggctatccatcactgcaatatttttactctatctttaaaaaagaatttggtatgacgccgaaagagtttagggatgagtga

SEQ ID NO: 310298 - DNA, 762 bp, Proteus mirabilis
  misc_feature (34)..(43): n is a, c, g, or t
gtgttagaatcacgacgtttattaaactattcannnnnnnnnnattcaggtgaggtgcttctgaatacgccatcacagctatcattaccactatctctgcccgatgatgagacattcgatagcttttacgcaggggaaaatgcatcactcgttgcagcgatccaaactgctattcaccaatcacatggcagttatatctatttctggtctcgtgatgggggcggaaaaagccacttgttgcatgcagcttgtgcagagctttctttagccggagatgcagttggttatgttcctcttgataaacgggcttatttcgtaccagatgtgcttgaaggtatggagcatctttcattagtttgtatcgataacgttcaatgtattgcgggtgatgaagagtgggaacttgctctgtttaatctgtataatcgcgtattagaacttggtcgcacctgtctattaatcacaggggatagacctccccgtcaaattgatttacaacttcctgatctcgcttctcgcctagattgggggcaaatttatcgcttacaaccgctaagcgatgaagaaaaaattcaagcactacaattaagagcgaaactgcgtggatttgaattacccgaagatgtaggtcgttttgtattaaagcgcttagatagaaaaatgcgcacattatttgaaatgctagatgaactcgatcacgcctctattgtggctcaacgtaagctgaccattcctttcgtaaaagatattcttaagctttaa

SEQ ID NO: 310299 - DNA, 264 bp, Proteus mirabilis
atgacttgctgttttaattccacatatcccgcaggccccattaaaaccgcattaccggagcctgccaaatcaccggaactacgcacgggtgcctttatacctaatgcaaaacaatctgcttttgaaatctctaattggctttgtggacgaaccggccctaaaacacgaactttactgatagagcctttaggcccgactaccatcacacactctttggcggcaaattgtcccggttgttttagatctttaaacggggtgatctga

SEQ ID NO: 310300 - DNA, 378 bp, Proteus mirabilis; identical to SEQ ID NO: 302944

SEQ ID NO: 310301 - DNA, 228 bp, Proteus mirabilis
atgacagaaattacagcacagaatcaaatgcgcttagagctattacggttagttggcaatgataccgcagcagctcaagcggctatcgagttcgtaaaagacgacgctctcaagtttgagttattcaaagacgcatacaaacagtgtcagactgaaagtgagtttgtatcacgatcacagaaagccgcacgagaagctcaggaagcactcgacctattcacgcaatag

SEQ ID NO: 310302 - DNA, 360 bp, Proteus mirabilis
atgaaattacataaaaaagtaaaagtccccatatacggacttaacattcatatctgcgctactgaggatgttgcaggcagtatctatggttcgggcatacataccccatcaaatatggggcaggttgttcagattgaaaatacaaaaactggcgagatgataatcctcattagctttaaagatatcgattgttttaatgccgacactatatctcatgagtcagtgcacgccgcatggaaggtgttagaaatagttggcattaaagtagactacgaaaatcatgaggcgttggcgtatctaactggttggattagtaatgagataaataagttttattacaaaattagtgctaatgattag

SEQ ID NO: 310303 - DNA, 492 bp, Proteus mirabilis
atggcagcaccaaaaggaaataggttctgggaggctagaagtagtcacggaagaaaacccatattcgagtctcctgatgatttatggaacgcttgttgtgaatacttcgagtgggttgaagataatccactgtatgaaactaaggcgtttgcattccaaggggcagtgactaaagaaacattgcctaaaatgcgagctatgacgctatcagggctttgtttgttcttggatatacatgaggacacatggcgactgtatcgagccagagaagattttatcgaggtcactacgcgagctgaaaaagttatctacgatcagaaattctcaggtgctgcagctgacttgttgaatgcaaatattattgctcgtgatttaggtctcaaagacagacaagaggtcgaggatgtaactccagataagggagaccgtgacaagcgacgctctcgaattaaggagttattcaaccgtggaaaatctggatcagatacttga

SEQ ID NO: 310304 - DNA, 588 bp, Proteus mirabilis
atgcgaagaaaattaatctttattcctaattacggcgtaagtttagcgcaacatattatccctgcggcagatttatctgaacaaatatcattagcaggaacagaagcttctggtacaggaaatatgaaatttgccctaaatggtgcattaaccatcggtacacttgatggcgcgaatattgaaattggcgaacatgttggtttcgataatatgtttatctttggccacaatgcacaagaagtggcggaattaagacaacgttattcccctcgtcgttattacgatgaagatattgagttacacactgtgcttaatcaaatcgctaatggtttctttaacccaacggatcctgataagtacaaatcaattttcgatagcttaattgaatttggcgatcattatcaggtattagccgattatcgtagttatgttgatactcaagatagtgttgatgttctctatcaagatgaagatgcttggttgagaaaatctgcgttaaatatctgccaaatgggttatttttctgcggatcgtgcggtaacagaatatatgcaacgaatttggaaagcttctgcgattacattgtaa

SEQ ID NO: 310305 - DNA, 1347 bp, Proteus mirabilis
atgaaagagttagtcgcaacacatagcacgcaattttcgactgaaatcgatcttactccccattttgcacttgagggtgatagcccttttcgtgatagacatgccacaatgccgtggcgaggctctgtacctattgcgaaaggagatcaacaatctacatggcaaacactgttaaacagtaaaacgcctgcgtgtaaacgtttgttgtatattcatatccctttttgtgcaacgcattgtacattttgtggtttctatcaaaataactatcacgaagcagcctgtaagcgttataccgacgcattactgcgtgagatatcggctgaatcagatagcttactttatcagtcagcaccaattcatgcagtttactttggcggtggaaccccttctgcattatcagcaaaagatctctatcgtgtgatcacacatttacgccaatcactccccttagcaccagattgcgaaatcacgattgaaggtcgcgttttaaattttgatgataatcgaattgatgcttgtttagatgcaggtgcaaatcgattttctattggtattcaaacctttaacagcaaaatacgtaaacgaatggcaaggacatcaaccggtgaagaagccgctaagtttatgaaaggactctgtttacgagatagagctgctgtggtgtgtgatctgttatttggattaccgggacaaaatgcgctgaattggcaagaggatctgactattgcccatgatattggcttagatggtgtcgatttatatgccttgaatttattgccaaatacaccattaggtaaagctgtcgaaaatcaacgtgtgacagtaccaacaccgatagaaaggcgagcgctttatcttcaaggttgtgattttatggataacgtgggttggcgtcagatcagtaatagtcattgggctagaacaactcgtgaacgcaatctctataatttattaattaaacaaggcgcggattgtcttgcctttggctctggtgctggtggttcagttaatggttattcttggatgattgaacgctcactcgataattattatcaaaaaatcacggataaccaaaaaccgttgatgatgatgagccgtacaacagacagcggttttcgttggcgtcatgaactacaagcgggcattgaatgtggtcgtgttgatttagccaaattaagtccgcaagcgactcagctctcccctttattaaatcaatggtatcaagcaggtcttgttgaagatgattttctttgcatgaaactgaccaatgaaggtcggttttgggcaagtaatttactgacttccttacagcaattaattttgcagttaaatactcctcgttaa

SEQ ID NO: 310306 - DNA, 2139 bp, Proteus mirabilis
atgtgcattcaatttaaatcttgcttcgtgttgtccgctttaacactctcactctctcaatatgctattgctgataatgctccacctaaagaagaaacacttgttgtgacaacaacacgtagcgcaacttctttatggaacagccctgctactatccaagttattgataaagaaacattaagccaatcaaattcatcttctattgctgaccaattacgtgatattcctggtgttgaagttacagacaatagccttgctggccgtaaacagatccgtattcgtggagaagcatcatcgcgtgtacttttattggttgatggacaagaagtaacctatcaacgaggcggtcaaaattatggtgccggtattttaattgatgaatctgcactagagcgtattgaagtggttaaaggcccctattctgtgctttatggctcacaagctattggcggtgtggtgaatttaattactcaaaaaggtggcgataagccttttgggggaaatgtcaaagtcgtttatgactcagcaacgatgggatggcgagagtctgcattaatttcaggtactgtcggtgattttgaatatcgccttaatggaagttatgccgatcatggtgatagatatactcctgatgggcgtttacctaatacgcattttagaaataacggtcaaggtgcatggttaggttataaagtggataaacataagtttggtctttcgctcgatcgttataatttatcaacacaatcttattatgctgatgaaggaaaatatcaagagtttagcgttaaagtacctaaacttgagcgtgaaaaagtcggtttattttatgactatgatgctgatacagattatttcaaaaaacttcatattgatgcctatacacaacgtatagagcgaaaatttgaaaaccgtgttggtgttgttaccccaacgggtagcccaatgattggtaatttaaccgttaaaaaccgaactcagtctgaagacactcaaaatacttatggaatgactatgcaggctaattttactttacctgcaaataatgagttaattttaggcgctcaatatcaacaagataaagtaaaacaaacgtccgctgggcagacttcttcaaatagtacaacgggttttccacctgctgttaattatgaaaaacaatctcttttgcataaccgcagtaaacaaaccaatatctctgtttttgcccaaaatgattggaaaataacagatgattggtcatggactatgggcgccagacaatattggttggaatcagaattacaagatggtgatgaaactattcaccataataaaacaggaacaagttataagacattagcttacgattctgtgaaagataacgcttttattgtgtcatctcatttgcgttattctggatttaaagatacagaattacgtctcgcgtttgcacaaggttatgttttcccgacacttgttcagcaattcatgaacacaactgctggcggtgcggtgacttacggtaatcgcgatcttgaagctgaacattctaataatgtggaatttggtgcgcgttataaagggaataattggtacatcgatagcgcgatttattattctgaagctaaagattacatcacatctatcgcttgtgcgggagaacgtatttgcgaaggaaatagtaaaactggccgcgcagattatttctattacgacaatatcgatcgcgcgaaaacttatggtatggaagtgatggctcaataccaaggttggtcaattactccttatgtttctgccaatgtgatacgtcgtcaatttattggttcaacattgaaaacatgggataccggtgaaccaacattaacttctcgtattggtgctaagcatttattactgctcaataatatgaatctaatgtcggacttatatttaagagcagcaacaaaagcgaaagatcatagtaaccccgaaaataaacagcactatgcaggttggacgacgattaatctttcattgagtacagaatttggtcataacgatcaataccgtattaacttcgatttaaataatattttaaataagcgttatcaaacggctcatgaatctattcctgccgcggggattaatgcagcagttggtctgacatgggcattttaa

SEQ ID NO: 310307 - DNA, 1380 bp, Proteus mirabilis
atgatccgagaaaataatgacctgcaacggtctggagctaataatatcgggttgcagttagctcaagggcttggtggacttggtgaaatgtacaagcaacagcaagctcaggaaagagatagagaattccaatctttgtggggtaaggcgtacgcatctggagatagagacgctatgaggcagttgatggctacatatccagatcaggctgagaaaataacctcaggtatgcagggaatatcagaggacgtcagggaatctttaggaaacatagcatctggctaccggatagctattaatagtggtaatactactgattacatccgtaaaaacgctgatgagttaagacgattaggtattgaccctcagcaggctctggcaatggcaaatgaaaacccaaaaggggctatagagttagctgaccatatcggcatgtcggcattaggccctgataagtattttgatgttcaggataaaatcgaaggtcgttctattgatagagataaactttccgagacagtgcgtagtaatcaagccagtgaagcgttgacgcgagaaggtcatcaaatacaaattagaggacaaaatatctccgctcaaaactctattagatctgctaactcttcaggaagcaagcctgcatctgtgcaagagtacgagtacatggcatcgcttacccctgagcaacgtaagcagtttttagcgttaaaaggtaggggagagagtgaattacaacaggctcagttatccaacgggcaaactgtaatgattgaccctaaagctcaaggcgcaggagattccaagtattacaagggtttcgacgctaacggtaatgtagtaaccattcctgtcaatgctttatcaagtgtgtcgtctacagcaaataatgcatcaactacacgcatgaatgaggatttatctttaatagcaaacgcgcctatttcccaattaaatgccattactggtattactggaggaacaggaacaacacctataacagctgacgcaggaactaggacggtgaataaagaggcgcgatctttatataatgccgctcaacgtatacagggtaacatgcaaaatcaaggtattagtgcagctagagagatgggggctagtgggattaatacggttgcagaagcaaaaatgttcttccagtcaatgccacagcttgattattccagccctgaagcattgcagaattcagtgaaaataattgaccaatacacgaaggcatttaattcaaggaataacgccaatctaggtgcaccatcaagccagaaaccaaagcaacaagcccctcaagcggcgattcaagcattaaagcaagatccatcattagcatctcaattcaaagctaaatacggatatctaccataa

SEQ ID NO: 310308 - DNA, 438 bp, Proteus mirabilis
  misc_feature (385)..(394): n is a, c, g, or t
atgaaaaataaatcattttatttcacgctattattattttttattgctatggatacttctgctgctcgatgtcggaatgtgtcaatcaaatataattttccagcccaaatagatattacaaataaaaaagtgggagataagctttattcttttggtgcgccagacgcccctataaacgttgctggtcaatgtctacgtgctaatagtggggcgggaaatacaaatggaaattatatttatattgttgatcaatatggatcatcaccaacattatgcccgactactggtacagttgataaaaattcaccagatggatacttgcgttttcgttcaacgggaagttgtgctaattcttcttggctgctagttcttgattataaaatannnnnnnnnnggggttggctggaccaatttaacaggtcccggtggtggtactga

SEQ ID NO: 310309 - DNA, 492 bp, Proteus mirabilis; identical to SEQ ID NO: 305263

SEQ ID NO: 310310 - DNA, 1398 bp, Proteus mirabilis; identical to SEQ ID NO: 301325

SEQ ID NO: 310311 - DNA, 1227 bp, Proteus mirabilis; identical to SEQ ID NO: 305063

SEQ ID NO: 310312 - DNA, 480 bp, Proteus mirabilis
  misc_feature (428)..(437): n is a, c, g, or t
atgataaaaacaaataatactcctcatgataataataaagaccagaagaaacagtctatcgtaaataaaatattatcagcaattactggctctatcgctccggttatccctctgttagcgggtgccggtatggggaaagtgttacttattgtattaacgatgcttggttggttggataaaaatgaccaaacctattatatccttaactttatctttaatacggccttctattttatgccggtatttattggtttctcggcggcgaaaatatttaattgtaaccaatatttagctgctatggtctgtttagcgatggtcagccctgaatggacaagcttagttaaagccggtgagcctgtcgaatttatgcatattcctgtcgctttggttaaatattcatctcaactgatccctgccttaattactgnnnnnnnnnngtgccagaaatggttaaagtatttatggtgcctttattggtga

SEQ ID NO: 310313 - DNA, 849 bp, Proteus mirabilis
atggaaagtgaacataatcaacttattgagcgagcctgccgttttattgaagaaaataacggtgacgtgtcgcttacctgtattgcagagcatgttatggcaagcccatatcatttccatcgcttatttaaatcaacgatggggatcacaccaaaagattatgctaatgcttatcgtcaaaaattaataaaaaaagcgttagttcaagatggcagtattacagatgcgatttatcaatcaggcttcaatgcgaatagccgtttctatgaaaatgcaacagcgatattaggaatgacgccaacaaattggcgtacaggtggtaagaatattgctatcttttttgctatcgctcagtgctctttgggaagtatccttgtggcgcaaagtgaaaaggggatttgtgccattatgttgggggatgatgcagagctgttattagaagatttgcaaaaacaattccctcatgctgaattaattggtgccaatgaagagtttgagcaagtcattgcacaagtcatcggttttattgaattacccaaacaacccttatctttacctcttgatatccaaggtacggtatttcagcaaaaagtttggcaggcattattagatatcccttttggtagcacgatgacttaccaagaaatcgccgacaaaattggagcacctaaggcatatcgcgctgtcgctaatgcttgtgcagctaataagctagcagttgctattccatgtcatcgtgttattcgacaaaatggtgaattatctggttatcgttggggcattgaacgtaaggctaagttgcttcagacggaggctttaaataatacccttgcgggtaaaaaagaataa

SEQ ID NO: 310314 - DNA, 336 bp, Proteus mirabilis; identical to SEQ ID NO: 302672

SEQ ID NO: 310315 - DNA, 360 bp, Proteus mirabilis
ttgcatgaattaggtcatgcactagggctagagcacatagatgcatatttgaaaaatataaaaaatagtgcaattgaaacatataaatatacagttatgggcatgggatttgctgatattaaagatgcagattttggcggtctttatcctatgacctttatgctagtagatatattattattacaatatatctatggcccaaatatgaccacacgtcttgaaaataatacctatggttttcattccaatacgggacgcgccgcttactctttaaaaagcatagaagataaattagtgagctgtatttgggatgcaggtggaattgatacattagacttttccctatataccgttaattaa

SEQ ID NO: 310316 - DNA, 198 bp, Proteus mirabilis
atgttgattggctttatattttggtacaaaggattatcacaaggtgggatcgcggcagtaggacaacttcaattattacaaccattctttggcttaggtttagccgctgtattacttcatgaatctgtcaatttattgatgttgttagtcactattggtgttattttttgtgttgctggctcaagaaaatatgcttaa

SEQ ID NO: 310317 - DNA, 390 bp, Proteus mirabilis; identical to SEQ ID NO: 299355

SEQ ID NO: 310318 - DNA, 162 bp, Proteus mirabilis
atggttgatacatcttcggttatctttggaacactagatggctctcacttcccacctaatatagatggtgattttattgtttcgtataatggtgatgaaattcagggctcattgcaggatgaattaatatctattgcagaagaaaaaggaatatataaataa

SEQ ID NO: 310319 - DNA, 372 bp, Proteus mirabilis
atgatagtaaaaaatgacattcaaaaaaatttagagtgttttttaaatagatattgtgaaattaaaaattcacattatattcccaaaaatggagatgatagagtaataggtgccgcatgggcaggtgtaggtgtaatgtctccatcaattggctctgtgctccaaactttaagtgaaaaagcagattcatttaaatgtgaatcaatcttaaaaagaaaaaatcaagttagaagagtattctttattagaaaactatcgatgttttttacagagacgtttggaacgccccttcataatataacagcaactattagtggtgtttttttaaaggaagatatttcaatagaagaagtaagatctgtaatacgctaa

SEQ ID NO: 310320 - DNA, 174 bp, Proteus mirabilis; identical to SEQ ID NO: 300220

SEQ ID NO: 310321 - DNA, 798 bp, Proteus mirabilis
ttggcgtcagatactgaattgcttgttcgtgggcgatttaatgtattaagccatatcatttgggctaaaccatcaggaccatggcgacgacaaaataaagaaagtctacgtgccttttttccttcaacagaacgaatactttttgctgaacattatcaaaagccagtcacagctaaaggcgctgaattttctttaaaatgcaaagaactaaagcaagacgtatttaaaccgctgatagattattttagaaatgcacggttagcactgcaggtgagcgcaaaagaaatagataaggcaacaggtaagcaaatgtgcagtcattggttcagcaatagccaatggcaattaccgagcgaagaagactataaaaagttacaaaccctgtttacacacattgctgataaacaagaaaaactatcaccgttatctcgtcactttagcgagttagagcgagaacaattcaccttacaaaaagattatcaagaattaataaaagaatatggtttattaaggcgtccattctttgtgactgcagatgtgccttacaccgatgtgtggacttatccccctgttcaatactatcccggcaagcacccttgtgagaaaccatcgatcatgatggaacacattattcgttctagcagtcgtgaaggtgatctggttgctgatttctttatggggtcaggtgcaacactgaaagcagcactaaaacttaatcgaaaggttttaggtgtcgagcttgagaaagagcgctttgaacaaacagagcaagaaataaaaaagctaacttgtaagtaa

SEQ ID NO: 310322 - DNA, 393 bp, Proteus mirabilis; identical to SEQ ID NO: 304083

SEQ ID NO: 310323 - DNA, 1134 bp, Proteus mirabilis
atgaagatccgctctttctttatttatactatctttctacaaacgatatctatcgtgatgttatggggcgtttggttagcttggatagaatttgattatcttgctgactttgaaactatctacaataagcaacaagaaattattgctgaaggatttgctaatacactcgaaacggtttcctctcaacccgagacagtaaaacagatagctcaccatttacaaaacatgtatatcgataccatgcttaatggtgaggatgatgatttacactatttaccttggtttattgtcttaaataaagacaatgatctgatttataccaatagaccggaactttctctgcctaaacgggtactgtcgcttgcctctgaaaaaatctctgtggctggggagaaatggtatttatcttatagttggggaaaacaacataaaattaaagtttttattggtgaatccgtcgaagatagaggacatgtcattggtaaccctatttccggtacttttgtgcccttcctatttattttagcgacggtgatcttggctatcttaattactgcttattttagtttgcgccctttaagacaagccgcagagctgatttctaaccgaaaacctcgcaatttaacgccaattaatgtcggacaacaatttaaagagatccgccctatctttaaagagcttaaccaattaatggcaagaatagatgcggctaatattagagaaaaacaatttatggctgatgcggctcatgagctaagaaccccgattgccgcagtgattgcccaattgcacattctctctttagtcgatgaaaagcaggagcgagaagaaattattgaagatatgaaacaatctctggatagagccgccgcactttcccaccagcttattgatttagcgagattagagtgtgatgatttccctataaaaatagaatcctttgatgtttataatattattggtaatgctattgctcagcgcgtgccttatgccttaacaaaaaatattgagctatctttaaatgaaggtatgtcacttaaaatagaaacagataaacaagcactactgtctatttttaataacttattggataatgcaatcaatattgccccaataatagtcaagtcgaagtga

SEQ ID NO: 310324 - DNA, 663 bp, Proteus mirabilis
atgagttttgataatgcgcaaattgaaattagagatagatttgcagaagctaactcgcttttacattttttacgcgagaatgagcctgagcctctgcaaccaacaactagtaacatgaaatcacttaaaggtctttggttggtttctatttactctgcagtagaacgttcggttaatacaataatagaatctgcacttgaggtaattattagccataataatcgaagtatagattgtattgcttccattcatagtatacttcactttaatgaaattaaatcaataaatgaatgtggaaaaaataaaatattcgataaatcaatatctttatttcaagcaaccttcagtgaaacagccttaaagataactgataatcctttagcggaaagtttgcaaaatgttgatgctaatacaatgtcttgggttctaaaactgtttggcgcgcctaatttttcagtatctcctgcgtcaataggtcgagttaatactttacgagaaaggaggaatgctgtggcacacggacgtgaaagtgcattggaagctggagagagatataccattgatgaattagcaaatatatataatgcagctgatgaagttgttacagcttttcttttaaatctaagtgctcattgtaccaataaaaattatattaaaaggtaa

SEQ ID NO: 310325 - DNA, 618 bp, Proteus mirabilis
atgaagcaatatggtttttattttgactccactaaatgcactggctgtaaaacctgtcaagtcagttgcaaggacgaaaaagatttagatttaggccctaaattccgtcgtgtttatgaatatggcggtggtagctgggcaaaacaagacggtatctggacacaaaatatttatagttattatttatcaatttcttgtaaccactgctctaaccctacttgcgtggcaggttgccctactggcgcgatgcataaacgtgaagaagacggtttagtggttgttaatcaagatgtttgtgttggatgccgttattgtgaattacgctgcccttatggcgcaccacagtttgatgaaaagaaaaaattgatgtcaaaatgtgatggttgctatgagcgtgtcgcccaaggtatgaaaccggtctgtgttgaatcttgtccacaacgtgcactggattttgatgatattgaagtgatcagagcgaaacatggtacagagtgtggtatcgcaccaatgccagatccaagcttaactaacccaaatatcgtgataaaagcacataaagatgcaaaaccttctggtgataaaaccggctcagttcaaaatgcggcggaggtataa

SEQ ID NO: 310326 - DNA, 363 bp, Proteus mirabilis
atgagtaagggaatagggataaataaaaaggaaattactcacggaaagtatggctgtaaatgtgcttactgtggaacgcatctctcaatcaatgaaatgcatatagatcatgttgtaccaaaaaagttaggcggtaaaaacaatataaagaatttaaacccatcctgtcagagctgtaattcaactaagggagcaaaaagcttagaggattacagaattcacttaatgataaaaaaatctaagttctccggtgttatcaacgtctcacaatggagagacctttgtcgattaggtgtgtcaattcaattaccaagtcattcattttattttgaggagattaattatgagcagaatagctactga

SEQ ID NO: 310327 - DNA, 3897 bp, Proteus mirabilis
gtggcactatcatctgcgatgctctacaaagagatagagcaactctcgttgcgggatcagcaacgattgagaaaacgcttacgtggcgttgataaaataagtaaagaaacgtcgaaacaggcggtattaagcgagattgagcaggatattattgtcgcaaaacagcgtatattaaatcgacaaattcactgtcctaaaattgtttatccagaaaacttgcctgttagccagaaaaaagaggctatctacaatgcaatcaaagataaccaagtggttattattgcaggggaaacggggtcgggtaaaacaactcagatcccgaaaatttgtctcgaattagggcgaggcgtaaaaggttatattgggcatacgcagcctcgacgtttagctgcacgctctgtcgcagagcgaattgcccatgaattaaatacaacattaggtgagtctgtcggttataaagttcgttttagtgatcatgttggtgataacacgctagttaagttaatgactgacgggattttattagctgaactacaacaagataagttgttattacaatatgatactattattatcgatgaagcccatgaacgtagcttaaatattgactttattcttggttatttaaagcagcttttacccaaacgcccagatttaaaagtgattattacttctgccactatcgatcccgagcgtttttctaagcattttaatcaagctcctattattgaggtatctggccgaacttatccggttgaagtgcgctatcgtcctattggtggtgacgctttggatagtgataaggatatgactgagggcattattgatgcgattgacgagttaagtcgagaaagtgcgggtgatattcttatttttatgagcggtgagcgtgagataagggataccgcagaggcattaaataaattacaactgcgtcataccgaagttttacccctatttgctcgtctttctaatagtgagcaaaaccggatatttcagcctcataccggaagacgcatcatattagcaaccaatgttgccgaaacctctcttacggtaccgggcattaaatatgtgattgatacgggttatgcacgtattagtcgatatagttatcgaaccaaagttcagcgcttacccatagagcctatctctcaagcttctgcggatcagagaaaagggcgttgcggtcgtgtttctgatggtatttgtattcgtctttattctgaagatgattttatttcccgtgcgcaatttaccgatcctgaaatactaagaaccaatcttgcttcggttattttacaaatgacctcgataggattaggggatattagcggatttccttttgtacaagcgcccgataaacgcaatatacaagatggtgtacgcttattagaagagctgggtgccttacaagagggtactgataataaaggtgcttatcgtttgacgccgatggggaaacaattagctcagcttcctatcgatccaagattagcgagaatggttcttgaagcgcgcaaatatggtgcagttagagaattaatggtgatcacatcggcgctttctattcaagatcctcgtgaaagaccgatggataagcaacaagcatcagatgaaaaacatcgtcgtttccaagataaagattcagattttctttcattactcaatttatgggactatttaaaaactcagcagaaagagttgagtcactctcagtttcggaaacactgtcgccaagagtttttaaactttatgcgagttagagaatggcaagatgtctatacgcaactacgccaagttgtgaaggaattaggttttccaattaatagccaaccggccgattttaaaagtattcatgtggctttattaagtgggctattatcacatatcggacaaaaagatagcgataagcaagagtttactggcgcgagaaatgcgcgttttgctatttatcccggctctgggttatttaaaaaaccgcccaaatggaccatggtggcagaattagtcgaaacatcacggttatgggggcgcattgctgcacgtattgaagcggaatggattgaacctatcgccacccacctagttaaacaccactatagtgagcctcattggtcaaaagcgcagggtgcggtaatggctaatgaaaaagtcaccttatatggtttacctattgtggcctcgcgattagtaaattatggcaaaatcgatccactattatgtcgagagctatttattcgccatgcgttggtagagggcgattggcaaactcggcatgcttttttccgtgaaaatttaaaattacgtactgaggttgaagagttagagcataaatcacgtcgtcgcgatattttggtagatgatgaaacgctgtttacattctacgatcaacgaataccacaagatgttatctctacccgccattttgataaatggtggaaaatagcgcaaaagaattcacctgatttgctgagctttgaaaaaagcatgcttatcaaagaagatgctaaacgtgttagtgcattagattatccaaattattggcatcaagataatttaaaattacgcttaacttatcagtttgagccaggtacagcagcagatggcgtcactgtccatattccattaccgattttaaatcaggttaaagatgaaggttttgattggcaaattccgggtattcgtcatgaattagttgttgccttaataaaatcattacctaaacctatacgtcgtaattttgttcctgcgcctaactacgcttcagcttttttagaacgagtggttacccctgaaggtgaattactcgataaattagaaaaagagctacgtagaatgactggcgttacggtcgaacgtgacagttggcaacttgagcaagtggccgatcacttaaaaatgacttttcgagttgttggtgacaacaataaaacccttgctgaaggaaaagatcttaatcagttaaaagcacgtttaaaggacaaagttcaagaaacattatcagcggtagcagatgatggtattgagcagcaagatttacatatttggagttttggtgacttgccacaacgctacgaacaaaagcgtggtagctattcagttaaagcctatccggcattagtggatgaaaagaatagtgttggtatcaagctatttgaaacagaaacagagcaacaagcggcaatgtggcaggggataagacggttattactacttaatattccttcacccattaaatacttgcatgaaaaattgcctaataaagcaaaattaggtctttattttaatccttatggcaaggtgttagatctgattgatgactgtattgcttgtggggttgataaacttattgcttcttatgggggattaatatggcaagaagagcaataccaaaaacttcaagattatgtccgtgctgaattaaacgatgttgttgtcgaaattgctaaacaagttgaatctattttaactcaggtatttgcgattaataaacgcttaaaagggcgggttgatattagtgttgcttttgcattgtctgatattaaagcacaacttaatcaattagttttccccggatttgtcacatcccatggttggaaacgtcttgcggatattcctcgctatctcagtgctattgaaaaacgtatggagaaattagcgattgatcctaaccgtgatagagcacaaatgagccgagttgaaaatgtcattttgcagtggcaacagtggttagctaagttaaccgagaagcaaaaacagcaagaagaggtacaaaatattcgttggatgatagaggaattaagagtgagtttatttgctcaacagataggaacgccttatcccatctctgataaacgcatcttacaagctattgagtctatctcattaagttaa

SEQ ID NO: 310328 - DNA, 2412 bp, Proteus mirabilis
atgatggcagcagcttctcgtcaagagtcagtcgccacgctgcaatcagcgaaagccagcgagtatgctgcaaatatgtcggtcagaaaggcccaggcagatttagcttctgccagatcggccgttgctctcgctcaagcagagtataacgttgcgaagggaactttagcggaagcaactgcacttgataacttaattgctaaaaaaacattggcttcaaaagctgcaataacattaactcaagcaacccaagcgcaaacggcagcaatggcaaactcagcagcggcggcaaggtcagcgtcattgtccatgggtttattgcgtggagctatgggaatgttaggcggtcctgctggtgtggctatgttagctggtgctgctatatattacttttatcaacagtcaaaagaagctagagaagaatcaaataagtttgctgacgacataagaggtcttactgaggagtataaaaaattctctagagcagcaaaagaagcggctatagttgaggctaaaaaacacttagaagtcgctgatgaagaagctgcaaaacttaagtacacgatcagtttgattgaaaaagagattaaagaattaaatgatggatttgatttatttggggtaaatgctgataagtcagctaaatttacagaccaactaaaaacagctgttgctaatttagaaaagcaagaggaaagaaggggtaatattctctataaaatagagatgatgcagtctgatttaaatggaacattaaaacaaggagcagatcttctgcagagagagtcatccatattgccaaacgctaaagatgcttggaatgcttatggtttctctatcgagcgtgcaaccagacaaaagaaagaatttaatgcacaaagcttaataatggagtggtcagacaaaggtcttgacttgagaaaatctctagagagagaagctaaattagctaacgcaaaaagtgagattgacaaaagaaagctacaagttgagttttacgcagaagataatggattgtcagagcaagaggtagcatcattaaatcaatatgctatagctgcacaagaagctcaagacgctgcagccgaacgtaacaaaacgaccaaggaatcaaccaaagccacagatgctgcttatgaagcactaaagcgccagagagaagaaattgagcttttaaacaaaggttataaagacggatctcttgaaatggctaagtatgatgcggttaaagcgttgggtgatacggcatctcctaagcagattgaattagctgagaaactcgcagaagaaaaatacaacattgagcgtaatctagctgataagaaagccgcgcttgatcttgatttggttgctaaggctaaagagtctcacgataagcagttggcagacttagagcggataacaaaagatgatgtatctctcactgaacaggcagcaaggcgtaaagctgaaattgaggcggaatatcagcaaaaaatagccgaaataaaggctaataacgctgtctcaccgcaagataatttaaaagcacaagtagaccctgttcagcaactcaaaaacgaacacgaacgtaaacttgcacttattcgtgagttcgaaacagaaaaaggcgctatcactcagcgtggcttagagttaatgaatgccgctaatactcaatatgagcaagaccggttaaatgctcaatgggagatatggcgcaatcagagccaagccaatcaattcttagctgatgggttggacgcattaggacaacgctctactaacgtactcacagggctattaactcaaacacaatcccttaacgatgctttccgtagtgtcgcattaaccatcgtagaccaagccgttggcgctctggttcaaatgggtatgcaacaggttaagaatatggttactgaaagtgccatgcgtaaggcttccaatgctcaagctatagcggaggctacaactactggcgccgcaattacaaatgctatggctccggcggcagcaacaaccagtattgccactatgggctctgccgccacatggggtatggcagcaatggcagcagctattcccgctatgattgcgcttgctggtgctcgtaaaaatggtggacccgtaaatgctggctctatgtatcgagtgggtgaaggtggtaagcctgagatattcaaagcatctaacggtagtcagtacatgataccgggtgataatggtcgagttattagtaatcgacaaatgggtaaaggtggtaatggtgtcagcatgggtgatatgcactttacattccaggttcaagcacctaatggcatcactcaaaaggaagcacaacagatacagcaaatggtgagaggtacggtttatgacgtacttggtaacgaaatgcgtagcggtggtgctttggaaaaagtaagaagttggtaa

SEQ ID NO: 310329 - DNA, 612 bp, Proteus mirabilis
ttgcctggttcaggtgttgatttatctcgctttacattatcattatcagaatataaacataaatttagatttctattagtggcaagaatgctttatgaaaaagggattactttttatgttaaagctgcacgtatcttaaaagaaagatatggcgataaagttgaattttgtcttttaggatttgttggtgtaaataatccttcagcaatcacacataaacaaatgaataactgggtggcagagggaattattaattatttaggtacatctgataccgtagaaaatgaattagcccaagcagattgtatagtgctaccttctttttaccgagaaggagtgccaaaaacattactagaagctggagctatgggaaaacccataatcactactgataatgttggttgtcgagaaacagttactcatggttttaatggatatatatgtcaacctaagtctgtatcaagcttagttgatgccatggatagatttattaacttaccctatgaaaaaaaactaaaaatgggtcaaaatagtaggcagaaaatcgaaactgaatttgatgaaagaatagtcataaaaaaatatttagatgcgttaaaagaaattatgtaa

SEQ ID NO: 310330 - DNA, 1167 bp, Proteus mirabilis
atgaaaatcaccatctcaggaaccggctatgtcggtctatctaacgggatactcctttcccagcacaacaaagttgttgcattagatatcaataaagaaaaagtcgaactattaaacaaaaaaatctctcctatctctgataaagaaattgaagagtttttagctactaaagaactcgactttacagcaactttagataaagaattcgcttataaagatgctgaatttgttatcattgccactcctaccgattatgatcctaaaactaactacttcaacacctcttctgtggagtcggttattcgtgatgttttagaatataatccaaacactactatgattataaaatcaaccattccagttggttttactaaacagatgagagaaaaatatcataccgataatattatcttctctcctgagttcttacgtgaaggtcgcgccctttacgataacctctacccatcacgtattgtgattggtgagcaatctgcaagagcagagaaatttgctgagcttttacaacaaggggcattaaaaaaagatattgatgttctttttactgattctacagaagcagaagccattaagttatttgctaatacttatctcgcactgcgtgttgcttattttaatgaactcgatagctacgcccaagcttacaatttaaatgcaagacaaattattgaaggtgtctgtttagatccacgtattggtaatcactataacaatccatcgtttggttatggtggctactgcttaccaaaagatactaaacaactattagccaactacgaatcagtgcctaataatattattggcgccattgtggaagctaaccgcactcgtaaagactttattgctgattctattatcgctaaatcaccgaagattgttggtgtttatcgtttaattatgaaatcaggctctgataatttccgctcctcttcaattcaaggcattatgaagcgtattaaagcaaaaggtattgaagtggtaatttatgagccagaaatgaaagaagagactttctttaactcaaaattaattcataatttagatgagtttaaagccatgtctgatgtcattattaccaatagaatggcttcagcactaaacgatgttgaagaaaaagtttatactcgagacctctttggtaacgattaa

SEQ ID NO: 310331 - DNA, 243 bp, Proteus mirabilis; identical to SEQ ID NO: 297991

SEQ ID NO: 310332 - DNA, 246 bp, Proteus mirabilis
atgggaaaaatgacattcgtagttgagtatgaagatggcaaggagccgtctataaatgcaggagtggatattttaggtggtcgattaacagccgtggcattctatgattaccgtgatgatttgcttactcaggatgaggctcaagctgtaaataattccattgaatttactgtactgcgagactactgcgaagagtttgaagttgatttcgacgaagttgtcgctaagttagaatcgccactctag

SEQ ID NO: 310333 - DNA, 189 bp, Proteus mirabilis; identical to SEQ ID NO: 309967

SEQ ID NO: 310334 - DNA, 747 bp, Proteus mirabilis
ttgaaatcaggaatagacaatttacaacaaagtaaagcattgttagaccgagaaatttctatcactaagccaatagttgcacaaggtgcaatgtctgctgtggaattattaagaatggagaggcaatcagccgatattcaattacaaatagatgaaaagaaaaataaatatttaactgaagctggggctgaattagttaaaacagaagcggaattagctcaagcaagggaaaatatggctgggcgagctgatcctgttgaacgtgctttaatacgtgcaccattaagaggtattgtgaaaaatatccgtattaatacagttggtggagtaatttcagcagggcaggatataatggaaattgttcctttagaagatcagttattagttgaagcttatattagtcctcgagatgtggcctatgtacgtgctggtatgcctgcattagtaaaattgactgcttatgattatgcgatttatggtgggttagaaggcgtcgtgactttggtaagcccagatacattgcatgatcaaaaaagacctagtgatttaaaacttaatcaagatgaagctttttatcgcgtattggtcacaactcaaagtagtcatcttacggataaaaatggaaaagagcttcctgttattccgggtatgatcgccagtgttgatattaaaacaggtgagaaaacggttttccaatatttgatcaaacctataacaagaatgaagcaggcattacaagagcggtaa

SEQ ID NO: 310335 - DNA, 132 bp, Proteus mirabilis
atgaaaaatatcacccgttttattgagaataatgagaagaaagaatttatatatgacggtggtatggtgtgtgaattaagtagtcaaaattggaatataaacatattagaattaaatggggaagttgtataa

SEQ ID NO: 310336 - DNA, 168 bp, Proteus mirabilis
atgagcgaatctttaaaaatattaaataacatccgtactcttcgtgcacaggcaagagaaacttctttagaaactttagaagaaatgcttgagaaacttgaagtcgttgttaatgaacgccgcgaagaagaacaagcaatgcaagctgaaattacaaaaataccgtga

SEQ ID NO: 310337 - DNA, 273 bp, Proteus mirabilis
atgaacgccgcgaagaagaacaagcaatgcaagctgaaattacaaaaataccgtgagctattaattgccgatggtattgatccaactgacctgcttgaagctgctggcgcaagcaaaactggtcgtgctaaacgtgcagcacgtcctgctaaatattcatacgttgatgataatggtgaaactaaaacttggacaggccaaggccgtacaccagctgtaatcaaacgtgcaattgaagaagaaggcaaatctttagaagatttcctcatctaa

SEQ ID NO: 310338 - DNA, 261 bp, Proteus mirabilis; identical to SEQ ID NO: 294452

SEQ ID NO: 310339 - DNA, 261 bp, Proteus mirabilis
atgtctgctaaaaacggacaattttttattcgagaagcattaattgataaagctatgatcagaaaactcgcgttatcagaggctattacttccaataattattctcccgaaaagtcaggttttattcttgatgtgaaaaataacaaattagaaatatatggtggtaatgggggaacaacattaaccaatcaaaatttatatgtaaaagacgaaactgggtataacgttgttattattggtgatatcacaaatgagcgataa

SEQ ID NO: 310340 - DNA, 195 bp, Proteus mirabilis; identical to SEQ ID NO: 298995

SEQ ID NO: 310341 - DNA, 444 bp, Proteus mirabilis
gtgattgctaatccagaatatcgtgagaaatttaaacaatgcttaattgccgcaggtattcataatcctggttacttctctgtccctgctttcttacaagcttataccttacaaggtcaacaatggatcaaggagcttaaacattaccttgctgaaaacaggcagtgggtaaaagagcaatgtgcacgttattttcctgattgggttatcactcaaagccatggcacctacatgctatggatcaattatcaaaaaatgcagttaaccgaacaacaattaaagcattggtttgtttcattagccgaagtagaaatgagttggggaagcggttttggtgcggctggggatggttttttccgcattaatattgctacacctcgttcaatattagaaaccgtttttactcggcttattcgtacctcacctcacgccagtttggaataa

SEQ ID NO: 310342 - DNA, 903 bp, Proteus mirabilis
atggctgaaaataacgtaacaccggtcattagtgcaccggtgccaatgaccccctttcaagagttttggcactatttcaaacaaaataaaggggcggttgttggcttaatttatattgtcattatgctgttgatagcggcccttgcaggcgttttagcgcctcatgcacccaatgagcagtttcgtgagtttcttctaacgcccccagtatggcaagaaggaggaagctggagttttattttaggtactgatgatgttgggcgggatattctctctcgcttaatgtatggtgcgcgcctttcattactcgttggttgcattgtcgttatactttcactgattttaggcattattttaggtttaatggccggctattttggtggcatcgttgatatcgccattatgcgcgtagtcgatattatgctggcattacccagtcttttattagcattagtgttagtggctatttttgggccttcgattattaatgcttcaatcgctttaacctttgttgccctacctcattatgttcgactgacgcgtgcggcagtgttaacagaaattaaccgtgattatgttgtggcgtctcgtgttgcgggagcaggctctatacgccaaatgtttatcaatatcttgcctaactgccttgctcctttaattgtgcaagcctctttaggtttttctaatgccatcttagatatggctgccttaggttttttgggaatgggcgcacagccaccgaccccagaatggggaaccatgttatctgatgtattgcaatttacccaaagtgcatggtgggtagtgacttttccggggttagctattttgttgacggttttagcctttaacttaatgggtgacggtctacgagatgcactcgatccaaaattaaagcagtaa

SEQ ID NO: 310343 - DNA, 171 bp, Proteus mirabilis
atgtcatttttaaaaaaactaccgggaattctgttttgtgcactaattggtgggttattaacattatctggtctaccgatggcgttgatgtttgggccaatcgtcgtggttattattgcttatcgttttaaatggcagctctctgttcctaagcatacactcatacactga

SEQ ID NO: 310344 - DNA, 597 bp, Proteus mirabilis
atgctaacattaaccttaattagatgttctcaatggttttctcaatatagtttaattatcctgctgtttatattaataatttcttatagctattacactattaaacaccatagtgctaaatttcgcgacattgaacaacgatgttggcttaatcttccttacttgggggtcttattaagatatcaccagctacatattatttttcagataatgacgattacacaacaagctggattaccactgttacaggggttaaaaattattacagagcaattaacgcattcactgtatcaacgagcactcactgatatgatagcgcatattactcaaggcaaatcacttagctcatttatgcgacataatcctctattcccgccaatctgttatcaattgatctcttcagcagaaaattctggacaactactgtttttttgccagcaacttacccactggttttatcatcaattagaagaacgtcttgatagtgtaaaaacatggcttgagcctattttaatggcactgatcgcattgattactggcacgcttattattgcgatgtatcttccggtgttacaactaggtgataccatacattga

SEQ ID NO: 310345 - DNA, 399 bp, Proteus mirabilis; identical to SEQ ID NO: 306761

SEQ ID NO: 310346 - DNA, 1101 bp, Proteus mirabilis; identical to SEQ ID NO: 302906

SEQ ID NO: 310347 - DNA, 1050 bp, Proteus mirabilis
atgataatttctaaacagcagttacaccaattaatcaaaaataagttacataatgcaggactgaatgaaaaccatgcagacattgttgccgatgtattagttcatgctgatgtgaaaggaattcattcccatggtgctgtacgtgtggaatattatgctgagcgcattagtaagggaggaacaaatacgcatcctaagtttacttatcaagagacaggaccttgtagtgcgatttttgatggtgataatggtgctggacatgttgctgctaagcaggccatggagcacgcgattaatatggcacaagagaaaggcattgctgttgttggggttagacgcattggtcatagtggggcgttatcctactttgtagaacaagcctctgcatcaggaatgattggtatttcactttgccaatcggatcctatggtagtgccatttggtggctctgaagtttattatggcactaatcctatcgctttttcagccccgagtgcagatgataaacctattacctttgatatggcgacgacggtgcaggcatggggtaaaattctcgatgcgcgagctaaacatagtgccattcctgacacatgggcggtagatgaagcgggcaaaccaacctgtgatccctttgcagtaaaaggtttattacctattgcggggccaaaaggctatggcttgatgatgatggtcgatgtattgtccggtattttattaggattaccctttggtaaacatgttagctctatgtatcatgatttgacacaaggtcgtgaattaggccagctccacattgtgattaatccagccttcttcacggatgctgatttatttaaaaaacacatttctcaagtaatggctgagttaaagagtattaagcctgcagtcggttttgaacaggtattatatcctggggaaaatagtcagcttgcagcgcagcgaagcgaaaaagaggggatagaaatcgttgacgaaatttatcattacttaaattctgatgtactatttaatcaatcttatgataataaaaacccatttgctagctaa

SEQ ID NO: 310348 - DNA, 543 bp, Proteus mirabilis
atgagttctataaaatcacctataattatctctatcacctcaattgcaggtggcggcaaaacagcactttctcattatataagagaaaagcttccatcaagcaaatgccttcattttgatgatttcgactgccctacagcacctgaagatctcgatgagtggatagaacaaggtggtaattatagcgaatgggatataaagccatttgttgaacaagttaatcagacaatagaagagtctcaatatactcatatcattttggattatccttttgccagatctcacccagcgctacaacagatgatcgactatgctttttttattgatacaccactagatatcgcattagcaagaagaatattgcgtgattataaagagaaaagtggaaatgatattattcattatttagaagagtacttaatctactcacgaccctcatatacagcaatgacggaaagagaaaagctaagtgctgacattattattgatggtaacgcatctgtgtctttaattgcacagaatatcctaaagtatattgtttaa

SEQ ID NO: 310349 - DNA, 501 bp, Proteus mirabilis
atggaagatttttttcgagagtatataaacataggacttattaattgcgctcgtgttctgtgtgtgacctcggactatgataataatctaatgtgggcccattatgcggatgagcatcgaggttgtgtacttgaatttgaaaatgtatataaagaggctccagatagacttcatcaaggacttttcttttcaaaaaaatccgcatggcaatatgaaaaagaatatagattattatttagtgaaaattttggtgtaattcaaggtagcattaactgtcaaacaaatgaaaaaacatgggctgtcagtgggcaatccgatcaattatatactgatgtagagtttgctccagattcattactttcaattacttttggagttagaactcaggctgctatagttgatgaaattatatctattgcacgtagtaagaaccctctatgcacgttctatcagatgataagatctggaggatctacagtacgtcagcgcatgcaaatttag

SEQ ID NO: 310350 - DNA, 177 bp, Proteus mirabilis
atggttaagccttttatacttggcataactaacttggaatcaattgaaattgcaactgctttaaaagaatatgaagttgaacagtgtgtggtaggtgagctattattggaaaaaatgaagaaagtcaaattcttgattgcacttcgggagaaaattatgagctcagtacttcgatag

SEQ ID NO: 310351 - DNA, 276 bp, Proteus mirabilis
atgtatgcggcgcaaggttatgcttcggggggctttgtgggggcggtcgcagggcgaatacccgttacaccacaaccaacgttagcccgtgcgggtggtgtacaaatgacggtcgttaatcatattacggtgacaggaaatggtgacgctgtacttgcgcaggcaatgaaagaagctgcacaacaagggacagaagctggtgcacagaaagctcacgcgatgatgttacaagactttcaaagtaatggcgcagcacgtagaacattaggagtttaa

SEQ ID NO: 310352 - DNA, 438 bp, Proteus mirabilis; identical to SEQ ID NO: 309057

SEQ ID NO: 310353 - DNA, 843 bp, Proteus mirabilis
atgtataaaaaatttaagttaaaaagttcagtgcttaatatatttaaccatgtgatcagtgcagacatacctgatagtcatctggtttatgcaaataaaccaagcgacaaaattaaacaagccatctatgaaactgcaaatggtgatatatcttcagaagccttaattgattttttgttcccagaagaaaaaacgcctcatattttcatatctcacagtagtaaagatatgaaactcgctatcaggcttgcaaacaaaatttataatgaatctgggataatttcatttattgactctcaagtttggaatcatatagatttagcaattgacacgatgcacaaggattactgccgcatacctgatacaaagtcatactactacactaaatcaaatattttactaagtaacctttactctcttttatctatgtcgcttatggacgtaatggatcgctctgattcagttatatttatagagtcacaaaactctactattgataagatcatggatagtgataaatggaatacaggtgaagacctttcatctagtgaagccacatactcaccatggatttattctgaaattaactacgcaaataagctaagaataaattaccataaagatcgaacatcaatgatgttagaatctgtagagaaaagagcaggattagaattgcatgcaaatgatgcgatgcctaaatttagacacccaatagatataagcgaatttgatgagataactctaagctctctttgtaacgccatggaacaatttaaaaacagacacaacccgataaaaaacttagacttattgtataagcttatttccgacgataataagtag

SEQ ID NO: 310354 - DNA, 423 bp, Proteus mirabilis
atggaatctaacgaaaaaatagccgcattacagatactgcagaatatcattgacagaatggcaagtaactctctgcaaatgaagaaatggtcgatcactattgtcattggtttaataggcgtctctattacctctaaaggcatatcacacaagttattattctgcttacttccgttttttgtggtagtgccattctctattcttgatattttttacttaaaaaaggaacggagttttacctctgcatacaatacgatcagtgatttaaacaaaggtaatccattaaatataaataaatatacagatagtaaaaaagacacagatagtgaaaaaaacacagaaaccatgtggtcaatttggcttttttacataccacttgtgttaatatcaaccattactatatgggtatctttgtatgtataa

SEQ ID NO: 310355 - DNA, 174 bp, Proteus mirabilis
atgagtcaaaataccaatagaatatcaccatacccgctaagaatgcctaacgaggttagagagtggtatgagatggaggctggtagtaacgcaagatctttaaatgcagagatagtaaaaatattaacggatagaaaaaacagagtagaagggcaaaggaaaaatgctcaataa

SEQ ID NO: 310356 - DNA, 354 bp, Proteus mirabilis
atgaataaatacaccgaactatctgacttcgagattaataaaaaggttgctgacttaattggcgccactccatttccattcggatcaacagattatcgtcgctccgctgtttctggttgtgaaagtgcaataattattagatcacctcgcaaggttggctcatttgatgcctgcaacaacccatccgatgccatgccgattattattgagaatgaaatatcgatgattaaaagctcaggtggctggatgtgctgccatggttcagttggtcaggttgagcgtgaaagcttataccgtggcgctatggaactattcttaatgatgaaggatgctgaacgtgaaaccaatacttga

SEQ ID NO: 310357 - DNA, 162 bp, Proteus mirabilis
atgaatgataaatataaagctgaactaattaacggcaaaccagttattttattaaatggaaatatgattgaaaaaggatttatttcaattatagatgcggaaaaaagagctaatagcttaaactctaaattcaaagtagcccacacatataaaactaaataa

SEQ ID NO: 310358 - DNA, 264 bp, Proteus mirabilis
atggataaatcaagacagcagtttgaagcttggtttaaaaaagaatatccgttaattgaatctcagccagaaaatactttacttcaagcggtgaagcgtcaatgccttagagcttggcaaacatcacgcgagagattggaggttgaattgccaaatttaggtgacgttatattggatgattatttcatagatggtttcaatgatgcaatttcagaagtagagaaaatactaatcagcaacggagtgaaaataaaaaatgaatga

SEQ ID NO: 310359 - DNA, 270 bp, Proteus mirabilis
atgaaaaagaaaaaactaagtgaaaaacagaaaaataagatagatgaagaaattgccaacataacgcccaaaaatagaacggaagcaaaaatacagcttgctgcaaaactaagaatagaaaagaggaaaagaagtaaagaaagaagaaactctccgccaccaatagaggtgctcaatgctatgagattcgagcaaggaatggttccatcgttcgatatagccagagtagaaacaactactaaaaaatggaggggtaaaggagcaaattag

SEQ ID NO: 310360 - DNA, 336 bp, Proteus mirabilis
atgaacattaaacaattacagcaacaaattcatcagcaaaataaagatgcaggatggtgggataatccacgcgaaaaagggacattactttgccttattcactcagaaatcagtgaggcaatggagggcgaacgtaaggatttaatggacgatcacttaccacatcgaaaaatggcagaggttgaacttgctgatgctgtcatccgtattttggattatgcagaagcctttggttatgacattgaaggcgcaataactgaaaaactagaatacaacaagcatcgagcagaccatcaacgggaaaatcgcacaaaggaaggcggtaagcagttttaa

SEQ ID NO: 310361 - DNA, 195 bp, Proteus mirabilis
atgaaaggaacagaaattaaaaaattgatgtggatttattctgatgaaaggatgagacgtaaacgaagatatgtgaaagctggaaaacaagcggacgattggaatcgtaagttatataagccatatcgtagtgagcgagttatgaatcgattgttacgattaaattcattgaaacttgtgagtttttttaattga

SEQ ID NO: 310362 - DNA, 153 bp, Proteus mirabilis
atgaaactgatttctctgcctcatgttgaagagttaattgcgccaattttctatactgtaccattacagttactttcttatcatgtggcgttaattaaagggactgatgtcgatcagcctcgaaacttggctaaatcagtgactgttgagtaa

SEQ ID NO: 310363 - DNA, 318 bp, Proteus mirabilis
  misc_feature (11)..(20): n is a, c, g, or t
gtgctaaaacnnnnnnnnnntgctaaaacagggggcatttccggtagtttagggcttgctgaagataccgccgatgcggctatttcttgccaacaagtagggccaatcgaattaagcgaaaaagtcttaaaaggtaaaaatcgtggtgatgttgtttttcaaaaaagaacgtcactggtctttaaaaagctacaagtggtgcgtttttacgataaaaaccgccatgcactgatatatcttacttactctgataaggttatcgatggctcaccgaaaaatgccattagtgcagtacccatcatgccatggaaagagtaa

SEQ ID NO: 310364 - DNA, 333 bp, Proteus mirabilis
atgttattaaatgagcatcattctattgtttctttagaagatgtggggtcttttagtgctgcttattataagaatacagagttagaagatttaattacttatgaaggtactgatttaaatagtgtattaaatctagtctcaaaaacttattcggtcgctattgcgcctagatggttagttgaaagctattcagaacaattgaacattaaggcgatatcattaccttgggagaaggtagaacgtccatgctatttaatttggcatgagtcaacggcgcgagataaaggccatttatggatgaaaaatttacttagtgaggtttgtcaaaactaa

SEQ ID NO: 310365 - DNA, 633 bp, Proteus mirabilis
  misc_feature (540)..(549): n is a, c, g, or t
atgacggattacacatcagcaacaacgaccaataaagagtcagcagatatgcatttacgtaatgttgatcttaatttattaacggtgtttgatgctgttatgcaaatgcaaaatgtcacacgagcagcacaggtgttaggtatgtctcaaccggcagtcagtaatgcagtttctcgtcttaagatcatgtttaatgacgagttatttgttcggtatggccgaggtattcaaccaacattaagagccaaacagttatttggccctgttcgacaagcattacaattagtccataatgaattgccaggggcgggatttgaaccggaacaaagtgatcgtgtgtttagcttatctatttgcagtccattagatatcaagttagcgccaaaaattgtagagagaataaaaaataaaacccctaatattaatgtaaatattaagtcttatttgaatagtaatattgaacaccaattaaaatatcaggaagttgagttctttattaattataaacaatttgataaaccagagtttcattcacacccnnnnnnnnnnctttattcaatgatgaagtggttttggctgtctctaaccaacacccacgaattaaagaaagcgttactgaagagatgttattaa

SEQ ID NO: 310366 - DNA, 189 bp, Proteus mirabilis
atgtctacgatgatgggttgtcttgataacactaaaaaacccgcctttgttcaagctaatatggggcaagcggcatttatccgctataacagcaaattacctattgttgtctatgcaccaaaagatgtagatgtgaaatatcgtgtgtggtctacttctgacgaagttaaagattcaacaaagaaataa

SEQ ID NO: 310367 - DNA, 525 bp, Proteus mirabilis
ttgacaatagaaaaattagactcaccacttgaaaatgggaaaattattccggttactgatcccaatgaaattttatcaacaccggctaatctgattcttcccggtcatgcaagtgatgtatttaaaatcatttatcaagggcctaaggatgataaagagcgttattatcgattaaattggaaagatgatcctattgctgaaaatggtataacacaaagctcaaaatcagcgacagcaacaacatctgcaactattagtacaattttagtggttgcacccagaattgagaattttaattatcagtatcatgataataaagtttctaatatcggtaatagttcatttcgtgttgtggcttcaggcccttgtctagcagaaaaacaacaatatggtgtggaggggatgtgtcgcgagcgttattaccttatgccacatttagccgttaaattacaacttgtcgatctcacaaataaaaaatctagcgtaggcatttggcacaaaggagagttcattgttgtcaaataa

SEQ ID NO: 310368 - DNA, 267 bp, Proteus mirabilis
atggttaatattcttttattaaaaaaaataaaagataattatgttccttggatagaagattctcatttttctattgctttaagtacagttaagatttctaaaaagaaatatgctgataaattagtatcagtaccccaagaggtaattgatacaattaataagcaatatccacaggcacgatatttacaattgtggataccagatgaagatcagtattatcaatatgatcatttaatcggtttttgtgaaagacaggaattgtcatga

SEQ ID NO: 310369 - DNA, 270 bp, Proteus mirabilis
ttgatccttgattataatattaacaccaatgttaatatccctcatgaaggaagcaatacgcaaagtatttattacaatggtactgttggttataacttcggtagctggcgtattcgttctgattatcaagggaattataatcgaacctctggtgatgcggaaaacaataaagatttattaaattttactcgagtttatggatatcgcgcgatccgcagtttaaagtctaacctaaccatcggtgaaaactttataaactccaatatttaa

SEQ ID NO: 310370 - DNA, 516 bp, Proteus mirabilis
gtggatgatacacccggcatgtccttacaacacattcgttctgaaagtcggagaattaagcgcaaagtcggtgatattgggttcattggtgtcgattacctcacgctgatgcaagcgggaaaagctgaccgtaatgacattgcctatggtgaaatcactaaggggctaaaaatattagcaaaagagctcaatacggtggttgtgttgcttgtacaattgaatcggggattggaaaacagggcagataaacgccccgtaccaagtgattcaagagacacaggacaaatcgagcaagattgtgattattggttaggcatttatcgtgatgcggtgtaccacgataatgcggatgaaacgctgaccgagatgattttaaggctcaatcgacacggtaaaacaggcaccgtgtatgttgatcaacaaggattgagtattacaccggttgatcaatatatggctgcttatcgcgctcaaccgaaacgagaacccaaaaaatattgtgaaaaatcgttttaa

SEQ ID NO: 310371 - DNA, 699 bp, Proteus mirabilis
gtgaattggcaggggagttatggctcgggtaaaaatacatttttctttaataccgctagcttaagtgctgtatctggttttagttttttaagtaaaatcaaagcactcagtgaggaaggggaagctaaaatggtttctcgtcctattttgttaactcaagaaaatacccccgccatatttgataataacaccaccttttatacacaaattaaaggtgagcgagttgcttcattagaatctacaacattcggcactatgatcagtgtgttgcctcgtattagtaatactaaccaagagattgagatgattatcaatcttgaagatggcgccgagaaaaaaagtgatgatgaagatagagaagaagggattgaaaaattacctgttattaatcgcacaaatatcagcaccgtggcccgagtttctgaaggcggtagtttattaattggtggatatacacgagaagataacataaaagcagaaaacaaaattccttttttaagtgctatacctttagttggccgagcatttagctatcagtcagataataataaaaaaatggtgcgtatttttatgttacaaccgcgtttattagataaaactgatacgcacggattggactctttaactgaacacccatttttaccgatggataaaaaaacatctcaagcgctaaaacaaattcaggcatttatgaggtga

SEQ ID NO: 310372 - DNA, 180 bp, Proteus mirabilis
atggaaaaaccgataaaaatcaataaagaaaaaacaattgttccttctattagcttaggtattgctgaataccctaaggatggcaagacattatctgaactattaaagtcagcagataaacagctttatgcaataaaagagaaaggaggaaataaatacggtttttattcagagtattaa

SEQ ID NO: 310373 - DNA, 327 bp, Proteus mirabilis
  misc_feature (261)..(270): n is a, c, g, or t
atggctaaccgtctaagtattattgagaaaattgaacaggagcgattaaatattgcgacaccttcatctttttgtcttgggattattgattgtgataaattcaaaacgattaatgatcaatatggccatgctattggtgatcatgttttatgtgagatagcgcagcgtttattagccttagaacgccagcaggtttactgtggacgacttggtggcgatgaatttgcggtacttttccctgctggattacgttcttgctcnnnnnnnnnnctttattgttattggagatcatcgaatcgctatggcgaggaatggaaaaaccgataa

SEQ ID NO: 310374 - DNA, 348 bp, Proteus mirabilis
atgctttatgagcgtcatttaccttttgtagcaggccatggattaaactgctataacgcttatgcactacgtttattacagaaacaaggcatgatacgttggtgtatgcccgttgaactgtctcgtgagtggttaaataatcttttaattcaatgtgaagaattagcgattagagataaatttgaagtagaagtattcgcttatggtcatcttcctttggcttattcagcgcgttgttcattttggcgaaattgttttaaggtagtaaaaacttcatcagactgcggtgaaagacggacgatatcgactaaacctgccattgaagttaaatcattacctaaattgtaa

SEQ ID NO: 310375 - DNA, 552 bp, Proteus mirabilis
  misc_feature (9)..(18): n is a, c, g, or t
atgatggtnnnnnnnnnntatgatggttatgcatccttaccccttgacactaaaaatcatttacccacagcaaaaaagagctatgaactcgatttaaatcatgggtttatgactcaactaagtaaagctcaatatggctatagtgatatgttagtggggaaaaattgtattttgttaaatcacgatgcttatttttgtttaccatcagaagagccgattggcaaagtaggtttatcacaaaaaatcaccttgttattacagtgtgcaattacgcaggaacaatcgttagccatagtggcaagaacgggcgatgcgacccaaggcactattattggttctgctgaatttaagctcaccacagatcaagataatattatttataaaataaccccattacttaatcatcctatttccgataataaaagttatttttatacttatcagattgatttatcttgtatttttagtcaagaagatcaaaaaaatctctattttcatctctatttctttgagcctaataccttgttggctgatatgactgttttattctaa

SEQ ID NO: 310376 - DNA, 543 bp, Proteus mirabilis; identical to SEQ ID NO: 305423

SEQ ID NO: 310377 - DNA, 396 bp, Proteus mirabilis
gtgttttcattgagtttagataaatctaaatccaccaccacagatcccgttaaatcggctttcactttatctaatttgctggataacgtttgtacccgagaggttgcggacgtcactttgccatcaagattagacacatgcgtacttaacgcatttaccacactactgtcggcttttcccttcagggttgaactgaggcctgaaatatctttcgattgtgcttgctgtttcgaggtaagggtttctaatgatttattaatcgctgaaacattcccattcatccgtgtttccagtgattgtcgggctttcgcttctgcttggtcgcctgtaacacgtgcttgtttctctgcggaaatgagtcctgcggtgactttcgataaatcattaccggtataa

SEQ ID NO: 310378 - DNA, 333 bp, Proteus mirabilis
  misc_feature (279)..(288): n is a, c, g, or t
atggaatttaacactttgttattctttgcccttacagtactgcctttaatttgcacacctggccccgatattctttttatctcctcacaaggattagcgggaggaataaaatcagcgtggtttgccaatatcggtgtcatttcaggttatatcacacatgctattcttagtgctttgggtcttgcaacgataatggcaacttctcccattttcttttatctactaaagtggctaggtgtgatttatattacctacttagcaatcaaaatgctgatatcnnnnnnnnnngatatctgcctgccaaaaaggccaactcacactacatgcagataa

SEQ ID NO: 310379 - DNA, 486 bp, Proteus mirabilis
atgaggtcctgctcatcaacgaatacacctttaccgaagccggtctgcgcgccggctgacccgtcatcgttaaactatcattcaccgattttctgtgaggattttatcgtgtcagacacactttccgggacaacgcatcccgatgacaatgacgaccatccctggtggggactaccctgcacagtgacgccctgtttcggcgcccgtctggtgcaggagggtaaccggttgcattaccttgccgaccgtgccggtatcagaggccggttcagcgacgcggatgcataccacctggaccaggcctttccgctgctgatgaaacaactggaactcatgctcaccagcggtgaactgaatccccgccatcagcataccatcacactgtatgcgaaggggctgacctgcgaagccgatacccttggcagttgtggttacgcttatctggctgtttatccgacaccggcagagcccgcaatcaccgtataa

SEQ ID NO: 310380 - DNA, 399 bp, Proteus mirabilis
atggggaacatcaaaaccaaatgttttgataaacctgaattaatccaatatattatgactgattatggtcaagatctaaaaccactttcccctcaagatgagtataacgatactgttaatctagcgttagactacagtttacctcaaccacaatttactgatcctgatattcaagcagaggcagaaaattgggttgcattgcttgatcaaattaaagaaagtaatgatcctaatatccataaacagcttaaaacaccattacatgaagcaataaataagttatcaaaagccgatagtgaaagagcagtaaaaaactctgttgaagataataaatactataattcttttattcaccaagcgagccaatatcaatcttatgggatcttacctagagattaa

SEQ ID NO: 310381 - DNA, 681 bp, Proteus mirabilis; identical to SEQ ID NO: 297282

SEQ ID NO: 310382 - DNA, 1020 bp, Proteus mirabilis
atgtgttccacgcttgtacgcatgccggggtcgatgacgatagcgccttgcggggtgagcgtgacgcccgtcgcatccagtgccagcttgcgtgtgttgggcgcgcggccggtggcgaccagcagcttgtcggcgcgcagttcgccgtgcgccgtggtgagcacgaattcgccgtccccttcaccattgatatacgcgacctggctggcctgggtgtgttccctcacctcgatgccctccatgcggaatgcggccgtgacggcttcgcctatagctgggtcttcgcggaagaacagcgtgctgcgagccaggatcgtcaccttcgctccgagtcgggcgaacgcctgcgccagctccagcgccaccactgatgagccaatcacggccaggcgcttaggaatcgtctcgctgaccagcgcttcagtggaagtccagtacggagtgtctttcaggccgggaatcggcggcacggccgggctcgcgccggtggcgatcaggcagcggtcgaatgccaccacgcgctcgccgccgtcgttgagttgcacgatcaggttgcgattgtccttaaagcgggcggagccgtgcagcacagtgatcgccggattgccctccaagatgccttcgtacttggcgtggcgcagttcatcgacgcgggcctgctgctgggccagcagcgccgtgcgctggatggtcggcgtggtagcggcgatgccgccatcgaacgggctttcccggcgcagatgggcgatatgggcggcgcggatcatgatcttggacggcacacaaccgacattgacgcaggtgccgccgatggtgccgcgctcgatcagcgtgacacgtgcgccttgctcgacggccttcagcgccgctgccatcgcggccccgccgctgccgatgacggcgatatgcaatgcgccgctgctacccgtcttgtcgtttctgcccagcagatcgcgcatcttgtcgagcaatccgcccggcgtcgaaactgagggggcatcggccagcgtggcccgataa

SEQ ID NO: 310383 - DNA, 1083 bp, Proteus mirabilis
atgaaaagaatctttgtcatattatttcttttaactctattccctagtctagctgttgctggtgcagatgactacgtaccgtctccaataacaatcaacacatctaccctccctgttgttgttattggtcctgctgatgcccatacttacccacgagtgataggggaactcaccggaacaagtaatcaatatatatttaacggcggtagtttaatagcattaatgcgtggaaaatttactcctacattacctaaaataggcaaaatcacatataactttcgccaaggaaataacactcaatcttccgatttcgatatatttgatactggagttccagggctaggtatcattattggtatggcgggctattggcctgcaacgccattggttcccataaacagctcaagtatatatattgatcctgttgccgccaatacaaatccaaatgcttataatggtgcaactggaagttttggtgctcgtttatatgttgcttttgtcgcaacaggacgattacctaatgggtatgtaacgataccaaccaaacaactgggccatattttattggaatctaatcgggcaagtttgaataataaaagattaacagctcctgttatgttaaatggagggcgcatccaagtgcaaagccaaacatgctcgatgaatcaaaagaattatgttgttccattaaatactgtctatcaatcccagttcacgtctttgtataaagaagtgcaaggaggggaagttaatatacaacttcaatgccaagacggtattgatgtttatgctacattaaatgatgcgacccaacatgggaatcgttctgatatattaacattagcaacggattctacggcaaaaggcgttgggctaagattatataaaaataatgaagtaactgcgattagttatggttcagacactcctaacaaaggaaatcaaaatcaatggcatttttcgaattatagaggagagataaatccacgtataaaattaaaagctaattatataaaaacggcaaacactattacgccgggaagtgtaaaagcagtagcaacgattactttttcatatcaataa

SEQ ID NO: 310384 - DNA, 306 bp, Proteus mirabilis
atgagtacaattaattccattattgcttatagaataatgcaaaaaagaaaagaattagggatgacagggagggaaatagcccattcattggaaataagtcaacagcactattcacgtatagagaatggacataccaaaataacagtagaacatttattctctatcgcgtttattttaggtgtcaaacctaaagaactattgcctaattataaattttcaaatgaaaaagagataattaaagcaaaacaatcattatcagcagaaatcattatgccaataaagaaaaacgacatgtatcctacataa

SEQ ID NO: 310385 - DNA, 615 bp, Proteus mirabilis; identical to SEQ ID NO: 302399

SEQ ID NO: 310386 - DNA, 756 bp, Proteus mirabilis
atgccgtggactttttcacatcctgccgtcgttttccctttaaaacagtctcggattggcaagtaccttaacttgcctgcattagtggtaggaagcacttcacctgacttactctactcttttggtttatatcaatcagccaccacagcacataatttagtggggtggttctatactgcgtttcctttttgtcttttagtttttatctttaattattggctaagaaatccactaaaaaccgtgtcacccattccactagataactcaataaggttaaattggcgtgatttaagtctatttgttatttctctgtatctcggtgctgtgactcatattgtatgggattctttcactcatgaaacaggcactgctgtcagaattttttctatcctacaaactcaattactgcagggaatgaccgatagccaagaactggctatttataaactattacagcacttaggctctgtattaggacttatttatctttgttggaaatatgtgcagtatcagcgaaaacaagagagtgatatacaaataagaaatcgtcttaaattgtttcgtctaataggtatcggattaatatcagggttatgtgcattcccgttagcatggcaaaatgccgataaaggagaggggattaatgttaatcgatttattttccttgagctttctttagctgtgccttttttctttggattgatgataattttaggattatggttatatgctaagcagaaaaaacagctcttttag

SEQ ID NO: 310387 - DNA, 261 bp, Proteus mirabilis
ttgtcgtttcgtcactctcgcaccggacgctaccttttcgataatgaggctaaaaccatttcacgactagagtatcaaccttttgtcctcactgaagaagatggctttattcgtgaagatagcggtgcacaaagacactttcgagcaattgacgatcgctggcaaagcaataccgcttaccaagcattattaaaattgaaaatgctcctgattgaaggaaatcgatttacaccacgtcgcttaaccgatcaacaaaagtga

SEQ ID NO: 310388 - DNA, 1194 bp, Proteus mirabilis
atgaaacatacattgttaaaaacgactgcaattgctatggcattaagtgtgggagttgtgcaagcgactgaatataaagcgagtaccgcagaacatccaatcaaaatagttaatttagatgctcttgaaaatcaagtaaaagaaaatatggataaaggcgctttcggttatattcgtggtggtgctgaagacgaaaataacttgcgttctaatacaaatgcatttaataaaaaatatattatgcctcgtgcattacaagggattgaattttccgatctgaatttaaaaacagaatttttaggtattaaattagatacgcctattattcaggcaccgatggcagcccaagggcttgctcatcaacaaggcgaagttgccacagcaaaaggtatggcgaaagcgggctctattttctcattaagtacttatggtaataaaaccattaaagaagtcgcgcaagcacaaccgggttatccgttcttttttcagctatatatgagtaaaaacgacgcgtttaatcagtatattttatcgcaagcaaaacagtatggcgcgaaaggtattattttaacggttgattctcctgtggggggatatcgtgaagatgatattaaaaatagttttcaattcccattaggttttgccaatttggaagcattcgccaaaatcagtgatgataaatcaaaaacaggtaaaggttcgggtattagtgagatctatgctcaagctaaacaagcatttactcctgcggatattcaatatgtgaaaaagatgtcaggtttaccagtcattgtgaaaggtattgaatcacctgaagatgccgatactgcaattaaagcgggtgctgatgcgatttgggtgtctaatcatggtggtcgtcagttagatagtgcaccagcaaccattgatgtattgccagccattgccaaagtcgtgaacaaacgtgttcctatcgttttcgatagtggtgttcgtcgtggctcacatgtctttaaagcgctagcgagtggtgcagatgttgttgctgtggggcgtccaattctttatggattaaatttaggcggtgctgaaggtgtgaattcagttatcgagcaattaaataaagagttaagaattaatatgatgttaggtggtgcaagaaacgtcaaagaaattcaagcaacacacctgtatacagatgctgactttaaataa

SEQ ID NO: 310389 - DNA, 342 bp, Proteus mirabilis
atggaactatcaaacgaacgcaaatttcgagaaatcgaatcaaaaatcatgaaagggatacttgttactggtgctagagaagtagcgaaaaggacgggtattcacgaatcacaaatatctcgctggcaatctcaacaatctaaaacgcaattaagcttcatacaacgttgtgcaaggcttttagttgctattgggtatgagacaccagatgacacagtgatattgcaaggtgatgaggctagagcgttaattcaaatgcttgagcatatcaaagcaccaaaaagaaaagcctcaaccacggcgaatggtgaggcttctcaacaaatggacttaaccatttag

SEQ ID NO: 310390 - DNA, 153 bp, Proteus mirabilis
atggtctttttcaccccaaagcttaagcgagtacttgccgcttgttgcaatgtagaggtgatcaaaggggcacttggtttactggatgttggtctatcttcacggtttttaacgatgaaagtggcattctgtaacgccttaaccgccacctga

SEQ ID NO: 310391 - DNA, 219 bp, Proteus mirabilis
atgatgatttgtcctgtttgtggttatgccgcgcatactcgtagtagtcagcaaatatcttccgataccaaagaacgttataaccagtgccagaatataaattgtggtgcaacgttcgtcagccatgaaaccgtaacacggtttatttcaaagcctcaattgattgaacgggtagagccgcatgttgataagtgttgtcagcaggcgttggggatttga

SEQ ID NO: 310392 - DNA, 2115 bp, Proteus mirabilis
atgcgctctctgtttgccagcacaggccgaggtctggaagaattattaaaaactgaacttgaacaccttggtgcccagtcttgccagattacgcaaggtggtgtctatttccgtgctgatgataaaaccatgtatcagtctttgctctggagccgtttagcttctcgcatcatgcttccgctaaatgaatttaatgtctacagtgatctagatttataccttggtgtgcaagcaattgattggagcgaagtatttacagttaatcatacttttgctattcactttaatggcactaatgatgtgatccgtaatagccaatatggtgcattaaaagcgaaagatgctatcgtcgattcattccaacgtaaaatagggcaacgaccggatgttgctaagcaatcaccggatattcgtttaactatacatctacataaagaaaaagcgtcattatctttagatctcagtggcgatggattacatcaacgtggttatcgtgacttaacagggcaagcaccgctaaaagagaatctagccgcagcgattattatgcgttcaggttggaaaaccgatacaccattaattgatcctatgtgtggctcaggtactttacttattgaagcagcaatgatggcgacggattgtgctcccgctttaaatcgagtccattggggtttccgtcattggttaggacataatgaagcgctatggaaagaagtcactcatgaagcatttgcccgcttccgtgaaggtaaaaagaatactcaagcgcgtttttatggtttcgatgtggataaacgtgtattagatatggcaagagccaacgcacgtcgtgcggatgtggccgatttaattacttttacccaaggtgatgcagcaaaactgactaacccagtatccacaggtgttaaagggacgattattagtaacccgccttatggtgaacgtttagaaagtgaacccgcactcattgctttgcatagccagttaggacgagcggtaaaagcccatttcccaggatggcgattatcactttttagtgcttctcctgaattgttaagctgtattcagttacgtgctgagcgtgaatttaaagctaaaaatggcccgttagattgtgtacaaaaaaactatttattatcagaaacaccttcgacgattaatacacgactggcggaagattttgctaaccgtttacgtaaaaatgagaaaaaactcgcaaaatgggcaaaacaacagcaaattgaatgttatcgcttatatgatgcggatttaccagaatataatgttgcggtagatcgctatggcgaaaaagtggtgatccaagagtatgcacctccaaaaaccattaatgaacataaagcacgccagcgtttatttgatgtgattagtgccaccatggaggttttagcattacgctctgatcaactaattttaaaaactcgtcaacgccaaaaaggtaaacaacaatatgaaaaaatggcagagaagggggatttctttttagttgatgagtttggtgccaaattctgggtgaatttaaccgactatctcgatactggactgtttttagatcaccgcattgcacgcaaaatgttaggtgaaatgagcaaaggaaaagactttttaaatctctttgcttataccggtagcgcgtcagtccatgctgggttggggggagctaaaagtaccacaacagtagatatgtcaaggacttatcttgaatgggctgagaaaaactttcaagcaaatggattatcaggtagacaacatcgtttaatgcaggcggattgcttacagtggctaagccaaagtaatgaacagtttgatgtgatttttatcgatcctccgacgttctctaattcaaaacgcatggaaaatacctttgatgtacaacgtgatcatattgaattaatgaaacatctaaagcgtttattaagaaaaggcggaacaattatgttctcaaataataaacgtggtttcaaaatggatcatgaagcattagcgaatattgggttaacagcaaaagagataacacaaaaaacgttatcgcaagattttgcacgtaaccgccaaatccacaattgctggctattaaatcatgctggtgaggaataa

SEQ ID NO: 310393 - DNA, 321 bp, Proteus mirabilis
atggtcaaagccggattagtcaaacatatggccattatgtctaatgaaaaatcggcattttatcctgatgttcctctctttaaagaagcaacaggttatgattgggatttacaagcatggaatatgttagttgcccctaaaggacttgataaagaagcacaagataagcttaccgcagcaatgaagaaagtttatgcttcaggtgaattagctgaatttgctaataaacaaggatttgaagtcattgaattgtatggtgatgatgcgacacaatttatggccaatgaagataaaaagtttggcgaaattataaaaaaataa

SEQ ID NO: 310394 - DNA, 1143 bp, Proteus mirabilis
  misc_feature (12)..(21): n is a, c, g, or t
ttggttactatnnnnnnnnnnggttactattttatttcgttatttggtaaaaaaaccattggtatcgcttattctctagctattgcagaaacgatcctcgcccctgttacgccaagtaatacagctcgaggtggcgggattattcacccaataatgcgatctattgccgatagctttaattcaaaacccgaagagggtactagtggtaagattggtcgttatttatcgctagtcaattataatatcaatcctatcacctcagcgatgtttattactgcaaccgcgcctaatcctcttattgtaagcttaattatcggtgaaacagggcctgaaaatgagttaacttggtcaatgtgggcaatagcggcttttgttcccgccattgtttcattatttttaatgccgattgtgatctactttttatataaaccagagataacccatacgccgaatgctccccactttgccaaagagcgtttagctcaattaggccctatttcattgccagaaaaaatcactttgggagtatttgcactgttattaattatgtgggcaggaatacccgcactattatttggtgatgcttttagtattaatgcgactactgcggcttttattggtttatcaatcttattatgtactggcgtattaaattgggatgatattttaaaaaacaaaggcgcatgggataccgtggtttggttttccgcattagtaatgatggcctcttttttaggaaaattaggtctaattaaatggctttcattaagtgttggtgccggtattgatagtatggggataagctgggtaagtggtatgatattgctcgtgctgatttatgtctattctcactatttctttgctagcaccacggctcatattaccgccatgtttgctgcattctatgccgcaggtttaacccttggcgcgccaccaatgttattaggacttattttagctttctcttcttcattaatgatgtctttaactcattacggtacaggtactgcaccgattattttcggctcaggctacgcgaccttaggtgagtggtggaaagcaggttttgttatgagcattgttaacctcattatctggataacccttggtagtttatggtggaaggtgctggggtattggtaa

SEQ ID NO: 310395 - DNA, 285 bp, Proteus mirabilis
  misc_feature (247)..(256): n is a, c, g, or t
ttgttagcgctgtttgttggtactattgcggctattatcggcaaagccttacctataggggcagtatctattattgctattgcgcttgttgccgcaacaggcgtcactaacccagactcaactaaaggggcgattaatgatgcattaagtggcttttccaacaatcttatctggttaatcggtatttctattatggtttcaatgagtcttaataaaaccggattaggtgctagaattggttactatnnnnnnnnnnggttactattttatttcgttatttggtaa

SEQ ID NO: 310396 - DNA, 201 bp, Proteus mirabilis
atggattttattacagcaatagaaaaatcactcaatattaaagctaaattgaacttaatgccgatgcaagatggtgatgtactttcaacctgtgctgattgtagcgatttagctcagacaacaggtttttcacccaacactgcagtagagtatggtgtgaagcagtttgtggattggtatgtagattattaccagcaataa

SEQ ID NO: 310397 - DNA, 159 bp, Proteus mirabilis
atggaattaataaaaaacactaaaaaaccgactgttttctatttatctgaagggattatatcaacagggttatatctggctggcctaaaaattcaacagatggaacaacacatctcacctatacatttcctaattacagtgatcggtcagaaaatataa

SEQ ID NO: 310398 - DNA, 471 bp, Proteus mirabilis; identical to SEQ ID NO: 297673

SEQ ID NO: 310399 - DNA, 1209 bp, Proteus mirabilis
gtgggtcatcatcaccataatcacaatcatgtttatcctgatgaacagcatgtacatggtattccctatattgaaatgaatagcaaacgatgggatcttcgtggtgaaaaaaataaccctttcgcgggtattgaatcaatacgttttaatgcaaccagaaccaattatcatcatgatgaaaaagaaggtagcgaaatcacaacccaatttaaaaacaaaggagatgaattaaggctcactttcacacatcaaccggtgtggggatggcatggggtaattggtgggcaatttaatcagcgcgattttagcgctcaaggtgaagaagcttatgttccccctactaaaactaaaatacactcactttttttattagaagaataccgctatgaattaggatttcgccaagactggcaatcactattaaataaagcgacccagcagaacaataaacagagtgcttcctctatttctgcaggattagcatggaattttactcaagattattttttaaatttatcattatcacacgccaaaagatcacctgtggctgaagagctatatgctaatggaattcatgctgccagccgcacaatagaaaaaggcgatgctaatttaaccacagaagttgcaaataatattgatttgggaataaccaaagtaacaggtgatattcaatttaatattaatgcctattacaaccgtattaacaattatatttatgggaaatttacaggacctgtattagataatggctatcgttcattacaatatatacagcatgatgcggaatttaaaggtatagaaggaaatattgattattactattatcaagataatttaatagggatttctggtgattatgtcagagcaaatctattacataacaaaggcaatattccaagaatgccagcctatcgtttaagtgcctatataaaacaccacttaacaaataaattaacggggaatattcgtattgaccattttggtaagcaaaataaaactgcagaatatgaaacaccaaccacatcttataacagtgtgagcttaggtggagaatacctaggatctttggatcaagctgactataccgtttatgtcaaagttaataatctttttaatgctaaggggaaagatagtacttcttatattaaagatgaaatgtatttacccggtagaaatattattttaggcacaacacttacattctaa

SEQ ID NO: 310400 - DNA, 246 bp, Proteus mirabilis
atggcggtgatcattggttggattgaacaacatcagcctgatattttcctgaatcccgataaacgccaaagtcattttacctttgacgcctttattgatagcaaccagaccgccagtattagcattgatttaaagttgactgagcgtgtcctcgttaatgtgcaagcgaataaattggttgttggtgccattgaagagccggctgatccgtttgaaagttgggagagtgtggctcatgaacgctga

SEQ ID NO: 310401 - DNA, 570 bp, Proteus mirabilis
ttgaaacaaagcttaagtgatttacaaacagattatgttgacttaactctagtacactggccatcaccaaatgatgcagtttctgttaaagaatttatgcaagagttattagctgcgaaacagatgggattaacgcgagaaattggtatttcaaactttaccattccattaatggaacaagctattgctgccgttggtgttgaaaatatcgcaacaaaccaaatcgaattatcaccttatttacaaaatcataaagtggtaaattgggctaaacagcatggcattcatattacatcttatatgactctagcttacggcaaagcattaaaagatgaaacaatacaaaccattgctaaaaaacacaatgcaacaccagcacaaatcattttagcttgggctatgaatgaaggttattctgttattccatcttcaacaaaacgtgaaaatttagccagtaatttactcagcgtaaatatcaaattggatagtgaagataaacaagcgattgcaaagttagattgtcatgatcgtttagttagcccagaaggtttagcgcctcattgggattaa

SEQ ID NO: 310402 - DNA, 291 bp, Proteus mirabilis
atgcaagaagatgtctacacaaaagcagggatcggcactactgcttttcttggttacttcgcagggcttccagcagaagttgttatgggttcactgttgggagccatcttctttaccactgctgctactatctttatttctgttactggtcttttcggtgtgaaacctgagcaatacgaaatcgaacatatcgatgccgtaggtgcttttgtttccgctttgctcgtggttaagttaagcgtaaaagcatacagaagggctgatataccgaaacaaggagggcaacaatga

SEQ ID NO: 310403 - DNA, 339 bp, Proteus mirabilis
atgaactatctcggcatgaatgcacaaaccggtgaacgtattaccgatattgagcacgttcgccagtcggtgaaagatatttttaacacccccattggtagccgattgatgcgccgtgaatatggcagtttgcttgccgacttaattgacggtcctgttaacgccaagatgcgactgcaattaatgtcggcatgttacaccgcggtttatcgttgggaacctcgtatagtaatgaccgccattgatattcatagccaacaggaacaggtgattgtggatatcaccggctattacgcccataaccaacaaccgattaacttctctctaccggtgacataa

SEQ ID NO: 310404 - DNA, 207 bp, Proteus mirabilis
atgcggatttacacccaacaaggggataccgtagatgatatttgttggcgttactttggtcagtcatccggcatgattgaacaagtattagaagctaatccggggcttgttgaattaggggcaatattacccacaggcacagcgattgagttaccggacacgccacaacaacacagcaccacaccgattttacaactttgggattaa

SEQ ID NO: 310405 - DNA, 849 bp, Proteus mirabilis; identical to SEQ ID NO: 297974

SEQ ID NO: 310406 - DNA, 315 bp, Proteus mirabilis
  misc_feature (287)..(296): n is a, c, g, or t
atgaaaaaaatatttatggttgccgttatatcttccttattagttggctgtaaggttgatttagaaacgaaaataaatacagataacttattgtctagtgagcaaagtattgttaaaggagatattaatttcgaagtctcttcatgtaatgattttgaagactcaaggaaagagtctaagtcattgatagaattaaaaaataaagttcctgagattttcagagatgcggaatatgttgaatgttataagcaaaaacttaattcattcgcccatttctcaatacctgnnnnnnnnnncttcagaaggggtaattaa

SEQ ID NO: 310407 - DNA, 423 bp, Proteus mirabilis; identical to SEQ ID NO: 298890

SEQ ID NO: 310408 - DNA, 516 bp, Proteus mirabilis
atggcgttaccacgcaagttaaagaattttaatttatttatgaatggcgccaattatgtgggcgttgcggaagaactcacattacccaaaatcacccgcaagttagaagcctatcgcgggggcggtatgaatggctcggtgcaaattgatatgggccttgatgatggtgcgttagacactgattttaccctcggtggtgctgatattgacgtttaccgccaatggggcgcatccactattgatgcggttcaattgcgtttatgtggcgcttatcagcgtgatgatacgggggaaacattagccgttgaagtggttctgcgtggtcgttatagcgaaattgatccgggcaactggaaatcgggcgataacacacagaccaaagtcaccgtaaaacccacttactacaagttagtgatggacggtcaagaaatcattgagattgatatcgtcaatatggtggaaaaagtggacggtaaagacctgttacaagcacagcgtgacgcgctgggactttaa

SEQ ID NO: 310409 - DNA, 516 bp, Proteus mirabilis
atggcgttaccacgcaaactcaagaattttaatgtatttattaatggtaataattatgtcggtgttgccgaagaactcacgttaccgaaactgactcgtaagctggaagcctatcgcggtgccggtatgaatggttcggtacaaattgatatgggccttgatgacggtgcgcttgatagtgagtttactctcggcggtgctgatattgacgtttatcgccaatggggcgcatccactattgatgcggttcaattgcgtttttgtggtgctcatcagcgcgataataccggtgaatcacttgccgttgaagtggttctccgtggtcgttatagcgaaatcgatccgggtaactggaagtcgggcgataacacacaaaccaaagtcacagtaaaacccacttactacaagttagtgatggacggtcaagaaatcattgagattgatatcgtcaatatggtggaaaaagtggacggtaaagacctattacaagcacagcgtgacgcgctgggactttaa

SEQ ID NO: 310410 - DNA, 168 bp, Proteus mirabilis
atggaactttctacattacttctttttatcccagcaaatttagttacactgaaaatgaactcagatgtttgcaatacaacagctagcccaaatgaagctagaacaatcataatcacgaatgcgagtaatctaccgagacctcctgcacatgaacgagcaaacccatag

SEQ ID NO: 310411 - DNA, 189 bp, Proteus mirabilis
gtgcttgaagatttattaagtggggcagttgttgaattagctaagcgtgaagacgcgttttgtgaactacaggctgataacgtagctacgacaataaacgccggtatgagcttaagcattctcataaacggtttatttctcattgtgacagatttcccttacatccttatgtgccagatgagcacatga

SEQ ID NO: 310412 - DNA, 264 bp, Proteus mirabilis
atgaatatggtatttactggtcaaaattatgctgatgcaggtaaaacattgttagcgacatctacaggaaatacaaataatttaggtattgcaatcgatggttttgaatttggtaagccaacagatgttctatcacgaattgttaataaaattggtgataatactttaacatttaaagcattagcaaaagtcgtcgatccatctaaagatgtggtagaaggtacatttagcgcgatctctaatttccgcattacttacgaataa

SEQ ID NO: 310413 - DNA, 333 bp, Proteus mirabilis
atgctttttttatcgaaggcgagtaaaattaattacctaatggggatgattatctgttatagctttgaagaagattttgctgaggtaaaaaaaagaggcctgttttgccgtgtattatggtttctgattttgatccctttaggtacattgttactctgtttattattctatttgctgaatataaaagagaatttctttttaatttattcggtgagtttatctttagttatttatctctattttattgagcggagaaataaactctatcaggaatttatattagcatttgatatgatcttacgtttaaaagcactaaaaaattttaaggagtaa

SEQ ID NO: 310414 - DNA, 2013 bp, Proteus mirabilis
atggataaattaaagatgcacagccccgacatgacgcagcaaaacatagagaaaattcaggcgttgtttccgaactgcgtgacggagtcgagaggtactgacggagaactaaagttatccattgattttgatcaactgaaacaagagctatcaaattcaatcgttgaaggcccgcaagaacgctatcagctgaattggcccggtaaacgagaggcgttattaacagcgaacgcgcctattgccaaaaccttaagaccttgtcgagaagaaagtgtcaattttgataccacagaaaacctctttattgaaggcgataaccttgacgcgctaaagatgctgcaagaaacctatttaggcaaggttaagatgatctatattgaccccccttataatactggaaaagactttatttatgcagatgactttgcagaaaatacagaagaatacttaaagagctcaggacaaaaagatctggtcggtaatcgaatggtcgctaatactgaaaataatgggcgctttcattctgattggctttctatgatgtattctaggttgaagctagctagaaatcttttgaaagatgatggtgttatttttattagtattgatgatgaaatggcaaacttaaagaaagtttgtgatgaaatatttggtgaagataattttattgaaaatatttcttggaataaaagaatcccaaaaaatgacaaaggcgttggtaatattcacgagtatattcttatttatgctaaaaattcagaatgcaaaccagaattcacaatgagaaaggatggtttagatgatatttatgaattggcagaaaagctgaaaaagcaaaaagtgccaattgctgaagctaatgaggaaataaaaaaactttataagaagaatggatatgatcggggtataactttatacaatagctttgataatgaatatcggttgtggggtaaaataaacatgagttggccaaatgcaaacacttttggtccgacttatccagttaagcatcccattaccggaaacccagttaaaatacctgacagagggtggcgatggaaagaagaaacatttaatgaggctgcaaaaattgtagatggttcatacactgaaattgtagagttacacgatggtggaatattatgtggtaaagtatggttttctaaaaaagacgatcagcagccgagttctgtcacctatttagatgacgttaattcattccttcttcgctcaattttatcgacaaagagtgatggaggcattgaagtagagaacttattttcaggaaaaagctatttctcatatcctaagtctacaagcttacttaaagttctaatatcatcttataaaaatcgattagaacagggtgaaattattctggactttttcgcaggttcatcaactactgctgatgctatcttgcgattaaatgcggaagatggaatgaaccgaaaatttattatggttcaacttcccgaatcctgcgatgaaaaaacagaagcctacaaagctggttataaaaccattgctgagatctctaaagaacgtatccggcgagctggcgtaaaaatattagcaggtgagtgccacaaagactggaataaagacgttgggttccgagtacttaaagttgatacttccaatatggcagatgtttattattcgcctgaccaagtgtcacagggttcgctaaacctactagtagataatattaaatcagaccgcactgatgaagatttactcttccaagtactgcttgattggggcgttgatttaaccttgccaattagaaaagaaacgattcaaggtaaatcagtattctttgttgatgatgatgcactcgtggcctgttttgatctgcgcataaatgaagctttgattaaagagttagccacaaaagagccacttcgcgtagtgttccgtgatgatggctttgagtctgatgcagtaaaaattaatgccgagcagattttcaagcaagtgtcgccacatactgaagttaaagcgatataa

SEQ ID NO: 310415 - DNA, 285 bp, Proteus mirabilis
atggaaaatcaactttgctgccctgtatgcgactcaactcgtattcgtgaacgtcatatagggaaaaagacgggagctgttgctggtggcgtatcaggcgcactagctggagcgtctatcggctctgctgttcctgttgtagggactattgctggtgctgcggtaggcgctctatttggacgtttggtggctggagctactgctggggctgtgagtggttcagctttggatggtgtagtgtttgatcgttatgaatgtatcgagtgtgaatacacgtttgattga

SEQ ID NO: 310416 - DNA, 1212 bp, Proteus mirabilis
atggcactaacggacattaaagtaaaaacagcaaaaccaaaggaaaaaccttataaattgaccgatggtagcggtatgtatctactgatcaatcctaacggttctaaatactggcgtatgaagtaccgtttcgcaggtaaagagaaaatgctctctattggcgtataccctgatatctcgctagctgaagctcgcgagaagcgcaacgaagctagaaaattacttacctctggtagcgatccaagtgaaataaagaaagcagaaaaaattgctcaaaaattaagctttgaaaatacatttgaagccattgcgagagaatggcatcagcataaagctgatcgctggtcattacgttatcgtgatgagattatcgacacttttgagaaagatatttttccctatataggtaatcgccctattgctgatataaaaccgatggatctattggaaacattacgcaaaattgagaagcgtggtgctctagaaaaaatgcgaaaagtacgtcaacgctgtggtgaagtctttcgttatgctatcgttacaggcagagccgactacaatccagctccagaccttgctagtgcgctagcaactccgaaaaaagtgcactacccttttctatctgctgatgagttaccctacttcctgaatgatctcgctagctataccggtagcattattaccaaaacagccactcaaatcattatgctaaccggtgtgcgtacacaagagttacgctttgctcgctgggaggatatcgattttgataagcgactatgggagatccctgctgaggtaatgaagatgaaacgtccacatgttgttcctctatctgagcaagtaatcacacttttcaagcaattagagcctatctcaaagcatcatccactcgtgtttatcggtagaaacgatccccgcaaacctattagcaaagaaagtgttaatcaagtcattgagctacttggctataaaggcagattaacagggcatgggttccgccacacgatgagtactatattacatgaacaaggttttaactccgcatggattgaaacacaattagctcatgttgataaaaatgcaattagaggaacctataaccatgctcaatacattgatggtagaagagagatgatgcaatggtatgctgactatattgactcattgaagaatggacaaaacattctccaattaaatcgtaaaaaagcataa

SEQ ID NO: 310417 - DNA, 1116 bp, Proteus mirabilis
atgttgggtgagctggctaaaacattgagactttctgattctgagaggattaccgcgtgtatatccaacacagtccatgaccgatttactaatagtgaacatgaaaaagtgatatacatgggagctaggaactctactaatgcagtttttctatcagcgatagacaaacaactggcaaaatacatattgcaagcgatggaaatagacaggcggtcatttaaaaacttaactactgttttaaatatgaatatttcttttgtttttggagaaaaaataatcgaaacaattttaacgcctctagacacagcaaatagagatactgagcgcgtaataaaaagggctagcgatttgggtttactttccacccgaaaaataaacactctaaagcgaattattgatggaaatggtcgatttgagcaactgactaaagctcagatttcaacactgcggagctaccttgatttaaacatcgatttctctattagaattaatcttgatggggggcaatcagttaattttcattctctaagctcaggggagcaaaacagatttctcacatttgcaaaaattcttagtgtaatgaaaaatggaatcatttatttaatagatgaaccagaggtaagccttcatcttcattggcaaatggacttccatagtaatatggatagactactttctgatataaaaaattttcatgtcattgtcgccactcactcaccaacaattatcagtgaagcagttaaatatgataataatcgccttgaaaatacagtcgcagtattacaaagagaatgtgaaatcaataacataaaaaaatccaatgataaatcagttatttgtaaggttcacacttttgcagaggtagcaagccatgatcaattagttcttaggcacttccaaacctccccttataagacgagagaagtaagtgttgaaattgcggatgtagtcttaagtatggccgaaggtgaaaaagcaaaaaatgatgctgtaaatatccttaacgaactaagaactgctgttgggttatccaacgaagctaaaaaacagatcaatgcagctttagctttagtagaaaatgatttgataaattcattaaaaataaatggtgaataa

SEQ ID NO: 310418 - DNA, 729 bp, Proteus mirabilis
atgaaagatctatgtaatgatgttcaaaaaaatcattttgaaaagttacttaatttgattaaaaacaatactctcaatggaggcgaggcgtggtcagtattttcatcaccggcgtcgtcaaaaaaattcatcagggataaaaaacattataaaaccataacattcactacggaagaagtcaatacttataaagctctacgcataaaagtaaaagaaaagcttttcaaacagtgtttaggatgttgtgcatattgccgtcgcccagtagggcattatggatgggcatggcacattgagcatgttattccaaaatcaaaatacccagaattaacatttgatatgtctaatctaactgttggctgtgtacattgtaatcagtggaaaggagcccgggtagataaacaattacaagggaagaaactccccatcattaacccattagatacaggctttgtttaccccaaacaccttacatatgttcaaatcagtacagagtcactgtgctttgctaagtactcaactcattcgatagagggacggagaacatatgaattgttatcgttcaaagaacttgaacgagcttatgctataaatggtatgcatgcccctactgctgccttgcatgagcggttaactcgattaatctatcaaaatctcgatgatccagaggggctggagctggtagaactgctgggtaatttaaaactatcaatctataagataccatga

SEQ ID NO: 310419 - DNA, 1131 bp, Proteus mirabilis
gtggatgtttttgctaaaattgaaggtttgtctgaagacaaactacatgaaaaattcaaattgttgagaaatgagccgtattatataggagctagaaaaatcatcgacgattggacgaaagatttccatgaccgagataataaaatagcattcgaatttcaaactacattccattctgcattttgggaattttatcttcacgctgtatttaaaaaactagggcttgacctatgtgagaaacacagcagacctgacttcatagttaatggagaatatgagttttatgtagaagctgtggtttctgaaataaaaaaagaaggaaaaccagaatctgaaagaactactgatgaccaattaagcatgctcgagccaattaagaatgatcgtgaattccatgaactaattgatgaggctatagctcgtcattctaattcaattaaatcaaaactaagtaaatacacaggatatgaaaataaaaagggaaaatggataccggggtataaagaatgtaattggattgatgaaagcaagccttacttaatagcgctatcttcttatgaccagatcaattatggtaaggagtatatatactcgatgtttgccttgttgtatggatggtattattcgcctgatagaaactcctataacatgttagaatcaataaaaaaacccggaacaaactcagacataagattggcgatttttaatactaaagaaatgtgcgatgtttcagctattatctttaccaacactctcaccctaggaaaattgtcttcattgagtaagtcgattcaatatgatcttgctcatgttttaaatgttaggtatgacagagaaccaccacactacaaaattcatgaagttaatacccaatcccctgaagatttacttgatggtgtgtacatatttcataacccaaatgctaaaaataaatttgattgtaaagagatcaagtcaaaccatatagtcgaattctctcttgatagccacggcataaccattgaaggaggaagggcaccaatcgtagcgcggtactgttcaccattcggccatttgtatagcgaattacttaaatccaccgctgccagtaactacaataaaacagttgcatacgacataattgacgattaa

SEQ ID NO: 310420 - DNA, 126 bp, Proteus mirabilis
atgagcgataaaaaatcgtcaaacactacgactaagacggtgtttgttaatgatcatatgccgtcaagattaattaaaaccccacctccaccaccacctgcaaaaacaggggataatggtaaataa

SEQ ID NO: 310421 - DNA, 450 bp, Proteus mirabilis
atgagccgacaagatgtaattgctagaattttatattcacattatctagagaagctgtacgcaacagcgactggacgtatagataagatcatttcagtgttaactcttattttcggctcatcaattattttgaacggaaacccgtttttgtttggtgttcttgttgtggtacttactggtatacagactgtatttcaattcggtaaaatgtctggtagtgcaagaaaaagagcttatgattacctgcgtttatacacacaagagtcgaaatataccgatgaggacttacgttttcatatgctggagattgaattatctgacaattcaatttggtcatcattagaagaaatagctgcagtgaaaaccgagattagattaggaacctctgatttttccgggttaactaaactccgaacaaaacttaaattattacgcttaatctgcggttaa

SEQ ID NO: 310422 - DNA, 207 bp, Proteus mirabilis
atgatgaagcttttaaaattatattcaagtaaccccaaatttaaaactattacctttaatagtggtatgaatattgttgtaggcctacaggctagcaagtcatctacagatagctccaatggtataggtaaaagtagctcattaaatttagtacatctaatgctcggtggaaaactagacaaaaaaatgccagtgatattaaattaa

SEQ ID NO: 310423 - DNA, 1485 bp, Proteus mirabilis
atgctagttggttctacagagtacactatcaaattaaattttgaagatggaatatattatcttaatgaggcaaaaataggaaaatcagaaacatttggtaaatatctttctgagaaggtttttattaacctgaatggggaagtgacttttagacaagtttttaattgttttgctagaagatttcttccagaaagaaattactataatggcaccttaatgcaacaagggcagccaattaacgatttttatcagagaatggttaacctttatttgttgggtatagatttatctctcccttacgcttacaaaaagacggctagcaaaatagatgatttaacaaaaaccagtaattctcttgaaaaagccaatgtgttagaagatgagtctgagttattggatttaaaggataagttagaactattattgaaagataaagataacttcatcatagcaagtaattacgatgcgttaaaattagaagctgacgagctaactgatgaaattaacaagatcagaaataaagtattttctcaattacgcgaactgagaaacaaaagaagaatattaaattcctctaaagatgttgtaaaagtggactttaaaaaggttgagcaaatttttaatgaagctaaatttcatttctctgacaagatacagaaacggttagaagatgctacggaattccatataaaaattcaggagagtagaagggataggatagaaaaaagtataaatgaaataaatttagagagcattcagttaaaagattctttgtgtaaactagaaaacaaaagagacaacttactcagcgggcttagctctatgggagctctggatgaatataattctattattgatagaattagagctctagagtcagagattgcagaaatatccagccataaacagactttagctaaagttagaaaaaataaagccatcttagaaaaacagagggctgaaattagtgttgatgcaatggaatacattgaagggaaacaagagcatcttgatagtattcagtctaaatttagagcattagttagacggttctacacacatcaggggggatcaattcgaataactaaaaatgagggtgttgcaaagtacctttacgatataactatacatattcagaaagattcatctcaaggtgtaggtgaagtcaaaatattttgttatgacatattgctatatcaattaaatatgaatttgctaggttttcttgctcatgatagtgctctattttctggaatagatattaggcagataaaaacaatgttcaaaatatctcttgaaatgtgtgaagaaagcgggcttcagtattttgtaaatcttaataaagatatctatgatgagataacatcaagcaagaaagacgatattttaagtgacaaagataaagatgaattaaagaaaggtacagtgctaaggttatttgatgacaaaccagagaacactttatttggagagtattttggttga

SEQ ID NO: 310424 - DNA, 162 bp, Proteus mirabilis
atgtctcctaagataattaaaggggtatcgagtcgattacttcgacgtgatcgtcctgatattgcccaacgtgattacttacaagggggttctttggtcgccaagttatttcgcggggagttgtggtggcgcaccaatatccattatccaccagtacattga

SEQ ID NO: 310425 - DNA, 141 bp, Proteus mirabilis; identical to SEQ ID NO: 301132

SEQ ID NO: 310426 - DNA, 255 bp, Proteus mirabilis
gtgattaccaacacctacggactaagaaacgactggtacgaacgtcaaatggaaaaacaggcgtttgttaattctcaggaagagaaaatatcagttgatgaggttatggatagcctgcccgaagaactactgtgcatggatttggcaaggaagttaaatccggtatttgaaattagcccccaagcacttgatgcagttttagatggaattagaacggctattcagatagggatagataaagaggttttaggatga

SEQ ID NO: 310427 - DNA, 207 bp, Proteus mirabilis
atgacagataaactttacacatacggaaatatgccaaatagacagtttcctagtcatcgtgaggaattacgagacaagttcgcaatggctgctatgaatggaatccttgtaaacacagagagaaatcaattttcattcagtgagacaggtgaaattgcaagtaaggcctatgagttggcagatgcaatgttaaaggctagggggtga

SEQ ID NO: 310428 - DNA, 180 bp, Proteus mirabilis
atgtcagatgaagtgaacccatcccttaacccaacaaaagctgcgtatcaattaacgttagaaatgattaaagctggatcttttacctctgaatcacaaggcggaaaaagaaaagccagtgatgtaattgaattctttgatgcagtcagagataggtttgttgagcttggtaaaaagtaa

SEQ ID NO: 310429 - DNA, 177 bp, Proteus mirabilis
atgaaatttgaagatttaccagttgacgtaagggaatcggcgcttgatgcatacaaacaaattattgttagagaggttggcgctgttgatggcgaatatgtaaatgaccaaaaagccagactattaaatctggctgaaaccatagctactggatttattaagctatacgaaagctaa

SEQ ID NO: 310430 - DNA, 450 bp, Proteus mirabilis
atgagccgacaagatgtaattactagaattttatattcacattatctagaaaagctgtacgcaacagcgactggacgtatagataagattatctcagtattaattcttattttcggctcatcaattattttaaacggaaatccatttctttttggtgttcttgttgtggtacttacgggtatacagacagtttttcaattcgggaaaaagtcaggtagtacaagaaaaagagcttatgattaccagcgtttatatacaaacgagtctaaatataccgatgaagacttgctttttcatatgctagaaattgaatcttcagatgactcaatttggtcatccttagaagaaatagccgcagttaaaacagagataaaattaggtgcttctgatatttcagcactaactaaactccctatgaaacttaaattattacgcttaatctgtggttaa

SEQ ID NO: 310431 - DNA, 183 bp, Proteus mirabilis
atgaaatacatcatcacctgccctgtatgcaaagttaaatttgacgtgagaataccactcatgcatatcaatcaacatcacgcaaaatcaactgattctgaattaatgaagatcagagatgcacgacgtgaggtacttaaaacaaaacagccgagcggtgagttcggggttacggcgagataa

SEQ ID NO: 310432 - DNA, 180 bp, Proteus mirabilis
atgaataaacacaaaattgcactgatgggagctgctctatcaatggcttcaattgcggcacaatcagcatcatgggctattaatcatagtcacagttggtgcagctaccccacatcaaataagcgcataacaggtcacgcaaaaataaaccgagcggccaaaaaacgaaaaaacaaataa

SEQ ID NO: 310433 - DNA, 447 bp, Proteus mirabilis
gtggccttttttattgggtggaatatgaatagaccaatgtttattaagtattttaaggtgtcaatccacagtaagcatggtgtcacggtaggttactcaaaggcacaacatccacacgaaaacggtgatgattttattacggtgttttcacagactgccggagctgaaacggtgagcgttaagctttctgatgtagagagatttgttgtaacccctgtgtaccatgaggatgagaggttggaggtaaatgttggagatattaacattaccacacggcctttagtctgcaggagtttctataaaggaagaactgttggccagttaatcgacctgacaatcaaatctatcgatgcgtttcaagaaactggtgactctaagcggcacagagaagagttgtcgatcattcgtgaagaaatgaaaatctctcattcattaaatagatactaa

SEQ ID NO: 310434 - DNA, 2394 bp, Proteus mirabilis
atggctacagttgtggaatcactgattgtctcactgaaattagacaacactgagttcggacgtgcagtaaaacaagcaattgaagataacgaacaattatctgatgcggttaatggtgttggtgatgcgtcaaaagatgcgggtattaatatcaacatctacacgcagcaaacaaagaaatccaacgacgaaacagataaagccaaaaagaaaaataaggatttagagaaaacaataaatggagttgtaaaggctttatctggcttatttaccacaatatttgtttcaaccggtttacaaaaactgattgatgaaaccagcaaaaccaatgatcaactctatttcttaagtaaaaacttaggtatgaatgcaaccgacattaaacggtggcagaacatggcagagatgacaggcggtagtgctgatggaatggcagcgagtttatcgggcttgagtcaatccctgtggaacttagtcaccacgggtgatgcctctatcctgccttggtttaatgcgctcaatgttgatgtggttaactctggcggtcaaattagagaccttaatgatatcttgctcgatgtgtctgacagtttgtcgaaaatgtcacgacctcaggcatataacattgccaaaaatatggggttcgatgacggcacaataaatctgttgcttgaaggtcgtcaggctatgcaacagatgctagaaactcaaaagcatatcgttatctccagtgaagaagagttaaagctcagtcgtcaacttaaccaacaaaacgcattagtcagcaagcagtgggaaggtttaaaaacactcatagccaactacttaatgccttacttcctccgcttctctgagaaagtctcaggctggcttgattatctcaataaaaatagagaggtagccaaagatctgtttaagggtatggcggttgttattggggttttattgatccctgtattatggcgtgcagcgactgcgatgttggctttatttgcccctatattcactggtacaggcttggttttagcattagttgccgctctagctttgttatataacgactacaaagcatggaagcgtggtgataagtccttattcgactggggtaagttggatgagggtattacctacatactgaaaaaacttgaagagtttgaaacgtggttcaagagcacaacagtaggtaaatggtttactgatcaggatgggaatatagaaacatggaagttggctctcggtggtttgcttgcttatttcgtggggccatttgcattaagcatgataggtacaattgcctctattggtggtgcttttgctggtctattgttatggcctactttaatactaacagcaattgctggtagtttactctggtttaaaaactacgttgataacttagatctaggttcacttgctcctgaaatggcaaatgtcactatgacgggagttaaaacggcagatgctttatcacacgtttcaaaagataaaagcaacgctgaaaatgcgaacataatattaagctctctagactggttaatgccgggtggaaaggctattggtcatgctattgaagaaatagataaaaaaggccttgataatgctacaaaatcaatgtttggaggtgtgggtaacttttttaatagagctattcattccaaaagaacaccaaaagaagaaaaagaagaaaccccaattataggcaataaaagaggtgaaagaaacaacaaccctttgaacatgaactttgccaaacagagaggagcaacattagaggatgggccagacgcaaggtttgcaaaattcaataccccttatgatgggctagaaagaacagcttggcagttaagaaggtattttgatggtaaaaccacaggtgttaaattgcagacagttcaagatatcataggcacttgggcgcctaaaaatggaaaagataagaacgatactgacggttatattaaacgtgtatctgaaaggctatctgtatcaccaacagaagtgataaatatctacgatccagaaatgatgtatgcactaatgaatgcaatgagtaaggaggaaatagggaagccactcccttacaataaatcactcgtgatgtctgctatcaatggaactggtgacccatctgttaatcttgcaaataacattaactctctcaataaagctattagtaagccactcgtgtcaaatacaggctttgaggctcaaaactttttatctcaaactcagaaattaaataaccaaccaaaaacggtaaataataaaacagaagtaattatgaatggtgatattaacgtcactagcacctctcctacgatacagggaactacaagtgatggcacggtggccgcaagggaatctctatcacaacttatgccaacgatgagttaa

SEQ ID NO: 310435 - DNA, 216 bp, Proteus mirabilis
atgaagttgctatggattcttgttgctgtgtgttcggttattggttttgtaaacggtatgctgcctgccatcattcttgctgaaagtgctccccagcaagctgctggggcagcgataggaattggctgggctgtcataccatattgctttgttaaagcagtaagtatgatgtggccaacctcagttattattgaaagcaacaaggctgaaaaatga

SEQ ID NO: 310436 - DNA, 996 bp, Proteus mirabilis
atgaaaaagatagctattggtttgtttgtttttgcttcattttcagttaattcagcaagttttgattgcagtaaagagccaagtaaagtagggcagttaatctgcaatacgcctgaattatcaaaaatggatgatgaactttacgttgattacctacaagcaaaattagtaactggtaacaatgcagagtttaaaaaactagttaagcaaaactggaagcttaggcaagataattgcgagacagtagaatgtattgcggattggtataagagatccactgtactttataggaatatagctaatgtcaacgcttccaagaatattgagacaaagaaaacaaatcctaatgaatacttttatgcggaacctgtaaagctagatggtttacttctaaatgaaagtgttgggtttccatcgctaaggctttttgagatcatctctgtatcgtcaaaagatggtgggaaagaggctgatgaattaccagagtttggagttggtgttactcagttagttattacaagagataacctgtgggaacaattcgagaaatacaaaggtaagccagcaactgttacttgtggtttatttcatgctcacacagctcaccacaaaacccctgtaatgtgtaatgtaatcgatatatcactagatgaaaatcaggcgaataacgataatagagcaagtagtaatcataatgtaaaaagtagcaacacattagatgatttttttaaaagcaatcctgaattaagtaacaacatttacataaaaaaagccattaaagatatggctgcagctctttcattgcaagactcatttatatcaccaagccctaactcaagtgtgttaagagcaacgagtgataacttgaaggagaatgggtacgagtatggacgactggcgataagaacccttcaagacaattgcaggataggcgctggtgatctgtggggattgagagataaagaatgctctatcatccttagttatagagactaa

SEQ ID NO: 310437 - DNA, 336 bp, Proteus mirabilis
atgagaactgaacatactaggtctatacaaaccattaaccatgcaactgaagtaattaattctttttttgatgatgcatcagaaaaaaatttttccattaggcgccttagcgtgagaaccaacccaaaccgtcaattattcattgtcactgttgatgatgacttggttaagggtgattttaaggtaattccatatgctgaagtaactgtggttaaaaataagatgcgatttacagtaaatccactgaagcagtatccagccatgaagtcgatgtttgaagtaataaataacaccatagaaacatccatttttgggtttatgaaaaaatttcattaa

SEQ ID NO: 310438 - DNA, 732 bp, Proteus mirabilis
atggcacctgacctagttgattcttactcaaaaaatctcaatgtaaaaccgtatagcacctcagaacaagaggtcgataaattctaccatctatcagcggatggcgacttgcttgaggtcgttgagtttattctgaatggcggtgattatgatttctatattgagatatataaggctggttgtactgatcctgatttcttcagggaacaggccttggaaaagttaaatgatggcgatactgaagatctcattattgattacctactaagcttagatatgttagatgatagtgaaggtgagttggtaggaaggatagcctacaatgaattcacctttaaaaaaggttctgaaattaaaagtggaaagcaaataaaggccgcatttatagctgatgattatagaagtggcggattaggaagatctatttataaaaggcttgtgtataaacatgagcatattatttgcgataatattcaaagtgttgccggcgggacgctatgggctagtggtataattacattggctggtgttgatgtgtacgatacacgtaatgaatgtataataggcgtgcttggagataatttcttagcaaccaacggcatgaaaccgtggagtgctattaatattaaatcagttcaatcgctggatcggtgggatgcaaattcactggcagaagagagtcgccatcacattgtcaatatccttagtagagaaaacctattcagctattag

SEQ ID NO: 310439 - DNA, 708 bp, Proteus mirabilis
atgttcggaatgccagatataccaaactggaagggattgcctaacgctggattagatgcaggtattagccttggtggtgctgcgttaattaactccctgttcggtaactactggggaatattcaatgaatacggtgttccgttattactcgctgataacgtgatatcactccagtatgaaaataaaagccgtgttgtaaatgcgcctatcgaaagaggcacatttgccagctacaacaaaataagcgatccgtggaaagctaccgtacaaatgagtaaaggtagcggtggtgctttagagcgcggtgctttcttggctcaacttgaaatcctatctaaaagcacattgcgatttatcattatcacgcctgagtttgtctacaagtttgcaaatatagtggggtatgacctagcgcgagaggctaaagacggggcgacacttattaaagtaaatgtgcatcttgaagaaattcgagaggtcacagttagctatgcagaggaagaagtcaccaagccagatgattcaaaggtgaaggataccggtgatcagactcaaaaggtggagtctcaggggtttaactttgattggaatagtggagatagttatttatatcagggggctgaatttctaaaaagtgcaggtgatggctttctaaaatcattcgatgaaataatgaaatttgcacaaggacaaatatctggaggttaa

SEQ ID NO: 310440 - DNA, 933 bp, Proteus mirabilis
atgcgtgtattactagctccaatggaaggagtccttgactctttagttagagaacttttaagcgaagtaaatgattatgacttatgtattacggaatttttacgcgtagtagacaaattacttccagtaaaatctttttatcggttgtgtcctgaattacataatcagagttatacaccatcaggtactttagttcgagttcagttacttggacaatatcctgattggttagcagaaaatgcagttagagccatagagctaggatcgtatggcatcgatttaaattgtggatgtccttcaaaaatggtgaatggaagtggtggtggtgcgacattacttaaatctccagagctaatatataaagcgactaaagcaatacgtgatgcagtgccagcacacctacccgtaacagtaaagatacgcttaggatgggattctagcgcacaaaagtttgaaatagccgatgctgttgagcaaggtggtgcaacagaaattacggttcatggacgtacaaaagaagatggctatcgctctgaaaaaattaactggcaagcgattggagagcttcgtcaacggctctctattcccgttattgctaacggcgaaatttgggattatcaaagtgctcaaagttgtttagaaactacggggtgtgatgctgtcatgctaggaagaggggctttaaatattccaaaccttagtcgagtagtaaaatataatgaacctagaatggcttggttagatgtagttaaattattgcagaagtatgtacaattagaaaaaaaaggtgatacaggcatgtatcatgttgcacgaattaaacaatggctgggctatttacgaaaagaatatgatgaggccacaagcttatttgtagaaataaggcaattacaaacatcaaaagaaatagctaagactatacaatcgttatga

SEQ ID NO: 310441 - DNA, 852 bp, Proteus mirabilis
atgaatacagctttatgtacacaagacaaccaagtttgggatgctgaaagtttttacaagttatcgaatgaaaagcttcaattaatgcgtaaaagtcttttgtgcacagaatgtcatggaaatgcttggtttcgtatatctagttatggaaataattcacctcacttttgtgctcatcatgaagaaaattgtcctttagcgacaacatatgaagttattggagaaggtgatggtggaacaggtacgccagcggcagatttggataatggtatcgttttaaatctaggaaaagaaaagaattataatatagatgtagcaaaaaaagatgtagaagaacacattattacaggccaacaacgcacaagcgaacaagtgaaaaatggtggtgggctaagttttcctgctcatatgactttaaaaaatgttttatatcagttagttcgctcagataaattatattcatcagaccaaagaattattattaaagatgatatatctgaaggtttaccacaaatagcaaatcaactatttgtcaattttgctgatgtaaaaccttggttaaatgagcagaaaagaatattttggggattcattagtgacgctaggcaaaccaaagatgggaagatttggttgaatgcaggaaatattagctcaggattaagtattgcgattaaccctgaaattgggcaagattttaaagaatactttaaaattgaagattcactagattcattagcaggttgtcatgctttaattataggtgattgttattatgcttcttcaggtaaaccagtaatttggtgtgctaatttgaactacttgatgctaagaagatataattttaccgagtag

SEQ ID NO: 310442 - DNA, 651 bp, Proteus mirabilis
atggcgttcgattggattgcaggtacagcgttagctgttggtatgggatcattatatttaacctataaatctacaaaatcagctaaaagagcgatagatacatcaattgagttgtatgaaaagcaaaagcaggatgatagagaaaaaacaagatttatagataagaaaaagctaatagcaaaaataaatattattgagaatgaaatagttaattgctatatggagtacatgaacttttttaatttgtgcactgcaattaaaaatagagatagtttttctgtgacgattggtaattattctaactttacaggtgtagcgatagatgctgaaaaaacagattgtgtcagtggtttgatacaaccgccaaaacttgattttactaatgatttcattaatgaattgtatcttttagatgaaaaacttgctggagatatagtctcattgaaaggttacatgaatcgaagttcgcatattatgaatcacatggttttatgtaaggatgatttaggaggtcacgttgaactaaaaaggtatgtggaaaggttttatacagatattgaactattcaaatataccatggagaaagttcatgatagtcattcaattacaggggtatcactaatgaaaaaatatcaattagctcatatgtag

SEQ ID NO: 310443 - DNA, 228 bp, Proteus mirabilis
atgataatgtcattgtcatataatatgaacgaccttacagcaatagctaatggagataatcaattacttcatgaaatacgtgattttcataataaagcaagtatacaaacagcatgtggtaacaaatacatacgttcatttatcaaccttggtggtgaagttgaatataaatttacttttaaaaacaaatctatttatgatgtagtaactataactagttgttattaa

SEQ ID NO: 310444 - DNA, 582 bp, Proteus mirabilis
atgcaaaaagatgatctattaactcatattgcttcagctggatataatgttgggtttggtgcgaagaaaacttttgctacatttgatatcgtcagcaaaattccaggttggattggtatcatatcactagcagtctctattttaggtctttatatggacgaaatgagttctaagcatatagcggccatttttatcattttaagtattggtagcttatacatcaatttctatgatggtgataaaagtaaatatgaagaagcgggtaagaagcaaactacaatcttcagaaagattgaaagattgtattacgatgcaaaatcagaaaatgaaccagattctgttaaatatattgaacaacttaacaatctgatgaacgattttgatgaaaccactatcactaaacaaatttgtggaagcaattggtatgctcattataaattttttagtgaaatggaaaaaaggtggattgaagatcagttgtcattgaccttttggaaggataaactccctaacacattgaaattatttgtttttgttattttctgtgttgctgtgtttttgatgacttatagatatatttaa

SEQ ID NO: 310445 - DNA, 1362 bp, Proteus mirabilis
atgcaaacatcagagatgtttcaaagttttttgaacaatttgaagattccagaagaacgtatgcgggcaattgcgacgcattataaaaatgccacaagaagacttaacatcaagtttcgagggactgcaaatggattcaacaatcgactaaaagtcggttcagcaggccgtcgaaccgcggttagcaaaacatcagacttggatatgctgtatattatgcccgcaagattatgggaagattaccaatccggaattaatccacagagacgtttgcttcgcgatgtaaaagaagcattaaagctgtcctttgtccaacaagaagttaagattgatagattagtcgtacagatcgtttttgaatctttccatatagaggtgcagccagtctttgagactgatgaaggctattttaaatatcctgatactaaagctaataatggtaatggagggtggcgattaactaaaccacgaatggaaattaccgagatgaggaattttcgtaacaataaaagtcgtaatcttcataatctttgccgcatgttgcgagcttggaaaaacagaaacaccgttgacatggggggacttcttattgacacattagcttggagatttctgaaacaaacggatgattatgataatactggaatggtcagttatgggcttatgtgtcgagacttctttgattttttgcatcaagaggatgaacatgagcattatgcagcgataggaagtgggcagagagttaaggtctataaaaattttcagcggcaagccaaaagagcctttaaattatgtacacaagcaattgaggcttatgagaatggctcgacaaagaaatgccatgaacactggatagaagttttcgggctaactttccctaaggcaactgtggaaatacaagactctatggggttggaatcagctaaattcattaatgaatccagtacaactgagtcatggcgcaaaacggaagagtttacagatgaaaagtttgatgatgttgatataagataccctctcgaagttaaatgtattgtcaaagaaaatggatatagggatcgttcaattagggcttatctgtcggatatagctcgttcttggttaccgccgcataaaactttatcattttcgattaatcaggcaagtttagatctcattccagaaccttatgatatttactggaaagtcttgaatagaggtagagaagctgaacagcttgatgaaattcgaggccaaataattttaggtgaagtaactcatacggaacatacaaaatttagaggtgctcataaggtttggtgttacatagttaagaataatatagtagttgcccaaaatgttatcgatataccaatcgagtaa

SEQ ID NO: 310446 - DNA, 201 bp, Proteus mirabilis
atggcaacaaaaaatatagttattattggcggtggtacggggggtactattctcgctaatatcttagctaaaaaattaaatgatgaaatattttcaaaaaaaataaagattacgcttatttcagataatccataccattattacaaacctgcatttatgtatattgcatttaaccttttcttaaaagaagagttaatgtga

SEQ ID NO: 310447 - DNA, 249 bp, Proteus mirabilis
atgaattacgttaatatgttgttttttgatatctacccctatattgctggtgctgtttttcttatcggtagttggttacgttatgattatggtcaatatacatggcgtgcaggctccagtcagatgttagacaaaaaacatgcgacttgcttcgaacttattccatattggtattatcggcatttttgcaggccattttctggggatgttaacgccacactggatgtatcaatcttttctaccaattga

SEQ ID NO: 310448 - DNA, 471 bp, Proteus mirabilis
atgttaacgccacactggatgtatcaatcttttctaccaattgaatataaacaaattatggcgatggttggtggtggtacttgtggtgtattaatgctgattggcggcattatgctgttaaaacgtcgtttgacgaatgcacgagtaagagcaacatcgtcatttggtgacatcatgatcttaaccttgctggttgtccaagttgcactcggcttactgactatcccattctctgcacagcatatggatggtagtgagatgatgaagctggtggcatgggcgcaagctattgtgacattccatggcggtgcttcggcaaatcttgaaggtgttgcacttatttttaaattgcacatattcctaggtatgacgatttttttattgttcccattctgccgtttagttcatatttggagcgtgccaattgagtatctaacgcgccgttaccaaattgttcgtaatcgacactaa

SEQ ID NO: 310449 - DNA, 315 bp, Proteus mirabilis
gtgaaaggacaaggaacggtgattgcttcacctcaaggaaatatcacagtaaatacaacagggaacagtggattatcgacagcagggagcggtgatgtattaaccggtgtcatggcaagttttttagcacaaggtatgccaatcgcagaggctgtgccgagtgccgtatggatacatggtatagccgcagaccaattaataaaacaaggaatagggccaataggattaaccgcatcagagcttattgataccatccgtgcggttcgcaaccaaatgtgggcaacccaccaacagcacagcgctgatttattttaa

SEQ ID NO: 310450 - DNA, 417 bp, Proteus mirabilis
atgaaaaatgaaactaatattcgccttggcagacattgtgtattcctgatgcacgtccatttggtctttgtcacaaaataccggcgaaaaatatttgatcaggatgccattgaaaaattgcgaggctactttgccagtgtttgtgctgattttgatgttgaactggttgaaatggatggggaacgggatcacgttcatttactgattaattacccgccaaaactggcgatatctaatctggttaacagccttaaaggggtatcgagtcgattacttcgacgtgatcgtcctgatattgcccaacgtgattactacaagggggttctttggtcgccgagttatttcgcggggagttgtggtggcgcaccaatatccattatccgccagtacattgagcaacaggaaacaccgagttag

SEQ ID NO: 310451 - DNA, 1176 bp, Proteus mirabilis
atgtctcatcagtttgatagcttcatgccaaataaaacagaattaatgaaaattttagatgaaaaatattacgatattttaaatttattggagaaacctgatgacaaagttgaacatgaacatatgtcactaatcttttgtttgatcatttttaatgacctagaaaaagaaggaaaaataaataatgaaataaaaatagagaacgtatttaaaattatagagaaagaatatggaaataagcaaatcatcgagaaaattaatggagagaatattgatattcttcctttaatgacatctattatttcatcatgtccaattgattctgatagaatggattatttacttagggatagttatttttctggagtaaagtgtggaatctatgattataaccgtttgtttatgtctatagtacctgttaaagaagatgctaaattattccttgcctacaaagagagtggaattgattctatagccgaatttattaatgcaaggtctagtttatttgctcaggtttattaccataaaaccaatagagcattttcatctatgctaaataaattatgtgataacatgttagcagaatatagagagaatctaattatttcagagatttatgatgaggataccactagttctaatactgatagtagtgaagcgttgattaaattctatcttgactgtagtgatgattattttttgaatgaaaaaattgcagaatggattgatttaactgaaacagaaaataaaaacgcaaaaatcttagatgatattatcaataggcatccttggtcaaaggtctatgaagctaagcattatattagaaatataaaaattacagatagagatgatggatatttaagaaaaaatttacaaaaaaaactatcagagatattagatttacatatagaaaaacatttgtatgcaattgatattgtttccgatacagcatttaaagatattaataaaactgaggttaaactattgattaaaagtattaataataaatatgaaataaaaaaaatagtagattgcgatgataaattaaatcaatatcaaattataaaatatttcattcgtgtctttattgatcgtgatgaaaaagataaaataccacctgaattacttaatgaaattaatgacgttgtaatgagggaaataaataaagaaccataa

SEQ ID NO: 310452 - DNA, 1416 bp, Proteus mirabilis
atgaacttaaagctatgtaccaacatatttctaacggtttttgtcatattagccgtatcagctttaatagtttgttggaatgatataacagtaaaagaagtgtggtctaactatattagtaaaccagatccatgggttggcatttttacaagtataggtgcaatttttactgtatttgtttttatagtgaccgcatatgcatctttaaaatcaggagaaagtgcaaagattgctgctaaggcattagagctatcgcgcgagagtagtcgaagagatgattttattaaacaatttactttattacttgaacagcataacagatctcatgatgctttagctaagagtatagattcaaataatgggcaattaatatcaaatagtagtagttttattcagtggggaatgacattaaaagaagcttctaaaaaattatttcaacactatcaatatagtccatatatgagaatattatatagaaatctaaaatatatcaatgagagtttttatcttgaatcggatgataataaatatatagaagagaaaaaacaatatactgctattttaagaagtatcattagaaatgatattcttttttttgtggcaataaatgctaaaaatgaaatgaagatatttagaagatatgaggaaattttaaagaatttttctttttttgaacatattattattgacgatattggcacaaaaataaaatttaatattgaagaaaagaaaaatgtttttagtttaaatgtaaagaaattgtttgagttctatttaaatgattaccttaataaaactgtctacgtcagaacaacactagaagataaaagtattattaatgaaggggttgtgctagagagttcatttgtttatgaagtgatgagggatttttctctttggcaatacaatttgttcaaggaggatttattaagaataattgaatgctattattcttatttgaaaaatttgcaaaataaatatttcacattgaatgatagttattatttatataaaggcgagaaaacagggtggataaataatagtaaagatgagaatctcatcttaaaagatgaaattattctgaatgatggtttttctatttctctagttgatgaattagaagatattttagaaggaaagattaattgtaataataaagtgattaatttaaacaaagatattttttttaaaaaagaaggagatataaattatcagagttttgaatatataaaaaaacaatgcattaaaattaatttaaaaaaggaagaattaaataattattttgaaacgtatgatgatatgtatttgaatattttaaattatgtcattaaagaagttaatgaaacagaactatttaaaaaaatgaacgaaaaattaaagattgatagtactggtacaattttatttgaaaaataa

SEQ ID NO: 310453 - DNA, 360 bp, Proteus mirabilis
atgaatattgatgatgagttaactagaaaaattcttgacccaattcatggcattatacgaatgacagctctggaatttaattttattaatcatccattataccaacgtttacggaatattaagcaaaattcttttttatataaagtgtttccttctgctgttcatagccgttttgagcattctcttggggttcttcatttatcaaatgagattctcaataacttgtatcttaatgctattctttatgataaaaaatataatgatggaaatgttttttgtgatataaatcatattccaaagcataatgttcaagaattaaggctagctgcattactgcatgatattagactggccccctga

SEQ ID NO: 310454 - DNA, 822 bp, Proteus mirabilis
atgtctcgtttagcttctcgctttggcgcagccaatatcattcgtcgtgaacgtccgttaaccattgatgagttatatcagaccgtaccgagtgtctttggtgaaaataaacatgaatcttgtagtgagcgttatacctatatcccaaccattactttattggaaagtttacagaaagaaggttttcaaccgttctttgcttgccagactcgtgttcgtgatatcacccgtcgtgagcatactaagcatatgttacgtctacgtcgtgaaggtcaaatcaccggtcaacaagtgcctgaaattatcttactcaatagtcatgatggctcatcgagttatcagatgttaccggggatgttccgattcgtttgccagaatgggttaatttgcggacaaacctttggtgaggtgcgtgtgccgcataaaggtgatgtggtggaaaaagtgattgaaggagcttatgaagtgttaggtctattcgagcgaatggatgagcaacgtgatgcgatgcaatccctgttattaccgccaccagcacaacaagccttagcccatgcagctttaacttatcgctttggtgaagagcatcaaccagtgaccacggaacaaatcctcacaccaagacggtatgaagatgataaacctgatttatggacaacctatcaacgtatacaagagaatttggtgaaaggaggtctctatggtcgtaatgctacaggtaagcgtagtcatactcgtgcagtaaaaggcattgatggtgatgtgaagcttaatcgagccttgtgggtgatggctgagaatatgcttcagttagcttcgtaa

SEQ ID NO: 310455 - DNA, 1179 bp, Proteus mirabilis
atgagtgatttgttcaaagaattacgattcatggcgcttcgttctacagatgatacgaaggtatctcacgtcatttccgaatcaacattaaggaaggaatataactttactgatttctataaattggatgacaacaagtatcgggtgatagacttatatcttgagggacgggtagctgaaaaagtcaattatcccccaaaaaaaacacagaacagtattcctgtaacgggtttagctcataattccattatatatacgccattaggtaatcagtctttttctctttatgcgagcgatctctttacaagaaagcctaaaggagagttgcttagtgcaatgaagttatggataaaggagaaagaggatttttatgaaaaattatataaaacatactcaacagtaaaaaaagagcacaaagatatctatttattaccgataagtctgaaggtcaactttgaacattatgatgaagatccggtagcgagaattaatcatcagagtgccttactaacgagtgcatttaagttgctcatcacaaagataacctctcgtaaaggctatgaggtatttcttcattacactcgtgtcattctactggataatcgtcaacagccttttttacatgttgtgctttactataaagagtctgatatatctgatttctacctacgagatttaactcggatttggtgtgaggtcgtcgataaaacgatacaagaaaaatgctctgacattaagctccagacgaataaagataacgatgatttgagtgttgaagtcgattatgtgtattttgataaaccatttccatcaatgcataatgatgaatacgaagatgagtggaaaaatggtaaacattacagcttaactgatagtgaaatacgatatggctttgaggtatctgcaacggatttaccatctgcatttaatcccttacgtcacaaaaatatcatcgttccattgagtaaaaaacgccgtactagtagttatttaggttatgtcggtcggttttctgaagcagatagctaccttaacgaagcagagtttaaaaaatggatgaaaggcattaagcaagaccaaaaataccataccgattacctagaaaggatcgctaagcaatatgtaaaaatacccgacttgaataatctaagtcacggtgtttttacttacaaaaaataa

SEQ ID NO: 310456 - DNA, 564 bp, Proteus mirabilis
atgagattatcgattaatcctgaattacaaaatttactctatcgacaacaaaccaaactctttgaacactactcgaagatattaacgataagaaccgatttccattggcgtgaagaaagtgaacgatacgtttatggagatgaacatcaatttagtcacgatatgagttacgtcatgctctacttatccgagtatgcaggtgtcattggttatgcttgggtattggaagaagcgccagacagaggcttacatgctcatgctgtcatctatgtggatggtcaacgacattgtaagaaatggggcttttatgaattactggataggttatgggcagaggtgacggaacgagaaggttatcttcatcattgtcgtgataagaaagcatatcgagcggatatcagtaagcccatccactttgatgataaacggggtaaaagagcgatgcggtatgtcgtcaattacttggctaaatacgaacaaaaaggcgttaaacctatctaccatctctcgactccgcctacggaaaagcgaatcggtcgtcctcgtaagtcctcttcgtcttaa

SEQ ID NO: 310457 - DNA, 213 bp, Proteus mirabilis
atgaccaatacaaccaattaccccttactgaatgaccaatttatcgacatgaaatttatcactcatctgacaggattaacggataagtggttttataaactcattcaagacggtgaattccccaaaccgattaaactaggtcgtagttctcgttggttaaagagtgaagtcgaacagtggctacaagcgcgcattgatgaatcgcgtacttag

SEQ ID NO: 310458 - DNA, 345 bp, Proteus mirabilis
atgggtaaaaactccgttcgtagttttgcgagtgagtgcggtatcagtgatgctacaattagaaaatacctaagcggtcagagcctgccgggtattgacaaaattgaagcgatagtaaagtacacagggtgttcattagagtggttagttacgggaaaaggtactctgcaatctgcaccactcaataatgtcacaccgaaagaaattgaagcgggttgggactacatctttaactcattgaccttagaagaaaaacatcgcgtgatttcaacgttcaatcgaggtggattacaggcgctatttgctgaaggcatcatgaaacacaatgaagatgtaataaattga

SEQ ID NO: 310459 - DNA, 1005 bp, Proteus mirabilis
atgcccaataacatgactataaactatttacttgatagtgatcagtccttacttggtactgaaatttatcaaaatatcacggaaatcacgttgccttcaccacacgaaacagggcataaaataacgttaactcgtttctttgaagggcatacatctcatcgctggttaattgagcgaattgttcacaaaactccagaacaaacaaacttatttttaacaccaagaattgagtgtgaaaatgaaatatttctcgctaaaacatacaactccaaacgaactgtagcttctcgaataacaaaaggtacattagtcgaagttgaatatggatttatacaatcaaccaaacgcataacgggaaaaattagctcagtaaaacgctaccctgattttgtacaaaatggagaaatgcataagcgccgtttggccattgttataaattcttgttttccctcaacactacaagttattcctattacttctattcatcaaaatgaaaatgataaaagtatttttgaaatatcattaaaatcattagataaattagtccattacaataacaaagacataagaagttttgctcttggtcatatgatccaaaccgtttcaatacggcgtattcttccacctttagcaatacaaaaagataaacaatgttatagagatattggttattcccatcgtctagacagagaagatatgaaatcattggaattggcgcttacaaccgctattggttatggtgattatcaaaatataagaacagagagaaaccatttaagattaaatattcaagagttaacaaaacaaaatgcccaactaataaacgagttatctatccatcaaaacaatcaagtagcctacgaacaatcatctatccgttgtcatgcgctagaagaaaagatgatcgactggtattgctcaatggacggtagtctttctcaagaagatgcccgcaaaaaattagaacaagaactcactctttatttagaaatctatggtagttga

SEQ ID NO: 310460 - DNA, 153 bp, Proteus mirabilis
atgaaagaaaagcgtaatgacaaagaggaaagcatgattacaacacaaacagaaaaagaaccactagggttctttttcataaactttaattttcggctatgccacttaaggcgtcgcaggaatggaagccgttccatgaaccctgccggttaa

SEQ ID NO: 310461 - DNA, 684 bp, Proteus mirabilis
atgagtgaaatatcacacttatctgcaacagataaagatactatagatgcatgggcaactgtaataaaaacactttatctaattattggtggaatcattggtggtgttcttagttattggtggaatagaaaaaaatatcttttagctaagcagaagttggaacatgaaattgaattatcaaggaataaaattgaagatgataaaaaagctcttcgccagcaaatgataacaaataatattgctccaatgaggcaggcttggattaatgatgttagagaaagaacatcaaatttcattcatcaatcaaaagttttgcgtatgatactattttccactcttttaaataaatcaaacttaaataaagatgaaataatagatagagagcgtaatgccagcacgatatattaccaactaaatgaatcagctcaatatttagatgtaatactaccatactccattgatggtgatagagatgagcctgaggctgataaattaaggataaacatcataaatatcatcgatacttttgattctttatttaaagatattgattcaaaaaatctagataatatagataaatacttaaatgaaatactctcaataacaaatcttgcaagcaaaaataccaaagacattcttctaaaagaatggagagaaactaaatcactaaaagaaattgagtaa

SEQ ID NO: 310462 - DNA, 828 bp, Proteus mirabilis
  misc_feature (809)..(818): n is a, c, g, or t
atgccaagcatttcccctagaactgatgaagtcattgcttatttagatagttttgaaaatattatttgtagtgggaatagtgacgatatattgatgggaagtgataaagataattatattgatgcagcttcaggtaaagattatgtcctaggattaaatggaaatgatacgatcaagctatctgaaggtttcgctaatggcggtgaggggcatgatacttatattatttcacgtctaaatactttttataaagggaaagcagaagtatctattattatcgatgaagtaactggagatgaaaaactagaaaataatcaaaatgcatctgagcaaaatattgttaaactagaacataacttaaaagatataaaatcaataaaacgtattggttcagatattgtttttttattagataatggctttattatcaatgaagataagacacaaacgccacttcctgcaacatcaatacgtttaaaaaacatatttaaaaatgagaacagttttgatgtactaactaattattgcattattacaaatgatgggtttattttaaataataatagcgatgctaattgtaatagtgacccgttatttaactttagctatatggagaattattcaaatcttgatgataaatatgaatatatatacataaatagcaataatcgagagtttaatctccgttcacgctccggttctgttaaatataatatattgcctgaattaaaatacagcggacttgctaacggtaactcgatagagttatctattgaaggagatagtggcaataatacttatttagccannnnnnnnnntagccattga

SEQ ID NO: 310463 - DNA, 1668 bp, Proteus mirabilis
atgctttgctattcttacgtaagatttagtacccctgagcaagctagaggcgatagtcatcgacgccagatggaatttgcccaaaattactgcaaactaaataatctaacattagtagaagatctcagctttaacgattttggcattagtgcctataaaggtgataatctaaaaaatggagctcttggtaagtttcttgagctggttcattctggatatataccaaatggcagtacattaattattgaaagcttcgaccgtctatcacgtcaaactgcaattaaagcacaagcaattttttcagaaatcatcagcgctggtatcactattgtaacagcaatggataataggtcttataatttaaaatcagtcactgaaaacccttttgatcttatgtacagccttatgataatgatcagagcaaatgaagaaagcgaaacaaaaagtaaaagagttaaagaggctataaaagcaaatatcaggaataagaaaatagtctcaagcaaacttccatattggattaaacataacaaggaaaaagatatattagagttaattcctgaaagagttgaagtaattttatatataatagaaaaatatctatcgggattaggaataagtaaattaacccagcatttaaatgataatattaaaccttttgctggaaaaaactggtatccagtatatttgcagaaattacttcggtctccatcattatatggagagagacaatataatatagataatactttacatataatggataattattatccagcaattataaataaatcaaaatttgctgtaatacaagaaaacttagatttaagagcgccaacaagaggcggaaaaatatcatcagctataacaggaatacgaaaagcgtactgtggttattgctatggggtattagtatctcaatcaacaagaagaaatggaaagatagtcgatggactaagaagagtacgatgcaactctaaccataatggaaaacattgtattacaagcacatttagagcctctcttgttgaacatgcaatagctgaatattgtagtcagcacattgatttatcatttttagaaccaacatccaatgcttctaaattaaaactatctgaatataaattagaattacacgaattaaataaaaaaatcaataactacgtaaagtttatatctgaaggtcatgttagtccagccattgtagcctcattaaatgaggctgaaaatagaaaaaaagaaatcgaatacaatataaacaaattagatttagatattttatctgataataaagaggaattaataaaaaaatggagagaaataaaaacaaacctagaatcatataatgaagagaatattctaaaactgagagaactaattagaatatcaataaaaaccatatatgtatttcaatatggagtatggggaaaagaaaattcaataatacttccatctagaaaaagcatcccgattgaaaaaggagctttcactatacaaattacatttaagagtggagtaagaaaaactttagtattaggagataagattgaagatatggaagtaatacctcaaaatagaacaataaaagaaaatggaaagacttatacttcagaagaatatactaaaatacttgaagataaaataaaaatagagtacgaacaaaaatga

SEQ ID NO: 310464 - DNA, 303 bp, Proteus mirabilis
atgttaattattcataatgagctttgccatcgagctggcttttcgattgattggcatagaacgaataaaatggattacttgagagccttaagcgctgaaattaaatccccatcaaaagggcttttggataactacttatttcagtttataggagatacccgagatcgaaatctttggggggagtctataaatggtattcgtggtttagatggtcaaagtatagaaaattccgtagatggtgagtacacggacatagcagttgctcaaaagtatcaatcattcaagatgaatagaggtctgtga

SEQ ID NO: 310465 - DNA, 366 bp, Proteus mirabilis; identical to SEQ ID NO: 181418

SEQ ID NO: 310466 - DNA, 906 bp, Proteus mirabilis
gtggatagcgcacgcgcccttattgcccggggatggggagtaagcttagtcagccgttgtctccgggtgtcgcgtgcgcagttgcacgtaattctcagacgaaccgatgactggaaagatggtcgccgcagccgtcactcagatgatacggatgtgcttctccgtatacaccatgttatcggagagctgcccacgtatggttatcgtcgggtatgggcgctgcttcgcagacaggccgaacttgatggtatgcctgcgatcaatgccaaacgtgtttaccggatcatgcgccagaatgcgctgttgcttgagcgaaaaaccgctgtaccgccatcgaaacgggcacatactggcaaagtggccgtgaaagaaagcaatcaacgatggtgctctgacgggttcgagttccgctgtgataacggagaaaaactgcgagtcacgttcgcgctggactgctgtgaccgtgaggcactgcactgggcagtcactacgggcggcttcgacagtgaaacagtacaggacgtaatgctgggagcggtggaacgccgcttcggcaacgagcttccggcgtctccagtagagtggctgacggataatggttcatgctaccgggctaatgaaacacggcagtttgcccggatgttggggcttgaaccgaagaacacggcggtgcggagtccggagagtaacggcatagcagagagcttcgtgaaaacgataaagcgtgactacatcagtatcatgcctaaaccagacgggttaacggcagcaaagaaccttgcagaggcgttcgagcattataacgaatggcatccgcatagtgcactgggttatcgctcgccacgggaatatctgcggcagcaggccagtaatgggttaagtgataacaggtgtctggaaatatag

SEQ ID NO: 310467 - DNA, 468 bp, Proteus mirabilis
atgttcgatgatatattttcagaaattttaacatctttaaaagaaacacataagaatttcacagaacatataaatgaatgtccaccaataaatataagtacatgctccaccgtaggatacaatggatatcgatgggcaactcaaatagatccatattggaatgcttattttttaggattagtcttatttctagcatctgatattgaaaataatagagttgatagcacacatgtttactcatatagattcgcacctgactttgcttcaggggctttattctgtaaaaatataaattggaggaaatttcaagaagatagtttagagctagctaaatcagatgaaaaaattaattttatagtcacatgtgatatagcggatttttacactcgaatttatcatcataggttagagaattcattagacagaatagacccacataaaaacatatcatctaaaataaaaaaatga

SEQ ID NO: 310468 - DNA, 198 bp, Proteus mirabilis
atggtactggcagatcaagagggttgggatagatatgaagctgctaaatggatgactatgcgccgttggcttgacaaaaatagtgccgatgattttgctcaagaaattcgaacagaattgactatagcccctaaacgtcatgttagttttacacgagaatacttaggctggggggtatttgtattaattgctcgataa

SEQ ID NO: 310469 - DNA, 324 bp, Proteus mirabilis
  misc_feature (243)..(252): n is a, c, g, or t
atgctatgtacttgggctcacgattacaatattacaggtattggcatcgatataagcccgctgtttactctacaagcaaaatctagagcagaagagttaggcgtcagccatcgagtgcattttatccatcatgatgcctcagattatattagtgataaaaaatgtgatatagcagcatgcataggagcaacttggattgctggtggtgtaattgaaactatcgagctactcgcaaaaagtatnnnnnnnnnngtattaaaacaggtgggcttattcttatcggagaaccatattggcggcaaattccaacaacacaagagatag

SEQ ID NO: 310470 - DNA, 150 bp, Proteus mirabilis
atgatttccctcttatcagacgatattttaggtatgtttaagcttccatttttaaaagatactgaaaattcaaatttgtttgctcttttaattttggaaaaaattaattgtcttgatcttgatgtttttaaccaagatatagcagcatag

SEQ ID NO: 310471 - DNA, 282 bp, Proteus mirabilis
atgatttataagcaagcactaaatttatcacaaatttatggtgtaagaaaagagctaataaatgatatagcattaggtaaattattaactaagttagggcttaagaaaaaacggaaaagaacttcagaaggtagtacatatgaggttattcttccttttgaagaaaacataatgaacacgatgagattaaaatttgaagaaataatgggattcaatattgagtggtgctcgttaaatgaacacttggagttagtgccaaatgacttaggggactcctactaa

SEQ ID NO: 310472 - DNA, 303 bp, Proteus mirabilis
atgataaaggttattgcagaagattttattaaatcaggatcaatagaaacggttttaccactttaccaagaattggtaaaagctagccaacaagaagcactttgtattagctatgatttatttgttgatgagaaagatcccggtcactttatttttattgaatcatggccaaataaagaagcactagatattcattgtaatagtgaacattttcgtcgcatcattccgatgattaaacaatatacaaaagcagagtcaaaaatcactttagtcaatagtgtatttgataaaaatatagattaa

SEQ ID NO: 310473 - DNA, 357 bp, Proteus mirabilis
atgaaatcgttaatgccaagttgctcccaaagttcagagtttggttatcttttggaaaaggtaaataaattacgattattatatagctttatagaaatgaatatagaaaatttagttaaagaagatttaaagagttttataaaagaagatgatttttatcaactaactattaatggaatgatatctccagaacaaatggaaaaatatttaatatcacttatggataatcaatggaaaggttattttattaaaataaaaatgaggttgctacaacagttaaagacaatgttcaataaatatcctgaattattatacttatctgatgattttagaaatcaatatcaattaagaaaataa

SEQ ID NO: 310474 - DNA, 423 bp, Proteus mirabilis
atgatcggaccaattaatactgcaacttcgacaaatggtgccagcaacagtattagtaaagaaagtcagcaagacatagaatataagcaaccacaaataaacgaaagtgaaaattatcaaaatcaattaatagaaatatctgatgatatgtctatggtggcaactcttttttctcagcgattaggaaaattattagacaaaaaagccaataaagggcaagaagctttatatattgcagaagatggtgctgatgagaaacttgataaggtgatgcttcaatttagaaaatcggggagaagtttacaggaattattgcaatatttacgtaaaatgttccctgatcctagtgatctcgttatggttttacgagaattacttaggaaaaaaaaattaggtgcacaattagatgcaggctttgtttag

SEQ ID NO: 310475 - DNA, 669 bp, Proteus mirabilis
atgaataatatcgcttttataagtgatcatgattggttagggtattctatagaaattgcaataacatatatagatttgaaacatcaaggtatggcgagtaaagctattgatcaattgaaaacaaatttcaatataaaaagtgatacatttattcaccatggtgatgctgtgcatttttacaaaccaacatcaaaaacatctatgtataaatacgtgttggcaagtgttggatatgcaccaagtcttttggtaaatatggaaatagataaaaaacgttatctcgtctctgatactgatgaaaagctctatctcgtttctgaattactacccgatcatcggcttaaacaagaattttttgaactttataaattacccaaaacagcatcacctggtgtaactggtggtggagaccactcaagtggtaaatatacaaactttattatttctaaaataattagtttagttaaatataaaggattaacagaatctgcatataatattagagcagaattgatcaatcaaaaaagactatcacaagccaaatacgacgaaagcagctatttgctagacttagatcttatggtcgcagatacattattacccacattacttatgccagaaggtataacggcgctgaaaaggttcaaatatgctaatgacaatgattaa

SEQ ID NO: 310476 - DNA, 600 bp, Proteus mirabilis
atggaaaagagtaaaaaaataaaatgggctatgcctgatgcctttattattatttttggcatcgttattttagcggccatcgccacctatttgatccccgcgggaagttatcagcgggaaaccgttaatggattaaaccgcgttgtccctaatagctttaattatgttgcacaaaatccagcttcattgatggatgtgttttatgcaatccctgtagggttaaaacaatctgccagtattattttcttgatctttatgattggtggcgcgattgccatttatgatcgcacccgtgctattgattcaggtattaatgcgcttattgttaaaaccaaaggtaattatcaagctcttattattacggttgcttttatttttggtatgttgtcatcccttgggcttgcggccaatgccgttattgcatttatccctataggaatagccctttcgcgatcaatgaaacttgatgctattacgggggttgcagttgtttatttaggctattatgcaggtaatgcggttggtgtattagatccaactattttaggtactgcacaaacattagctgaagttcctcttttttctggtgttattttttga

SEQ ID NO: 310477 - DNA, 471 bp, Proteus mirabilis
atgatgtcagctgtatcactaaaatttggtggaaagttaattgaagagctttctcaaaagattccttcatctttgtttgctttaaatgaactcataaaaaatgcctacgatgcattttctccagacattactatcactataagtccatcaaaatcagtaattactattacagataaaggcattgggatgtctgaagaagagattgcttccttatttcatctatcaaaaagtacaaaaaaatatggacatgaagtaacctataacgggatgacaaggatcacccaaggttctaaaggattgggttttctctctgctttcaaatttggtgacacagtaaaatggaagacatataaaaatggcaagtgtagtattttttcagtaaaaaaatctgatctagtaacccaagatgatatttcaggtacacaaatttcagtaactactagtatatgtctgtctcttatacacatctga

SEQ ID NO: 310478 - DNA, 1326 bp, Proteus mirabilis
atgaataaaaaaaaacaggatatagcgattatcaataaaatcaaagcctattctttgacagatgattcgtattggtctttcaaggggcgctatagtaggcagcattgccatgctttgatccaatatccagcaatgatggttcctcaaatgcagggggaacttatagatgttattcaaagcgaagataagagcattaaaactgtatttgatccttttgttggctctggaacaacgttaggtgaatcaatgattcgtggactaaattttgtaggtcatgatatcaatccactagctattcttgcatgtgaagtgaaaagtgggcctctatttactagaaaattggaagaaaaagttataaaattgctgtctagtattgaggataatagtgctgatgtagtagctgtaaattttcctggaattaataaatggtttttacctcatgttcaattagaacttagtacaatatacagagcaattaaagctgagccctcgaagtgggcgagaaaaattttttggttagctcttagtaatactgttcgtactacttgtaattcaagaggttcaacatataaattacatatcaaatcagaagaacaaatagaaaaaattggttctcctatagtaatatttaaaaaaaatctattaaaaaatattgagaatattaaagctcaaaaagctatcttagccaaaaatggatatttaaaacgtaataaaagtgttagtaaagtaattattaaaaatgtagatgctaaatctcgtaaaaaatcaaaaattaaatatgatttgcttattagctcacctccatatggtgataacgctactaccgtaccttatgggcaattttcgtatttacctttacaatggattgatcttgatgatattaatcagtctattaatcctcgcctattaaaattacagaatgcaattgatagctctagtttaggtggttcactgaaagatgtttctgaaaagcataatgtattagaggataaatcattttcactaaatgaatgcattaaaagcattaattcaataaaacctggaaatacaagaaagctgatcagttttatttatgatctatatctatcacttataaactctataaatgaattacgtagtgatgcatatatggtttggacattaggtaatagacgaatttctaatatagaagtacctttagaccaaatagtgagagaacttttagagagtctcggttgtaagtttgtatatcaactagaaagggatataccaagcaagcgtatgccagcaagaaataaagttgtaaaaactatgggtaaagaaacagttttaataatgcgacgttaa

SEQ ID NO: 310479 - DNA, 2163 bp, Proteus mirabilis
atgaaaagttataaaatagcggtcagctacgatatgtctgactatatttcaacccaccgtgaatgtgtcgatattctacatactgatttttctgatgttgccgtgattattatttcacttaatgacattcagaatggaaagcttaatttaattgaacaaaatagctttgaacaacctatttttgccgttattaataaagatgaagttatccctgctaatattattaatcgattaactggtgtaattgatttaaataaaaaaaatagtgagttatataataaacaactagaaactgcagcgttaaaatatgaagagagtctattacctccttttttcggcagcttaaaaaaatacgttgaacaaggaaattcagcttttgattgtcctgggcatcaaggaggtgaatttttccgccgtcatcctctaggtaaccaatttgtcgagtattttggtgaaaacttattccgctctgatttatgtaatgccgatgtttctatgggtgatctgctgatccacgaaggtgccccatgtgccgcacaacaacatgcagcaaaagtctttaatgccgataaaacttatttcgttcttaatggtacatcttcctccaataaagtcgttcttaatgctttattggcaccagatgacctagtattatttgatcgtaataatcataaatcaaaccatcacggagcattaattcaagcaggagcaacgcctgtttatcttgaagctgcacgtaacccatttgggtttatcggtgggattgatgctcattgttttgaagaaaaatatcttcgtgaactcatcaaagaagtcgcccctacacgtgcaaatgaaaagcgccctttccgcctagccgttatccaattaggtacctatgacggaacaatatataacgcacgtcaggtagtcgataaaatcggacatttatgtgactacattttatttgactccgcgtgggtgggctatgaacagtttattccaatgatgaaagattgttctccacttctacttgaactgaatgaaaacgatccggggatcttagttacacaatctgtacataaacaacaagcgggattctctcaaacctcacagatccacaaaaaagatcgccatattaaaggtcaaaaacgctatgtaaatcataaacgtctcaataacgcctttatgatgcatgcctcaactagtccattctacccattatttgcagctttggatgtgaatgccaaaatgcatgaaggtgagtcaggtaaacgtttatggatgaattgcgtaaaaacagggattgaaacccgtaaattactcctgcaatcctgtaaacatattcgcccgtttattccagaaactatcgatggccgtgcatgggaagattttgatactgatgaaattgccaatgatctccgattctttaattttgttccgggagagcgctggcactcatttgagggatatgaagaaaatcaatactttgttgatccatgtaaattactactaaccaccccaggtattaatgccaaaacaggaaaatatgaatcatttggtgttcctgccaccattttggcgaactatctacgtgaaaataacattattcctgaaaaatgcgatcttaactccatattattcctgctaacgcctgcagaaagcatggcgaaaatgcagcatctggtcgcacaaattgctcgctttgaacaattactggaacaagatgccccactgaaagaggtacttccatcagtatatcatgccaaccaaacacgttatcaaggatacaccatccgtcaattgtgccaagaaatgcatgatatgtatgtgaaatttaatgtaaaacaactgcaaaaagagatgttccgtaaatcacatttcccacaagtcagtatgttacctcaagaagccaatatcgcttttgtgcgtggcgaggtggagttagttgccgtggaaaaaattgaaggccgtatcgccgccgaaggtgctctaccttatccaccaggagtactgtgtgtagtaccaggggaaatttggggtggctctgtacagcaatattttctagcgctagaagaaggaattaatctattcccgggattctcaccggaattacaaggtgtatatatccgcaatgatgaggacggtcgtctgcgggcatatggctatgtaattaagcactaa

SEQ ID NO: 310480 - DNA, 1131 bp, Proteus mirabilis
atgatagggaatatatttattagaagtgagagtgaacatcttgaatttaactctgacaggactaattttgttgataattatttaactagaaacttaattaagactcttgaatctttaaattattttattcaaaagaatggtgctatattaaaggatgaattaaaacaagaaaaaaaacaagcacctaccggaaaagcgtttccaattgacacacctaaagaaccaattattaaaacagcgtcaatattaattgacagaagcaaaaatactaatttttatattccctcagaacaaattgacttaattgattatatatctatagctaaagatagcctaggtataaatataaatagaaatgaaattataataagtgtaaacaatgaaaaaacaggaaatatactaagctcaatagaaacaccatgtgatattactataaactttcgatatgatgaccctctaactggtattgtatctaaagatgtctatttatgcttcaaacaaaaaatatcaaatatttctggtagggcaaatgaaaaatctttatttacaatacaatcaggctctaactataaagtcgatattgaaattgtatcagatataattcatgctattgataaggtatattccacaaaatcaaaaaatgattaccttcctcttatagcttgttcagttagatcgatctttgaaatatctaaagatagaacaatcaggaaacacaagggtttattcaaaaaatttaataacgaaaagctcagtgaaaaaacaaaaagagaaataaaagacactctattaatagatacattacagatattctatctagttaaaaaaaatgcaaaactgcaaagttatatttctgatgttttagatattagctttaaaacatttaataacttactaaattttaacttcttaggccttaaagaggcgattaaaaattcacatattggagctcaccaatctacgcgatttttatctaaaccaagaatcgagaagagtgctgacatctgtggtcttttcactgttatctgtgacattttaataaaaatagataaaaacaaaataaatgatctagttacaaaaaaaataaatgaagatgatttgaatttttattttaattcattagtagaataa

SEQ ID NO: 310481 - DNA, 831 bp, Proteus mirabilis
atgagtttgaatgattataagttaatcatcaaccaagctgccgagataggaacttttcaggtggctttgggtggtggaaatccaaatcagcatccagatttcatagaaatattagaatatacgaagttaaaaggaattgttcctaactatacatcaaatggtcgagggctgagtgatgaaattattgaggcaacaaaaagatgctgtggagctgtagccatttccgcgtaccctccatatgatgagactgagcagagcttacaaaagttgcttagtgccggagttaaagttaacttacattttatcttagatgcgtacagcattgatactgcaataagctggttgaaagagccaccagagtttcttataggtattaatgcagtcatatttctcaattataaaccttcaggaaggaaaatctttgaagataaattgttaagaaacagcgatagacttgatgagttttttaggttggcgacatcttcgaaaagaaagctaaaggttggatttgatgcctgttgtgttagtggtgtatttgcgagaacaaatgcaagtccagttatggttgatgcctgcgacgcagcaagattttcactatatgtgtccgaagatttaaaggtatacccatgctcatttcaaagtggtttagagtctggagatactttgaatgaggatacatcattagtggatatatggactaaatcagcaaatatgcaatcttttcgggattactttagctcagatcgttgtggtaagagttgtagtcacatgtcaacctgtaagaatggttgtcctatttttgaacagcttgtagtttgtgggcaccgatag

SEQ ID NO: 310482 - DNA, 402 bp, Proteus mirabilis
atgaaaataaagcttgattttgtatccaatagttcatcaacctcatttgtctatatctcagacactgaattgactatagatcaatttctagagtcggttggtgttgataaagatggacctgtaggagatctgttttgtgatatgtataacgagttacataacgcgattgtgaattatggtaaaccaataaaaacggaagatgaagtaaatgctttgttaggttcttatgagtttactcctgacgttattgataagatgaaggatggtattgccaacggaaaaaatatcattacttcatcattgagtagcgaaggtgagtttgctgagtcccttctttgtatgactgtgtttgaaattaactctgaacacttttatatcaatgcttacaataactattggtga

SEQ ID NO: 310483 - DNA, 378 bp, Proteus mirabilis
atgagagatgaagttaaatttattattgctacctcttgggaaccaaatattgaagagtttttgtcatctctagggatatcatcaggaggtcttggcgcacaaatattctcatctgtatatgatgcattttttaaatcctcaatcaacgtaacagaagaatatgaacgattttactcagtagagtatggatgtttatcggactatgtagaaattcgatatggtaaaaagctcagtgatgaaaacttggaagccaaaagaatatttgctgtaacttggacaccacaagtagttgacgacaactatgaagataataaattagaagcagttatacatagccttgctattttgaatgaggtaaacaatgaaaataaagcttga

SEQ ID NO: 310484 - DNA, 1068 bp, Proteus mirabilis
atgaatgatctaattcttttgagattgttttgtgaaatatatgaaggacaggatattggatatgttcctgatatatataaaggagaattgttcgagcgttacttgatgatgaaaatagagcagttccttccagagcaaaaatcaattgctatcagctccctgaaaaaaatttgtcatcagatgcttaagaatgaaaatttttcattggtgtcaaacgcaggcttcaatgctattgagaagcaggtcatagataagctagttggcgaagatatcatattgagaagagaggtacctccatctgggctgatgtcacttggcattgagaatatatcgttcacatatgatgaaatgagagactttctgctagcttattttatggtggtcgatgttgaaccggataaacaagataccagtatattcaaaaaaatgagtgattggccaatatatgagggtctattccgttatacctatatcttagctcgaaaatacaataatcaagatattatatcgttgtgtgaggatttcgatgactttaacacccactatttgaacaacttacctcttctatcttcaaatctgcaatcagatgaagatgttaaacgaataagaagcatattaagggaaagtactattagttcagaaatactgtctgttgcttggtttctttttagaaaaagagatacttctgaacagcttaacttaggcgttttaaactcacatttgggcacattaaataatgatgaatcagaacaatttttcagctttatgtatggcgcaaatctcgaatataggcgcaatgattggagagaaaacctaaacagacagattggaagtttgaaagactatagcgacgaaaacaagatgttacttgatccattggtattagcgtttattttatataccttaccttatgcatattggaggcaaagggaacatgtccttaatttctttaataagtacaaagatcaccataatgtagctgctgccatagcctcttgtcgaaattcttgttcagaatatattcaatcatacttagatgagttagatcagggagttaaaaagctatga

SEQ ID NO: 310485 - DNA, 876 bp, Proteus mirabilis
atgaataatgttatagctataaaatttgattacagtaaagataggaaggatcccgaggatattttaaatatcctaactggttatgttaaattttataagagtattggtgtaataaccctaacgtcaatcaatgaaaaagactacgctcattttgaactaataggattaaagagtggttcagctatagcctttatcagttgcataaaagaaaaattcaataaacttcttgattccacatcatcgagactagcaagtgacctatgtagttcccatgagatatcaaccagagaacaaattgaggttatcgcacagaatatgtctacttctatcacgaacaatgaactcaatggaatgaaaatcgaaccagtaatagatgtggagcaactagggaagtctctatctgatttatccgcactaaattctaaacttaaaaatggagagagcacatatattggcttcggctcaatggaaaatgatagtaactacaattacaccaaactaaataataaattcacatttgttggtgatgttagcgaagttttgtccgcaagaaaacgccattataaaagaaaatctaaattttatgttaatgtgtcagtgaataaaggtgatacagtctggaagcttgaagaagtagaaacaaaaaatatatttctacctagagtagctgatgaaaactggcttcaaagatatcaatctgggcttatagacccaattgggccaaaagaccttatggaagctgttatagaatacaatgaagtttactatgaaaataaaaataaaaaacccaagctaaaggatgttaaaataattgaagtcatagatgttgttcgaaccaaggggtatcaaagtgacatgttcccaaaacgagaatag

SEQ ID NO: 310486 - DNA, 477 bp, Proteus mirabilis
atgttgttcgaaccaaggggtatcaaagtgacatgttcccaaaacgagaatagaaaaaatagagcaatgagagccgatgcttacggtgaagctatgttttttttaattcctgtattgggcttgttcattgtttctatcgctaaggactattcatctataaaatcaatactatatcatctcttaacaacatctgactggtcacttatgtctgcggttattttcgggcaatgtacacataaaatggcaaaagcaatacccatgatgcaagggaatatagatagtgcccagtattcattttatgtatctaaaagagtgtttctcatcgttgtttcaatgcttacatacgcaattattatttttttccctaatgtgtatttgggtataattcaaataataatatttttattgtcattgtttatttttgttagtgatagcattgcaatccacagactaatgagtatacagaactccaaataa

SEQ ID NO: 310487 - DNA, 375 bp, Proteus mirabilis
atgtactgcaacttgcacctcatccactttgcgatatcttcattagtgaaaccatctggcgctatgattattggttcagttgtcatgatgactcctacaattcaattcattttcatcaacgattgttatcttatagatttagtatatgcattacacgcaaatgcgtcaagcgcatatattgtttttgtcaaaatagaaacggacgggttttatccgtttgactttttatttatgtctttaaaaatctcagattggaatgcagatcacttctttggtggggagagggcacaaaaaagccctcgcggggagggctgggatggggttatttggagttctgtatactcattagtctgtggattgcaatgctatcactaa

SEQ ID NO: 310488 - DNA, 210 bp, Proteus mirabilis; identical to SEQ ID NO: 301952

SEQ ID NO: 310489 - DNA, 144 bp, Proteus mirabilis
atggccttcatgctgcatcatgggctctccttaaactgtcatagcggttcacgttggcctgtggttccaatgtcagccttaaccccttgggaattggaatcggtttgggtggaggttcttcggtcaaacgtcccaacagattaa

SEQ ID NO: 310490 - DNA, 4971 bp, Proteus mirabilis
atggcattggttggtatttacaacgaaaacgacttttactcacaccattatctgagcgaagtgtttgtcggtgatattcgtggtgtattagaacagtggttagaaaaagaaaaccaagcccgcgaaattgaacgtgcggaaaaagagcaaggtggtaaaccgcagcgtggctatcgtgcacctcacacccagctggcaagttatagcggtgagtactttcgcgagttaaatcagcatctcagtgttaaagacatcaacaaacgccttagtaatcagcgtgcgcgttggagccccatcttgcatgcgctcgggtttgagataaaaccaacacaagtcttgctagaaaacggtcagctaccggttttgtcggcttatcaagaccatcaaggtttgcctctgttatggatcctcgaagcccatgatccatccatggatgactgcgctgacccactgtcattgcccctgttatcacagcagttagaagcactcgaaccagaacagcgtaaggttctattaaaaacacagcaaggtgatgagctgagttggcaggacttaatttcgaaaaaaatctttagcgccccggagccacctcgctggttgctgttattgggcaatcgccaatgcttgttgctagatcgtaccaagtgggcgcaaaaccgtttgttacgttttgatttagaagagattcttggtcgtaaagagagcgatactctcaaagcgatggctgctcttttgcataaagattccatctgcccacagcaaggtcagaacctactggataatttagatgaaagctcacacaagcatgcgttttcagtatccgaagatctcaagtacgcgctgcgtgaatccattgagctgttgggggatgaagccgcaaaacagctgattgaaaaagggtttacctacgacggcaaaaacaacattgatgccagccaactaagccttgaatgcttacggtacatgtatcgcatgctgtttttgttctatatcgaagcaaggccagagctaaaatacgcaccgacaaactccgatgtctacctcaaagggtacagtttagaagcactacgcgatttggaaatggtggatctctctaccgaagaatcgcgcaatggtcgctatattcacgacagcttgcagatgctatttcgtctcgtggccaaaggctttgctggcaacagcaaacagagcgatagcgagagcagcttatttgatgatattcagaaaagttttgccatccgcaaacttgaaagtcacttattcgatgacgcgcgtatgccgtatttggcgcgtgtggtatttcgtaacgaaaccttacagcgcgtgatcaagttaatgtcgttaagccgcccaggaaaaggcaaaggcaagcgtcgtggccgcatctcttacgcgcagttggggattaaccagttgggcgccgtgtatgaagccttgctttcctaccgtggcttttttgctcaaaccgacttatatgaagtgaaaaaagctggggaagagctcaatgagctggaaacaggctactttgtcagtgccgagcagttggccgaataccaagatgatgaaaaggtatttcgcaaagatggcaccttactcagccacccgaaaggcagctttatttaccgcatggcggggcgagatcgtgaaaaatcggcctcgtactacaccccagaagtgctcactcagtcattggtgaaatatgcgctgaaagagctgtataaagagcagctcgaacccctcgcaaccgttgcggaacaggccgataaaatcctcaccatcaaagtgtgtgagccagccatgggcagcgcggcgttcttgaacgaagcgataaatcagctggctgaaaagtaccttgagttaaaacaactggcagaagatacccgtataccgcaagagcaatacacccgagagctgcaacgggtaaaaatgtacatcgccgataacaacgtttacggtgtggatttaaaccccgtcgccgtcgagctggcggaagtctcgctgtggcttaacgccattagcgatgaagcctttgtaccttggtttggctatcagctttacaatggtaactcattaattggcgcacgccgccaggtgttttcgactggcgacctcacttacacaaaagccaaagacccaagctggttaaacatcgagccaaaacgtttaggccataatgaagcgcgcagtccgcatgaggtttatcactacctgctgcccgataacggtatggcaaactacagtgataaagtggtaaaagcgcttaagccaacagaaattgccaccatcaatgcatggcgcaaaacctttgttcgctcgtttagcatggaagaaaaagatcagctaaaacgtatctgccaaaaaattgatgagctatggcaagcgcatgttgagcagcgccgaaaagagcgcaatatcaccaccgataacctgcaaatttggccaaactccgcgcgctcagcacagcgttcaagtaccaacgataaagataagttactgagtcaatcacagcagtcaggttcagccgtttacccgcgcttaaaaatggtgatggattactggtgtgcgctgtggttttggccaatggagagtgccgatgatctgccaagccgcgcggaatacctaggtgaaattgagcaggtactcgaaggctatgcagaaacagcaagtcttaatcttgttgaatctggctctggccaactaggtatgttcgatgaaatggcagagtctcaaacgcaagatctgtttgccaccaataacagcggtaccgtcaataaagacttcttatatatggtcttcccgcgtttagcgctggtggataagctggccgcgcgctataaatttttccattgggaactggaatttgccgatatttttgccgaccacggcggttttgatctgattcttggtaacccaccttggttgagagtggaatggcaagaaagcggcattatgggtgattttgagccacaatttgtattgcgtaagttttccgcttccaagctaaatactctacgtgaagaaatgctgctacagatgcctgcgctagaacatgcgtatttttctgaatatgaagaagcatcagcaacacaaaactttctaaatagtttggcgaactatcctgagctcaagggtagtaaagcgaatctatataaatgttttttaccactatcttggtctattggaagtaaaaatggcacagcgggattgttgcatccggaaggtgtatatgacgaccccaatggtggtaggttgagagctgagatttataaacgattgcggctacatgctcaatttcaaaatcaacatatgctatttccaatagggcatcgaaataagtatagcgtaaacatatttacatcccgagagaatgacaccgtcgattttatcaacgtgtctaacttgtttttaccaaaaacattagacttatcaatccaccataatggctcaggaatagtaggaggaattaagaatgatgaggggaactgggatgagagtgggcataaaaatcgcttattaattattgatcaagatacactaaaattgttttctcaactttatgacgaagaaggaaccccttcgcttgaagccagattgcctgctttacattctacccaattactgtccgttttagaaaaattagccagtcagccgaaaaaactatcctgtataagaaaaagtttcgttaccactcaacactggaacgaagtgaacgcccaaaaagacggaacaatagaacgacagacttgtcatcctgatcacacaggtagttttgtgttatctggcccacatttttatgtaggcacgccagtctataaaacgccaagagcaatttgtaccgaaaaagggcattacgatattgtcgatctccaaacgatacctgacaactacctccctcgtaccaactatgtcccagcttgcgatgaagcagaatatctgcgacgtacccccaaagtaccttggatagatgaagccgatttggccgcatggcaggaaaagggtgcaaaaccggaagaaatgccagagccaagacccgtgacagattactatcgatttgtgaatcgtgaaatgatagggccatcttcggagcgaacaatgatctcaacgataattccaaaaagggttggccatataaacacttgtttaggaacggtgtttaaacgccatgctgacttgttggattatttcggtatgacgttatctgttccaatcgattaccgcgttaaaagtacaggaatggggcatgctaatacaacgttgatcaatcagctaccagttctttcaaatgatatttatcgcgtggctattcatttgcgctctttagctttggttgctttaacaacagcttatcaagagttgtggggtaagtgctttaaagcgcagtttgagaatgaaacttgggcaaaagaggattctcgtcttcccaaccgtttttttagaaacctaaccgcagaatggcgtcgcgattgtgcactacgtaccgattacgcacgccgccaagccttagttgaaatcgatgtgctggtagcaatggcgttgggtatgactttggaagagctcaaaaccatctaccgtgttcagttcccagtaatgcgtcaatacgaggcggatacttggtacgaccgaactggccgtattgtgtttaccgcctcaaaaggtttggtgggcgtaggtttagaccgtaagtttaataagaaaaacgggtttaccctctcgattgaagatggcgtgtttgccgataaaaccagcgggcagggcagtgcagccgagccgtggacgcagagcaatgtagcgctcggttgggaagatattcgcgaactgaaatccggcaaggtttacaaaacttacatggatgacacgcaacccggcgggccggttgaacgcactattgaatacatcgccccattcgacaagtgcgaccgtgagcaagactacgaaaccgcatgggcggtgtttagtgagcgttttgcctag

SEQ ID NO: 310491 - DNA, 249 bp, Proteus mirabilis
atggaaatggaagataaagcgaaagtcgctggtgctgttggtggcctcggcggtgtaggtggttcaattggtgccgtatcagcggcaggttccgttgcaggtttaagcgctgctggtgtcacttccggtcttgccgccataggtggtgtagttggtggtggaatggttgccggacttgcaattactgcggcagctccattggcgattggtgctggaacttacggtatatacaagtggctgaaatcatag

SEQ ID NO: 310492 - DNA, 2274 bp, Proteus mirabilis
atgaaacacgatgaactaaatgagcgtttaagaactttcttaatttcaagccgagaaaatgcgggtttgtcccaaagtgatgttgctgcaaggtctgaggtttttggaattggaagaacactggatcaacgggctgtttcaagaattgaaagtcaaccaatgaatgctgatgcaattaagattgctgggtatttatcagctgttgggattcagccaagcaagtattatgaaattttaacggaatacacttataaagaggatgattacattatgtcagaagttggtgagcaaactatcaaaattaaggtagaggcagcgaagtcgcttatttcatcagtgaaagatagtatcgattgctacaatcatgagtatatcgattcaatagggcttaaaagtaaggttgaacagcttgaggctgtagtagatggacttaatagaaagcctgtaattggatgttttggtcattttgatgcaggtaagtcaacactgattaacactgttatcaatcagtcactgctcccgaccaaataccaaccagcaacatgtgttgttaatcttcttatgcacgaatcagataagcctgaaacaatttcaggaaatgtggctgtgtttaagaagggctttaagccgcatatggttcattcaccagttgatgtcgaaaaatatttaattgaacaaggtggttcagaaatattggatagattaggagtacacaatcatgaagatgatgtattaaatgaggcttatatcgcaattgttttttcagattccgagatacttcgttcggtttggttgttggataccccaggggatcttaacggttcagatgagtctgatactgagaaggctctcggtggtgtagaacttgctgatggtgttgtttttgtttcaaatcataccgggtttttcaaagatagtgatttagggtttgcatcaaatatcatcaggcagagaccaccagtggataaggagaaaccacttgatcatttaatgttcatccagtctcattgtcactctgaaataagcagggatgatgtggaagctgtaggtcgtgtaaccttcaagagaattaagaagcaactagataatttaatattttcatcatggatggaagatggatttattacgcaattaccagaaagttcagaactaacagcacgagttcaaccattttggcgtgaaaataatgactatcgtagtgatacattgcgaaaaatcaccgaaatggcttcgtctctaactttgaaccaagcatcaatagtagataagtatatttctaatattctaaagaatatcgaaaatatgctattgagtgagattgataatctaaagaacaagaaatcggagactttcgaaagaattaaggaggtcaacgagaaggatgcgcgatttcgtgagttgtctactcagttgataaaagattttaactccctcattgaatcatgtaatagccacaaaaaacacgacttggatgttatgagtacctattacaaatacaatacttctgttgaaggtctcgaagagcttatcaatgacacctattcggacaagaaagaggctcaatctgagttaggcaattatattggtcagcttttgactacaaaattagaaagcacattaaagactagtggtaaagccgtatcgacggaattagattctttgttgctgagatggcaggaagctgcccccacaatctcaactacaggagttgatacccaaatatctggattgggtgcagagtttagtgcatttaactcgagagcggcttttgttggaggtcttgcgggattaggaagtcttggagctatggcattatatgtatcgactatagcaagtaatttaggtgcatatattttagttggaaaggcagctggagtattggtgtctttagggttggttggaagtgttactacagtaacttcattcgttgcagccatcggtggtcctattaccataggtattgctcttgctgcggcaattggttacataatatatcgactagctggtggtagttggcaaaaatcactcgcaaaaaaagccgcagaagcaattcgtaaagagtcggtgtttgatgacatagagaaagctgtaactgagtattggaatagtacatctaaggcaatcaaagctggtttggatgagctaatcatcaaaactgatgaatatattgaaaatttaaaggctgatgcgaaagttgaatatgatattgatgaagttgatgtatgtgtctcacttatcgatgacacgttattaattcttaagtctagcgactaa

SEQ ID NO: 310493 - DNA, 519 bp, Proteus mirabilis
atggcttggtggctcgctgctcctcttgttatatggggggcaaaaaaaatatatgatgctgttactgaagatgatgagccatcatatagctcaagttcaagtagtacactatcttctgcgaagtctactcgtacaaagttaaggaaaaaactcatacgagaagcaatacttgagaataggaagtcgctaatatcaaaggcttttagcgatagagagtctgaacttgttaagttggatggctcaagtaaagccgatgcgatcttagacgtttccggttttaatgcggctttaggtaatttgtctagcactgtaaggttgttaaatccttcttatagtgagagttttgaggaagttgatggttcgttgttggttttcacagatttaaactcggaggtcaacaatgttgcaaaaaaagctgacgatgaatatggttcaatggcgggcattgatcactacaatgaatacgatagatccatagatccattcgtagctaagttgcaaagtgagatttcaagataa

SEQ ID NO: 310494 - DNA, 1965 bp, Proteus mirabilis
gtgcatatcgagagaataaatctacagaactttagaagtttcgggccagaagggcagagcatagctgtcgatccggatctaaccaccttggttggagcaaatggtgctgggaaaacggtcttgatgcaggccttacagcgaatgtttggcatctccaatgagcagcggacgattcgccgtcaggattttcatattccctctttggaagaagaaatacccagcaagcggactctcacgcttgaagccattgtcgccttccccgaactggatgatgaagatggagatcactctgtgataccagatttttttcatcatatgagcgttacagatgagggtggaaaactgaagtgtcgtttgcgcttggacgcggaatgggaagatgatggctcaatagacgggtacattacgagccagttccgtgcggttacgacatggggcgagccagaagttgctgattttcaaaatgtacgtccagcggatcgttctcgaatccaactgatttacgtccctgccacacgatgcgcagtttctcaggtatccgcttttctgaaaagccgactttggaaggctattaactggtcggaacaagttcggtcatcttttactcaaaaagccacagagctgaacgaatcttttgagggtgaaaaggcgattagtatcgttaccggaaagctcacagagcgttggcatgaactgcactctgctggaactgatagtacaccgaagtttcgcccggtcgacctacgctttgaagaattcgttcgtaaggtggaggtactgctgcacccagatgaaagtggtcgggataggagcattgatgagctaagtgatggccaaagttcgctgtttcacatcgccatgacttcagctactctcgatgttgaaaccgagatattagcccaaccggagagtgaagattttctcggtgcagacttgttcttgccctcgttgactattttggcacttgaggagccggagaataacctagccccatactatctatctcgaatcataagtcagatcagcagtttagtgcatggcttaagagcgcaagcagtgctatctagccattcgccgagcattctcgccagaatccagccaacacaagtaaggcacttcagactagcaacagaatcaaacaccactgtcgttcgtcaactgactttaccctatgaggagaatgaagctgcaaagtacatccagcaagcggtgagagcctatccagagttgtatttcgctaaagttgttgttctcggggaaggggcttccgaggaggtaattcttcctgctatatcagaagctatgggcataccaattgataaatcttttgtcgccatggttccattagggggccgccatgtaaaccacatgtggcgtttgctaacagatttacagatcccttttctaacattactcgatctggattggggacggcacggcggtggctggggaaggattaagaatgcagttgccaaattgatagagtatgggctcgacccaagtgagatatttgggcaaaacctcaatctgttaggctaccaacataaccttgctgcatttgataattatccggtttcagattggaataacattaatcagtgggttcaatggctcaggcggcacaaagtttatttttcaagcccattagacattgattattcgatgttaaaagcattcactagccattatcgggtggtcccagatgaaagctctaatggaccatctatgcatggtgatccaggcaatgctgttatgggagatgaagggtatcctggcttctacgcggatgatgtacttaacttgcgctggtacagatatctgttcttaggaagaggtaaaccaagtacgcatattcgagtgcttggctctattccgccagatcagttggctcaaaacgcgccagaagagctacgggctttagttctagctattcacacaacccttcaaaaccaggaggcaaggtga

SEQ ID NO: 310495 - DNA, 1893 bp, Proteus mirabilis
gtgaagtttattcgacctgaccactggcagccgaaggggatcgacgatcttgagccaaatgcttggcaagcactaaggcaacgagagtccacaagtattatcgctggccctggagccggaaagacagagtttttagcgcaaaaggctgcatatctgcttgagactggcctatgtccatcaaacaaaaaaattctggcgatttcattcaagactgatgccgcaaaaaatctcgcagatagagtgaaagagcgttgttcagaagaagtcagcaatcgatttatttcgatgacttttgatgcattcactaagaatttaatagatcgatttcgcatggctttgcccgagcatcatcgcccatcaaagcgatatgaaatctcttttccatcttttcaccaagagaagcagcttattagtagtttcagaaataattttgggaacgcagtaggtatctatagctttacgcaaagactccaaaacatgaatcagtttatcggaagtgtgcgtataggagatcccaagttgtcatggttggaggaggaatttttaactttttggttgagtcagcaaataaactaccccgacggtgtttccagagtgtcatttccggcgctaaatcgacttgctgaatatatcgttcgcactaacgatcatgttcgtagatctattagagcatcatatcctattgtttttgtggatgagttccaagataccacgtttgctcaatatgattttctatcttctgtttttaaatcaagtgaggctgaggtaacagcagtaggagattacaagcaaagaataatgggttgggccggtgctaaaggtgatgtgtttcatcaatttgaggctgacttttcagcagaacgacattcattgctccttaatcaccgctcttcacctgaattggtcaggatacaacatgttattgcacaagctattgaccatgaagtgagagaggttcagacaagtaatatcaatttaatttctggtgatgccgcttggatttgttgtagttacaatataaatcaggaggctgctcatttggctgagtggatagcaaatgacttgctaggtaggtcactgaatccaagaaactactctattctggtgcgtcaaaaaccagaagattatgaacaacagctatcttattatctcgctcaacatggactgagcttacgaaatgagagtgtgaaaataggtcaaactacattacaagatttgcttgctgaagaactgaccattttgttctctactctgcttaggctgggactggtccgtcgaaatgcacaagcgtggaatcaactatcatcagatattcgaattcttcgtaatacgaaccaggaagacgaaaaggcactacgacaggttgaacgcgagctaacaaagttcatttctacactacggatgttaatgcaacagcctctgacacgggaaaatggtcgcgatgtatttgagcgaactataaaatttattaactcagacgatcttcgcagctccttttctcgttacgctacaggaaatttacttgaaataaacttggcagcactcgaagaattttttataaactgtgttgatactcagaactcttgggcaggtttgctagatgagtttgaaggcacgaaccatattcctcttatgactattcacaaaagcaaggggcttgaattcgatacaaccattttcatggggatagacgacaacgcttggtggtcttataagcaaggtgataaggaaggactatcgacattttttgtagcactgtctcgcgctaaacaaagggctattttttcctattgtcagcaaagagggcaacgaaccaacgtcgcagatttttatgagttgttgacggccgctggtgttcaggagtatgcgatccaaccaagtgtagtggcataa

SEQ ID NO: 310496 - DNA, 276 bp, Proteus mirabilis
atgcctatcgattatttagttgttggtggaaatttacaagggaacataataaaaaaagataagttgatgaaaaaactaactattactgaaagtgtaatatcatcaacaaaacaaaaaaccaccccaaaccctgtggttaccatggatgttatgcaccatagttttgatggaaatagatacgcaattgccatcaatggaacatttggcgatgacattattgatgaactaataattaaatacaaacctaatccaatacctaacaattttgttttataa

SEQ ID NO: 310497 - DNA, 588 bp, Proteus mirabilis
atgggttggagtgaagttatttctatcgttggtagtttaggttcggctgtggctgttgccgttagtttattgatattttggagacaaagaaacactgagttaatgagattaaaaaatgaacgagagaatgaattatctgcgttaaaaaaattaatcttgttaaattgtgagtcgctgaaagagtcactaaaacagaatatgaaaataactgaaacgataaaatcaggtaaatatgcaggtttaagcattgataagatcggtggatatttttatataatttttaaagatggttatacaaaggaaacaggcaattactattggaatacaaatgttagattttgctttttgagtaaatttttagaacatgagttattaatactagctaaacataatcaagaagtaataagtacacttatgtcaatatataagaatattgataacgttaataatttactggaatcaataataggtgattatgagcgtaaaaattattcgttattaaatgctagagctgaaggtgctgaaaattattgtattgctctaaatacttacatagataatctaatattagaagtttccattatttag

SEQ ID NO: 310498 - DNA, 270 bp, Proteus mirabilis
atgcgcatggacaaattaaccaatgctacctacggaacagctggcttaactgccttttttgcaagtctctcattgtatgaatggggctttgtaatagggatgggatttagcatgcttcttggattagcaacttatctgatgactcggcgagaacagcgaaaacgaacagcattatttgctgaattagttcatcgaaattgttctagtgatccgcgagaaatcgaaaaaatagttggtgagatgctgactaaagctaaaaaggacatctaa

SEQ ID NO: 310499 - DNA, 1269 bp, Proteus mirabilis; identical to SEQ ID NO: 80762

SEQ ID NO: 310500 - DNA, 513 bp, Proteus mirabilis
atgcaatatccaagagtaagtattaatggtgtatctgttcgcgtttatgacaaaggaagatataacctaaatgatttacatgcctcagccgtggcaaatggcgaagccagagagaatcaaaagccaagtcaatttttgagaagcaaacaggttaagacatttgtagaaaaattaagcgcaatgcaaaaatgcactgcggtcaaagtcattaacggtgggcttaatcatggtgtgtgggcattagaattggttgttattagatacgcagcttggctaaagcctgagtttgaaattctcgtatataacacctttagggatgctacgagaaaagggttagatatcatggctaagttgaacaagttagatcatgtaatcaataccgaaacaaaaaatgttagtagctgcgcgagaacgatggctaactggggtgttggtggtagaaagcagttactactaacagcgagggaacgaattcttaaagaagctcaaatctatattcctggtattgaatag

SEQ ID NO: 310501 - DNA, 264 bp, Proteus mirabilis
atgagattagtatatttcgtttatcaagataaaaatgcttatgaacgttatttttattgtgatgaatattccatgttttgggattctattgataaagttggaaatcctaatgattgttgtaatttctcattaaagagtagtattgtcccagctacattactagaaatatctaacaacgacctgatatcttatattgatacagtaaaagaatacgttatagaaaataacaaattaagtaaattaacatatattcatataaaataa

SEQ ID NO: 310502 - DNA, 372 bp, Proteus mirabilis
  misc_feature (6)..(15): n is a, c, g, or t
atggcnnnnnnnnnnctatatggcagttgcattaattccaatctattagatgagctttctgttgaggataaatatttaaaaataataaaaaagtcactcaaaaacttaaagattgcaccccatggtaataaaaaacgctttgaacaagagaaagaaaaatttttaatcaaggccaaacacgtactaacctttcacactgaaaaatgtagaggtattcggggaaaaataacacaagaaaaagttgcggaagcgactttaagtagccattgcccagagtgttcaatggtgttgttaaccagcagtattgataccgcgaaaaaatatttaagaggcgacactgatatcatgaatgaaataaaaaagctaggttag

SEQ ID NO: 310503 - DNA, 1026 bp, Proteus mirabilis
atgaaattattattaaccccttatattcagcctgatcttggtgtcgttttattgaagcctgaagcggagttgcttgagcaactaaaacaacattctcgtgtgattattagtgatgtaccaaagagtttagataaatggccttctggtgcattaacagggaatgaacaaccattattgaataacaaggacattattggctttttgaataatgaaaaagtgatccaagctatgggcgagctggcatcgatgaatatgtggataggcagaaatatccattgctgccagatcaacgatgagcatgacagttatcatcatcatgaattaacaaccacatggcataaagacggtgtgatacggacttgttggtaccatgataatcatattcgtaattcatcggcggggtgggttgctgaattagcgtataaaaatcgtattgcttggatgatagacactattcgcagtcgtttgagattagatgataaccattcgctgacgatacctgatttttttgcttttgccgtgatgcataaactggttgatgaattacctgatgccatattgcgtcgtattctaaattggtctgataaacctaaagagcgtagggtgcatggcggttttcctgaagctgatattgttccaaatgaagtgacagcactatcagtaatgaatgcgcgtttagatgccataaaacccgttattaatgtgactgtcgatccggaacctccagcctcatttcttcttaaacctaaaatgcgccgttgggagaatacccaatggcttcaatgggtaaaaacacagccttgttgtgtttgcggacaacaagctgatgatccacatcatatcatcggccatggtatgggaggtatgggaacgaaagctcatgacttattcactattccattatgtcggcaacatcatgatgagttacatcgtgatcccaagttgtgggaagccacttatggtaaccaaatcgaattgttattttcttttttaagccgttcattaggaatgggggcattggtttaa

SEQ ID NO: 310504 - DNA, 642 bp, Proteus mirabilis
atggaaaaagattccaaacgcggttccgcattgataaatgctatcaaatcaacatcaatcatcgatctcagcaaggagtacgctgagtgcggactggatatgttaattgactcagatgttttgaaagagattccttttattaatactgctgttgggatatttagtgctgtaggttctgcgagagactatatattcactgaaaaacttattcgcttcttgacacaattttctgatctttcaatatcagatcgagtagcaatggtcgataagttgaatgaagacgataaatttagcgggaaggctggcgcaagaataattgaaataatagaccgaatggagagtgaaaataagccagagttggcagcaaagttttttaaggcattcgccagtgcggagattaatttttctgaatttcgtcgtgtgcttgtcgctttggaacgtattcctgcgtttgatattcctgcattggctgcattttcgatgtgtgatatttatgaatctgcaagaatggaacaatctcttttgcttgcatttgttaatgcgggacttggacaaaataatggcggcttcgatggtggtgtaataatcccaacagaactctgtaaaatattcataaaagccggaaaattaaaatcagattaa

SEQ ID NO: 310505 - DNA, 492 bp, Proteus mirabilis
atgaaaataatagccaagagccctaaaaattgcgatataaaggaattaaaaacctttgaaaaattagtaatcgagggaggtgaagtagctcctgaagggctaaataaaaggatattggattctgagtgtctgttctttatctacgccaaggaacaatgcattggtattggtgcaatcaaacgtccagtagcaggatataaattaaaatcttttgaaaaagctggtgtttctgagcaagaaaaatacgattatgagttaggatggatctacatcaaagaaaaaatgagaggacaacaattagggaataaattaatggaatcaatatgttgttacatttctgagaatttatcagacaaaaaatgttttgccacagtccgtcaagataacaatagtatgcagtatttattcgtaaagtataatttttcgaaatcaggtcattcatacaaaagtagaaggggtaattatttattggagctatatataaaggcataa

SEQ ID NO: 310506 - DNA, 423 bp, Proteus mirabilis
gtggttgccattcctaatgaagcaagtatgaaagggcgagctttattattacttgcagaaaatcacctcatttctttaaaagagggagttggttttttaccttccgttgaagacattattgataatcctaatgccttgatatttcatgaagttgaaactcccatgttagttgaagcccttgatgatcctgaggttacgatggcggttatcaacaataatttttcctctcaaattggcttacttgctacccgcgacggtttaattatggagaataaacattcgccttatgccaatgttgttgttactcgtatagataatatgaatgatgaaaaaataaagaaattaattactgttttacattcaagacaagtcgaattaaaggtgcaagaaatgtataaaggggacgcggttaaggcgtggtag

SEQ ID NO: 310507 - DNA, 213 bp, Proteus mirabilis
atgtctaatacaatgactggtacagtaaaatggttcgatgaaggtaaaggttttggttttattactccagctgatggtagcaaagatgtcttcgtacatttctctgcaatccaaagtgatagcttcaaaacattagctgaaggccaacaagtttcattcaccatggaaaatggtatgaaaggcccagcagcaggcaacgtggtggctctctaa

SEQ ID NO: 310508 - DNA, 399 bp, Proteus mirabilis
atgagagatatgcaggaagttttatcgcgttggggagcgtggtcagctaatgagggaaatagtatcgattactcatcaattgccgccggttttaaaggattaattccaagctcaagacgaagccgagagcaatgttcagatgatgatggcttaaaaatcaataaagcggtattacatttaaaggtaaataatagttacttgtttcagttggttattatgtactatgtgaagaattatcctttgcgttcaatggcttcaaaactcggtatttctcataacgaagtggctaagcgattgcagacagcggaaggctttattgagggatgtctatcggttgataacgtaaaattagacatggataaaataattagaaaacaccgcatttatagtcttgcgtaa

SEQ ID NO: 310509 - DNA, 1026 bp, Proteus mirabilis; identical to SEQ ID NO: 310503

SEQ ID NO: 310510 - DNA, 807 bp, Proteus mirabilis
atgaatggactaattgttattgatggtgttcaaattcgtcgagataccgcagggcgttattgtttaaatgatcttcatcgagtctcaggtggtgaaaaacggcatcaaccgtcgaattggagtgctttgactcaaactaaagagttggttgatgaaatttcaaccgctcctgagatcacaggagcggttgccattgtgactattgttggtgggcttaaccaaggaacatatgtttgcaaagaattagtgtatgcctatgcaatgtggataagcccatcatttcatttaaaagtgatccgtacttttgatgcattgataacacagcaacacggcgaaaagttagccgataaagttcaagctggagtcatattgcttgaatcgatggctaaaagcctgaatttctcaaattcttcaaaattaggggcgtatcaaaaattacaagccatggcaggcttacccgaattagcccctgtgtatgcgattgatgcgccaagcggatcaatggatggttcaagtcgtccaacagtagctttatcaacactgattagaaaacatcaattacctatttcagcgcaacaagcttataaacggttggccgatctcggcattgttgaacgtttatctcgcccaagtacgaaaacagcaaacaaagtgaaagagttctggtctgtgactgctcgaggttgtcagtttgggaagaacatgaccagccctaataatcctcgtgaaacccaaccccatttttttgaaagtaaaacggatgaattgatccgtatggtgatgctgaataagcgggtgagtgcatga

SEQ ID NO: 310511 - DNA, 528 bp, Proteus mirabilis
ttgcatcgttcagctaatggtgatactcgtttaatgattgaaacaccaggggttggtgatgtacctctagatagtggcgttatcaaaactaattactttggacttgcagttattcctaatgttaatagttatcgtaaatctacggtttctattaataccagtcagctacctgaaaatatagaaacgctagaatcaacaactgatattaccttgactaaaggggcgatagggtatcgtagtttatcagtaatgaaaggggaaaagttgtttgccattatatccctaaatgatggtaagaaaccgccttttggggcaagtgtacgtaatgcggataatcgtgagttgggtattgttggtgaagatggtgtgacatggctagtaggcatttcatcaaaagaaaaactatctgtttattgggcagggaaaaaacaatgtgagttgtcacttcctgaagatttagcatcgccaactagcatgttattgctaccttgctcttcacctactatatcaaaaattacagaaaattaa

SEQ ID NO: 310512 - DNA, 750 bp, Proteus mirabilis
atgaagaaaaataacaacccaacaagaattaattctattgaagttttaaaatttagaggtttagaaaatgtaacaataaactttggtaagagaataaccgctatttgtggcaaaaatggaacatctaaatcaacaattttaggtattttggctcaggtttttagtttcagagaggatgtatcagtagagccatcaataaaattaactgactataaaacattaacaggtaaaggtttcaaatcagatttttcagaccatttcaggttttctgaaaagtatgatgtaggtggaaatatgcatgttaaattgtcagtttatgatgcatatactggaatcaccccaccagatttagaattaaaaatatatgattattcagatcgaagcaaagcaaggcctgtagttagaaaaaatacaacaattgaggggaaaaatgaaagtcggaatctgacgcacccagtaatttttttaagccttcgaagattgttgcctataacattacggcctgaatataaagcggttacaaactcttttttagaagagtataacagtgacatcagatccatgtatcaatatttaacaggaaaagatggttctaattttttgactggaactgagggaactattaattctatggtgatgcactcagattgctatgatcatgagtcggtatctgttggggaagacaatatagggcaaatagttcaggcattgttttcatttagaagattaaaaacacagtacgctgattag

SEQ ID NO: 310513 - DNA, 624 bp, Proteus mirabilis
atgttaaataaaaaaatagcatcggtgatgctatcaacaattattgctgcttcttttgctacggctgctaatgcagatactcgtgttgcacaagcaaccgcgacttggcaagcaactgcaattaaagatacaaccagtatgttagttgtcactccattaaaaagtctgacttttaattatgctgaaggccaaaaatcatttaaccaacaaaatggtgcatttgatattgctattcaaggccaatctggggcaactgattttaaattatcatcaaaactgattgctaatacgttagcaagaacaactgatgattcaacattaacagttggtgttaaatggaatggggaagacctttctaaaacaactgatgtcgtgttaattgatacatcaaaagggttaacctcaggtttagataatttagctgctgatggtatttacaatggctctgagcgcgctacagatcgtggtgaattcacttttgtgattgccagtgcacaagcagcaggagcaacagccgattttaaatcactggctgatggtgtctgggatggtgatgtaaaagtgcaatttactgccacttgggatggtgacttttctaccgttaaacctaatccagaaccttaa

SEQ ID NO: 310514 - DNA, 804 bp, Proteus mirabilis
atgagtgcgtcagtaattagttttatcaatatgaaaggaggggtagggaaaaccaccctatgcattagtattggtgaatatctagcaaattataaagataaaaaagtattaattatagatattgatcctcagtttaatgccacgcaatcaattttaagtaagtataaaagaatcgatgagtatctggatgatcacctagcaaataccaaaacaattcgtagaatatttgaaacaaaatcatcattaacggatacagttcaaccagttactccggatgaaataatcgtagaaatatctgaccatctagatatgatattcggtgatataaatacaatatttgatattgagcaaccggcagctagattaaataaactaaaacgatttatagctgaacataacttacgcgatacatatgattttatattgattgatagcccaccgactatatctttatttactgacgcagctttagttgcatcagactattatctagttccggttaagattgatcattactcaattttaggtgcaactagcttgttaagtgtgattaataacataaaagatacatatgttcatccaaacataaaaaatcttggttttatttatacgaacacacaagagtccttaacattaaaaacaagaagaatgaagaatcgctttgaaagaactgaaccgtttaatgatctttatttttttgataacaggttcaattttgttcaggatttaatggttggcggaaaaggcaatatagcatctagttataaattatcgagaaaatacctgtctcttatacacatctga

SEQ ID NO: 310515 - DNA, 1095 bp, Proteus mirabilis
atgaaagatctgcatatttttaaccctctgatccgtatgatgatcagtatcacccgtggcaatgtcattatagtgtgtattgtcacagcgttagtcgcggctgttgtacatttagatggttcgggtgcggcgacattcttaattattattcctgcttttttaccgctatatcgccgtttaggtatgagcccttatcttatgttgctaattatgtgcaccagtatgggggtgatgaatatggtaccttggggagggcctttaggtagagcctcggctgtaaccggtatttcggctgcggaattgtggcaaaagatcatcccagtacagataattggtatttttggctcgatgctctttgccgcggttatgggagtgcgagaaaccaaacgtattgctaaagcaaaactaaaagggactacgccttatgagcaagattctttattaagacaatttgatgaagatcagccagaaacaggaacagaaaaaccacaaaaattttggatcaaccttctgttaattatcggctcaatcacgtgtttagccttaggattattttcggcgccttatatttttatggttgcattatcagccgccctagtgatcaactatcctaagccgaaagatcaaatagcgataattaatcatcatgctcctcaagcactctctatggtagcaattattttagcggcaggggcttttttaggcatcatgtctaatgggaaaatgctggaagctattgccctcgatttagcagcagtattaccttctcattgggtcgataatttgcatattgttgtgggtatattaggcgttcccatggatatctttaccagcactgatgcttattattttgcgctattgcctattgtgcaggaggtcactgctagtggtggtgtccatgttgctgatgttgtgtatgctatggccataggtaataatgccggaacctttgtaagtccattctcaccagccgcttggcttgctatggggcttgcaggcactgatatgggtaaacatttacgttactcattcggttggatttggctatttagcttctttaccctaggtgttggcacattattgggactgttttaa

SEQ ID NO: 310516 - DNA, 216 bp, Proteus mirabilis
gtgctaacgattatcggattactcattattatttctattgtgacattactaatgatggggaaaacaagcccaattattgcaatgtcggtcataccattaattggtgcgcttgtcgcaggttattcatttactgaaatatctactttttttgaattaggtattaaaaaggtgagtagtgtcgcaacgatgtttttatttgcgatactttttttttag

SEQ ID NO: 310517 - DNA, 1230 bp, Proteus mirabilis; identical to SEQ ID NO: 16656

SEQ ID NO: 310518 - DNA, 657 bp, Proteus mirabilis
atggaaaataaaggaactttatttaaatctatatcttttgtagcggctacaatggtaacagtaagctctgtagctgccacagaacagcatgataatacaataactgttactgcaactaagcgcattcaaagtagttttgatgtaattggtaatgtgaatgttcaaactgatgaacagttaaaaaaatctttagttaatcaaactgatgatttgagcgcagtttttcctgagttgttatctgcaaaccgaagttcgcgtatttataacaatatgactcttcggggccaatcttcggccgatttcttttctccaagtttgggactgtttgttgatggtgctccccagctttctcaatcgtatgctcaatctcttcaaggggttgagcaagttgagctacttaaaggcccacaaggagttatttatgggcgtggcacattgggagggattatcagtgttattaccaaaaaacccagtagtcacgctgaagcatggttaggggggcaatattttggtcaaggggaaagaatcaatacaggaggaagcactggctacatggaaaacggctgggcttttcaggggaatgttagtctcgatagaaataatggttctttgaacaatccagcatgggataaaaaaatgttgatagcagagatataa

SEQ ID NO: 310519 - DNA, 660 bp, Proteus mirabilis
atggcaatacgttcaccacattgcgatgcattgagaatcttattcatccttaaagctggtggtagccccatcatctctgaagaaaatgacgaagtactagttttcaaaggagaacaacgacttcaagcctttgatttttggatgagaaaccctgattatttagccgctgaattaattgatttataccataaaacaaaagagtataaatattataaaattgcaaaaaaaattttagatgatgaagaacctgatctacgacgaatccctatgattcgttatctttttggagcttatgagcgtttagatgatgcattatcaatactacggtatcgtgatcttattcgaattacaggtaataagagatctgatgggaaggtagctgaaactgactttattttgacctgtttaggtagtgacttatgttctaatgcaatactacaagaaccatcattacgatggtatgaagaacgctccctgttagtcgctgaagttgcaggtgatatggggggaacagctcttaaacataggcaatatgaacgaaccacatatgcaaaaactaaattgggtggagttattccttcaatagtaaatgaaatatctgaacaattggcaaaaattgagataaatatccaagaggaaccatatgcaatcgaaaaatga

SEQ ID NO: 310520 - DNA, 1389 bp, Proteus mirabilis
  misc_feature (1323)..(1359): n is a, c, g, or t
atgcaatcgaaaaatgaatggctaaaatctatagctgaaaaagtgaacctcgatatctcaatagttgagaatgttttagctactcataaaatcactccatccccagttgtagcacaaccgcgtcgcttatccatacgtaagttagaattttcaggtgtaaaagatagcacaagtcattcaggccccttcaaattttgttggaataatcttgaaaatggcctatgggcaattttatctgaaaaaaatttccgtggtaaatcaactattattgaagttgtacgttggatgttaagaggaaaaccttccgataccctacaagaagatgttcgtcgttggataaattccatccaaataatatttcaattagattctgaagaatatgaaataatagcaaatactagtaacgatattactggtagcttaagccgaattaggacattgaatgataacaaaaaaaaacaaacagttttagcggagttcatttcagatagtgagtttgaacttgttatgtcagattttttcatgcgtatgttttccatgactccattatctacattgagaaaaaatgggccaaatgatgtttatgaagtaactcacggttgggcatctttgtctggagctatgtttataggtactgattataaagtacttctaggtgatatgccggtaaatgcagggttaacatcccgaatgatgcaaatgtaccttggaataccatgggtgtcgacattagcatcagtaaaaacggctcataaaattgttgaaactgctatacatgaacaaaaaagaaaaaatgagcaaaatagagctctaacaaatgaacgagcaaatattattaacgccgaaataagcgctaaaaaatcaatattaaatgacactcctaataatgatgatttattaatagagatacaaaccaaaactaaaaatttaataagttatcgtaatatcgaacgagaattaataataaagcaagagatcgctgaagcggagttccgtcaaatagacattatacataaacaagatcgtaataatttacaaacacataatgatgcagtctcagcaaaagctatatttagaagtttagacccaaaatgctgccctcgttgtgatcatactatatctaatgaaagaaaaaagcaggagtctttaaatcatgaatgcttcatttgtggagaaaaaactataaactcagaagatactgaggctataagagaagagttaataaataatgttcacttatcagaaaaagctttaaaaacatgcacatcccaaaaagaaaaaataaaagatgaacttttaaatcttcaaaaaaaaatcgatctnnnnnnnnnnnnnnnnnnnnnnnnnnnnnnnnnnnnncttgcaaataaatttaaactctatttctga

SEQ ID NO: 310521 - DNA, 645 bp, Proteus mirabilis
ttgcaaataaatttaaactctatttctgagaatttcagtctagcctcagataggcaaacgataataaccgaaatagccgttttagaaggcaggctagatgaattatcaataatatcaaaagataataatgatgatgatattgatagagctagtgaattaaatattttgtctgtaactgtaaaagaaacggaaaagttagttaaagatttacaaggtgaccttttagctgatatctcaatacggttagtcaaatatgctaatacctttgggatgaaaaatctttcttttgcaaacttaaaaggtaatgtaactcttaacctaactaaaggaggtactaagacaagctatagtaaagttactgatggtgaaaaattacgtttaaaagttgctactatactcgctatgattgaagtagctgaagaaaaaggtatcggaagacatcctggcttacttatgattgattcccctggtgcacaagaagtttcatcatcggacttagaacaattgattgcaggacttcaattggttgcaaataaatctcctcactttcaaatatttattgctggaataacatcaaaagcaataacagatcatgtagaaaaatccaatagatatgaggccactgtaaatgagtatctttggtaa

SEQ ID NO: 310522 - DNA, 1956 bp, Proteus mirabilis
atgaaaatgcaccctatcgaagctacgctttataaaaaagcaacacagaacggagattggcacttggatgaattgggcggaattaatgccatatcttctcaagttaaattgttaggcaattctcctatgatgccattattactgaatccacttattcacgcatggaataattctcaatccgatcaaaaagaactatttaaaactactttttttcaattattagaaataacacaaactgattttattctaattgaaacaatagatattctcacatatcataaccctttacctgatgattctgatgagttatttttcatggctcttcttaaaaaagcgtcacaactttcactatcaggattctctcgcagtattgcacttgatggtgcttttcgctgggcgaataaaaataggcgttggcaatttcgtttgctagatttatttttgggattaatgcccgatgacaataaagattttttacgtcattctgcaaaaatcataggtatcgcatatactcattggaaagaagaagcacttattgataaactaaataaattaactttggtagattatgctcgtccagaagccacctttgaattaggcatggtctacttatcaaaagccataagtgagaataataaaaacacctccattcatttttttgaagaatcaaagaaatggtttgaagaatcaatatttttttcagaagaaaaccctgaagcaagtttatattatagctcaattaatttgttattagaattcaataaaaactcagctaaagaaatcctagcagaacagtgttcaaatattaaagtaaatatttttgaattatatgaaaaatttaaccaatcaagccctacatggcttggctctagatatctagaagttatttgctgggggaatttttcaaattcaatcaacaacttactatatcaacttgataatcctgggtggtgggagccaacagttatcatagagaaagaattgctatctgtatatcatgcaagtcgaacattattaaatagaaatcaatccggagctatagaatcattaatttcaccacgtattacaaacaaaataaaagaaaatagctatcaaatatatttaattaaaacatggcttgaaaaaaacaaaaatcatgaattagctaatgaagctgaatttttaatctctcaagtggaaaatttagacgccccccctttaattgaagctgaaagtaataatgcctcactttcagctactattaatgaggcgttattaaaaaatgaaccgaaaaaagttcttcactcaatcatagaaaatgctttcaaccttagcatcagtaatctaacagcctgtgaaattaacattttagaacaatgtaaggaaaaagccttaggtcatattgactataaaaataatactaaagcacaacaattgtttgatgctgttttattttggcttacacgatttgtcgctaatcgtttagaattaagccgtgcacatgacccttcaagctattatctatttgaacaaaaagatggttcgcttcctcacgaaagtgaattgcaactagatttctatagatggctcacaacaaatgccattggagtagatcttgagcccccaaatgttggaggtgggcgagctgacattcgattaaactcggggccagaaagcttaattattgaagtaaaacgtgaggatagtaattgttcttttgattctctttaccaaaattactctgctcaaacaacagattatcaaaatactggcattagactgggagttttgctcgtattagatttgacaatttcaaatcgtgaaggcacacctcatatgtctactctatttgaaataagagaagttaatcgttcaggagagtcaatcccccgtttaatattaatagttaaggttccaggacggcgtaaattacccagtgagttaactaaactagcaaaaaaaataaaaaatcattag

SEQ ID NO: 310523 - DNA, 768 bp, Proteus mirabilis
atgacaagtatctggggagccgaactctattatacgccagattactggcctgtatggttaattgcagcaggtttgatcattgtcgccatgatagccatattggtgctacatggttttttacgttatgcactggcacctaagcaaagtggtcactatgaagaagagcgtgtttacttatactctaaagccattcgtttttggcattggggtaatgccttactgttcattcttctattaatcagtggattgttaggccatttttctatcggtaatgttccatcgatggtactactacataaaatctgtggttttattctcatcgctttttggataggttttgttgtaattaacctaaccacaaataatggtgtacattacaaagtcagaccgcaaggattaattggacgctgtatcaagcaagctcgcttttatctttatggtattatgaaaggtgaaccacatccttttgccgcgactacaacagataaatttaaccctctccaacaacttgcttacttaggtgttatgtttgggttagttccactacttcttatcacaggagtactatgcttataccctgaagtcctaggttatggctattggatgttaaaagtacactttatattaggcatcgttgcactcatgtttatttgtgcgcacttctacttatgtactttaggcgatacctttacacaaacattccacagcatgattgatgggcatcatcgacatcaaaaacatggtgaaagcacaacaacaaaaaattga

SEQ ID NO: 310524 - DNA, 702 bp, Proteus mirabilis; identical to SEQ ID NO: 305899

SEQ ID NO: 310525 - DNA, 786 bp, Proteus mirabilis
atgttaaaatcaggctcattaattgaaaaatatttccgtttttttgaacaatactcatataaacaagcatcgataattggtttaatgtcgaaaaaaaacttagatttcttttatacacataaaaataataagtactataaatgtgaaatattaaggaattgggcaaatacttcagaaatatcgataaaaaaagaaggatatacttcaatacgtacttccttaaatttacaaaataaaactattttcttttatggtggaaatataggccatgcacaagatatggaaaacttgatgcgcttagtgaagaaaatgagcatttatcctgatgctcattttctttttatcggtcaaggcgatgaagttgatttaattaattcattagctaacaaatggaatttgagcaactttagttacttaccttctgtgaatcaaaacgaatttaaactcattttaaaagaaatcgatattggtttattttcacttgccgcacaccattcagctcacaattttccaggaaaattactgggatatatggctaaccatattcctattttaggtagtgttaatgtaggaaatgatttattagacctaataaatcatgaaaatgcaggttttgttcatataaatggtgaagacgatgatttatttgaatctgctaaaaagctctatcttgatataacattacgcaaaaaatgtggccatgatgcttataaactattgtgtaaagagtttgcagtgacctctatagcatcaacactcatagatagattaaggttattaaaatga

SEQ ID NO: 310526 - DNA, 210 bp, Proteus mirabilis
atgatatcatttttttcaaaagatattccaaatggattaactggtgtggatgagattttgaaaaattatcattttgtctgtcaggtatattctgcagatttccctctcccttttaaagacgtattgggattgtccgatgccatcggatacttatttattaaaaatgaaggaaataatatagagggccttttcttcgtgcaaacagcataa

SEQ ID NO: 310527 - DNA, 570 bp, Proteus mirabilis
atgaaccattcacaaatagaatttttaaaactttgtttacagaaagaagttataaaatctgacacaaaggggttttcatggagaagaacaattcaaagagcatggaaatatcctgagcgtcgtttttatttctggtggagaatagctagttttctatataaatcaaataaaagtatctttatggctaactatataaatagacgacttcgtgcaaaatatggatgcgatatagatgttggagcagaaattggcgtcggattatcgattagccactatgttggcttagttatagcctacgatacaattattggtgaaaattttcacgtaagacaaaatacaactataggtatactatattctggtcaaaaaggaaaaatccatatcggaaataatgtaactattggtgcgaactcttgcatcataggtgataatattaaaattggtaataatgtcatggttggtgcaatgagttttattaataataatataccagataacatggttgtttatacgccaaaaatcagtaatacactcagactctcagaaaaagataatagaaaaatttggtaa

SEQ ID NO: 310528 - DNA, 384 bp, Proteus mirabilis
atgaacaaatcagctttattcacatcagctcataaaatcgctaaaagcacagtttctgttgttggtgactaccgcatcgcatttatgttagccctgcgtagcctgtaccacacagtagaatcaacaacctctaagttaattaaattaggttgctcggtttgggaaaactacggcaaacgtcgtgtgtatatcaattacgacaaattagaagccgttttcggattagaaattgggttttataacactgggaacatcagttatgcctacatgcacggcgagaaaatatctaacaccagtgcgtacaaactgttatcagtaaaaccttattttgactgtgtaactaactcatgggttcatcacgaagatttatcaccaatcatttaa

SEQ ID NO: 310529 - DNA, 594 bp, Proteus mirabilis
atgcaaaaagtggttcttgctactggaaaccccggtaaagtaacagagttagcctcattactcgctgattttggtttagatattgtcgcacaaactgagctaggtgttggctcagttgaagaaacaggtcttacttttgtagaaaacgcactaattaaggcgcgtcatgctgccaaagtaacaggcttaccggctatagctgatgattcagggatctcggttgatgcattaggtggtgctccgggcatttactctgctcgttatgctggtattgaggcaaccgatcagcaaaatgtagataaattactcgaagcaatgaaagatgttcccgcagagaaacgtcaagctcagtttaactgtgtgttagtttatctacgccatgaaaacgatcccactccgctaattttccatggtatttggcaaggtgtgttaactcaagaaatgcaaggtgatggtggatttggttatgatcctattttctttatccctgagctaaattgcactgcggcacagttaaccagagagcaaaaaaatcaatactctcaccgtggtaaagcactaaaactaatgttggatgcacttaagaatgcttaa

SEQ ID NO: 310530 - DNA, 819 bp, Proteus mirabilis; identical to SEQ ID NO: 293554

SEQ ID NO: 310531 - DNA, 276 bp, Proteus mirabilis
atgccacactcaccagcagaaaaaaaagccgcgttaacccgtgtaagaaaaatcaaagggcaaattttggcattagaaaccgcccttgaaaacgaaaatgaatgcggtcaagttttacagcaaattgctgccattcggggtgctatcaatggcctgatggcgggcgtactcgaaagtcatttacgtgaaggtctaatggatgccgtcgcttctcctgaagatcaaaaaaactccgttgatgatgcaatctcactaatacgcacttacctgcgctaa

SEQ ID NO: 310532 - DNA, 390 bp, Proteus mirabilis
atgtctaaatcggcaaaaggtacgacagaacggcatggacggaacgtaaaagctaaatctggtttaaaccgctcaatactggagcagggctggtatgaaatgcgccgtcagcttgagtacaagcagctctggcgaggaggtcaggtactggcaataccccctgcctacaccagtcagaagtgcgcttgctgtggtcatacagcaaaggaaaaccgccagtcacaaagtcaattcgagtgccttgaatgtggatatacagcgaatgctgatatcaacggggcacgtaacattttagcggcaggacatgccgtgcttgcctgtggagggagggggcagtcagaccgcccgtcgaagcaggaacccgccgaggtgattcagacatcagtctga

SEQ ID NO: 310533 - DNA, 831 bp, Proteus mirabilis
atgaacaacatcgaacgccatgcctgttttggcggttggcaagaggtttatcaacacacctcaaccaccctcaattgtgagatgaaatttgctatctatctccctcctatggaagatgggcaaaaatatccggttttatattggttatctggattgacttgtaatgaacaaaacttcattaccaaagctggagcacagcaatatgctgcgcaacacggtgttattttagtggtacctgatactagccctcgtggtgaaaatgtggctgatgatagtgcttatgatttaggacaaggtgctagtttttatctgaatgccacacaagcaccttggaatagtcattataaaatgtatgactacattgttaatgaactccctaaattgattgagacacattttcctgccaatgagcaacgtgctattagtggacattcaatggggggacatggcgcattgatgattggtttgcgtaatttgtctcgctattgcagtatttcagcgttttcacccattgttgcaccaacccaagtcccttggggacaaaaagcctttagcgcttatttaggcgacgatatggcacaatggcaacaatatgacacgattgaattactgaataaaacacaacagacagtgcccatacgagtggatgtcggtcttgatgatcctttttaccaacagcaactacagccagaacgtttagcacaagtgtgtgataaaaaacagtttgcgtgctatttaaatttacatcaaggctacgaccacagttactattttgtcgcgagttttatcggtgaacatatagcctttcatgctaagcacttaaaggcttaa

SEQ ID NO: 310534 - DNA, 1188 bp, Proteus mirabilis
atgatgagaaatgtaaaaaacgattttgatgcagtcattgccggtggtggcatgattggcgcagccgttgccattgggctggcgcaagaaggggtgcgtgttgcaatggtagaacggcaatctccagcaccttttgatgcctcatctcatcctgatattcgtatttctgcgatcagctgcgcgtccgttagtttattaaaacagctaggtgcatggcaacatgttttagcgatgcgcagtgcgccatacctaaccctcgaaacatgggaagaagataatgcccatgttatttttgatgccaaaagtcttggtttacctgaattaggttatatggttgaaaatcgcattttgcaattggcattgtggcaagaagcagaacgttatagcaatatcactttattatgcccaaatagtctaagtaacatgaaatacttagataataaatggcaagtcacgcttgctgatggtcaggaaatcaccactcagttagttgtaggggccgatggggctaattcgcaagtgcgtcaaatggcggggattggcagtaatggttggcagtatcgtcaatcctgtatgttaatcaccgtgaaaacgcaattaccaccagaaaaaggtacatggcaacgcttttacccttcagggccacgggcttatttgcctctgtttgataattgggcttgcttagtttggtatgattctccgcagagaattagaaagctacaaacgatgtcaatggcacagttagaaaaagaaatcgaacatgctttccctgaatgcttaggcaaagtgacacctattgcagcaggctctttcccattaactcgtcagcatgctagtcgttatgttgataatggtgtgattttagtgggggatgcggcacatactattaatccattagcaggacagggggttaacctcggttatcgtgatgtggattgcttgcttaatttagtggcgcaagcgaaacagcattttgaaccttggcattcaatggcattgttaaaaaaatatcagcgccgtcgtatgcctgataatatgctgatgcaggcaggaatggatctcttttaccacgcttttagccatcaattaccaggcttaaaattagccagaaatatcggattattagctgcgcagcatgcaggaaaagcgaaagaagccgcgctacgttatgctttagggattaaatga

SEQ ID NO: 310535 - DNA, 384 bp, Proteus mirabilis
gtgatttctcatgaagtgggacatcatgttcagcatctacttggtatcaccacacaaatgcgtgaaaaacagcaaatggcacgttcaaaagtggaagcaaatcgcttatcagtaagactagaactgcaagctgattgttttgcgggtatgtgggggcgctttattgccggtgaaggccgtgttgatgaagcggacttactgacggccattaaaaccgcacaagctatcggtgatgataggctgcaacgccaacaacagggttacgctgtaccggatagctttactcacggcactgcagaacaacgtaagacatggtttatgcgcggctacaatagtggcgatattaaatcttgtgatacatttgcttcttcgtcattgaactaa

SEQ ID NO: 310536 - DNA, 1113 bp, Proteus mirabilis
atggaaaaattaaatcctcaagtagcagggttattcgtaggctgtggtgggctcgattttgggtttaaaaatgctggttttaaccttatttgggcgaatgaattatcatctgatgctgctcaatcttattctgagttagtgggacatcccgttatagttggagatatatgggaacatttacaaactatacctaatgctgaaatactaataggaggtcctccttgccaagcattttctttagttggtaaaagactagaagatgaccctcgtgcaaaattagtatttgcttttgctcaagctgttgaaaacgttaagcctgaagtgtttgttatggaaaatgtaccaggcttgatggcctcttcaataaatggtattaaactacatgaggttttatcggctaggtttagagctctaggatataatgttgaaattttaaaattaattgcgacagattttttcgtaccacaaaaaagaaaacgtgtatttatgattgggcatcgctttcaaaataaaacatttaaactcatcacatcaaaagattttgctcaacacttaggtaaaccagacttaataaaaccgatatgcgttagtgatgctctgggtgatttaccttcaccgctaccaaaaggcagtaaagaaaaaatagaatacgcaactcccccgattacatcttatgctaaattaatgagacaaagcaatggtggaaccgtttctcatcaagtaatgccaacaatgtccattttagaccgagagtttgttaaacatatcccagctggtggtaattacatggatattccagatgaaatatcaacaaagcgtattatgtcatttaaagctagtggtggtagaacaactacctatggccggcttcaccccgattttcctgcttatacaataaatacatattttaaccgtccaaatgtaggggcaaattatcactacaatgaagaacgcctcattacagtcagagaagcattgcgattgcaatcttttccagataatttttcgccatactataccaatcaaagaagtttacatacacaggttggtaacgcagtgccccctctcatggcacaagctatagcatattcaataaaacaactttttttatga

SEQ ID NO: 310537 - DNA, 768 bp, Proteus mirabilis
atgacgatgaattattcatatatagagaacgaagtttatggttatatgagaaagaataaagttttttgttacctcatatggcgtgtgttgagcaacagcaaagacgctaatttttatatgtttaaaacacgaaactatttaaaagatctcacggttaagtacgattttagtcatgttataaaaacagtaacgaatgattttttcgacaagaaatttctttttgagccgaagagccatgaagggcgatatgttgaaagtatcgaatatattaactttgttgttacaaaacttaatgcttataactacacagattatgttactgatatttatagaatgcttgactatttgagaaatgacttagtcaaaaagacctgccgttacagatattttgattggctaaaagcgtctgatagtaaaacttgcgagtgggtctataactacctaatcaagagcagagtaatagataaaactcaatatcaagataatgaagagctgtatctttacattgtgactggtttttatttatggcaaccaccccaagaggaaagagataaccgttataaaaaattactcctagctcgaaatgagcgaaaacacagaacaactagccaatcaaaaggttcggtaaggccaaaaaaatcaccgaaagatattcaactttcagcagaagcaagaactaaattgacagagttagcccttaattatggtgtacccgcgtcggaatggttgaatagcttcattattgatgaatatgaaaaaatgaaataa

SEQ ID NO: 310538 - DNA, 207 bp, Proteus mirabilis
atgacgttattacccccattagcatcgcatccaacacattgccctcactgttcttctgaacaagacatcattgcatggggagagggttggatgtgccgcgattgtaattttgaatgggtaacaccgattcaaaatcaaaagaatacctccagtgagattaaggagagactgcaatttcacggtaaagaaacattcagtcattcatga

SEQ ID NO: 310539 - DNA, 453 bp, Proteus mirabilis
atgatgaaaaagataaatatcctattcgttctgagtatgttggtgttgggttcatttgcatatgcaaatgaacaacgctacgcaagtattacacatacaagctcaaattttattaacagaggttattgtggttactcgtttactctcgataacggcggtagccatatggttttagaccatgctgaatttggtgcgcttgagataaccttgaaaatgaaggatgggcaaggaaaggtattaggggatacgatactggaagttgaaccttttggcgattctagcgcaacgcgtgccacgtttgcaggattggaaattccgtgtgaagatgttgctgaatttgaagtggttaaagcggtggaagatcagaatggacgcaaagtcgaattaccgctatcgatctttctggccaataatccagagttggcgaagatgtcggttgcagggaagaaataa

SEQ ID NO: 310540 - DNA, 1293 bp, Proteus mirabilis
atgaaattatataatttaaaagataaccaagaacaagtcagctttgctcaagctgttaaacaaggtttaggaaaacagcaaggactcttttttcccaaagacttgccttcattttctcaagcagaaattgatgcgctattaaaattagactttgcaacacgcagtagccgtattttaagtgcttttatcggtgatgaaattcctgctgatgtgttagcaaaacgtgtgaatacggcatttgcttttcctgcgccagtgacacaaatagaagaggatattagttgtcttgaactcttccacggaccgacactggcttttaaagactttggtggccgttttatggctcaaatgttatcagaagtcgcgggtgaccagcctgttacaattttaacggcgacatccggtgatacaggagcagcagtcgctcatgctttctataagctagataatgtccaggtcgtgatcctctatccacaaggaaaaatcagcccattacaagaaaagctattttgcacattaggggagaatattcatactgttgctattcaagatgactttgatgcttgccaagcattagtcaaacaggcatttgatgatgaatatttaaagaacaccatgcatttaaactcggctaactcgattaatattagccgcctactggcacaaatctgctattactttgaagcggttgcacaaattccagctgaaaaacgtcaacaattagtcatttctgtaccaagtggtaattttggtgatctcactgcaggattactggctaaatctatgggattacctgttaaacgctttattgcagcgaccaatgtgaatgataccgttcctcgctatttagatagtggtaaatgggaaccacatcggacaatagcaacactttcaaatgcgatggatgttagccagcctaataattggcctcgtattgaagagttatatcgtcgcaaaggttggctgttatcggatctttcgcatggggctgtgagcgatgaaacgacggaaaaaactgtacgtgaactggcacaaaaaggctatatttcagagcctcatgcggcggttgcttatcgtctattacgtgatgagctacaagacggagaatatggggtatttttaggtactgctcatccggcgaaatttaaagaaaatgtcgaacgtattttaggtgatacattacctttaccaaaagaattagctgagcgtgctgataaaaaattactatcgcatcttttaccggcagatttttctcaattaagagcatttttgttagaacgagcacctaaataa

SEQ ID NO: 310541 - DNA, 930 bp, Proteus mirabilis
gtggttaaagtttatgcaccggcgtcaattggcaatgtgagtgtcggttttgatgtgttaggagccgcagtttcgcctattgatggtcaattattaggagattgcgtaaccgttgaagcggcgcaagaatttcaacttcacagcaaaggacgctttgttagcaaattaccttctgatgctaagcaaaatattgtttatcaatgttgggagctattttgtgaaaaattaggtaaacaattacctgtctcgatgacacttgaaaaaaacatgccgataggctcaggattaggatcaagtgcttgttctgttgtggctgcactcgttgcattaaacgaatttgctcacaaaccatttagtgaaagccacttattattaatgatgggagagctggaaggccgtatttccggtagtgtgcattacgataatgtcgcgccatgttatttaggtggtttacaacttattttggaacaaaacgacattatttgtcagcctgtgccggcttttgacgattggtattgggtgatggcttatccggggatcaaagtctcaacggcacaagcaagggctatcctccctaaacaatacgataaagctgatattattaaccatggtcgttatttatctggatttattcatgcttgtcatacacaacaaccaaaacttgccgcaagcttaatgaaagatgtgattgcagagccctatcgaacacagttgctccctggttttgataaagcgagagaggctgcattacaaaaaggcgcgcttgcatgcggtatttcaggctcagggccaacgctgttttctattactgattcattggctattgcccaagatgtggcgcaatggttacaacaacattatgtacaaaacgatgaaggctttgtacacatctgccgtttagatactcgtggcgcaagagagatagggtaa

SEQ ID NO: 310542 - DNA, 2460 bp, Proteus mirabilis
atgcgagtgttaaaatttgggggaacttcagttgccaatgcagaaagggtgctgaatgttgctgatatcgctgagaaaaaacgagagcagggacaagtcgctctggtattatcagcacctgccaagataacgaattacttggtggcaatgattgaaaaaacggcagaaggagaagaacctctcactcaagtacgagaagcagagcaaatcttcgctaatctattgcaaggtttacgagaaaatcaacctggttttgattaccaaggtttaaaagacaaagttgagcgtgagtttgctgagattaaacatatcctgcatggtatctccctattagggcaatgtcctgatagcatcaatgctgcgatgatttgtcgtggtgaaaagctttcgattgccattatggagtcggtgttacaagctagaggatataacgttaccgtcattgatccggttaaaaatctccttgctcaaggtcattatctcgaatcgacagtggatattcctgaatcaactcgccgtatttccgcccttaatattccgaaagatcatatgatcttgatggcaggtttcactgccggtaatgaaaaaaatgagcttgtggttctcggtcgtaatggctcagattattcagccgccgtattagccgcgtgtttacgtgcacaatgttgtgaaatttggacggatgttgatggtgtttacacctgtgatccacgcctcgtcccagatgcacacctattaaaaggcatgtcctatcaagaggcgatggaactttcttactttggtgccaaagtccttcatccacgcactattgcacctattgctcaatttcaaatcccttgtttaattaaaaatacgggtaatccagaagcaccgggtacgttaattggtgatggtcaaaaagatgacagcacgccggtaaaagggatcactaacctgaataatatggcaatgatcaatgtatcagggccgggtatgaagggaatggtgggtatggcggctcgtgtcttttccgtgatgtcgcgagcaggaatatcggtagtattaattactcaatcttcatctgaatacagtattagtttttgtgtaccgcaaaaagagctaattagagcgcaaaaagcactgtcagaagaattctatctagagttaaaagatggcgtacttgatccgttagatattatgaacaatgttgctatcatctcggttgtcggtgatggtatgcgcacccttaaagggatctcagcccgtttcttctctgctttaactcgaggcaatattaatattgttgctattgctcaaggctcttctgaacgttctatctctgcagttattgccaatgatgcagcgacgaatgcggtgcgtttatgtcaccaaatgctctttaacactaaccaaatcgtagaagtctttattgtcggtgtcggtggtgttggcagcgcgctaatcgagcagatccatcgtcaacaagcatggttaaaaaacaaacatatcgacctacgtgtttgtgggattgccaattcacgtgcgatgctaaccaatatgcaaggtatcgatttagataattggcaacaagcgctacaagcagctaaagagccttttagctttagtcagcttattcgcttagaaaaagagtaccacttcctcaatcctgtgattgttgattgcacttcaaacgaaatgattgcacagcaatacgccaatttcttacaaaatggctttaacgttgttacgcctaataagaaagccaatacgatgtcgatggattactatcatcaaattcgccaatcagcggaagcatcacgtcgtaaattcttatatgacactaatgttggtgcgggtttacctgttattgaaaacttacagaacttgcttaatgctggcgatgagttggtgcaatttaatggtattctttctggctcactctcttatatttttggtcagctagatgaaggaaaaagcttgtctgaagcgacactttctgcgaaagaaaaaggctttacagagccagatccaagagatgatctctcgggaatggatgttgcacgtaaactgcttattctcgctcgtgaagcgggctatcaattagagttgagtgatattgatgtagaacctgttttacctagctcatttgatagtacaggtgatgtcgagagtttcttaaaccgcttacctcaagtagatgttgagtttgatgctaaagtcgaagaagcccaaaagtcagcgaaggtattacgttatgtggggatcatcaatgaagggaaatgccaagtcaaaataatggccgttgatgctaacgatcctctctttaaagtaaaaaatggtgaaaatgcgctagccttctacactcgctactatcaaccaattcctttagttttacgtggatatggtgcaggaaatgatgtcactgctgctggggtatttgcagatgtattacgtacactatcatggaaattaggagtttaa

SEQ ID NO: 310543 - DNA, 1188 bp, Proteus mirabilis; identical to SEQ ID NO: 310534

SEQ ID NO: 310544 - DNA, 831 bp, Proteus mirabilis; identical to SEQ ID NO: 310533

SEQ ID NO: 310545 - DNA, 1113 bp, Proteus mirabilis
atgaaatctcgtgctgcggtcgcctttggaccaggagagcctttaaaaattgttgaagttgatgtgatgccacctcaagcaggtgaggtattgattaaaattagtcacactggcgtatgccatactgatgcctttaccctttcaggtgatgatcctgagggtgttttcccggccattttaggtcatgaaggcgcgggggtggtggttgaagtaggtgaaggcgtcaccagtgtcaaaccgggtgatcacgtgatccctctctatacagcagaatgtggcgaatgcctattttgtaaatcaggcaaaacgaatctctgtgtagcagtaagagcaacccaaggtaaaggcttaatgcctgatggcacaacgcgcttttcctataatggacaacctatttatcactatatgggttgctctacctttagtgagtatacggtagtagctgaagtatcactcgctaaaatcaatccacaagccaaccatgaagaagtctgcttactcggttgcggcgtgacaacaggtattggtgctgtacataatacggcaaaagtacaagaaggtgactcggtggctgtatttggtttaggtggcattggtcttgctgtactgcaaggcgctagacaagccaaagcaggccgtatttttgcgattgatactaatcctgaaaaatttgcattagcacgccaatttggtgccacagactgtttaaatcccaatgattatgacaaacctattcaagaagtactggttgaaatgactcagtggggcgttgatcatacttttgagtgtattggtaacgtcaatgtgatgagagccgctctagagagtgctcaccgtggttgggggcaatctatcattattggtgttgcgggggcaggacaagagatctcaacacgccctttccaactcgtcacaggtcgttcatggaaagggactgcatttggcggagtaaaaggtcgtagccaactacccaatatggttgaagatgcaatgaatgggaaaatcgaactcaaaccttttgtgacccacactttacctcttgaaaaaataaatgaagcctttgatttaatgcatgaaggtaaatcaattagaactgttattcatttcgattaa

SEQ ID NO: 310546 - DNA, 276 bp, Proteus mirabilis; identical to SEQ ID NO: 310531

SEQ ID NO: 310547 - DNA, 717 bp, Proteus mirabilis
atgatgaaatcaaaaataaaacaaatgattgctcactactttaaaactaaaaaagagcctaaaaactatgatttttaccctaatcatatcgccgtacttgagaaaccgccgacaccttatagtcgtattattgcaataataatttcattaagtgtgattatatttttactctgggcatatataggtaaattagatgtgctttcttcagctataggaaaattagtggtttcaggttattcgcaacaaattcaaatttatgaacatagtcgcttaagcgccattcatgtaaaaaatggccaacaagttaccaaaggagaagcgttattaacacttgatattttaggtgttgatgaagagattaataatctaaaaaataagatagaaaatctattattactaaaaattcgttatcaagcattaagtcaaaacacccgacctgatacaattgatgattttaatttactaaataaagaaaaaaaagaagcggttctactaagttatcaaaaagaaaaggatgaatttgatgctagtattaatcatattaattctgaaatagaaaccaacaataaaaacaagcttcttactcaccaagaaatcaattcattaaatgaattaaaaaacaatattgaaaaacgttttaatataaagaaaaaactctatgataaaaaaatcattagtaccatggagtttttagaaaataaaaaggagttattataa

SEQ ID NO: 310548 - DNA, 666 bp, Proteus mirabilis
atgccccgcgttgtaacaaaaaattcatctgctcatgattcttttattccaacagataaagcatataccccaaacacacgagaatcagatttacttgatcttattatcacagaatacctatgtaaattttcacatacacaaggggctcagaaaaaagagctcccgaataaagataatataattaaaagcctaagaaagaatggaaggataaaatattctaatttaatcttattacctagagcttcgcgagtaaaagggcaagttggaattgtagagaatgatccgatacttatttcaacaaatgtcttattgattgaatctaaaaacatcaatcacgcaaaacttatggggtcatggcttctatctgttttcggccaattgcagttggaattatatggaatatctcaagaaggaatgcgaaaacttgaagttaatacactaaataaaataaaatttcctaattttgaactaattgaaaacagaaaagcaaaagaattaattacattgttttattctgaagatagtatagattttagaaatatacaacaaagacagcttgatagagcatggtctgaagttctctctccagacgaaccaatagcactaacaaatgaagtttttgatattttccaagagcttgtagataatcgtattggtcttggataa

SEQ ID NO: 310549 - DNA, 585 bp, Proteus mirabilis
atgaatataatcttttttgaaaagaattcaaacgagaaagtacaattacaacctcatgctaagcatactataacggcgaaagcaggggatgtgtatcagttaattgattcagatactcaactttctccattagatattcaagcgcatcgtaaatcggatgatcttattttatctagtaaagaacaaaatatagaagttgttattaaagatttttggcaagaatgccaaccaggggaacaacaatgttacgccactttaaatgttttagattcaaatggtgtaatgggacaagcaactattactcaagatggtcctgttttagaacatttagttgctggtgaaacaggtactctttctgataatgatgatggaattggtctatttttatgggttgctggttcaatcggtagtgcattagcgatctttttagctaatagaaatcatggtggtgacaataataaaggtaatgaggctgatattaccgcgccgagtaagccaggattaactgctgaagatgatggttctgtttctatcgatttaccaaaagatgccaataaaggtgattctgtagatgttactttttaa

SEQ ID NO: 310550 - DNA, 2481 bp, Proteus mirabilis
gtgacggcaggtaaagccgatgtgactatccctgcagataaagcaactccggatggtaattattctgttaaagcagaaattacagatcccgcaggtaacacgagtggtgaaggtaaagcaacggacttcactgtagataccgttgccccatctacccctgtattaaatgctgaggataatggctctgtttctgttgaactgccaggggatgccaacaaaggcgatacggtagaaattacctttgaagatgaaaaaggggataaacagactgtaacaatggagaaaggggataatggttggacatctagtgatcctaatttgatcccagacagtcagggcaataacaccgctattccatctgataatgtaaaagataacagtgaagtaaccgcaatagctaaagatccaagcggtaatgaaagtgctccagcaacagcaatgtccaaaacagatgtgttaccgacagtgagtattagtgttgatacaacatcagtaaatgacaatggagataagattagtgctgatgcttctgtttcgggtgaaataacagaagttcctgcaacaatagaggacaaggatgatactaccggattagtatataccgttgctctagattatgttgcagcacaggatgtgaccgtaaccataaccttaacaaatgatgcaggtcatgcaagtgcgccggattattcaacgcttgcaggctctcagcatgatgggaaaatcgccctacatggggacacaggtaaagtaacctatgatggagcttcaactgtaacggttgttattcctgctggatctaagagtgtttcatttatagttgatccaacaatggaagctaaccaaaatgcatttaatgctgaaggtatggagaaagttgttgcaaccattacgggaacatctaataacgctaccgctgtaactgatacagtaaataatgcaggtgcttctgctacgggggttatttatgatggcaaccctatttcattacgtaatctggacggcgattttacactgaagtattcattatcctcatcagtggctgaaaatggggactttggatataccatcggagttgatagcggtaaaaaagatcctaagctaacgacagattacaatgatacgatttatgttggttattatcaggatggtagcgaaacttcatcatacagcaatcttgctaactcgcaggataatggacctgatggcacaaaaacagatggtaatcaaagtattacaactgttgatttaggtgctggtgatgacctgatggtgatccgcggtaatatgttaaccaatacacgagtctatgctggtgaaggtaatgatacctttactatggacggcatgaatacagcgttacgttctatgtatgctggtagttatctctttatggaatctggtaatgataccgttacgattaaacgtacaggggtaaccaatgctggtcaaatctatcttggctcaggtagtgatacctttactcaaggtgatgccaatgatcaaaataataccgaattgtccggtttattagatctgggtagtggtactcaagataagtcaaatatgccaaatgagtatctttctgtttatcaggatggcagtaatttaagtttaggtaatgacaataacattgatgcggtcacagatgttaatactgtcactatttatggttctgtctccggtgaaattttaggtggatatggtagtgataatatcactatcactaaaaatctgactggtaatgtttctgttggtgataatacagacactctaactgctgggtggatttatggtggtgccactgtttctatgggggatggcaatgatacggttactgtcactgaaggtgcgtataacacaactatttcactaggggcaggagatgatgtgtttgatgctactgctggtgttatgggggattctgttagcgcgacattagtgaatggtgaagatggcaatgacaccataaaattaggcacaattggtaaaaatctgacagttgatgcgggtgctggcgatgatactgtgattttgacaaaagattatgatccttcacctataggtaatcagggatatattaatgggggagagggaactgatactttagtcttatcaggtacgattacggtaaatatggccactaagactgatgaaggtattgctaatttcgaaaaagtcgatatgacggttaacagtgagttgaaagtggacaatagctctcagactattaagttaaccgcatctgatgtgttgggaatgaatgcaaattcaacgatttatatttccggtgatgctaatgataaggtggatttaggtgccgatggtgctggaggtttaggtacatttacagctactgccactacaacaaaagcaaccgcattagatggtactgaacatacttacactctttatagcagtgcaagtggtgctaatgtctatattgataataatattatcgataatggaggcgttatttaa

SEQ ID NO: 310551 - DNA, 264 bp, Proteus mirabilis
  misc_feature (219)..(228): n is a, c, g, or t
atgcttaaaatagaagatatctttggagttagtggaaagcaagttggaagctacattgagcgtgaccatgttgatgcaaagctaatagatgcattaagaacagagaagcaaattatagtttatggagcatctaaacaaggtaagacagccttggttaaaaaatatattacttatgacgatcatattttgattagcttatcccctacacacactttaaannnnnnnnnnaaaagatatatatcaatcaatacttcgaaaatgtaa

SEQ ID NO: 310552 - DNA, 861 bp, Proteus mirabilis
ttgattcatcatgttggtagtaagaaaatcataatacttgaaaattttcactatcttcctgaggaaatacaaagagcatttgcttttgatctccgtacatttcatgatttgaaagtacggtttattatattgggagtatggaaagaagctaatcgacttacccaattcaacggagaactacaagatagaattagtgaaatacctgttgaaccttggctagaggccgattttaggagtatagcaaaaaaaggtggggatcttttaaatatagacattacacctgcgattattgaaaaatgtatctccaactcattcggaagtgtaggtgtttttcaagaattattaaagggatcatgtattgcggatggtattctcacaaaacaagaaacaacaaaacacttcattaatatagatgcagttaatactgcaatagcgatgaaaacaaatgaatattctggacgtcatttacgaaacttagaaactatggctgttgcaaatagtgcatctataactaaaggcaatcctttaccatatttcctaaattattatattgtaatgcacattctttccctaggatatcatggggtaaatggtggaattagcaaagaaaacatccttcatgcattaaaacaagtacatcatagaaaagatgaactaaaaggacaccagttagttactgctttgaagagtctaactgggttgcaggctagtaaaggaataactcctcctgtaattgcgtatgattcaaattctcgacaactaaagattgtagattccactttttacttctttttaaaaaattctgatttagaggaagttaaatcagagataccttgtccaatggatgggctagatgtataa

SEQ ID NO: 310553 - DNA, 267 bp, Proteus mirabilis
atgtttgtaccaaatactaacccaagtctgaggctcagagattcagaaaataaaggttctttctctattgccttaatttgttttggtgaaatattagtaaatgaagtttggtatagtgcggttaataaacgaccactaccgcttgcaggatcaataattgactcattttctttaagttctcttcctagtgtcactttagcaattatcgacaaaagccttgctaattcagtatcagtttctacaatgccttgcttttttggtatatag

SEQ ID NO: 310554 - DNA, 438 bp, Proteus mirabilis
atgaaggaaagactggaaaaatataatattaatgagcgtaaaaaattgatcaaaccagttattggaaaaattgtattcaattactatatccgaaatgcgccaagacacttatggaatgctcataatatagctttatctgataatttttatgtatctgagcctaaaaataacttcccacctgaagcggcttggctattattaaatagtgagcaatacttaaatagattgatttctgcttcaagaaaccaaggtatggggttgcttaaattacaattgtatgagtataaaaatgttttattaccaaattggaatttacttaataatatcaatataatagaaatttctaatgaggcgaatcaattaatccaaaataatgcaacatacgaagtaataaaaaatacggcgacaaatttagtcaaaaaattaatggatatatag

SEQ ID NO: 310555 - DNA, 318 bp, Proteus mirabilis
  misc_feature (258)..(267): n is a, c, g, or t
atggtgcgagaattagcagaaaataataatcaactcaacgagacttttgggcaaataagtgcattagaaaaacaaaaattagaatatgagcaaagaatattgcaacgtaatgccaatttccaccaactagctcgaacagagctaaataaaatacaattacaaatcagtgaaacagaaaaacaacttattatagaaacagataaattagctaaaatggcaattatcgcaccgatatcgggtactgtgatggatctttcnnnnnnnnnnccaaggtggctttgtaaaaacaggtcagacattaatggatatagtgcctga

SEQ ID NO: 310556 - DNA, 318 bp, Proteus mirabilis
atgaaaaaaatatcatttttattattaggattaatggttacatcaaactcctatgcagcaatttctttagatagaacaagagctatatacgaaggtgggtcaaatgcattagttattaatattactaatgataataaacaattaccttatttagcccaaacatggattgaaaatgataagaatgaaaaaattgagctagggccattaattgccacaccattagttcagcgattagagcctggtgataaagcgttaattaaagtatctgcgacaccagatattgaaaagttacctaacgatagagaaacattattttaa

SEQ ID NO: 310557 - DNA, 270 bp, Proteus mirabilis
atgcctaccattattcttataggtgattcggatacaggccatgataatcatggccctaccaaagtcatcacaggttcatcaacagtaaaagttgatggtaaagcggttgctcggctaggagatacgttagcccctcatggagaacattctagaacgataatcagtggctcaaacagtgtatttatcgacgggaaacccgctgcccgagcaggggacactattagttgtggtggggtacttatcggtaacgcatccgttaaagttggttaa

SEQ ID NO: 310558 - DNA, 915 bp, Proteus mirabilis; identical to SEQ ID NO: 300686

SEQ ID NO: 310559 - DNA, 3021 bp, Proteus mirabilis
atgacagaactaacaccattcgcactcaaggatgcgcccgcactcattgaagcggtctatcccgcgcagaaaatatcattcgaagcgcaaaaagaacgcaaagccaatcttggtcaaacgctaacaggtttggggtcctactggaaaggtagaaaaccgctgatccttgttcgctccgttgtgctcggcacgctgctgcctcaaaccgaagacactgaaaaagatctcgaaatattcgagatgctaatgggctttgatatcgaaagcctcgctaagcgcgcgctcattcaaaatgacattaaacccgcagaattcgctgcacgaattcagctgcacaatccttgggattattttagtcacaacgtcaaagttaccgacgatagtttcaacgaaatcgatactctgcaatttcccatcaatagtgatgcgctcggtttaaagctgcgctggcgtcgcgacattgaagagaacgaaaagcttgcactttatcgtggctatttagaaacgatcgaaggctacgaggcaaaggcaagtctttgtaaaagaccggaagaagtagatcaggagtggctctatggacacatttggtccagcgtcaatcgacattatcaaagcctcaggattaaggccagatcacatcaagaactgatagagcagcttggtcaacttcgctatgggcaccgtcccaaagtagccgacactttcagtggtggtggctctattccgtttgaagcagccagattgggatgcgatgtatatgcatctgatttaaatccagttgcattgatgctgacatggggtgcgttggaggtaatcggaggctcgccatctcagaaagaagaaatagaaaagctacaagctgaaattgcaaaagaagtagatgaaaaaatccaagcgcttggaatagaaaccgacgaagaaggtaatcgcgctaaagcctatttgtattgcttagaggcaaaatgtcctgaaacaggttggatgatccccctttctccgagttgggtggtctcaaaaaatcgaaaagttgtcgccatacttaaacctaattatggtcaaaaaagattcgatatagagctagtcgaagtctcatcagccgctgagctagaggaacttgataatccgacaatcattgatggcacgatggtttatcaactagatgggaagtcatatagaacaccaattaaaacattgagaggtgactacaaggataatggaatcactaaaaacagactaagactttgggataaagcggattttaaacctcaatccaatgatattttccaagagcgactatatgccatacattggattgagcgagatacgataaataaccctagacaagttacatatttccgttctgtgactccagaagatattgttcgcgaagagaaagttgaaaaaattctaagggataatttttctgactggcaggaacgcggatttattccggatatggcaatcgagccaggatataacacaagccaaccgattcgcgaaagggggtggagtcattggcatcatctgtacatgccaagacacttattgattaacgctatttttagacaggcgttgaagggaaagaatgaagcatatttcagcatattactgtgcagaatcctaaatgttgaatcaaaaatgtctcggtggtcgcccgcaattggacatgatttggcattagacgtgttttataacatgtcattaaataccttttataactatggctgtcgagcttccatttcagctttcagagatctatttgaggcgagcatagccaaagaagaaaatatagcttcgcatttccaaatacaaagtcacgaagcgaaagacattgttgcagaaaacgacatttacataactgacccaccatatgccgacgcagttcattatcacgaaatcaccgaatacttcatcgcatggctacgtaagaacccacccaaaccatttgatgaatggacctgggattcgcgccgcgccttagccatcaagggatctggtgacgacttccgcaaaggcatggtcaaggcctataaagccatggcagaccatatgccagacaacggcatgcagtgcgttatgtttacccatcaagataccggtgtttggtcagatatgatcggcattttctgggcatccggtttgcaggttgttggcgcatggtacatcgccacggaaaccagtaccgagctgaaaaaaggcggttatgtacaaggtacagtgatactaatgttacgtaagcgtcctgccggcgaaaacgcgggctttaagcagcgactgctcccagctgtgcgagcggaggtaaagcgccagatcgaaaccatgatgaacctgaatgatgaggtgaaagacaagctgggtgagcctgttttcaacgattcagatctgcaaatggccggttatgcggcagcactcaaagtactaacatcctacacccatattggcggtgaagatgtcaccagctttgccctgcggccacgcactaagggtgaagtcacggttgtggatgagatcgtgcaacaagctgcggaagccgcaaacagcctgctggtaccagaaggtttgtcggctgatacctggcaaaagatcaacggcattcagcgcttctatttgcgcatgatggacattgaaacttccggagcctctaagctcgacaactaccagaattttgccaaagccttccgcgttgacgattacgcccgggtaatgggcaatatgactgccaataaagcgcagctgaagcggatccctgagtttgcctctcgcgacctgactgacagcactgaaatcggctccacttggctaggtcacttggttattggcttgcaacagatactcaatgaaaaagagccgcagacggttatcagtcagttgcaagcaggcttgccagactttatggaggtccggccaatactgatcgacctgctgacctttattgagaaaaaggccccagaaaagtccactcgcgatgccgctgaagtgttaggtgcgcgcttgaagaatatgcgtgctcttgggcaatga

SEQ ID NO: 310560 - DNA, 228 bp, Proteus mirabilis
atgaatacgcttgtgatgattgtaactaatgaagatggcgaagaagaagaacctctatggcatgtaataaacccacacgctgatgatttaatggttttatgttcagggcaatattttggcgacggtgcaagtgaatgcacatataaaacaaaggatattatcagaggtggcattaactgtccaaaatgcttagagataattaagttttataagagcattaagctctaa

SEQ ID NO: 310561 - DNA, 585 bp, Proteus mirabilis
atgaaaaaccagaatatcacaggcggtatactcgccggtggccaagctactagaatgggaggcgctgataaagggcttcaactcttacatgggctacctttatacctccatattgcccaaaagttatcaccacaggttgcctctattctgattagtgcaaaccgtaatctagaacgctatcgccaaagccagtatcctgttatcaccgatgaaaccagtgatttttccggtcctttagctggaatgctggcattattaaaacaagctcaaaccccttgggttgtgtttgttccttgtgatgtcccctattttcctagcaatttggttgaaacgctctatcgtcacaaaggggatgccttagccgcctatgccgacgatgggcagcgagagcatccaacactggcactgttaaatcgttgtcttattccaacacttgaggcttatctctctcaaggtgaccgtaaattaatgctatttatgcgccaaatcgctgctaaaccggttttatttgctaatcaggccgcagcctttattaatttaaacacacctgaagatatagcaaacgccaatcacatagcaaaatag

SEQ ID NO: 310562 - DNA, 402 bp, Proteus mirabilis
atgaatattgatttttcgatgatttggtttgcgatcattatttttgccacgcttatgtatattatcgcagatggatttgatctggggattggcattattttaccttttacccgagataaaatacaaagagataccatgattaatagtgtggcaccggtttgggacggcaatgaaacatggttagtattaggaggggctgcgctctatggtgcttttcctcttgcctacgcagttattattgatgcgttaacaataccactgacattgatgcttattgggcttattttccgtggtgtggcatttgaatttcgcgttaatgcacttcctaaacatcgcctattttgggattcagcttttattggtggctcttttcttgcactttttgccaagggatcacggtag

SEQ ID NO: 310563 - DNA, 393 bp, Proteus mirabilis
atgaatttaagagaaaatcatgattcatttatattaaaaaactcctttgttaaaaagagttacgtatatgaagcgtatatgaaaatatataccaatgacttggaatttctttttaaagatattaaatcagtaagtaaaataaacttaacttatttatcgttaaaaaattgcatcggtaatttaatgctcggaggtcaaggaatagagcatatagtttcaaaaaggactggtaccagagaagaagattttaataaagaattcaaattcttacaaatgctattgaagaaatatggtgttgaaaatacgtctaacataaatttgactgaaattggcaatatcattgctatagcttatttgaatagcaaaggattaaatttgccaatagtgaattga

SEQ ID NO: 310564 - DNA, 1260 bp, Proteus mirabilis
atgacagaaaatttggatgataagtgtaatttaacttatattgacctgttttccgggtgcggtggattgtctttagggctaggtcaagctggttggaaaggcatatttgcaattgaaaaagatcagatggcgttttctacattcaaatacaatttaattgactcagaaaactcacattttgaatggcctcagtggttacccaaagaaggtatgaccgtagagaaactgctagaaaattacactccgcaactattacgtttaaaaggaaaagttagtttgttagctggtggaccaccatgtcaaggtttttctctagcaggccaacggaactcaaacgaccctagaaataaactatctgaagaatatattaaggtagtcaatttagtctctccaaaatatttattattagaaaacgtaaaaggatttgattctgttttcaataatgtttcatcacttgaaaaaagaaagccatactcaatgatagtcaaagaaaaattagagcatttaggctataagatttttcatgactatatatgttgtgctgattatggtgtacctcaaaaaagaactagattcataatgattggcatcaagattgaacatttaccatctgataaatttaacccttttgagctattaaaaaaacacagaacaagttttttaatacataaaaaccttcctttagaacatattagtgtaaaagaagctattgatgatttatcaataaacaaaaatggcactaagtatcactcaggaaattcaattactggatttaaaaaaataaattatgaaccacctaaaaaaggctctaaatatatacaactgatacgtaaaaactcccaaaaggaaataccaaacagccttagactagctagacataaacaagctactattgaaaaatttcaactgattcaaagcatttgtgtccccggtattagcttaaatgatgccatgcgactaaaagtaggcacaaaaaaacaagctataacagtactaaatgagtatctaccatcaaaaacacttactacgttgcctgatgacctattgcactattcagaacctagaatattaaccgttagggaaatggctagaattcaatcatttcctgatgatttcaaaatacttggaaaatacacaacaggcgggtctagaagaaaacaagagtgtcctcgatatacacaaataggaaatgctgttcctccattgcttggtgaagctttaggaatgttaatgaaaaatataggtgagcataatgaatag

SEQ ID NO: 310565 - DNA, 864 bp, Proteus mirabilis
atgaataaactcgaaaatcattttcttttcctccctaaaggggttaaggatatgtttttatcccatttgaataaacttatcaattactcccccaccataggcttaatgggtaaaacaggggctggaaaatccagtctgattaatgctctgttccaatcccgtctatcgtctgtgagtaatgtttcaggttgtacgcgccaagcccaacgctacagtatgacgatgaacaaccatacactcacctttgttgatttacccggcctgggggaaagcatagaacgagataaagagtaccaccagctatatcgtaacttattaccagaactggatttaattatctgggtactcaaagccgatgatagggcatggtcttctgatgaacagagttatcgctttctcactgagcaatgtggttatcaaccaaaccgctttctatttgtgctgaatcaagctgacaagatagaaccctgtcgccagtggaatgaactgtctcaccaaccatcccccgagcaagcggctaacttagaattgaagcaacaagccgtagtaaccgcctttaagccgcataaccctgtgatggttgtatccgcaatcgaaaactatcaactcactgaattaacagagcaactaatacaggtattaccggcagaggctagtagcggtgtcgctaggcaactgaacagcgcttaccgggcgcaatctgtggagaattctgcacgtaacgattttgggcaatgtgtcagtgatatcgtcgataccataatcgatattgttccattacccacattgataaaacatacgatcagcactgtcaaaaacaacatcatttccgttgctaattccctgtggagcctattcttttag

SEQ ID NO: 310566 - DNA, 837 bp, Proteus mirabilis
atgagtttattagcttcgcgttttggctctgcgaacagcattcgccgtgaccgtccactgaccattgaagaattatttcgtactgtaccgagcgttttctctgaagataagcatggatcacgtagtgaacgttatacctacatctcgaccatcaccttgttagactgtctgcaaaaagaaggcttttatccgttctttgcttgccaaactcgggtgcgtgatatcagccgtcgagagcacaccaaacatatgctacgtctacgtcgtcatgaccaaatcacgggtatacaagtccctgaaattattttgttgaatagccatgatggttcaagtagctatcagatgttgccaggactctttagaaccgtgtgctctaacggtttggtgtgcggcgatgtattaggggaagtgcgtgtaccccataaaggggatgtggtgggtaaagtgattgaaggggcgtatgaggtgttagatacgtttgagcaagtggcagaaaaacgggaaagtatgcagtcattacagttatcgccacccgcccagcaagcctttgctgaagcagcattggcctatcgctttggtgaggagtttcagcctgtcactcgagagcaaattctacaacctcgacgatttgaggataaaaaagaagacttatggacggtgtatcaacgtttgcaagaaaacctgattaaagagggattatcaggccgaaatatcaaaggtaaacgaactcgtactcgcgcagtgaacggtatcgatggtgatatcaaacttaacaaagcattatgggtaatggcggataccttatttaatcaactcacacttcgccaacccaattaa

SEQ ID NO: 310567 - DNA, 942 bp, Proteus mirabilis
atggataactcttcgcagcatgagcgtttagcaaatcgtattgcactgattttattgcaactatttaaggaaggcatggtttcgcgtcgtgagctggctgagcgctttaaggttacggagagaaccatttatcgtgacctaaatcgcctgggtgagtttgtcacgtgttctaaagatgggatctatcatatcagcgtgcaaaataaaagcgaagacaaacttcctacgttagatagtttgagtgaaaaaacgggcatgagagaattattgccgttgtcagggataggttcgttacaaaatatactcacgtcaattgaatataagcgaattaaaatattaccactttctccagaaatattgagctctgagcttcaaaagaatactttttttagtctggataaagcaataaaagaaaatttggtttgtgtgattcactataaaggaaaatccagaactcttcatccgtaccgtttaatgaatttaaaaggagtatggtatctggcggcaacagatgctgaattaatgattaaagcctttcgggtgagtgcgattgaatggctggatatcaaaaaaacaacgttcattccagacagtaatatccatgactatcttgatagcgaggacgacgcctggtttagcatggataaaatggaagttatggttgaagtttttcccgatattgcttgctactttgaacgacgaaatatattgccacagcaaaaaattatcagcaaatcactggatggcagattaattctcacaacgcgaattgcacatcgggaacaactcttttctacgctacgattctggctgcctaacgtacgaattctatcgcccgtgacagaagctaatgcgtttgtggggcagctttctcagtatattgcccaacttactcaagaaaatgaccttgtaaccaataatgttttacaggataacgtctaa

SEQ ID NO: 310568 - DNA, 1416 bp, Proteus mirabilis
atgatgcacaatcgcaaaaaagctgtaacgcagtcgattagcctctgtccaatctggccaatgcaggctaccgaaaaaattggacgaatggttggtgaaataaaccaggctaacaatattatgtcaaccatctcttccacagcgcaaaacaacgcgataaaaggcggttttgctgcggaaacctggcatgcagaatccttcaaccttgatgccattctaaaagataaagatgtacgcgcttttacggatcagtttaagaataccccgttggggaaaaatcatcagattcatgacattgtagttatgaaaggcgatgagcaattagtgggggcgcagcttaaatattttcgcaatgccgaagagacacaaaaagccttccgttccaccaaagatggcgttcatcaatatcagcacagcgatgtatttatcggtccggccgatcaaattgatgggatcaaggattcagcccaacgtaccgtacttaaaaaccaacaaaagcgtccgtttgtatcggatgctgcagaaaaagtgtgtgataaaactgccgcctccattgaagctgaaggggttaaatcgatgccgcttagcaaacgtgagacggaaaccgtcggggcggggacacaatcgggtaaagatctacataataaaatgcagaccggatatcttaacaaagcgaccatccaacaaagtgtgcgcgctgcgggttctgcggctgtgatcaccacagtcattgcgggtagcattaatacattccaatatgtgcgacaggttaaaaatggtgaaatcacggttgaacaagctaccgcccagatcctgcaagacaccgtcattgctgccggggatagcgcgctgaaagccggggttgccaccgcgagcgtcagcatcgccgcacgctccttgcccggtttgtttgcaggtactgtttttaaacgaagtctcgccaatggtggtatcgcgggggccgcggtttgtgctgtggatgttgtacaaaatgtggtgctgtttgctgcaggaaaaattacagcacaggagctagagtctcgtacaggtaaaggtctcttccagacaggggctggtgtggctggtgcatctattggtgcagcagtgggagcgcctggcgggccggttggcatgctgttaggaagcctcattggcggcttgattacgacccttggtatgaatattgctttggataatcacatcgagaaaaacttcgaacttactctcgtcaatacagaactggtagtgagtaatggactagtaatgcacgatgcgctgagctatctgcatcaatcacaaatctattacgccgacttccataaggacctttatttatctgaaaaacatttttccagccagataaaaaccatggaagcgcaaagttttcgcttaaaaaatataattaataatctgtaa

SEQ ID NO: 310569 - DNA, 3216 bp, Proteus mirabilis
atgagtgatatgaccgccgagcaacaacaacagattttccatcaacctttggaagtggctgaacagaaagttgtcaatgatttggtcaggcagcacaaagcgaacgcagcgcttacacaacagttggcattggatgcctcaaagctgatttccagtagccagaatcggttacaagaccaggcgagtagtggttttttcaaacggttttgtggggctttaagcggaaaaaacaatgagaataatctactaaatcaatcagatactatacagatgcaaaagttagcatggtattatcttatgcaactccagcagcaaaacctgatcaattcccagagtattgccatcattcgcaataatttgggaaccatgaatgaatatataattgaaacgcgagattttctcgagcaggcaattgataaaatcaaccgccgactcgttcaggtggaaaacaatacccgatttaataactggtcgttagatatcgaagcgaataaacgtcgctataaatcctatccagataatattctggtgttaagcctagcctatgattttatgcgcagacatcaggatgctgaactggtgacggcagatatcaattatctgatcgtgacgctcgagaaattaggcgttaactgcgatgaagaagtgcgcctgcttgatttcattcttgagctcatcgaccagatagatattatcagtattgatcgataccgttcactcatcgagctttcggtagatgaacatgaaattgactcacattttattcaaaccaatatatctggtatcggcttcaacgctctctattttctttctgaacaatatgaaaagatcgtttccctgattgatgatgacgcgttgtgtaacagtgatgaagaacgtgagaagctgatatctagactatttggtgaagaattttcaggattatcaactatttacagtatccgcgatctgattagcgaagtgattggcggtagtctggtgactattgatatctatcgggatattaatggattaaatgccactgtacttgaggatacgcaggatgaatcagcagagacgttgacgctggtttcagctttgccggatattcatcagcacagctttctggacgctacagacagcgaagagaaaaaatctctgtatctgcttttactcgcactgagtattgaaaatgctgcctcgctaacaaggcaggggcatgagtttctggcgcttcttggggaatatgcaggttgttctgccgtagtgggcgatatcatgagtctggccgatagtccttataaatatcaggaatatcagcaggcgatgttggaactgctagccgatgataatgcgcgctacacctggctttttgacgtattcttcttactgatgctttgtggcaaaaagattgaaaatccacaggtgatgcgcgtactcagtgcgctgaaaccctcgcagtttaaagacatttttcctcacatgcaggtgctgcttcaggaaaataatgaagaaaaactgctcaccagcgcagagaaactgacttcactgacgcagggatggattaatattttccgctatcgcgagttgcgatttaaaaatcaattttcggaggagatcaagcagcttaataccgccagtcttgcgtgcaatatgctgagctatgacatgctgaaagtgacgatgaaattcggtgattacagcttcttcctggggtcgtttgatgatgatagcttcttgggaaaaatgggggccgctgtcggtggttctgcctttgcgatgggaagaaaatcgtgtctctctgacgtaaatggttttcgtaaaaaggcacgtgagttcctttcgtcaaattcctcagccttgaataaggccaatggtatcacctctcgctgggggattccgacgtttgaatatgaaaatcaaattagttattccgattatgaacttgataactctgcagaaaatgaagactggtatgatcaaatcagtaaatatcaggagcaaattgatgattcactcacggccttttcaaacgcatgttccgatgccgtcgaacagcttgaattgtttgccagcggtgagtttgatcgctcagtcattcgcatcaaagaacagaaacatatcgagtggctacggcagaaagaacaggaaaaactcgataagcaatctgttacggtgatgaacggtggcaaagaacaccgctttcggatcgagtggcaggatatcgaaattcctccctgcgacccagagaatattcgtcatatcaagacggatggaaaagtttggttacttattgataacgatgaaaatttttatcgtagtgaagatcgattgaattggcaggttgttaaacctgatccatcagaaaaaatacgttatataaataaaattatcattgtagaaggtatttgggtgctattctccaactccgattccgggttttattattctagtgacgctctgacctggcagcaaagccagctcccagatgtaccaaatacctggaattttagaatgactgaagatcttgtttattttaataatctttggttgtggaggtttacggaacgtaaagagtatcagtataaagaggaaggatttttcttcgattcgataaaaacatttacttatgataaatcggttgttttttgtaccaatgctcttgatgctaaatggcgtcgttatgaagaaacgcctaatttcagtgaagggattgaaatacaacgcctgtgttcgttaccaggtatcaattgcttactagtattctgtaaatacaacggatactatttatcagtgaagaaacgccccgactctgagccaattattgaatatcatataccaggtaaaagttggcgagcttgtacctggaatggagagaaagagttctataacgatattatagtaaccggtatgaatggttctctaatgtgtttttattcccgttacctactgacctccgataaaggctatgaatggaaacagcatgacaatgagctgtactttgccgattgtttccatctatcagaaattagtttgttcccatccagttataatcgccaagtgatttatataagtcataatggtgttgatttcaaagaacttatgatggatgaggggaattggcaatatcttgcagcgaatgaacaaggattgttgagcgtttattcgccgaactctcatgaaacgttcttgcgcctagggacctatatttggggggaggagaaaaacatggcatag

SEQ ID NO: 310570 - DNA, 576 bp, Proteus mirabilis; identical to SEQ ID NO: 294793

SEQ ID NO: 310571 - DNA, 297 bp, Proteus mirabilis
atgggcgataaccaaaaatacacaaccattaaaatacgcaccctttgtacagcttgtggtaatgattgcggtgagcacctaatagcagttggtgaaaatattatcctttgttttacgtgcatagataaaaccaaagaaaaggttgatttgtatagaaaggaaatagctaaaaaggaaattcaacagatggcaattgatttatcaactggtgacttaggtttagttgatgtgggaatggctactgccagagcgcatgccaaacgcttatataaagctggatatagaaaggtggagtga

SEQ ID NO: 310572 - DNA, 879 bp, Proteus mirabilis
atggccagtagaccaagaagaaaggaatttaggcatctacctgactttctgtattacgattcatctaaaaaacagtatcgcttaacgctgactaatggtattcgaaaatgcattggtgctgataaagtaaaggctatcgcaatagccagagaatacaacaatattatgcgaccagaaaaatgcgtttctgttaactcattaattattgactcgggagggcaatatggagaggcactccctctctcagaacatttagataagttatttttgcggatcactaatgatgagaaaccatcagacagtacacttagtaactgggttaatgacttagagagaattaagatcttttttaaagatatccccgcaaatgaaatctcactggaacatgtaaatggctatattaatgaatatcatgccgatgcttctgctaatgtacaaaatcgtaaggtaagctttctaaagaaaatttttagttacgcaatggatgaatctcttatgtttgataacctagctgaacgtaagaaaatgaaaagagtcgatgggaaaaaacgtagaagattatcttatgatgattttcttaaaattagagcgtccgcagaaccttggttaagaacagcaatggatctggcattacaaacaacacaagcaaggcttgaagtatcacgcataaaatacaatatcaaagcccccaaagaaggcatctgtgggtgtttatggtatgaagaacccttaaatggaatatacgggatgatttatattcacagacaaaaagtgcaacataaagaggcatctcatattgcgatcctcataggcaaagcacttaaggatattatcgataatagccgtgacaatgtggcaagccccttatattgtgcatag

SEQ ID NO: 310573 - DNA, 336 bp, Proteus mirabilis
gtgacattagatgctatcgttgaaaatagtgaagaaaatgaagaggatgagcaaaacgatgccataatagaagatagcattgatttagctcaatcacttgatttaaattcaattggcgctattccgattacaatatcttttcttttagccaataaaacattatcaattgatcaacttgaagaattagcaccagggaagaaatttattttacctgataatgccattcgtcatattaatattttagcaaatggtaaagctattgcccaaggagaattaataaaaattaaagatatgttagcggtagaaattaataaattatctataaaatgcgaataa

SEQ ID NO: 310574 - DNA, 921 bp, Proteus mirabilis; identical to SEQ ID NO: 308046

SEQ ID NO: 310575 - DNA, 930 bp, Proteus mirabilis
atgaaatatcaagatgtaacaaaaaccccctgtgagaacgcttattttctagtctttaatcttattaactcatcagaaactcgccctactcttatcgacttttgtaataatctatcaggtcttcttcgtagtatgagaacccgtttccctgaattagacgtaagttgtgtgatgggatttggtgctgatgcatggtctaaactattccctaatcaagctaaaccgcgagaattaaatacctttaagcaaatcaacggcgatgtgtataccgcagtatcgacacccggcgatctgttttttcacatacgggcattaaaggtatctgcttgttatgaattagcctcaattattagccaaaaattaaactctattgccacctcagaagatgaagtacatggtttccgctattttgatggtcgctcgattattggctttgtggatggaacagaaaatcctgagtttgaagatgagcgtgtcgcttatgcggttattggtgatgaagatccactgtttaccggtggaagttatgcatttgtacaaaaatacattcatgatatggcggcttgggaaaaccaatctctcatcgagcaagaaaaagtgatcggtaggcataaattcaatgatgttgaactaactgatgaagaaaaagatccaggctcacacaatgtcgtcaccaatattcaagatgaaaacggtgatgatttaaaaatcgtacgagcaaatatgccgttttcaaatccctccaaaaatgaatatggtacctattttattggttatgctcgctatttctcaacaacaaaccgtatgttagaaaatatgtttgcaggaacacctgaaggacataccgataaactactgaaattcagtactcccgtcacgggcacattattctttgtcccatctccggcgtttttagatgatatagaataa

SEQ ID NO: 310576 - DNA, 567 bp, Proteus mirabilis
atggttatttatttttatagagaatgggtaaaaatattattttttatgcttatttttttacctgttgcaaatgcggctacaacaatgaattttgatggtactttgattgatacgccatgtaggattgatcagccaagtttaaatcaaaatgtggtttttttaaatagcacaccaagggattattggaaatatcctgcggttagacctgcagaaaaatttaccattaaactgatccaatgtgatgcaaaatcgttatggaaatcagtgaaaattaaatttaatgggcagccagagccagagatgggggctgaacaacaaaagtaccttacactttcttctggcgttaataaaagtaagttagccattggattaattgatatagatggaaaccaacgtattactttaggtgaaaaccataacggtggaaatggaactcaacttaacgatggcacgatgttgctgacctttaatgcatttgttgaagcgacaccaaaagcaatacaggaaaaaagtgttgtacctggagtttataatgccacggtagaatttgaggtttcttatgaataa

SEQ ID NO: 310577 - DNA, 648 bp, Proteus mirabilis
atgaattatgtaatattccctaatgatgactctacagtgtttttaggaacaataatagataaccttaaattatttatagctcctaatgatattaccatcataacttgtgaggcaagtaaagatggctatatagattcactaaatgaaataaaatctattaatgctcattcaaaagtattatttataggccatagcacggaagatgttttatatggaggaatgagtagcagttttgatagagagccattaatcaacttaaaagatatgaagctatttaaagattgtgaattatttttactctcttgtttttccaatagattactagaaaagtcaagatctagcagaaactactctagttgtataggctttggcctcttaccctctgaagttaaagaagtagatgcacataaacagatgcgcagcctacaactaacaaaagatgatattgaagatttcaaaaatttactcattgaaacaatgaataacgttataccactctttttttcagaaagtaacaacattgacaaagtatataaccttatgaaattaacaataaataaaaaaataaatgatattattttatcaaatggaaacataaaattagctaatatattcttttatgtagtaaatgaatcaatatccgattaa

SEQ ID NO: 310578 - DNA, 465 bp, Proteus mirabilis
atgcctgacccgattgggttattgggtgggataaatctatatcagtatgcgccgaatccgttgggctggattgatccgtggggactagcaggtaatccggcaacagcaacgcatattacttatcaaggtatagataaagcgacgggtaaaccttatgttgaatatgccagtatgcaaggtaatcaaacagctcaggatgtcttaaagtaccgttatggtaatgattttagtcgttttggtggctccccccctgaaataatttatgatggttacggtcaaaaagggaaagacattgcacgaggcatggaacaacgtacatttgaacaattaggtggtttagaaagcaccgccaataagcaaaaccctgtaggccaaggtaatgcaagaaaaacagaatatttgagtgcagcagatgaacatatagcagataaacaaactggtgctaacaaaagaggcggatgctaa

SEQ ID NO: 310579 - DNA, 615 bp, Proteus mirabilis; identical to SEQ ID NO: 308003

SEQ ID NO: 310580 - DNA, 366 bp, Proteus mirabilis; identical to SEQ ID NO: 121650

SEQ ID NO: 310581 - DNA, 225 bp, Proteus mirabilis
atggttatatcagataatggaaatgggatttctaatttatttttagaaaacccagaaagaatttttgaacttggagcaagagatgaaccgcctacaggggtatcaggatcaggaattgggctattctattctcgtgagctattaaaagaaatgaatgcatctatcgaatttatcggaaatgatattcaattgtctggagcatcttttgaggtaatatttcaatga

SEQ ID NO: 310582 - DNA, 354 bp, Proteus mirabilis
atgaaaaaatacgaccttatctattgtgatcctccgtgggattacaaaaataaagtttcaaacggtgctgctaaaaatcattatccaacaacctccctcttcaatttaacccatatccctattcattctattgcatctgataacgcagttcttgccatgtggtataccggtaattttgtactcgaggctattaaattagccgaagcgtggggctttaaagtgcgcacaatgaaagcttttacttgggttaagtttaatcctttagcatggcaacgaattgataaggcgattcaaaacggtgagttatttgattatcacgacctatttgaactattagatgctgaaacaaaatga

SEQ ID NO: 310583 - DNA, 261 bp, Proteus mirabilis
atgagagttggtaaaaatagttggatgtttaaaaaatacggttcgttaaataaagaatcatggagagaagatttaagtaaagggtttaatgaagcatttagagtgcttaggcctggaggaacattgctgttcaaatggaatgaaacccaaatacctgttaaacaaattttagcactaacagaccaaaaaccaacagcagtacagcgtgtaggtaaaaatgataagacgcactggatctcttttcttaaggaggttaaatga

SEQ ID NO: 310584 - DNA, 189 bp, Proteus mirabilis
atgaagccaatacttgatatgtgttgtggctctcgcatgttttattttgataaacaagacgaccgcgttttatttaatgatattagagccgaagaacatattttatgtgatggaagaattttaaatataacaccagatattatttctgattttaaaaatcttcctttccaaaataattcattttattaa

SEQ ID NO: 310585 - DNA, 831 bp, Proteus mirabilis
atgctgatgtgtgatgcgaccggtctgtcgcaacgtcgtgcctgcaggcttacaggtttatccctgtcgacctgccgctatgaggctcaccgtccggctgctgatgcgcatttatcagggcgcatcactgagctggcactggagcgcaggcgttttggctaccgtcgtatttggcagttgctgcgccgtgaagggcttcatgttaatcataagcgcgtgtaccggctttatcacctcagtggcctgggcgtaaaacgcagaagacgtcgtaaagggctggcaacagaacgtctgccgctgctccgtccggcggcgcccaatctgacctggtcgatggatttcgtcatggacgcactttccaccggtcgcaggatcaagtgtcttacctgcgtcgatgatttcacaaaggaatacctgacggtcactgttgcctttgggatttcaggcgttcaggtcacgcgtattctggacagcattgcactgtttcgaggctatccggcgacgataagaactgaccaggggccggagttcacttgccgtgcactggatcaatgggcctttgagcatggtgttgaattgcgcttaatccagccgggcaagccaacgcagaacggatttattgagagctttaacggacgatttcgcgatgaatgtttgaatgagcactggttcagcgatatcgttcatgccaggaaaattattaatgactggcggcaggattataacgaatgccgcccgcactccacgctgaattatcagacaccgtctgaatttgcagcgggctggagaaagggtcattctgagaatgaagattccgacgttactaactga

SEQ ID NO: 310586 - DNA, 264 bp, Proteus mirabilis
atgaagaagcgtttttccgacgaacagatcatcagtattctccgcgaagccgaagctggggtacccgcccgtgaactctgccgcaagcatgccatttccgatgccacgttttacacctggcgtaagaagtatggcggtatggaggtgcctgaagtcaagcgcctgaagtcgcttgaggaagagaacgccagactcaagaagctgcttgccgaagccatgctggataaagaggcgcttcaggtggctcttgggcgaaagtactga

SEQ ID NO: 310587 - DNA, 549 bp, Proteus mirabilis
atgtctgaacactttcaaggtaaatttgaagcagaattgaaataccacttaaaacgacctcaagattttattgatgcattacaactcgctggagcaactttatttatatcgaaaaatgatgaaacagattggtatttagaacatcccaatacacctttccctgctccctctataagtttatgcgtaagaaaaatggtcccctctggtatcaatttattaattgtaaaaggcccagaacaagcccaatgtgaagcaataaaaatagaagatgcagaaaaaacggtttcgatgtttaaaacattaggttatcactgtattttaaactatacaaaatcccgtcaaatctactttctagagcaatttcatatcactatcgataaattagacaatcttggctactttgctgaatttgctattatgactgatgatgagagcaaacttgctgactataaattacagttacataacttagcatatcaatttggctttaatgatagtgagcaagagcatcataactataaaacaatgcttttaagcaagttagcttaa

SEQ ID NO: 310588 - DNA, 249 bp, Proteus mirabilis
atgtacgcacttaaattaattactgaacgtgaaggacgtaaagtggaagaagtccactgcttaggggatatgtaccgcttagagttttatcctgaatcagaaaataaagatatcgtggtgcgggttgaacacacaaagaaagacgccatcccatcatttgatattaatagaacagatcgcgcttacattacgacagtaacaggtgatactgttcgggttatttccagaggcagaaaagtttgccagtaa

SEQ ID NO: 310589 - DNA, 159 bp, Proteus mirabilis
atgacgaattcgacagattctaaatatccaactagggctgacttagctaaagccagcccttacactgagcgcgataaattgtcagaagaagagcgtgaagaaagaagtcagaagtttaatgattctctatttttcggtaatgggtatctcaaactttaa

SEQ ID NO: 310590 - DNA, 696 bp, Proteus mirabilis
atgccaaatcatgtaacaaacattgttgaagctaaccccatagtcattaacgcgatgcttaatgaagatggagttgtagactttaaagttattagcccaatgcctgatgatttaagtatcaatggcgcaagcgggttttatggtgacgctgaaaccgctgcgaagcttatgtgcagagaaaagttaagtgaaagccatttctttgcaaggctagaagcatcaaatagacgtgaagctaacgctctaaacatgacagatgaaagctttgaacagtttgtctgcatgatgagaaataagcgtaaacacggtttttaccacagtatggactttgctagaaatgtatggggaacaaaatggggagcttataactcatctaaagaatcagacaataaagtctcatttgaaaccgcatggtctcatccattccctgcattaaaatcgctctctcagaaattcccaaatgaagaaatcacagttaattatgccgatgaagatactggcagtaattgtggttactacacaatcaaaaatggcgaaataatcgtcgaaagcatagcgccttcatggaatgagcagaccgatgaagaaaagcgtaaatggacagaattcgcatttaaattaaatcatccagacagtaatcctcgcgaatatggatataacgaaaactgggaatatgacgaaagcctagaaagctag

SEQ ID NO: 310591 - DNA, 264 bp, Proteus mirabilis
atggaaaaactaaccaaaaaagaattggcatggattgaaaaagttcaaaaggtattggatgaatgcccgtcagaacgtcttgttttttatacaatcggcgataatgatctgcaactttatgacagaagaaaagagccagcaattactgatttaatgaatgaaggttgtaataacgatgatttctgtcaggcagcggaaaagcttgatgctaattttcactgccatttaacttttcccgcgccagttgagtcaactgctgggtaa

SEQ ID NO: 310592 - DNA, 2820 bp, Proteus mirabilis
atgaaattgtatgaacatggttcagagtggagaaggtgggatcttcatgttcacactccagattcagtgttagaaacacagtttaaaggtgattgggatggttatataacagcaattgaacagtctaactcaggtatttctgttataggtataactgactattgctctatatccggttatgaaaaagtttgtgagtatcgaaaaaatggaagaatgaaaaatattgatacaattattccaaatattgagttccgtattactccaaatacagataaaaataaaggtataaacattcatttattaataagcccagaggaaaaatttcatattgatgaaatcaaaaatgcattaagtcggctgtttattgatcataaagggcagaattttgcttgtattgaaactcaacttatttcatatggtagaagcttattacagaatactaataaagatagtgatagaacatgtttaaaggaaggtattaataacttcaaaccatcctatgatacttttaagaagtggtataatggggagaaatggttaaggaataactcaataattgttgtagcaaatggttctaatgatggtgtatcaggtattcgagatggtggttttactggtataaagaaagatattttcgagtttacggacatgatattttctgctaagccatgtgatattaatttttttactggtcaaggaaataaaagtaaagaagatattattaaagatcttggacgtcttattccttgcattcatggttctgatgctcatgcaattaataaattatttgagcccgatggtaaaagatattgctggattaaggctgatccaacatttaatgggttaaggcaagtgatttttgagcctgatagagtatttattggagagatttctccagaaaataaatctgaatatcagacgatcaaaagagtaagatatattgatagttcgggtaaaaatagatttcccaaaaaatggattgctcttaataaagacttaaatgcaattattggtggcaaatcttctggtaaatctatgcttttatatcatatagctaagactataaatccagaggaagtttctactagaattgagctatctaaatcatcatcatatgatgatatctcagatttggattttgaagttgagtggtctaataatgaagtatctaaactttctgatataaaagatccattacaattaaaagcagtaacatacattccacagctatatataaatcaattggcagataaagaaggtaaagatgattttaatgatttaatctctaaaacattacttcaaaatgaatcctatcgaggtattgttaatgagcttgaaaataaaataagaactgttaattctgaaattcataacaaaatagaaaccagatttcttttactcagagaacacagtaaactatcttttgagttaagcgagattggtaatgaggattctgttaaaaatgaaatttcagcacttgaacttaaggctaaagctattagagaaaaatctcaatggactgaggaacaagaaaaaatattttttagcttaactcataagcgacagtgtacgttaaaagctagggataaatatatatatattcaatctagcttgattaaacttaaaaaaaccattaatgaacaacaggattactggttatctttaatacagaaacagcttatacaagattcaggatttactgataaatcaacaatattaattaatattttaaatgttattaaaagtaatttgttggttggatttgaaaaaacgaaaatagaaatttctaataaattagaatcaattcctagtagaatagagttgttagatattaagttaacgttaatagataaagaaattaagccattagatgaaaaagtaaaagataaagcatcactggaaaagttaaatactcaacttaattttgaaaaagataaacttaagaagattaatataaaaattaaagagctagactccattgctgatagagggaaaaaatgtataagcgaattgaacgagcaatattctaaattaatagaattatataaatctcattgtgctgaggtaagtaaacatcaaatagatgatgatataaaaattgaggcaaaagttgttattgatccattaaagtttgatttttttgtaagttgttatcatagatcaggttcaattcgctctattattaaagatgttatggatgataatggtaactataattttgatattaatactcatggagattttgtaaaaaatacagctattaaaataaaaagtagtggtgctccaactctacgaaaaagttatacgttacaagatgcgtttagtaatctttatgctgactattttagtattgatttttcagtgaactataaaaacgatagcattgctcatatgtctccaggtaagagaggattagttttactcagtttgatgctcgaattaagtaattcaactcatcctatattaattgaccaaccagaagataacttggataacagaacaatatattcagaacttaaggattttgttcggaaatgcaaaaataaacgacaaattatcatggtgacacataatgcaaatctggtagttgctgcagatgctgaatgtgttattgttgctgagcaacgggggccattagattgtataaatacacatcaatttgaatatttgggtggcagcttagaacatagcctagatactgataagaattttgaatataaatcaattaatgaattaggaattaggcagcatgtttgtcatatactggaaggaggtattagtgcctttaaagaacgagaaaagaaatataatttaatttaa

SEQ ID NO: 310593 - DNA, 399 bp, Proteus mirabilis
atgagtgaaaataatttaagcccaaatgaaaaaccgttgttatctaatgaagataaaattcatttagaacatttactagaaaaaataaggcctttattagcattaaagcgcctagataatattgttgatttattatccttagcctcagataccgtcgatattatggataacgcaacggtagaaaaattggcggttgcttttgaagaaacattaattccggtttgggaattaactacggcctttaatatggctaaaaaagaatctctttatcaggataaaaaatataccttaggtgcgattttttcattattagaaaatcctgacaccttaaaaggattaactattgtactaaggacattacaaattattggggaaaataatcagaaaatagaagtttaa

SEQ ID NO: 310594 - DNA, 648 bp, Proteus mirabilis
atgctgtgctcaattattgatcctgcatggatcattgcttatgcatatgctcaactactccaacaaaatattttatcagaacatgaactcattacattattaacagggaggcaatgtgcttttgctttccctaatgaacgtaataataatcaatatgcggataatcatgttcactttaatgggcatggttattcatcactatcaatgcttagttttatcgatggtgattataagctgaaaaaaaatttaaaatggcctcatcgtgaagaatatactttatttgaaagcgagcacctgaataaagaaaaattaccttgtctattttcaaactacgttaattgcttactcccagatatctacccaatgtcttcgacaggaaaaaacacatcaagatcgattgattatacatctctaattggtgttcaaggattaacgacagaacaatctttcatgttaactgaccttgttcacctttacgatacaacaacattacaacaacggatgttatatacggcaatacgttctaaagaacaaggtcaccaacgttggttactcttttgttgtggtttgattcttggagagcatgattcaaattacaataaagtactctctaatttcattagggtaagtaatatactacgtaattag

SEQ ID NO: 310595 - DNA, 1029 bp, Proteus mirabilis
atgtcaactcgccttcctcgcccttttattacggttcattgcggtgaagattatagtcacttattaagtggtctaagagcaatggatgaagctgttgaattttgccaattaaacgaaggtgatagattaggacatggtctagcattaggtgttgatgtaactcgttgggcacaacgtcaaaaacgagcttaccttactgcgggacaatatttagataatctagtttgggcttaccatcaagcggtacaactttctcaatatactgtggagcatattcccgtcatacatgaaatgcgagataaaattcatcggtggtcacaactattgtataacgatatttttactccagaccttctttatcgagcttggctattacgtaggaattggcctgactatgaagcaatgctacctgacacagttaatttatcagaatgggttcctgatgaaaaatggttaatttctgatgatacacaagatgctaataaagcaaaggttctttggcaaaaatatcttggtactgaacgggaagaaaacgatgctttcaatcgtgttatttctataaattgtcaacctgatgcaaacgaattatttgcaatgaatatcagtaactctgaagatattttatctatgggagaaatccgcctttatgaagctattcaagattttttgatggagaaatatagccgattaggtatcgttatcgaagcttgtccaacatctaatatctatattggtcgattcgaaaaataccatgaacatcctcttttccgatggaacccgccacaaccagaatggttaaaaccaggtgagaaatataatcgttatggtctacgttctggcccattagcaatttgtataaataccgatgatagtgccttaatgccaacgactattgctaatgaacatcgagtcatgagagaaacagcgattcaatgctacggaattggttctttaatggctgatttatggattaactctatacgccaaaaaggtgttgatatttttaacactaatcacttatcacaataa

SEQ ID NO: 310596 - DNA, 1041 bp, Proteus mirabilis
atggctgaaagtcaagtaccttacatttataatgatagtgaaagcgatatcattataaatctatcagaagctcgtttctccccttatttaaaaagtgcgggtttcaataaacattatgcattcaatttgtatttatataatgctcgcttatcaaaagcctttctttatcctttgcacattcttgaagttacacttcgtaatagaataaatgaaatatttagcataacttttgacaatgaatggtataaagatcaatcttttagatcaggtttatcctcagaaagtctagatgcactcgatcgaggaatacatagagccaaaagacctaataaagaagatatcgttgctaccttaacattcgatttttggtcaaacttatttagacctgaatacgaccgatttgtttggcaaactaacatgaaaaaactgttgcctaacaataggctaacacgaaaagaatttgaaaaagtagtaagaaaaatcaatgagttcagaaatcgaatagctcattatgagccaatacacaaaataaatctgagcgaaatgcatgtgatgataatagataccttatcatggttatctaatgatattagtctctgggtaaaacactattctacagtaaatgaatgcttacgtatgaagccttctattaaaggtgatagccatccttttgtaggagaaagatgtgataacaatttccaaatacttcacttcgataattgtatcagtaaaattcaagactcaaacttcactatatgcattgattcccaagataaaataaatgcaattattaatcatcaacatttagcgaactatttgatgtcatatatcgaagatgaagagcttcttatagatctaaaaaatcatgaagttaatcaacttattacaaaactcaatcttaataacaatatgtatttatgtgattatcatgaaccatatagttcgattaaaaattattttaaaggaaaaataaaatttcttgttattttaaataatgatgaaatttgtggaataatagagaaatcacatcgtagatattag

SEQ ID NO: 310597 - DNA, 630 bp, Proteus mirabilis
atgaatgagaaagatagagctatcattaaactaaaaaaactaatggttcttgctgagcgagcaagtaatgaaaatgaagctagtaatgcattttcaaaagctagggcatttatgaaaaagcataacatatccttatccgagatttataacccaatctcaaatgataatgaacaacaaagacgtgaagaacaacaaagacgcaaagaacaacaaagacgtgaagaacaacaaagacacgaagaacaacaaagatacgaagaacaacaaagacgtgaagaacaacaaagacgtgaagaacaacaaagacgtgaagaacaacaaagacatgaagaacaacaaagacatgaagaacaacaaagacatgaagaacaacaaaaacgtgaagaacaacagaaacgtgaagaacaacaaataattgaggaacaaagaaagttatgggaaaacggagaatatataaaaacagacagtaacaaggataaatattcagatctcgatgatgctttcactagttatcgaaaatcaattgaaaataaaatagaaactagaaatgaaagagtaaaattaattcctagtataatcctatctacattgctattgacattatttatatatgtgggctttattgcatga

SEQ ID NO: 310598 - DNA, 2025 bp, Proteus mirabilis
gtgtacctaaccgagttaaccattaccaattttagatcatttggttctgacggtattacagttaaatttcgtgaagggctaacagcccttgtgggtgaaaatgactctggcaagacagcagtaattgatgctctgagatttcttctcggaacaaccgatcaagaatggcttcgatttagtgatgatgacttccacaagacacgtgaagatagctcagaatcaagtgaaattaaaatatctggtacatttaaaaacttaacatctagcgataagttagggttcgttgaatacttaacctacggaattaataaggatgatgaacctacacttcaccttacacttacagcaaagcgtatgggaactagggcaggaaggccatatatctccacagagattcgatctggtaagaatggagagggaccaaatatggataacaactgccgttcattgcttgctgcaacatatctaaggcctcttcgtgatgctgagcgagagctttcctctggtcgtaattctaggctttcgatggtgctaaattcgctcgatggagcagaaatgggccagttgtttgatgcggaaacatttagttatgatgacattaaaaaactggggctattaggactgggtgacttattcaataagctgattgaacatcaccctcatattgagaatgggaagtcaaaagttaataatcatttagaaaaactacaacttcatggagactcactaaaaagctcgatatcagttagtcaaaatggctctgattctcagaggcttaggcaacttttagagaagctaactctcaatgtggataatactcctgggcgaatggggctaggatcaaataatattctttttattgcatgcgaattaatccttttagccgatgaccaagagcattttccgttattattaatagaggaacctgaggctcatgtgcatgcacagcgacaacttaggctaatacaatatcttcaaaagatagttaactcaaaaaaagatgaagaaaacaaaccacaaataataatcactactcatagccccaatcttgcatctgaggttaatctcaataatttagttattattcaagcaggcagagctttttctaccgctgatggtgaaactgaacttgattcgaatgattataaattcctctcacgttttctagatgtaactaaagcgaatctatttttcgcccgtggtgtcatgattgtagagggtgatgcagaaaatattttgatccctactttggccaagtgcattgggaaagattttacggaacatggagtttctatgatcaacgtcggaggcgttgggctacgacgatacgctaaaatattcatgagaaaaaatcctgatcaagatggaatacaatctgtacctgttgcttgtgtcaccgatctggacgttatgccaaactgtgctccctatattactaaggtcatccaagacgatagtgattggacaatattaggggacggagagaacagaaagtggcgtgctaagcgggattttacattgacgaaattaaatgaacataaggaaaagattaaatccaaggcccatgggcaaaatgttaagtcatttgtagcagatgagtggacactagaatatgacttagcatttgcaaacaacaacgctttggctgaagagctctatattgctgctcaattggctatatgggatgagggtaataattactctgaaaaaacagctaaggaaaaatttgagaaggcccaatccaaatatacaaccttaaaggaagaagctgacaaacttgcagcagataagggttggaacaagaatgaagttttagccagtaaagtctatgcaatgtatgtcacaggctctaaagcttcaaaatccatcgcggcacagtatttgtgtggaattatcatggacaagataacccttgaaaaaacatatgatttgaggaccaagctcccgagctatattgttgatgcaatagactatgttacgtctaatcttcatattgcttcagggggcgagattaatgaaaattga

SEQ ID NO: 310599 - DNA, 729 bp, Proteus mirabilis
atgccacaaagtgatggaatacaatattttaatagtgatgaatctaacttcgattatattttaattggtgatagtcatgctagacatttcttttcatatataaaggagcataatctaagagttgctagcttagcgctggatggttgtacttcaacaaaaaattacttttcatcatataataaagcaatgtgcgagggtagatatgatttagaggtagaatttattaaaaaacaccctaacaaaccagttattatatctagaaattggcctgggttatttccgagtcatataataagaaatgatggtggtactataggtaaagaaaacttgaataataaaataattgaagaattagattatttttattctgatattaatagaggacaatatatatatatattaggtgatacgccaggaagtgaaaaaataatatttgaatgtttggccaaagctgacttaccaataaataaagttattaatctttcaaggtgtaaggatacacagaaaaaaaatgttaatacctcaaatgaagatttgttaaggttttctagtaagtatgacaatgttacttatatagatacatactcatttttatgtgatagtaaagaatgcttaactattaaagatggaatgcctatttatacagactccagtcacctatctaagtatggtgctgagattgttggtgaaggtatattttccataataggtaaagaaagtgacaattaa

SEQ ID NO: 310600 - DNA, 288 bp, Proteus mirabilis
atgtctattttacgagtgttagcaatcatcggtaatacaatcatgttagtaggatatacttacttgtttattgctaaggatctttcaggtgctttattagctgtatatattccattagctcttgttccgttgatttcgcttatgtatttgtataaaacgcgattttataagttttcagagttagaccaaataaaagcaaaagaaaaacaaggaagctttttaagtttatggatacaaagaaaaaaacttgaagagcaagtaaaaataaataatcttaaaaaagattaa

SEQ ID NO: 310601 - DNA, 801 bp, Proteus mirabilis
atgtattcgatagttgcttctgatcttgatggcaccttgttatcacctaaccacttattaactccctataccaaagaaacgttacatctgcttattgaaaaagggatccattttgtgtttgccacaggacgtcatcatatcgatgtggcacaaattcgtgatgggcttggtattgacgcgtatatgatcacttcaaatggggctcgagtacacaatacgcaaggcactcttattttcagtcaagatcttgaacctgaaatcgtttatgacttagccctaatggtgtttgatcacccagatattgcaacgaatatttatagcagtgatgactggtatatcaataaagaaacgcctgaattaaaagaattttttaaagaatcggtatttaattaccgtctatttgagaaaacaggcttcccaacaacgcaggtgtgcaaagtcttttttacctcagaagatcatgaattgttagttgagttagaaaagaaaattaatcaacgttggggcaataaaattaacgcaagtttttcattgcgtaattgtctagaaattatggcgggtggggtatcaaaaggagaggcactacaaaaagtcgctaagttgatgcaacattcagtaaaagatgccattgcatttggtgatggtatgaatgataaagagatgctacagatggcgggtaagggctgcattatgcaaaatgcccaccaactactaaaagatctattaccggatatggaagtgattggctcaaatgttgatgatgctgttgcacactatttgcgtaagttgtatcaggtttaa

SEQ ID NO: 310602 - DNA, 666 bp, Proteus mirabilis
atggagaagcatgatgatgatatgcctaaagataaaatacaacaagccaaacgttggcgcttgattttaggccaatacgctgatgatgctttagggcaagccacgtttaatgctgatgatcttaaaattgaacgtacactcgattttctttatcgccgtgaatatcagcgccgaggattacgccaagagcgcggtcgccatggctctctcgatgcatcgcaacttactgccgtaaactggctaaatcaagctcgcaaactttttcccaatagcacatttgaacgtatgcaatcacaagcgattgaacgttatcaaatcagtagctttcttaaagatcccaatacgctaaaagccatggagccgactaaagcgttagctaaaacactattaagcttacgcggacgaatgagcgaagaaacgcgagatgcagtaaaaaccattattcgtaaagtggttgaagatattttgcgtcaaattcgtaataactttcgccaatcattaaccggtcgtcgtaatcgctttagacgctcgttagtaccaaatagtcgtaactttgattggcgtgccactattgccgccaatttaaaacattacgatacccaaaatcgtcgtttattgattgaaactccttactttaattcacgaatgcaacagcattttccatag

SEQ ID NO: 310603 - DNA, 270 bp, Proteus mirabilis
atgagacatccatcaattatacaaattagcaacgatagtattcgaacgctactaatgaaggggaaacatacggccagtgagataataaacgtcgcctttgaaactggcgaaattgatgaaaatgaccgcaagttttgggaaaaatacgatgatgtcaaaatttgttattttaaagcggcccctaagcctggttattcatcgtattaccatgaatcaagtaaaggagttcggggtgcatttttagcaacggctgtcatggtttattggtaa

SEQ ID NO: 310604 - DNA, 4545 bp, Proteus mirabilis
atgagcaaaaaagtcgtaggaaataagaatgctgattactgtgtgattgctacaggacccgatgtttgccaagtgggtaatgcgattgtaccgtttgatagttttcaacaactcagcgctgaggcaagctatgtttcaacggtgcgtgtgaatggcgtccctacgttaacagtaggtagcgttattaaaggaacacaaggaaatgcaggtagtggtcttatttcgggaacaagcttaggtgctggaaattgtattattacaagtggctcgccaacagtgcgtttctgtggacaatctgcagcttaccatggctcagatgtcatgatgaataataataatgtgccggggcgcctctattctgaagaaaaaatatcaccaaaagccaatgatgcgataaatattcctaaggatattccggaaaaaaacaaacttacggaagaaatgtcttatcaagaaatgatgagaatgggaaatgaatcttatcatgaggcagaattaataggaggtgaaaatttacctgatactgtgataggtggcggaaaaaactttgttaatagcttgattagtctgagtgaggcttatgctagatcaaatgcggtaagtacatcttatcaactagaggcacaagcttatggacctgcaacatggttgatgtctgatgaaggtaaaaaacgatacgctgagaatatgactgcactggcacaagagatgcgaaaggaagagaatctcccccagtttgagcgtttaaaatacgataatcaagctcaagagtcaggggctatattagaggaaataggcgagtatgctcttggcgctaaagctgttgccagtttattaactcatggtattaaagcattacccagattgattaaaaaggagacaccaccgcccaaagaaacaccactattaaccaagccccaaggtgaaaatagcacgaatattaaacccaataaatcctctaacaataaagcaatatgtgaatcagatccggttaatgtggcaacaggtgatttcattcaagtatggcaagttctttttttacctggactattacctatttcgttacaacgagcctatcattcaacaagtactgcttcagggttatttggtcctaaatgggtagataactggtcaatatacttagaagtccaatctgataatattatttatcacaatgaggaaggtgcggagattacctatccttatacaaagaactctctcagtattcgtaatgtgtattacccacatgttctactctcaggcgatatcacagcagacatatgtctattcgataatcgaacacaattaacttaccattttaattatattgatgggtgctatagacgtttgtctgctattacagatcgtaacaagcaatgtgttgattttatttataacaaacaacatcaattgataagcttatctcgtaatggtattgagacactatttttacactatatcgattctcaattaagtcaaataacgttagccaatgaagttattcatcaaccactcgtcacttgtcggtatgataagcaaggttatttaagtgagtgtgacgcttaccagcaaaatcatttgtggcatgaatatactgccgaagggttcatgtctcgctggcatgatacagaccaaaccgattattaccttgaatatgacaaacaaggtcgtactataaaaaatagctcgccatcaggttattggtgtggagggtttatttatgatgatgttcataaaatgaccacctatttcaataatgaaggtgaacaatcttactactattataatgatgcgggattagtcacccatgcaattgatgcgttggggcgcgaaacacacacagaatggcaaaataatcaaaaaattagtgaaaccaacgcccttgggcaaaccacttattatctttatcatcatgacggtaatattgcgcaaaccattttgccagatgaacgttctattgagtaccaatataatgagtatggtcaacttgctagcttcacatctccctctggcgatgaatggcagctaagctatgatgaaaatggcaatttaaccatagtgacagatccgcaagggcgtcagcaggtctatgaatatagccaacatggtgagttgctcaaagccattacgcccaatggtgcgcaatggcaataccactataaccctgcacatcaactgattaaaaccaccaatccttatcaacacagcacagaatatcatagtgatgaattggggcgtttactgcactacactgatgcgttaaatcacaccacacgctatcaatacagcactgagcatgccagtaccaacggcagtctcagcaagattttattacccgatggggtcgagcaacagatagactatgacagtgaacgccgagttatcgcggtgacggatggtgaaggaaaaaccacccgttatcgttatgggccttttgatgtcttactggcaatgatacgccctgacggcagtgaaattcgctttgaatatgattcactgacacgacttaaaaaagtggtgaatgcgaacggcgaggtttatctttacgaacgggataaagcgggacaaatcattcgtgaagttgattttacggggcgtgagatttgttatcgctatgaccgactaggacgtcgcattgccactcgctatccggataaccatgaactgcgttggcgctataatgaaagtggcttagtggttgaacaaagcgaatggtttgaagatgagcaagaaagccgctgtttatcgacgactcaatatagctataacgcacgtcaacaattgataaaagcgactaatcctgactcggtggttgaatttgagtatgatgaccaaggtcgtttatgcagtgaacgtattaatggacaagagattattcatcaatggaatgaagctgataatacgctggcattgactcgttttggtgagcgggagttgcattatgcttttggggcgctgggggaattaacttcactgcaagtcaatcaacatgcaccacttcaattcagctacaatgcagtaggacaagagtatttacgccgtagtcgcgccggatttgtcaattccagtcactatacggctaccggtttactggctcatcaacgagcagggcgaggcaccgaacagtttttacaatcgatacaagcccatccccaacaaccgccattttgtacggatgtgcaccgcagttatcaatatgatcgcgcttataatgtggtgggcattgaagatgatcgctggcgacagacacgttatcactataatgccaatgaccaaatcactgagacacaatacagtccacaatggggtaatcaggacgaaaaattccagtatgataacaacctcaatatcacggagcacttgacaacgccgtcctcgtcgatggtgccttcagaagcacaaggggcgatgctacagctatttcagcaacagcaagcaggacgggtgactcgccgttacacagcgaagggatatcaagattaccactatgatgttaatgggcgattagccaagaaaattgtccatacacgcggttttcgtcccagagagtggcgctatttatggaacacacaaaatcagctgaccgcatgctttacgccgaaaggggattgttggcactatacttatgatgcttttggtcgacgtctgagtaaaaccaaaaccgttgacagtgacttagcccatatagacccattatttccgcagattaagcctaaaatcaccacgtggcgctatttatggtcgggagaccaactgatagaagaaacgcagatatatgccgatggcactcttgcggagtctcagcaaatccaatggctgtatcaacccggagagataacgcccaccgcgcgttatcaacagggaaaactgcactatgtggtcaccgatcaccaaggaaccccgcgagagatattcagtgaaggcggacaagccagttgggcaggaaggttgaatacgtggggccaaatgcagttttggcgttaccgagagggtaaggcggagaatgaccctaattataccgaatgtccttttcgctttgcggggcaatatgaagatgaagaaagtggcttgtattataatcgctttcgctattatgatagggaaacagggcagtatctttccccagaccccatagggctattgggtgggctgaatccctatgggtatgtgcattgtccgacggggtgggttgatccgtttgggttggcgggtgattgttgtgatgagttactagttcttgctactaaccctagaagtaaaacagttcaagagatggctgaagatttagctaatcgaattaatagaaatacagtgacattttccacaccaacaagcatgggacatattgatttaagaggaagatctcactttgataaagtgacacaagctgatattccaacaccacatgttcaagtttcaccaattaacgttgctcctaatggaaatcgcttccctcttaaaaaactagaagcggcaaggccagccacaaaacaagatattagaacagcggaaaaactagcagaaagacaagggcttttaaaatga

SEQ ID NO: 310605 - DNA, 420 bp, Proteus mirabilis
gtgcattgtcctacgggttgggttgatccgtttgggttgagtggaacgtctcaattaaatgcatttcaaaatgctaatttcgccgactcccaaaaattaactcagcatttcgaaaaacatggccatgagttcagagctacttcagaagctgaatatttaaaaattggccgagatgtaatagaaaaaggtcataaagttgagtactattacaaaccattagaacaataccgtactggctatgtaatgtacatgagaaatacgaaaagaggtgatgtacaaatggcatttgtaggtattaaccctcaaggtcagatagcaactatacacacaaaaagtggtaaagacgtttggaaattactcaatggtaataaagatgaaaaagttatcaatcttatacctagagatgctaatgggttataa

SEQ ID NO: 310606 - DNA, 1104 bp, Proteus mirabilis
atggaaaatattcaatcaaaaaaagaaaaaatcatgcagttagtgatggtttatacaccttggatcactgtgatatgtgttgttgcgtttattggtatagcgactgcagattgggatcgctggtggagtgatgctcgttatcaaacaacagataacgcttacataaaagcggactcaacgatattgaaatcacgaatgactgggtttatttctcagattaataaagaggattaccaagtagtaaaacgtggtgaggtcattgctgaaattaataagaaagaacaaatattaaatcggcaagcggcattagcagagtatcaaaaagcccaattagctttagataatctcactgaagaaattaaagaatatcaattaaatattgagaaattagctaatcgttatcaagcatcagttattgatgttacccaagctaagcgcagcccaatgttgcgtaaagatttaattaatagtggggcaatcacacaacaaaattatttagatgctcaatctgatttgcaacgtttaatgaaattacaaagtgctgcgaaaaatgagtgggatcaggctaaacaagcactggtattactaaaatctcaagaaaaaatacgtctggcacaaaaagatatcgctcaaacacagtatcagcaggctgaaacggagctttcatacgcgactattaaggctcctttcgatgcgcaattaaataaaataaaagtcaatatcggtagccttgtgactgcgggtagcgaaattgtgactttaacaccgattaacgatgtatacattattgccaatttaaaagagacacaaataaaaaaaatacagccagaacaatctgttgctatcaaagttgatgcttttcctaccgatgttttttcaggaaaagtgagatatatcggcgcacaaagtagtggtgaatcagcacttattcctgctgataatgccagtggtaattttactaaagtagtacaacgtattccggtttatatcacgctcaatagtgataaccgacacttagctaaattaagagcgggtatgtctgtgcaagtgaaaattgacacagaaagccttcctgtagaggaggagggggagcgcagtgattaa

SEQ ID NO: 310607 - DNA, 1827 bp, Proteus mirabilis
atgccaagatcatcaacatgcgggtttgaggttgatggcatttatgctggtcgttatcaggtgagagttcgtgcaataaatgcatctgaaatatccagtgtttgggctaacgcacaagaaacaatgttaacaggcaaaatgggtaaccctccgaaaccggttaacttcagaacgtcaccattagtctttggcattaagttagattgggggtttggtgaaaatacaggggatactttaaaaactgaaattcagtacagcaaaacgaatgatggtgaaggcctgatgctgttgtctgatgttccttacccctcaaaaacctatgagatggcaggcttagctgctggagtggtattttatttcagggctaggctggtggataaaacaggcaatcaatctgagtggactgattttattcgcggggagtcagaatttgatactagcaccatattgccagaactcggcaatcatttcatgacagcagaggcaggtaaacaacttgacgaaaaactgaattggaatacggagtctattgctgaacttgttaatgccacctattcgctatctacggatgtattgcgatattccgctaatgctcaagccggtattactcaactacaacaactccgagtttctgataatgaagcatgggcgcaggaaatcaaagaaatttattctgctgttggtgagaataaatcggcgattaaggagactcaaacctcaatcactaaactcgacgaggcgttcggtcagcgttttaccgcaatccgaactgacatggataaggctcaagctgatattatttcaaactcccaagccatctccaacacaaataaggcttttgctgaaaacaaaactcaagttcaggctaagtttgatgagcaagagggcatgattgaagagaagatgcaggccacgtttgagcaaaccggtgacggtgtagttacccattccatcaacattacgattgttcataacaacgtgaaatacaatgcagcagggcaagtaattagtgctcaagttaagaacggcaagcttgaaagtttcataggctataacgcgaataactttgcttggtataaccctgtaaatggcaagatggaattattcatgtatgccaaaaatgggcagttgtttattcgagacttatttatcgaagatggctctattacaaatgcaaaaatagggaatgtgattcaatctaataattatgtagccggtaaatcaggctggataattaataaaaatgggtttgctgaattacagaatataaaagcgagaggagaaatagaggcaacttctggacgtttaaaaaatgttgttattgaagaaagttgtgacattctcggtaagctaaaggttgagaatttagaggggaatatagtcacagttactcaggacgtttatcacaacctctcattctctcataacaatattgttgagctatttaaagttaaacgcagaacacaaaagtgttttatatgggtgcaaggagcattaaatccttacgaaagaatacccaataatggcgtgaaaccagaaaatcgttcagcatttgcatatcgtgcaccgttttacagaaatggagcaggggcggctgatatctatattgatggagttatccagcctaggccgagcatctacaacatggaagacacatcaacatctgatttttatgctgtaaatgagtttgtactggaattaagtccgggtgaaggagttgcaagtattggtataaaaatccctcaaggtggcagtgaaacgacacggtttattatgcgagccagaataatcgtattcccagataaccaagacgttatttttaattaa

SEQ ID NO: 310608 - DNA, 588 bp, Proteus mirabilis
atgaaaaaaataatacgcatacttagtgttatcacattgaccacgcttttgagtggatgcatattcgcatggcgtgaatcggatactctttcatataaaataaaatcagcgttgacagataaatctgttgacgaagagtacacggataacattaaaaacaaacaaggtaatttaattaaaattaatcttactgtaaatttagatagaacatctaatataaaaagtacgtattatgatatatcagccatataccataatgataacgcatacataaatagaactattttttatagcataaaccatattccagtaaataatggggctgaaaatgatatatatctgccaataattaaaaattacaaactaagtaatgtatcaatctttcccgatataatcagtggacatggtacttttttaacaagctataaccatgatggaaaattgaaacccgcagcgaatggacagacaattaaataccaaagtagaaatgggcgggttgaggctgacattttactctgttttgaacccattttattatatataaaaccagatgatactccctttagaacaggtggaactcatagctaa

SEQ ID NO: 310609 - DNA, 411 bp, Proteus mirabilis
atggtattgatagctttgtctaaagttgctaaagcgtcatctttaacgtctaatttagctttaccatcagttgctttgaaagcaccatcttctgcattaataaccgctttaccactgtcttcttttaacgatgcaacgacttttgaaccatcatctttagtaacaacgaatttattcgcaacatcagtgccatcttcttggtatttagtcacagatttaatacctggaccaaaaccagttgcaccagaaactgcagcatcagcagcagtagcatcaatagctgcaccttctgattttgctttacccgcagcggttgtttcaaataatttatcagttgcaacgcctaatgtatcgttatcaactttatctaatttaaattcaataacttcattatcgttagtaccgacttga

SEQ ID NO: 310610 - DNA, 312 bp, Proteus mirabilis
atgaggaaattattaataagtttatttttgttatcaattggatactcagcaagtgttttttcttctgcaggggaatcaggaaaagatttctttgttgaaatggttgctgacatttgttcaaagcatgaggatccaggtctttgtcggtggcaggtggaaaatataagtgcgatatctagtattaacacactgacatattacgattgtaaactgcacgataaaaaagaaaaagagtgtttagaatcaatagaaatgtttgattatattcaaaggcaatatgataaaaacatgagagatataacaaataaatag

SEQ ID NO: 310611 - DNA, 273 bp, Proteus mirabilis
atgagacaactattattaagtttagttgcgctatttgttagctttaatatatacgctaatgatgagatagattttataaaggaagctaaagatttggcatgcaaaggagatgttaactgtgaaaaatattttatggacggtgttggtgcgtcagcaatagtttctagatatcacggctcatgcatagagaagaatgaacgcacaaaaacgtgtaatgacgcagaagatttttatgattatgtcatatcagaacaagaaaatagtagaaagtaa

SEQ ID NO: 310612 - DNA, 963 bp, Proteus mirabilis
atgggtttgaaactaaaaattttcgtgggatttttatgtgtagcatatgtcattattttagtatttctgatgccagaagtattaagagtcgctttacaaaaacatgggtatgataaattattatttataattgcaatagttacctttagtttaactaaaggtaatttcatgaaaaatgtaaagtacagaaatagcatattcgcaattttagacttgttttcattttgtataattcaagaaggtgtggctaaattaatagataatcaattagttagtgttttattttcactaattgttggtattatgtttgggtaccttatgtatagagaatattacacaggaataaaaaaagaatttagcagtgaagtcagtttggatggccaaaaaaacatgacttatgagtctttaaatgaaatacaaaaaaaagcatttgatgcttataaaaactcaagtgaaattatgtcaggaaagtcttttgcatacgacattaataagattttgttagaagatgaggtagttcctgtggagtataagggttatttgaaaggccttgatgaattatctgaattatactcattgccaaatgataaaattttatatcgagcttgttttgaggatacggttaaggggcttttagatagggaaaatactattaataaataccctgcatttatgtcaacttccactagtaaaaataatttatccactcactacgctgcaggatataatgcgataccatgcttcttaattatcatttgtactgctggagcaaaggtaattccacttgaaaaaaacgatacggcaaatcaagaagaggaaattttattacccagaaatagtcaatttagattgttgtgtaattttcagatagtggataaaaataagataaacgaattggctggttcatttcatggacaaaaatttagtgcaatcggtgtatatgttcttaaattaatagaatga

SEQ ID NO: 310613 - DNA, 783 bp, Proteus mirabilis
atgagtcaaattactctagcaaataataattcagttgtcacgtcgaacaattttcaggttccggaggtttattaccgaaaccaaaaagtaatcactacggaatcactggctattggctatggggctgagattaaaaatattcaaaataactttattaggaatgaaagccgttttattgaaggaaagcattatttcattgttcaaggcgctgaattaaaagagttgaaggactcaccatctttaagagggttagttgataagcgtgctccaaaattaacattatggactgagcgaggagcatctcgccacgctaaaatattagaaaccgatcaagcgtgggatttttttgaattactcgaagatacctattttggaacacgaaaaaataataaccttcctggtaattacattgaagcactggaaaacttattaaaagcagaaaaagagaaagcagtgatcgcagccgagcgtgaccatgcaatagaaactaaagcgtggattggtaaaaaacgtgaagcaacttcaatggccacagcatctaaagctgttcgtgaaaagaatcgccttgctgaaaagctaggtgaaagcaaaaaacacgcaacagtattagcagtagagaagaaactaaacaaaaaattcaaatggcaaccattgaagaagtggtgcaaagagaatgatgtagaaatatctactgttcatgatgatagatacggaacagctaactcatacccatcaggcgcatggaagtctgcttatgatgtggatttagctaaattgttctaa

SEQ ID NO: 310614 - DNA, 702 bp, Proteus mirabilis; identical to SEQ ID NO: 306672

SEQ ID NO: 310615 - DNA, 270 bp, Proteus mirabilis
  misc_feature (242)..(251): n is a, c, g, or t
atggaaagtatcagtgttagagtattagatttgtatttggatagtaaaaatcctcgacatgaacccatttctgatagggaaaaaataattgagcatttagtcaggaccgaaaaaataaaggctttagctaaggatatatctgagaaaggtattagccctttagatttgccagcgattattaaggacggtaagggaaattttgttgttgtagaaggtaatcgaagaatctgtgccttaacacnnnnnnnnnnccttaacactgttaaatga

SEQ ID NO: 310616 - DNA, 1065 bp, Proteus mirabilis
ttgtctcctgaaggtgacaaaacatacttcacaaatctttcagaaaaaagcgaaataatcccagaagaactaaattgtattttatttgatagtcgtgaagaggcaaatacatggattgagcttaggcataatggtgagcaaggcggtgttggcttagttccttgggatgcaacccaaaaaacacgcttttttgattcctcagataatacactggcattgaaacttattgattatgcgcaagaacggaaaataataacagcagctcaaagacaaacaaaaattttgacaacaatctcaagatttgttggaaatcctatttttaggagtacgttaggagtgactacaggacgttctgatcctaatgttaaacttgatgtgcctcgggacgattttgataaagttttaaagaaattctttgatgatctttttgcgggagaaaataacgttacttctcgctctaaaaaagatgattgggaacgatatgctaagaaattgagaactgagggatatgctcctaatactcatgtggatgagtatgacttaatagaaaaaatgcctaaacaaccactgccaccaaaacctattcagccacctatagatggtccggtaaataacccgagtccagatttaagaaaacatataatacccagcgatttcaaagttgttattaaagataagattattaaaagagcgtatgatgagctccgtacacttaattgtgacgaatatacattagcatcagcattagtttgcagagcttttttagaaaatgtgtatggacgtttttatgagaaaacgtatggtaatcatcctcgcggaatgcagactcatagcgttctcgataaagtaatcaaaaaacttgaagaaaataaaggtgaatttagcagaatggaatctaatgcacttggtgctttgagaaggggtcaaaacaatgaaaacaacgtcctctctcctaagactttaggcgcatttgctcatgctggatggtatcctgatgcaaaagctctaaaaagagaatgggataacatctcagcaatcgtagtttatttgttgaaaaatatataa

SEQ ID NO: 310617 - DNA, 423 bp, Proteus mirabilis
  misc_feature (409)..(418): n is a, c, g, or t
atgtttagtcaatcattattaaagttaaatatcccttcggagtatgccgttattggtgaaagcgatatgcataatgaattaggctatccattagcattatcttatgttgtggttattatttgtttagatggcagggctgttattaatatagattttcaaacaaaaaccattaaagcgaatgatatagtgatactcggtgatgatagaatggtcacattgcaacgtaaatcagctaattttcgtattttttattgttttcttaagaaatcttttgcctctgagatcgcttatgcactttcaaatagtttgtttacatttttgcatgaaaaccccatttgtcgcccttcaacggctcacttaaacgccataaacaattgggtggaacaattaaaatatatagataacagtnnnnnnnnnngataa

SEQ ID NO: 310618 - DNA, 387 bp, Proteus mirabilis
atgagtaataatataaaatacatatcaatacatgagggttatatatctcacttcgatcctgcaagtatgagtaatgagggcaggaaaggtggaaataacggaggaggaggagacatggaatcaagagtcgccaagttagaatctgatgttgaatacattaaaacagctatagcagatattaagtcagatttaaggtcgactaagagtgatgtgggtagtttaaaatctgatattgctgttatcaaatcaaactatgcaacaaaacaagatattgaagccgtaaaaacagaagtacaaaaatccatatcaacacaaacgaaatggttggctggaattgtatttgtggcattaggtgcatgtataggcattgctaggttattattttga

SEQ ID NO: 310619 - DNA, 342 bp, Proteus mirabilis
gtgcatgattttaacatccctcttgaatggtggaatcaacataaagttgctttaaaagataaaggtgttgatagtttttcacataaagaaccatgctatttcccatataaacttctttatggtgatgctcaatcttcaccatcagctattagccagttattattcctattaactaaggctggctttgatgttagcggtgcaaaactagaacattatgcacatagacattatgctgaaatttcacatagaaagttgagtcagattgaccaacttattaaccctgtaattaacggagctgttacttgcagaattagcccaccaatgcctatcgaatggcgttaa

SEQ ID NO: 310620 - DNA, 207 bp, Proteus mirabilis
atgccatccaaaaaatacctacttgtatatgaagcattcgacaatacaaatgtattcttattaaaaggaaatgctgctatagaaatagaatctggaaaaggtattgaggagatattgaatacctttactgaagttgcctgctctgaagctagaaaaattgataaatatgctagaagagtggcgatagtaagcgtaatagaactttaa

SEQ ID NO: 310621 - DNA, 288 bp, Proteus mirabilis
atggatactatatcgatttttaatggtggtgatcaaattttaattggtgatgaacataattatattaaatcagttaattatgaggatggttatattaatttaggtaaaaaaacaaaaataagtggatataattttatctcttttattaaatcacaaccattagtcactggtagtgattatgagaaaccaacaattacagcacgcaatgggtctttcatttataattcttcaaatgaaaataaattaatcggatggttgtattttaataatgaatggaatgaaagataa

SEQ ID NO: 310622 - DNA, 582 bp, Proteus mirabilis
atgtcagatcagtttatgaggtcaattaacttatttatcgataaatccaatgcagatattgaaacggttgtaagaaaaaccagtattcaaatacttgctaggctcgttgatatgtcacccgttgggaatcctgaactatgggaagttaatagggttgcctcaaactacaataaagcagtttttgaacataatgagtatctaaaacaagatcctaataatttaacaccaaagcgacgtcaattaaaaaagcgtgttcgtgttaatgactctatggatatttatgttcctcctggttatacaggggggcggtttagaggtaattggcaggtgtcatttgatgctccagcggaaggcgaaacgggacgcatagataagtcaggcaatatgacaaaggcgttaggcaacgttgttattgaacaatttaaggtaggaatgaaagctatctatttcacaaacaatgtgccttatgcttaccgccttgaaatggggcattcgaaacaagcacctaacggtatggttgctgtgactgctgaggaatttagtcagtttttcaactctgccgtatcggaaactaaatcatga

SEQ ID NO: 310623 - DNA, 669 bp, Proteus mirabilis; identical to SEQ ID NO: 295338

SEQ ID NO: 310624 - DNA, 1035 bp, Proteus mirabilis
atgataaaagctcttaatgagtttgatgctgaattaactgcttcgcttattgttgccttagatgatgcctctatcgatattaatagcttcactgcacggcgattggagtcgttactatccagcgttagaagtattaataagcgagctgttgatagcgctttttcgctactgacggaagaaatgagagcgcatgcattatatgaggctggttattacccatccctttttgattctctactgcctgatgttgttctacgcaaatatccactaatgagcattacagaggaaatgctattttcctcagtcatgtctcgcccatttcaagggaaattactttctgaatgggctgatggattagagtcagatcgcatgacacgcataaataacgctgttcgtaatggttatttaaatggtgatagtgcggtagaaatcgggcgtaaaattagagggcatgcaaaccaaggttataaagacggtgctctacagctcagtagggctaacgcaacaacaatagcaaagacggcaattaatcacttacaagcgacagcaagagatcaatttgctgatgccaataaagacattcttgattgtaagcagtggttatctaccctcgataataaaacatctcacgattgtattattcgtgacagactgaaatacacgctggaaggtaagcctattggtcataaagttccttacctacaaggccccggaaaaatccacttcaattgccgctcaacagaaacgctggttaccaaatcgtggcgtgaattaggcatcgatttagatgagacggacgcaggaactcgtgcctcaatggacgggcaagtgccagcagataccaattttcttgattggatacagagacaaccagaatggcgtcaacggcaggtatttggagagacgcgatttaggttgatgaaagaaggcggtatgcatccatccgaattttacacagataaaggtgagtttatctctctagagcaactcagggagatagaccagcaagcatttagagaggctgggtacagctaa

SEQ ID NO: 310625 - DNA, 246 bp, Proteus mirabilis
atgtacgcacttaaattaattactgaacgagatggccgtaaagtagaggaagtccactgcttgggcgaaatgtaccgcttggagttttatcctgaatcagaaaataaagatatcgtggcgcgggttgaacacacaaagaaagacgctatcccatcatttgatattaaacgaacagatcatgcttacattacaacgatagtcggcgacacggttcgggttatcagtcgcggattaaaatcaaactaa

SEQ ID NO: 310626 - DNA, 402 bp, Proteus mirabilis
atgaatcagtcgacaattaatactgaaatacgaaagctggtggcgagtattggcaaggatttaaatcttaaaatcgcatggcccaatcttccttttaatgatattaacgatccctatcttcaactccatatcatgcctgcagaaacggataatattgggttatctcaggatatgcctgtttatcgaggtgttattcaaattaacgtggttggcaaagtagggggtggagactcgcaactctcaacgattgttgatgacgttaaagccagattggagaacggattaacattaggggagggagtctacattaacggagagcctagccagttccctccaattacagatgaaacaaattatactattcctattcgtgcatcctatcgatgtaacgcaatccgataa

SEQ ID NO: 310627 - DNA, 582 bp, Proteus mirabilis
atgtcagatctgtttatgaagtcgattaacttatttatcgacaaatctaacgcaaatattgaaacggttgtcaaaaatacagggtttaaaatattagcgaagcttgttgatatgtcacctgttggaaatcctgaattatgggaagttaatagggttgcctcaaactacaataaagcagtttttgaacataatgaatatctaaaacaagatcctaataatttaacaccaaagcgacgtcaattaaaaaagcgcgttcgtgttaatgactctatggatatttatgttcctcctggttatacaggggggaggtttagaggtaattggcaggtgtcatttgatgccccagcggaaggcgagacgggtcgcatagataagtcaggtaatatgacaaaggcgttaggaaacgttgttattgagcaatttaaggtaggaatgaaggctatctatttcacaaacaatgtgccttatgcttatcgactcgaaatggggcattcgaagcaagcacctaatggtatggttgccataactgccgtagaggcaagcaagatgtttaattcggccgtatcggaaactaaatcatga

SEQ ID NO: 310628 - DNA, 138 bp, Proteus mirabilis
atgatacttcctccagacattgatattcagaaaggggataaggtgcttgtcgatggcgtttggttgcgagttcatgagtcgaaccctgttaaacccgctgatattattatctgctatcagtctcaattgagggcgtga

SEQ ID NO: 310629 - DNA, 1566 bp, Proteus mirabilis
atgcgcttagaagttacctgtaaagatcgcatcgggttaacccgcgaattactcgatctgcttgtattaaaaaatatcgatttgcgtggaattgaaatctttcctattggtcttatttatctaaatttttcgcaaatcgattttaatatatttcaacctttaatggctgaaatcagaagaattgagggggttatcgatgttcgtactgtggcttttatgccatcagagcaagagcatcgagctatgtggacactattagaatcagtacctgtccctgtcttttctattaataccaaaggtcaaattaagttattaaacccagctacacggcatctgtttgaattagatgaaaatgataaaaatgaaaaatcttttaaccaactgatacctaactttaatatccatcgctggttagaacaaaaagatcctcatgctgaaattatctccatcaaattaaaaaaacaacattttgatatggagattgtgccaataaaactgactgatgataatcagtttaatcattgtgttggtgcactcattttattgaaatatcgcggaataattcatgagcatccgaaattaattgttaatgataattcggggtttgaacaagttattgctgttagcacccccatgaaacaattagttgaacgcgctaagaaaatggcaaaaatggatgatcctttattattagtgggggatacggggacgggcaaagatctatttgctaaagcttgccacttattaagtcctcgagccagagagccatttttaggtcttaactgtgcctctatgcctgatgatgtggttgaaagtgagttatttggttatgcggcaggtgcatatcctaatgctatcgaaggtaaaaaaggcttttttgaacaagccaatcgaggcactgttttgctggatgaaattggcgaaatgtcgccacaaatgcaaattaaactcctgcgttttttaaatgatggtactttccgtcgtgttggggaagagcacgaagttaaagttgatgttcgaataatttgtgcaacacaaaaaaacttatgggaattagtacaaaaaggactatttagggaagatctctattatcgacttaatgtattgacattaactctaccaccgttgcgggaaagaaaagcggatatcatgccgttagcactgcattttattaatcaatattgtttagagcagaaagcatcaaaacctgttatttcccctgatttatctgcttatttagtacaatatggctggcctggtaatgttcgccaattaagaaacacaatttatcaagccatggctcagttagtaggcaatacattgcgacctcaagatatcgccttgcctgagcatactgcggatactttatttgatgaagatttgcttgaaggctcgttagatgaaatgactaagcgatttgaagcttctattttaaggcgtctatatcgtgattatccaagtacacgtaaactggctaaacgtttaggtatttctcataccgcgatcgcaaataaattacgtgaatatgatttaacaagtaaaaaagcggataaaacagagaaataa

SEQ ID NO: 310630 - DNA, 276 bp, Proteus mirabilis; identical to SEQ ID NO: 310531

SEQ ID NO: 310631 - DNA, 627 bp, Proteus mirabilis
atgagaaaagtaagttataaacgttacacagatcttccggcgctaattcagattttaacaaacagaaaactgactcttcttgacccttctttctgggatgacaagaatgattcttactttcttgcaacttataaggaaaagaagatgttacagtcagtgcttgcactgtgttttacaaaggaatcagagacttaccatcattggcgggtgttctcgtctggatcttccggaatatgtgttaacttcaattccgaaaaactggaagcagcatttgctaaaaccagaggagtaaaatttcaagaggtaacctacctcactttgaatgatttgcgtgataatcgtccaacgattgaccgattaccatttattaagcgtaaaccctacaagcatgaaaaagagttcagagcattatgggaatcaaagtctgataaaacttcctccctcgatgtcccaattgatatttctataattaccagaataacccttagtccatggatgcaccctagcttgagaaaaaatgttgtgaaactccttaaaatgatagatggatgtaagagcatcccgattaggaggtcaacattgattgaaaatacgcaatggaaatcatatggaataagtgcaaaataa

SEQ ID NO: 310632 - DNA, 381 bp, Proteus mirabilis
ttgtttaatcctgataattccgatttttattacaagctagaggataaggaaataattgacaggttcagagaaatttatctccaagagaagcccagaaaaacaatcaaggaagttcttgaacgaatttctggtcagaatggttggaataatgaagatattgagatactttctaattcgacagatgatgagttttatttttactttaaaggacttaaggggcctaatttaacatcacatatttcaacatgtttaaaatttggtggtttcagcaatggtagcgagaaaatggagttaatagcttcaaaagcaaaatcagccttatataaaatagcatctgaaaataagcttaatgagatgagaatacgtaagtttggtctgtaa

SEQ ID NO: 310633 - DNA, 549 bp, Proteus mirabilis
atggatattgttgattcacatcgtcgtaagtggttaggccttggtatggctgctgttggtttaggtttacttccctcacatgcatttgcatcattagcaactccccgaccgaaaattcttcgctttaataatttaaatactggtgaaactattaaagccgagttttttgatggtaaacgttataataaacaagagcttgctagactaaatcatctttttagagatcaccgtcaaaataaagttaaaactatcgatccagccttatttgatcaaatctatctgttacaggtgatgttaaacaacaataaagccgttgaacttatttcgggttatcgttcactcgcgactaataatcatctacgtcaacacaccagcggtgttgcgaaaaaaagctatcatacccgtggtcaagcaatggatttccgtttagtaggtactgatttatctaaagtacgccaagtcgcactaagaatgaaagcgggaggagtgggttattatccacgaagtaattttgttcatatcgatacaggacccgtgcgctcatggtaa

SEQ ID NO: 310634 - DNA, 351 bp, Proteus mirabilis
ttgttattaagcgattacaatattgattttaaatataatttctcctcgcaatcattatatttaactattccacaaaaagccttagataataaaaaaaatatgcttgctagccaagttttatgggatgatggtgtccctgctttgtttagctcatattcttattttggcaaatataacaatcaaaataagatagaacacaaaatcagttttaactcaggtgctaacttaggtgcttggcgagtacgtagtaaaagttattatcatcatacggataagcaacagcaatttaagctatactcattatgggggaatttcgaccaaccagtagaatgttatcaacagataaattaa

SEQ ID NO: 310635 - DNA, 555 bp, Proteus mirabilis
ttgcaactaagccgagctaatgcgacgacaatagctaaaacggccattagccatttacaagcaacagcgcgagatcagtttgctgatgccaataaagacattcttgattgtaaacaatggttatctaccctcgataataaaacatctcacgattgcattattcgggataggttgagatacacgctggaaggtaagcctattggtcataaagttccttatctacaaggccccggaaaaatccacttcaattgccgttcaacagaaacattggttactaaatcatggcgtgaattaggcattgatttagatgagatggatgcaggaacgagagcatcaatggacgggcaagtgccagcggatactaattttcttgattggatacagcgacaacctgagtggcgacagcgacaggtgtttggggagacgcgatttaggttgatgaaagaaggcggcatgaatccttctgagttttatactgacaaaggtgagtttatttctctcgaacaactcagggagatagacaagcaggcatttagagaggctggatatagctaa

SEQ ID NO: 310636 - DNA, 711 bp, Proteus mirabilis
atgatcacaaaaaaattaagagaatcgatatttcaacatgtaaaatccgaatatcccaaagaagcttgcggagttatctgtcagaaaagtcgagttaaaaaatactttccttgtagcaatctttcagataacccaacagagcattttgagctttctccagaagattacgctcttgctgaggactggggtgagccaatagcaattgtgcacagccattgtggtgatggtgtaacgactcaacctagcgaaatagataaattacagtgtgatgcaactggattgccttgggtgatcgcatcatgtccagagggtgatattcgaattatttaccctcgaggtgagcgtgaattagaaggacgtccttttgtgctgggttatgctgattgctggtcgttaatcatggattattatcaccaaaaacacggtattgagttacataactacagcgttgatcggcactggtgggaagaaggcgaaaacctgtatatggataactacgagaaagcgggttttgttgatatcgctggtgaaccaaaagaaggtgacatgattatcatgcaagtgcaagccgatgtacctaatcacgctggtgtgattatgaatggtatgttacttcatcatctttatggtcaactcagcaggttggtcccctacagcgattattggcgagataggactgtaaaaattgttcggaggaaagagtttgtatga

SEQ ID NO: 310637 - DNA, 234 bp, Proteus mirabilis
atgatacccgttcgacaaatccataacctttgttactggtgcatgaaaggcgattatcgtagtggtaatgggtgctcatattcagggaataaatattttgatgagagaggaaaccctgttgatgatccagcgctagatagttgtggtgggcttattagtgattgcaaaaaacgctttggtgagaatgagccattagattttggagggtttcccgctgcggggttaacgagatga

SEQ ID NO: 310638 - DNA, 738 bp, Proteus mirabilis
atgattaaatcacttatttttatcccttatctattattaagtggatgtggtgagtatatcaatatatatcttgataataaattccccgtcaatatgaataatgatggcaaaaaaatcacggtttattcaactatttaccctgaaacagtagtacttgttcgcggtacttatacgtcaaataaatgccaacgttctcattttaattcttcttatactgaagtcacttattcctctttaacacaacaagtagaagcagaacgtaaaatagcagaggataataaaaacgcgacctataccgtgcctattgatggagggggatggtgtaattggaagttagtaaaaatagaattatcaccagtttctaccattcacaaaagatatatgcgaattagtgaagttattccaatcaccgatgataagcattcaaaaatagaactatttaccacattagcccctattatagtagaaggcaagaatgagcaatccatctattattcaccatcaagcacggaaggtgaacgaaagttatccaataaatcaaatggagaaatctattttaattataaagttgaacctaaactaaccacgactatctcaaaggataacaaagctattttccctaacggcaatattaaaatactgagcggatcgacttatagtaaattgattggttttaatgaaataatcgagaatagtgatgaaaaagcgtttacttcttttgttagatatattgattga

SEQ ID NO: 310639 - DNA, 201 bp, Proteus mirabilis
atgttagttagtgaaatgggaaaagacatagaggcccttcaaacacgtactcttgctttagagtatataattcaagtgatgattaggagcatgtctaacactgaaaaagaaaaatttatcagcgagttacagaaagaagaacaaaacaatcctatgattgaagatgcttttaaaattattcaaagtcatataaataattaa

SEQ ID NO: 310640 - DNA, 291 bp, Proteus mirabilis
atgaaaatcaaagtagagtttccgttgttatcaaacaagttctcagacgtggaaataacaggtgatgtaaaaaggcatggtattggagccataaaaatagttgaaaaacctatattaacatcagaaattacagtaacgggagtagtggaaagtaatactcaaaatgaagaaccaaagttacaatttaagtacacagaagattataatccagatgaaacatttgcttcatttatggatagagcagaaaaatatgcaagaactatgatagaacgtattaaggcggcacagtaa

SEQ ID NO: 310641 - DNA, 153 bp, Proteus mirabilis
atgatgaaaaaatctcgttttactgaaactcaaatcgtgaatattttgaaactcgcagattcaggtatgaaatttgacgatattcgtcgtcaaaatgagagtagtagcatcactacatacaggctttcttgtctccccgttagtaaatattaa

SEQ ID NO: 310642 - DNA, 234 bp, Proteus mirabilis
atgatacccgttcgacaaattcataatctttgttactggtgcatgaaaggcgattatcgtagtggtaatgggtgctcatattcagggaataaatattttgatgagagaggaaaccctgttgatgatccagcgctagatagttgtggtgggcttattagtgattgcaaaaaacgctttggtgagaatgagccattagattttggagggtttcccgctgcggggttaacgagatga

SEQ ID NO: 310643 - DNA, 312 bp, Proteus mirabilis
atggactactaccaccaaaaacacggtattgagttacataactacagcgttgatcggtattggtgggaagaaggcgaaaacctgtatacggataactacgagaaagcgggttttgttgatatcgctggtgaaccaaaagaaggtgacatgattatcatgcaagtgcaagccgatgtacctaatcacgctggtgtgattatgaatggcatgttacttcaccatctttatggtcaactcagcaggttggtcccctacagcgattattggcgagatagaaccgtaagaattgtgcggaggaaagagtttgtatga

SEQ ID NO: 310644 - DNA, 204 bp, Proteus mirabilis
atgacagttactaatgccggaactatccgtctagctcttgcttttaagaaattccataaagaaaagttattattttttaatcctctaaaaattattgaggtcatcaaaaaaccagatataacaaaaaaacatcaacaccagcaaatccaccggggagagatgatggaacaaagtgaaacaacatcacagccaaaacagcaatag

SEQ ID NO: 310645 - DNA, 708 bp, Proteus mirabilis; identical to SEQ ID NO: 296442

SEQ ID NO: 310646 - DNA, 327 bp, Proteus mirabilis
ttggtatctttgggacagtcaattattagtattgttggagttccatttggtgggataaacttccgtaatacactaacatttcttgttgtggataaaaatggtggatatctaaacggtaaatttaaagcaacctccgcaccactcggcgtaaattcagtactagaagtcatgcggtataatgttaggggcgatttattttttgctctaaatatactgtttagtttatctatttcattttttaaatctgagtctatattatatgctgatctcaatgctccattaatgttaaaagagttactttcatttgaatttttatactttttataa

SEQ ID NO: 310647 - DNA, 177 bp, Proteus mirabilis
atgacaattaaagactctcttactcacgaatctcttgttcgtgataatcaccccatattacccgacgatgggttagaccatacactgtgtcatattgatcgcctccatgcatcagcaagagcgagaacaaaagcaccttatcaacctaaggttaaaccacaaaaaacgacgaggtaa

SEQ ID NO: 310648 - DNA, 747 bp, Proteus mirabilis
atgtttaataaaaaagaactaaaggatattttattaaaaaaaataatttttcctgatttttcaaataaaataactcgattggttattggtgtaggtattactatcatattagcgccgattccactaaaagtggttctctataattggcttattaaaacttttaatctaaatagtggagagatgttaaaattatcggactttcaatctggttctaccgattatatttggggcttttctttaatagcactagctttgatacataatatagcatataaaatatattgctatcaggtagataaacctaaaagagaaatgcaagaaatagacgttgatcgaaaacttttttctaagtttataaatatgttgccagctgatagttgtacgatacatttattaaagtaccatgattttaataattcttttgatggtagtaaaatagaggggttgcaagatattataaggttatttagtaatgtggaaaataaatttctagataaagatttagaggctacaaaaactaaattcataaataatttgaatggcttttataataaagttggtatatatgctgctccagctggagtaaaggcaaaacttttttcgtgtattcctgatatgtataagggagtatttgatatccctgaatcgatcgtgaaaagtatagatgaattaaattcaagtagtaatacctgttatcaacaatatgaagaatttgttaaacaagctagaactaaattaaaatgctaa

SEQ ID NO: 310649 - DNA, 225 bp, Proteus mirabilis
atgaaaacttttaaaaatgtaccttggattaactgttgtactaaatgcgatgccgaacgagcaacagtacagacagaaaaaggcaatgaagactggttttacgatggtgacaaagttacttgcgaaaactgcggtcacactggcgttattgaggcggacggcgaatgcgcttggtgcgtttgggatgaagttgacgactcgcagggatgcaatgaagaggaatga

SEQ ID NO: 310650 - DNA, 255 bp, Proteus mirabilis
atggataaatcaagacagcagtttgaagaatggcgcagtaagaataaatcatcaacgataaatctattcgatgtttggcaagcatcacgcgagagtgccgagccagaaattaaacatcaccaactaagagagctcgttaatactgcgagagatacggcaattaaatatcaagggtgtcaatgcttacgttcagcgttagaagcatccataagaaacagcttaaccagcaatggagtgaaaataaaagatgaatga

SEQ ID NO: 310651 - DNA, 336 bp, Proteus mirabilis
gtgaataaatacaccgaactatctgatttcgatattaatagacgcatagcagaaatggatactgaaaatagatatgtttactttgaaaaagagcaaactatttttagaaagtttaataatggtcagactcaggaatttaatccgtgtaattatccactcgatgtatggcaattaatactaggtgccaaattatccattcaccatgactttaataatgactgtaattcatggattgttcgtaacatccatataccaatggtaaatgaaactaatttagcacgtggaattagtattgcttatttattaatgaaggatgcggagaatgaaaaagtatga

SEQ ID NO: 310652 - DNA, 495 bp, Proteus mirabilis
  misc_feature (343)..(352): n is a, c, g, or t
atgattatatttatcaccggtgcttcagcaggttttggagaagctattgctcgtcactttattaaccatggacacaaagttattggtaccgcgagacgtcttgataaactgcaagctcttcatcaagaactgggcgatctattctatcctttacaattagatgtcaccgataaaaaagcagtcagtgaaatttatcaccaattaccagaacaatggcgctcaattgatgtattagtcaataatgcaggactcgctttaggattaagtaccgctgataaagccaatcttgatgattgggatactatgatcgaaactaataataaaggtttagtgcatgtcactnnnnnnnnnntgtcactcgagcattactaccctcaatggttgaacgcaatgtcgggcatattattaatatcagctcaacagcggcttcttggccttatatggggggaaatgtgtatggtgcaaccaaagcctttgttaagcaatttagcctag

SEQ ID NO: 310653 - DNA, 588 bp, Proteus mirabilis
gtgaagctcaaacagatagcaaccatcaatgctggctatccatttcgagggaaacttcctgaagtgccaggctctgctgtagtagcagttcagatgaaggatgtttctctaaccgaagggattcgctggtcagactgtttagaaacagagctaaccggtaagcgtgaacccgactaccttactacaggtaatattttggtggctgcccgaggcagtcataactacgccgtacaagtggataagttactggctaccacaggtaaacaggccgttgccgcgccacatttttttgtggtcagcctgaagaagaaagacattctgcctgagtttatggtgtggttactgaatcaagtaccggctcagcggtattttgagcagaacgccgaaggcaccttaacaaaaagtattcgccgcagtgtgctggaagatgcccctgtcgttgttccgtcacttgccaagcagcgagcagtcattgcgatggccaacactttgggtgaagagcaaaggctgattcagaggttagtaaacaacggtgaacgcatgatgggcgcaatcgccaacgaattgtatcaggcgcatggccactaa

SEQ ID NO: 310654 - DNA, 1524 bp, Proteus mirabilis
atgaacgacaagattaaccaagacagaatcaacaaagtgctgtggaatgcctgcgataccttccgtggcaccatcagtgcagatacctataaagacttcatcctgaccatgctgttcctcaaatacatctccgatgtatggcaggatcactacgatggctacaagaccgagtacggagatgagacggaacttatcgaagagatgatgaaaaacgagagttttgtgttgcccaaaacggctagcttttatgccctgtatgaacgacgttatgaaccaggtaacggtgagcgcatcgaccaggcgttgcacgccattgaagaagccaacgggaccaaactcaaagacgctggcaagagcgtgttccaggacatcagcttcaataccgacaaactgggtgaagaaaagcaaaagaacacaattctacgccatctactggaagatttcgccaagccagaactgaaccttaaacctagccgcgtcggcacgctggatgtgatcggtaacgcctacgaataccttatcaaaaacttcgcggccagtggcggccagaaagccggcgaattttatacaccgccagaagtcagcgacctgatcgctgagttattagacccacaaccgggtgagagcatctgtgacccagcctgtggctctggttcgctcttgatgaagtgtggtcgcaaagtcgtggttaaccatgctagtcgccaatatgctctgtatgggcaagaagccattggttccacctggtcgctagctaaaatgaacatgttcctgcacggcgaagacaaccacaaaattgaatggggcgacagcatccgcaaccctaagttgctcgataagaatggcgacttgatgctgtttgacatcgtgacagccaacccgccgttttccttggacaaatggggtcatgatgaagctgaaaacgataaattcagtcgctttcgccgtggcgtaccaccgaaaaccaagggcgactacgcctttatcctacatatgattgaaacgctaaaacctaagacaggtcgtatgggggtagttgtgcctcacggtgtgctatttcgtggctccagtgaaggcaaaattcgccaaaaattaatagatgaaaacctattggatgcagtgattggcctacctgagaaactgttttatggtacaggtattcctgcagcaattctgattttcaaaaaagagaaagtagatgacaacgtcctgtttatcgatgcctcacgcgagtttaaatctggtaaaaatcagaaccaactcagtgaggaaaatattgataagatcgtcgctacctacagatcgggagaaaacgtcgataaatatgcgtatcttgccagtcttgaagagatcaaagagaacgattacaacctgaatatcccacgctacgttgatacttttgaagaagaggatgaaatcgacctaatggcggtacgtgccgagcgtgagcagctaaaagaacaactgacggcactggaaattgagatggccaagtatctggaggagctaggttatggcgcgtag

SEQ ID NO: 310655 - DNA, 1275 bp, Proteus mirabilis
atggcgcgtagtttagctaaggatagcatccctacaggatggaagtacgacctgctggacaaatttgcaacccgttgcagcggtcatacgccgagtaaatcttttccagaatactgggatggaggaattaaatggatatccctggcagatagctcccgcttagataaagggtatgtcttcgaaacagataaggaaatatctgaagtaggaatagcgaatagctctgctgaattacatccggcagaaactgtcgttttaacgcgtgacgctggcatagggaaaagtggcgtaatggctgttcctatggcagtcagccaacattttattgcgtggaagtgcgataataaggaaaaactaaatagttggtttctgtataactggcttcagttgaataaggctgagtttgaacgacaggctgttggctcaactattaaaacaattggattgccgtattttaaaaagctaaaaatcgcggttcctccatacatagaacaaaaaaaaatagcccaaatcctctctacttgggataaggccatcaccaccaacgaacagctactcgccaacagccagcagcagaaaaaagccataatgcagcaactgctcactggcaagaggcgtctattggataaaaatggagttaggtttagtgggcggtggaatttttcacatctaagtgaactcggaactacttattctgggttgactggaaagacaaaagacgacttcggtaaaggaaaaccatacatcccatatatcaacatatttaggaattcccgaatagatcttaatgccttggaaaaagttaatatttcatctgatgaaaaacaagctcaggtgcgatatggagacgttttcttcaccacctcatctgaggttcctgaagaagtcggtatgtcatctgtgcttttggaacacactgaagagctctatttaaactctttctgttttgggttccgcttaagtagctttgaggttcttcaaccagaatatgcacgatacctatttcgctcggaacaagtacgaagagcaatttctgtcatgggacaaggtgcgacacgctacaacttatcaaagaagcagctaatgaagcttgagttaaatctccccccaatagctgaacagcaaaaaatcgcagccgtactttccgctgccgatcaggaaatctttgcactacaacagaagctagaagcgttaaagcaagagaagaaagccttgatgcagcaattgctgacaggtaagcgaagagtaaaaattgatgataaggagtttatataa

SEQ ID NO: 310656 - DNA, 234 bp, Proteus mirabilis
atggcaaaaggtaaaaaccaacacgtaattaaacatctagatgggtgggcagtaaaaggcgcgggtaattctaaagcgaccaaggtcaccaaaacacaaaaagaagccatcgaagttgctgaagagatcgctcgcaatcagcaatccgataccaaaattcatggcactgacggaaaaatccgggctggcaatagctacgggaatgaccctcacccgcctaaagataaaaaataa

SEQ ID NO: 310657 - DNA, 1281 bp, Proteus mirabilis
atgactacttcggagatgtttactgattttttggaaaatttggccattgataatggaatgtcaattacttctaagtatgaagaaattacatccgcactgaacaaaaaatttagggatacggaatctaaaactgccaatagtttgcaggttggttcttatggtcgttggacaggcattaaaggcatttcagatctagatatgctttatatcatgccagcttctaaatggaataactataaagacggaaaacaatccaagttactcgatgatacgcgtgacgcgataaaagctaggtattcaaacacagaagttaaaaaagaccgtttggttgttcaagtgctgtataagaattttactgtggaagttcagccagtatttgaacaagatgatggtagtttcaagtacccagatacatacaacggtggtagctggaaaataacaaagccacgcgatgaaattaaagccatgaaagagtttgtggatcaaaaaaataagaatcttcgcaagctttgcaaaatggctagagcatggaaaaacaagcacggcgtggggatgggaggacttttaattgatactctggcatacaattttttaaaatccagaacggattatgacaatcggtcagccgcattttatgaccggatgtgtcgagatttcttcctttatttgtccgaagagccaaataaggactattaccttgccttaggcagtaatcaacgagtaaatgtaaaaagcaagtttcaaagaaaagccaaaaaaacttatgacttatgttgcgatgccatcgcagcgggtgaaaatgactcagcaaataaaaagtggaaaaaagtttttggcagacctttcccgtcagctacgaaggcagaagcaagatctattgctaaagccttcaaagatactgagcagtttatcgaggatttgtatccgcttgatattcgtttcaatcttaaaatcgaatgtgaagtctcgcaagacggatttcgtgtagatttgctgcgtactatgctttccagaaagcttaagctttcccctaagaaacaactcaacttttatatcgatgaaatagacgtaccgggtgagtttactttgaaatggaaagtcttaaaccgaggggcggaagctgagcgcagggattgcattcggggtgatatcgtcattgataaaggctttagagaaaagcaagagaaaactgattttgcaggggagcatatagttgaatgctacgccattcaaaatggtgttgttgttgcgaaagatagagttcacgtgccgattcagtga

SEQ ID NO: 310658 - DNA, 603 bp, Proteus mirabilis
atggaaaataataatttacttaagcatatttcagaaactggttacaacgttggctatagtgcaaagttgcattttgctagctttgaaatgattgaaaaagttccgggccttctcagctttatttcactggcttttggtgtgtatgctctagcatttgcagaactctcaaccaagctagcgtcgagtacactgctagttttaggcatcgttggactctacatcagtcttaagaattctgataaaagtgattttgagcaaaaaggcatcgtattaacagatttgtttaatgaattaaaacatttaatggctgaagtaaaggaaaatacaaagtcagctcaagaagcatcagaaatacttaaggatatcgagaaacgttataacacctgttgcgcttcacaccatccaatgtttgcaacctggtttgctcactataagtttttttgggagcagcaaactgcttggatcggggagtatcgcccttttagtttttggcgagataaagtgccactatctttgtggttcacaatacttttaataattattggatcagttttctttttttctgatattacggccattatttgcagtataccaacagcataa

SEQ ID NO: 310659 - DNA, 3282 bp, Proteus mirabilis
atgacacaatatacacccaaatttcaggaagaatacagtgcaaagttaccggcgctgatgctattgaccaacctagggtggtcattcctctctcctggactcgcattagccgcccgtggtggtaaagttgatgaagttgttctgcgccaggtgctacgcagtgaactccagaagcgcacttttacctttgctggtaaaaactatccgctgtctgaaaagtctatcgacaacctgattgctgaggtgtgtagtccagcattaaacgaaggcctgttaactgctaatgagcgtctgtacaaccacctgctgtatggcatctctgtcactgagtttgtggatggtaaaaaggccagcccgactattgcactaattgactggcaaaacccagtcaataacagctttgtatttaccgaagaatttaccgttacccgttctagcggagtcgaaagccgcagacccgatattgtctgctttgttaacggtattcctctggttgtaattgaggccaagcgcccggatggcaattccaagaaaggcccgacaattgacgagggtatctcgcaaagcctacgtaaccagcgacatgatgaaattccgtcattgtttgcctatagccaaatattactgtccataaacggaaatgaaggccgttatggttcctgtggcacgcccgctaagttttgggccgcctggcgtgaagaagacatctccgatgccgagatgtacgctatcaaaaacaaaacgctcaaagatgaacagttggcaagcttattcagccatcgcccagcaaaagatctggattggtaccagagcttgaccgctgcgggggagattgctgtgactggtcaggatcaattactgatcagtctgttaagtccttcccggttgctggagatgacccgttacttcaccttgttcgataaaaaggctggcaaaatcattgcccgttatcagcaggtatttggtatcaagcgcctaattgaacgcatcaatacccgaagtagcaccggtggccgtgaaggcggtgtaatctggcacaccacgggttctggtaagtcatttactatggtgtttttaagtaaggcgctgatcctgcacgaaagcctgaagcaatgccgtatcgtggtggtgactgaccgggtagacctggaaacccagctgagcaaaacctttgcctcgggcggtgaactcgccggtaaaaaagacaaagaagcagctatggccacatcaggcaaacgcttggctgaacagattggtaaaggcacggagcgaattatcttctcactgatccagaagtttaataccgctaccaaaatgccagagtgtgtaaacaacagctctgacatcattgtactgattgatgaaggccaccgcagccagggcggtgaaaaccatattcgtatgaagcaggctctgcctaacgctgcctttgtcgccttcaccggcacaccactgttaaaagacgataagaccacaaataagtttggccccattgtacatgcttacaccatgcagcgcgccgtggaagaccagacagtgacgccgctgctgtacgaagagcgtattcccgacctggatgtgaatgaacgtgctatcgacagttggtttgagcgtattaccgaagggctttcagaagagcaaaaggccgacttaaagcacaagtttgccaagaaaggccaaatttatggtgcggatgatcgcattcgcttgattgctttggacatagccaaccactttgtaaagaacatcgatgaaggtttgaaaggccagttagcttgcgatagcaaggcctcggctatcaaatacaaaaagtatctggacgaagcaggcttgtttgaatctgccgtcgtgatgagcccgccggatagccgtgagggcaacaccgctgtagatgaggcgaccacaccagaagtcacccagtggtggaaggacaacgtaggcagtcaggatgagcaggcttacaccaaacacttgatagagcgctttgataaagatgactcactgaagatactcatcgtggtcgataagttgctcacaggctttgatgagccgaaaaacgctgtgctgtatatcgacaaacccctaaaagagcacaacctgatccaagcgatcgcacgggtaaaccgtctgcacccgaagaaaaaatttggcatacttatagactatcgcggcattttggccgagctggataccaccattcagaaatatcaggatctggcctctcgtacccaaggcggttacgacatcaatgatattactggcctctacaaccagatgagtaccgagtacaagcgcctgccacagctttataaacagctatgggccatattcgatggcgtgaagaataagaacgacatcgagcaattgcgccaggtactggtaccaaagattgaagagttcggcggcgagctggttgacgtgcacctgaaagtgcgtgaggacttctacgaagccctgactgcctttactagttgtttgaaggtagcgctgcaatcagctaccttctttgaagacaaaagctttagtgaccaagatcgactccattacaaagaaatggtaaagcaattctctagcttacgccagatggtacaacaagatgcgggagagaggattgactacgacgaatacgctgagcaggtaaaaaagctactagataagcatgtggtgggtgtcgaggttaaagaacccggtggcgtgtatgaagtgggtaaaatggggcaaaagcaacaacctgaggactggagcgaagataaaacgcgcaatgaaactgacattatcaaaacgcgcgtaacccgaatgattgagcaagagttacgggatgatctctatgctcaggaagcgttttccaagttgctgcgccaagccattgaagaggccgaaaaactgttcgaccaccctctaaagcagtatatgctgttccgtgaatttgaagagcaagtacaagataggcgcttgaacgacatacccgatgcgtttactggtaatcgtcatgcacaggcatattttggtgtgttcaagaaagtgcttcctgaggccttggccgtgcttgacagccaggttcaggataagtggataaaagttgcctttgaaatagaccaggcggtagaaacctctgtcgcggaaaactccataaacccacagaacatcgaagcggatattcgtaaaaagttactgccgcgaatgttccaagagtgcaaagccattggtgggggtatggatcaggctaagaagattgttgagatgattgttcagatcactcgtgtgggcttgagtggggtttga

SEQ ID NO: 310660 - DNA, 1476 bp, Proteus mirabilis
atgaaaatttatttttctgatttttttgacgtttcgcccaaagaactagaggaatatggtgcatttgatctttcattaatcaatgatcttcccctgtttattgacccattccttttatttaatagcgacaaaccggagtataagaaactacatgatgacattattcaatatgttgcatttttgcgtgcttgttcagaaaaagaagggatcagcaaaggtttaataaaagcatggttcttattcccagaagtaaaacaaacatggtttggatacagcaaaattggtaatggtggaagtggccttggtcagaagttcgcaaagtctcttaacgaaaacctgaacactgtgtttacgaattttggcactgaagagattaccaacggtagtcaccttgagaagctttgcttaatcaaagatggcgttggaagagataatataagcgacttcacaaccaatcttatcaaaaagtttttacttgattacactcaagaattcgctcaggagcatattgatgctcgttttttatccactcatttagttgataaagtcgaatttaactacaagacaagatcatggatggcgaaaacctatacactaccattatttcaaaatgattatgtacttttgacccctaaggacatcctcacgaaagatgaaaactggattaataagtctgacatgattggtgattttagaggtgtgcttgaaagtatccccaatgaccaacttagagcacagttgaatgactatctagccaggattcttcctgaaaatcctgataaaaaagagtttgataaagccgtcgtaagctcgatcataaaattccctcaatatattgactattttataaagcttaaagaagagaatggtgaccaggctgttaagcttagtgagctaaaggtaaatgagacagagtatctgttcattcaaaaagttaaagagcttgtgaacagcctagaaaaagatacgacgttttatgatcaaccatcaaattcattagacgaagcgtatcaacgtgttctctttctaaagcagatggtagaaaacaatgatggttacaggtttttctatgtaaaaggaaatccaataaaacgagagcaagaccttcagctcctatttaagctgacatggtttgctagtaaatatgatgtaaacgcagaagttaataatggtcgagggcccgttgatttcaaaatatcaaacgggagcaaagataaatcccttgttgagtttaagttggcttcaaacaaaaagttaaagcaaaacctgaaacaccaagttgaaatttatgaggctgcaaactgcacccatcagtcaattaaagtcattctctttttcagcgattccgagcttgaatctgtcagtaaggttatgagggagttaaaactaaaagaggacaaaggtttcgtattaattgatgcacgcccgaacaaagtatctgcttcaaatgtaagagacatgtttgaagatgactga

SEQ ID NO: 310661 - DNA, 615 bp, Proteus mirabilis
gtgtcgagtcccgaagatgcagacaatgatgcggttctttctgctgttaagaagcgtgggcgttggatatacgaacagcttaggaacttccgcgaacaacttgaattcatcccctctagacaatacatcagcggtgagagccattactaccttggaaaacagtatctgctgaaagtgattgaagcaccagaacaggttcaaggtgtgaaactactacgcggcaagttggaagtttcggtaagaacaaagtccgctgaaaaggttaaagagctactaacagactggtacaaagcgcgagccaaggaaaccttcaccaagcggctcgataccatgctggaacaagccctttgggtagaagagcgaccatcgctgcgtattctgacaatgcaaacccaatggggcagttgctcacctaatgggcgaattgcactgaatcctcatttggtaaaagcgcctcgtgagtgtattgactacgtgattttacacgagctttgccacatagcagagcataaccacagcgagcggttctaccggctaatgagtcaagtcatgccaaagtgggaaaagaccaaagaacgactggatgggatggcttccgtctatattgaatggtga

SEQ ID NO: 310662 - DNA, 915 bp, Proteus mirabilis
atggcagttccaacctacgataaatttattgagcctatattacgttttttaaaacatcaccctgaaggtattgctgccaaagatgttcatgaaggcgctgcagacattctagggttagatgacaaccagcgctccgaactgatttcaagtggccaattagtctataaaaatcgtgctggttgggctcatgataggttaaaacgagcagggctttcacaaagcctatctcgaggaaagtggtgcctaactgaaagtggtttcgagtggattaaaaacaacccatttccactgacccaagaacaagttgaccacttagcttttgattttatgaacataaaacttaaaacgaatcctgatatagttccactagatgaagatacacaaataaatcctgacaactctcaacacgttcgtagcccagatgaccgtctaaacgatgcactgaaagaaattcgtgaatctgtcgccattgatttattggcaaatttacttcaagtatcccctacccgcttcgaattcattgtactagatgtgctacataaactaggttatggtagccatcgtgatgatttacaacgtgttggtggtacaggtgacggtggaattgatgggattatttcgttagataaactcggattagagcgaatttatgtacaagcaaaacgctggcaaggcaccgtcggtcgccctgatttacaagcattttatggcgctcttgcagggcaaaaagccaaacgtggtatttttataactacgtctggttacacagcacaagctattgattttgctaaatctgttgagggattagtccttattgatggtaacctcttagttaacctaatgatggataacgagataggcgttagttcacaaattattaagttaccgaagctagatatggattattttgagtag

SEQ ID NO: 310663 - DNA, 210 bp, Proteus mirabilis
atgaatttctatactatggcatctaacgtcacagatgttaagttagacattggatatttaattgtgtgtaacttttatattcagaattcatgtaaatgtatgttacttatttttctgcaaaattgtagaatacctctattcctactgggtatattagcaagcaataatatgaaattagctttcatgattggtacccgtttaaatttctaa

SEQ ID NO: 310664 - DNA, 276 bp, Proteus mirabilis
atgaaggtaacacaaatccttttttataataatgaaaatagtattacagataatgaaataaaaaacctatttaatatctttgatactcaggtcattaataatagtagagtggatgttaatcttgagactgccaaaaatcaaataaataaactcgctgatgcagttaggaatggaagctcaatagatttagattatttagtaaacatcatgtttcatgatgatataaaaataagcttatatgcaactaatcagctctacttgatttatccactatga

SEQ ID NO: 310665 - DNA, 1011 bp, Proteus mirabilis; identical to SEQ ID NO: 308101

SEQ ID NO: 310666 - DNA, 144 bp, Proteus mirabilis
atgaactgcatgtcatgcaatagacagctaacagatgatgaaatttatgtttgcgatgaatgcgtaaatgaatatccgcatcttgaggttatggaaatagtgaaaggagagggagatgcagaagctaaggcgacggcgctgtaa

SEQ ID NO: 310667 - DNA, 789 bp, Proteus mirabilis; identical to SEQ ID NO: 52481

SEQ ID NO: 310668 - DNA, 1842 bp, Proteus mirabilis
atgcaaagtaaaaagtttagagctgatattaatggattaagagctattgctgtcttatccgttatgttattccattttaatcaagggttggtacctggtggttttgctggtgttgatgtattttttgtcatatctggttttttaatgacatcaattatatttagaggattagaaagcaataatttttctctctggagttttttaaaagcaagagctagacgtatagttccagcgttagtaaccgtcatatccattgtattggcgcttggttatttattttttgaaccattaacatatcagttagtcggtaagcatggattttctagtttactttttatatctaatatcacttatgctaatgaagctggatattttgatgcagactcttttagcaagctatttttacatacatggtcattatcagtagaatggcaattctacatagtatatccaatagtattaattattttatcaaaattattttcaataaagacactgaaaaaaattgttgtaatctctgccatcataatctttgtcttttgtgtgtatttctcgtccataaataaaaccctttcttacttcatgatttacactagagggtgggaaatgctttttggtagcatcgcgtttttattcccattatcaatagaggaaaataaaaaaagaataattgagttacttggattaatcctgattatcacatcattctttattttttcagatactgatacatggcctagttacaatgcattgatgcctgtttttggagcgtatctttgtattctagctaattgtaaaaaaactttattatcaaatatagcatttcaaaaaataggtctttggtcttattctatttatcttatccattggccttttattgttttctttaaaaaaataaatatagagatctctatttttacttactttatatccaccatattacttgcatttattatctatagtattatagagaaaagaagagattatagttatgggttaatattatgttggattctatctgtaggcgtatcttattacgtttctattgatggtgtaggtaatagagtagatgaaaaatataaattgactagcaaagagtttcatagagagtattttggtgggagtgctataaaacaagctagcgttattcaagaatttaacattgacaataatgataatcctcaagcaattataactggtgatagctttagtcgtcaatacatgaatagttttaaaaaaagtggatttaaagctattggtatttttaaagatggctgcttcataactccaaattattattctaaatttgaaagcaatgataacaggctctgtaaattgagatatgacaattttataaaagttatgaaagagcatcccaaaactaatgttattctatccatgtcatggggttcatataaattaacagataagaatactgacagagaaattaaagataattcagattctatcattatcaatgagttatctgaattaataaaaataggtggtcaccttaggaaatattatataattggaagacctaatggtagtgagaaatcatcatttgaatgtcttgctaggaataatcttcctataaatagaataataacacactgtgagttattctctgaaagaaaaataatatctattaatgatgaattaaaaaagcttgaaacattatataataatgtaactattatcgatcctaatgatgttctttgtaaagagaatgaatgcatattattagataaagatggtgagcctatttattccgatagcagtcatttatctatatttggagcaaatatagttgttgagtatatattaaaaaaaataaattaa

SEQ ID NO: 310669 - DNA, 555 bp, Proteus mirabilis
atgaaagctatttttttgactgctttatttgtattaactagtttagtgactggctgtgatcaaatcagacaatttgatgtcagtgaaaaagtaattaatgactatctgagtcaaaaatcgggattacaaaaacacattggggaagacggtgttgtttctgccgatatcacattaagtgatttagcgatccaaattggtcgtactgagcctggaaaagtgagcttttctggtagtgcttctcttaaaattgattctttgtttggcaaaactggcgcgaatgtgaatttaactttatcaggccagcccttttatcaagcagagcttggggcgatatatatcaagtcaatgaaaattgatagctataaagtgtctcctgaaaaaatggagccggttgtaatggcattaaaaccttacttagatacgactattgcaacttattttgataatcagcctgtttatgtgctcaaccctgaaaaaaatagtgcagaagcggctgcctttaaattagcaaaagggattgaagttaaaccgggtaagtttgtgatccaactttaa

SEQ ID NO: 310670 - DNA, 387 bp, Proteus mirabilis
ttgttactttctattggcactatcagtggatattcagtttacgctattggtgcgttagagccgggaaattatagtctagccagagatcattctttgcaatttaatgtagctattagttctggatttacaattgatgctaggccttattttttagattctagtacaaagataacagtccatacattaaaagcctgcgatgtgacgccacaaacagcaacatcgattaattaccgtagtcaaatagcacaaaattttgctacaccgactaaattcgatgagaatattgccagtataaatgttgattgtccctatgctgggaatgtacatatcacattaagaccgtttaataccttagtcaaaggcagagtaatacgggaatggaattaa

SEQ ID NO: 310671 - DNA, 327 bp, Proteus mirabilis
atggaatacacaaatacacgcaaacaatttaataaattcatttcaaatcacttgatggcttcggcattacaggcattgagaaataaaactcagtcggtggtcgctaaaacattaggtgttcatgactcaactatcctacgcagaactgaaaaatatcctgagatatgcgagacattagtcgcatcagggatagtcgattttgtgatggaaggtgagaggaaaatatcagaggaagaataccgctttttatggaaacaaataggtgaactgtcacagatgagaacaaaagaaaacgccccgattgttggagcaaccgaggcgcattaa

SEQ ID NO: 310672 - DNA, 306 bp, Proteus mirabilis
atgacgttatttgaatttatgaatagcagtagaacggatgggtttctatgtaagcgggttcactgcaatgatggatattatgtaagtattcaagcaagttatggacactactgttcacctcgtgaagatctaccatcttatgatctttatgacagctatgaacttggattcccatctaaacctgaccaactaacaaacgcctatgcagaatgtgacgaccgttttacagaaacggtctatccatacgttccaaaagaggttgttatcgctttgattgaaaaacacggtggagtgaaagttagttaa

SEQ ID NO: 310673 - DNA, 1707 bp, Proteus mirabilis
atgtggtgcattccatcgctattaaaacaaaaaaaatcattatatttaatttttattttatcttgttttattcaattatttgctttagttaatccaattattttggaaaaaattattgataaggtattaacaggaagaagcctctctaatttgcaagttttaggggtactcctcgtgctgcttgctattatagagcctatctatcttttattacgagataaactttatgcttttgtttcttgtaccctaggtgccgaattctcagggaaaatttatcaacacctcattcggctacccagtcagttttttaatcaacgtcaatctgggcaaattattgctcgtattcaagagcttgctcatattcgccagtttattactggctctgcgttgatgatggtactggattttatttttattatcgtatttctttcagtaatgtttgcttattccgtattattaacttggataaccatagcagcattagtcgtttactttttattttggctgatacttggccccatgatccgttattgggttgaacaagagtatcaagcaaatgctgataatacgagcttattaacagaggctattaatggtatagaaaccataaaaataacagcaacagaacatcaatttattgaaaagtggcaatataaactcactaattatatccttaagcgtttttcagcggccaaaaaagcgttatttgctcagcaattaattggggctattcataaaattactatggcaattatcttgtggcatggtgttaatctgattatgaaagcgcaattaagtgtgggcgaattagtggcttttaatatgtttgccgcccatattacacaacctattttacgtttagcccaactttggcaagatgttcaacaaacaggcatctctatacgtcgtattggcgagatcgttaatactcccacagagcatcagcatcaaggacttgctactgtacctaatattgcaggaagtatagtattttctcatgtacgctttcgttatacagccaatactccagatgtgattgagcaactctctttttcgatccccgcgggcaaatttattggtattacaggcccctctggttcaggaaaaagtactatcacacgtttaattcaacgtttttatactcctcaacaaggccagatttatattgatggtatggatctcgccattgccaatccccttactttacgccaatcaattagtgttgttttacaagataattttttatttagtggcactattatggaaaatattcggttatcaaaacccgattgtagtgaagaagatattattgaagcgagtaaattagccggcgcttttcattttattactcaactccctgagggatttaatacacaagtaggtgaaagaggtagtaatttgtcaggagggcagcgtcagcgtattgcgctagcaagagcacttttacctgatccacgaattcttattttagatgaggcaacatcggcgttagattatgcctcagaagcggaaattttagccaatcttccggctatttgtaaaaatagaacggtaatttgtattgctcaccgacttaatgctatttctatttcagattatatttatgttattgataaaggtcgtatattagaagaaggtacacatagcgatttattaaataagaaaacactttatcagcaattgtggcaacaacaaacacagcaataa

SEQ ID NO: 310674 - DNA, 465 bp, Proteus mirabilis
gtggatgttttcccaacggagccgggggcaaataacgatccgaacgatccttttgtatcagaattaattaaatttgataatgtgatcttaacaccacatattggtggttcaacccaagaagcccaagaaaatatcggttatgaagttgctggtaagttagctaaatattctgataatggttctacattatctgcggttaatttccctgaagtatcattgcctagtcatggtgatgatgtaaaccgtttactgcatattcatgaaaaccgtccgggtattatgaatagtatcaataacgtatttacagaagaaaatattaacgttgctgcgcaatatctacgtacagctggcaatgtgggttatgtagtgattgacgttactacacaaacgaaagcacaagctgagttagtattgcagaaactaaaaggactaccgggtaccattcgtgctcgtatgttgtactaa

SEQ ID NO: 310675 - DNA, 276 bp, Proteus mirabilis
atggaaatatggtttaaggagtttgagtcgcatgggcgtcagattctaatcaagaaagctcatgacgccgatgagtcaaaaatcggggtgcaatattgctggcctgagaagattttcgatgtcgactttggattatggatagattacgacgacgatgacgaggaaagctttgataaagcggaagaagcacgtaacaagctattcgacatcatcgatcaggaagcggtagataccgaggtgagtaacttaattcaaaaactcaagcttgataattag

SEQ ID NO: 310676 - DNA, 1047 bp, Proteus mirabilis
gtgaataagcgtatttggaaagcgttcaaagaagcagatcagaagcgtcttgttggtcgttatgcgggtttaattcttcatatcaatgatagtggaaagtggcatgagcctgtaacgaagtcaaagttacttaaaaaggcaacgccagcatgggcgaatgcaattaagcctactgattgggtgactgacattaattctcctaattacggtcaacctagcatgtggcagtacacggagacgctaccaaatggcgggactagaaatatcaatattcatccggataggattttcattctaggtgattattcagttgacgctatcggctttcttgagcctgcctataacgcctttgtaagtcttgaaaaggttgaggggggttctggtgaatcattccttaaaaacgcagcaagacagctaaatatcaactacgaaaaggaagccagccttgatgaaatggcaagaatgtatggcgttgacattgctgggttgcaggaaatttataatgaagtagcaagagaaatcaacgcaggtaatgactcagttcttgttacgaagggcgcaaatgttagtcctatggttaccgccgtatcagatccgacaccaacttataacgtcaatcttcaaaccgcatcagccgcaatggatattccatccaaaatattggttggtatgcagactggcgaaagagccagcaccgaagatcagaagtatttcaatgcacgatgccaatcacgcagagaaagcgaactctcatttgagatagaggacttcatcgaccacctaattaacatcaaggtactagctcctatcggtgagaaaacggttgtttgggatgatttaaacgagcaatcagctattgagaagctcgatagcgctgagaagatgagcctaattaatcaaactgctctcgctactggtgagccggtgtttagtgtcgaagaaattagggaggcggctggctatgaaaatgacagcgaagagccattaggtgaaactgatgaagatacagaagataaggacggcgataaggacaggaacgaaagctga

SEQ ID NO: 310677 - DNA, 159 bp, Proteus mirabilis; identical to SEQ ID NO: 297225

SEQ ID NO: 310678 - DNA, 585 bp, Proteus mirabilis
atgtacggcgttgatgtctctggcttgcaggaaatatataacgaagttgccagagaaattaacatcggtaacgattcggttcttgttactcaaggggctaacgtttcaccactggttagtgctgtatcagatccgacaccaacctatatggttaacctacaaacagcatcttcagcgcttgatatccctgcaaggatacttgcaatgactcaaacaggagagcgcgccagtacagaggataaccggtatttcaattcacgatgccaatcgcgcagagaaagcgagctcgcttttgagatagaggacttcatcgaccacctaattaacatcaaggtactagagcctatcggtgagaaaacggttgtttgggatgatttaaacgaacagtcatcgatggataagcttgatagcgctgagaagatgagccgagttaatcaaactgccctctctactggtgagccagtgtttagtgtcgaagaaattagggcggcggctggctatgaaaattatagcgaagagccattaggtgaaactgatgaaaatacagaaaataaggacggcgataagacccgggacgaaagctga

SEQ ID NO: 310679 - DNA, 381 bp, Proteus mirabilis
gtgaaaaggttattattatcttgttttttggttttatctgccctaattatttctggttgcgcacaagaaaagcaaattaactacaaccaaaaatcatccatgctttcattaggaatggataaagatcaagtaagaacagttcttggtgaccctagaagaactgaagtcaatacagaaagagaaagatgggtatattggggtaaagtttattatggatttactccggtagataacgagcagttatctcaggataggttagttgtgacatttcaagagggtaaagtgaccaagtgggggcagcaaacgctttctgatgatgcattagagatgtcacaaaaaacaattgaagctactactaacgcaataaaagcatcacagtaa

SEQ ID NO: 310680 - DNA, 480 bp, Proteus mirabilis
atgcggaattctactgtttgggtgtatgagctatttgcaaaggaaattggtgatgacaaagctcggcgctatttgaagaaaatcgactatggcaacgccgatccttcgacaagtaatggcgattactggatagaaggcagccttgcaatctcggcgcaggagcaaattgcatttctcaggaagctctatcgtaacgagctgccctttcgggtagaacatcagcgcttggtcaaggatctcatgattgtggaagccggtcgcaactggatactgcgtgcaaagacgggctgggaaggccgtatgggttggtgggtaggatgggttgagtggccgactggctccgtattcttcgcactgaatattgatacgccaaacagaatggatgatcttttcaagagggaggcaatcgtgcgggcaatccttcgctctattgaagcgttaccgcccaacccggcagtcaactcggacgctgcgcgataa

SEQ ID NO: 310681 - DNA, 633 bp, Proteus mirabilis
atgtcaatgtcatcagacaaaaaatttttcaaatttcttggcaatttacctaatggtcaagaattacaagatatttataaaaagtataaaaattcaaatgaaagtaactcttttaacattaatggagcattgagatcagcatataatatagactcagatttaaaaaatgaaatagataaactaaacagtatatttagagcaaaaaataaatcgcccctaacattataccgcatgacttctagtactgaatttacgccgagtggtgcggaggttgctttaaatttaccgtttagatatccaccatttttatccacaacaagaaatgttagtgtattacggaagtttatcccaccaaatggaactccaacaatactaataattgactgtcccaaagataccaaggtggctctaatggaagggagtaacaatgatcaaactgaagaagaagttttgttacagtcttatactgaatataaaattactgcatcccaaataattgaagattccaatgttcttcaaaattacttaggtaaagatagcaaacttaacttttgttatgaacttaaaatgcaaataactaataactcctctttaaatagctcagaaaaagagcaagaatttttctcattttga

SEQ ID NO: 310682 - DNA, 198 bp, Proteus mirabilis
gtgttaaccaagaaaccaagtgcgatggaaggcattgtcacacgagatgctcaagcattttcattagatgaattttcacatcgggtgtttaaatatgtgagaaaagatcatgttaaaacagatgtgcattggaaacgtaattggaaaagagcgccactaatttgggaaaaaacacaggagtctcatgatgcttcataa

SEQ ID NO: 310683 - DNA, 366 bp, Proteus mirabilis
atggaaaagagacattatcaacttattgaacaagcctgccgttttattgaagaaaatcagggtgatgtttctcttgccgacatcgccgcacatattcaatccagcccatattatttccatcgacgatttaaatctataatgggaattacacctaaagagtatgcgaatgcttatcggcacaaactaattaagaaagcattagctggcgataaaacaattacagatgcgatatatcaatcaggctttaatgcgaatagccgattttatgaaaatgcgacggccatattaggtatgacgccaacccattggcgcaatggtggacaaaatatcgtgattttttttgctgtagggatctgctcattatag

SEQ ID NO: 310684 - DNA, 1179 bp, Proteus mirabilis
atggttcagggaatatctaactcaaataagatgacgctatctagtgaaaaaacggaaagtgatattccaactgagtcttatagcgtaaataggtatttgaataaatgtcagcttacacctgaaagtataaaaaaattagcagagaaattagatatacttaaaaaaatagcgagtttaaaagacaatattgccagtcataacgatgagcaagatcttcaggaagataaaatgccagaaaattatgaaggtttgctattaagtcatcggtatttattatcatctggtggttctaaaactaaaaaaatatctttagatataaatataaaaaaaggatttaactctttatatataggaagagaagaaaaaaaagcacagctcactgatcagagaataaataaaaaaacatctaagatagataaatacaaactacaaccccatgtaggaatagaagaaaaaactgtcattaaagacataataagaaaaaacaatgttaaaacgatggttaatgaattcttatcgacaaaaaagagttcagtatttcctattttcgtagataaaaaaataaatcaacaacggtatattaagtttttagaaaaaataattaaaaaagaactcgttaataatgataatgttgatttagttagcagtgcaactaagcaggaaaaacaggctcaaattcatcagaaagagaataacagtgtatacaaaaatattgagcctagtatggcaatgccgctaaataacgtatcaaaagttgatacaaaagaagagccggaaatttatcaagaaaatatcactgaaactaataaagttgttcctttttcttcgcaagttacaccaataaaaacggtaattgcattaccaaaagtagccaaaatggtttcacagctacctgcttggcaagtaatagataaaaaaatatctatgttgactctaccacccagcattacttatacatttacaaaatggaagagtcgttatcatcaggctaaaattcattttattgataaacaagttcagttaattgcttcctcaggacgcgtttatcaaacagcattagagaatttaaagcaatataatggggggttatccatagatctaactaatagccataaaaataaatcgtggtatatcaactctattaatgctatttatgaaagagaggatgaaaatgaatga

SEQ ID NO: 310685 - DNA, 255 bp, Proteus mirabilis
atgcaaatttcatacagatactcgaacggaactcgggtagtagacggcaaaacagtcatggaatttgatgaaagtagcaagcttagtattgagacaggaagtttcgctgagctggctaaattaacggaaattgaccccgtggaagccctgcaatggattatgcagttcgacaaggaagagtttgacaggattgtcaatgaagcaagcaaggatacccctatttctaagctagctctgctaaggagggttgcgtga

SEQ ID NO: 310686 - DNA, 264 bp, Proteus mirabilis
gtgatatctgtagctgcactaacattaccatcgaacattccatttatatttgatatttcacctgtgatatcaataccgttgcgttttacaaaagttttaaatttaggtcttaatgcaaaattacctaagaaattatcaactccacgaatatatccaccagctgataatcttgcatttgctgcatacggagacgcctccggtaggatattcttgtattggaatgatgaattaacaatgttatttaagccaggtacatcttcatga

SEQ ID NO: 310687 - DNA, 201 bp, Proteus mirabilis
atgacacccatagaggctacctatcgcttatttgatgagaaagacaaaggaacagcaattactcgatggaaattatttgtgaaagatgtgtcgatggatcatgaaagtgtcactgtcacgctatctatgagtaacccattgaataaaaacattggacgcatttatgaaccgcaagaatggccgggcttggaggctgtatga

SEQ ID NO: 310688 - DNA, 201 bp, Proteus mirabilis
atgacacccatagaggctacttatcgcttatttgatgagaaagacaaaggtaaggccattactcgatggaaattatttgtgaaagatgtgtcgatggaccatgaaagtgtgactgtcacgctatctatgagtaacccattgaataaaaacatcggacgtatttatgagccacaagaatggccaggcttggaggctgtatga

SEQ ID NO: 310689 - DNA, 393 bp, Proteus mirabilis; identical to SEQ ID NO: 296427

SEQ ID NO: 310690 - DNA, 255 bp, Proteus mirabilis
atgcaaatttcatacagatactcgaacggaactcgggtagtagacggcaaaacagtcatggaatttgatgaaagtagcaagcttagtattgagacaggaagtttcgctgagctggctaaattaacggaaattgaccccgtggaagccctgcaatggattatgcagttcgacaaggaagagtttgacaggattgtcaatgaagcaagcaaggacgcccctatttctaagctagctctgctaaggagggttgcgtga

SEQ ID NO: 310691 - DNA, 255 bp, Proteus mirabilis
atgcaaatttcatacagctactcgaacggaactcgagtagtagatggaaaaacagtcatggagtttgacgaaagtagcaagcttagcattgagacaggaggttttgctgagttggctaaattaacggaaattgaccccgtggaagccctgcaatggattatgcagttcgacaaggaagagtttgacaggattgtcaatgaagcaagcaaggacgcccctatttctaagctggctctgctaaggagggttgcgtga

SEQ ID NO: 310692 - DNA, 255 bp, Proteus mirabilis
atgcaaatttcatacagatactcgaacggaactcgggtagtagacggcaaaacagtcatggaatttgatgaaagtagcaagcttagtattgagacaggaagtttcgctgagctggctaaattaacggaaattgaccccgtggaagccctgcaatggattatgcagttcgacaaggaagagtttgacaggattgtcaatgaagcaagcaaggacgcccctatttctaagctggctctgctaaggagggttgcgtga

SEQ ID NO: 310693 - DNA, 255 bp, Proteus mirabilis; identical to SEQ ID NO: 310692

SEQ ID NO: 310694 - DNA, 1581 bp, Proteus mirabilis
atgaaacagaatttaccggtcaccggcgtggagcagcgtttttctgctcaagccaatattctatcgaccactaatcttgatggcaaaatcacttatattaacaaagactttattgatatcagcggcttcagcaaagaagagctaaaaggtcagaaccaccacattgtccgccaccctgatatgccacccgccgtatttaaattgttttgggctgatttacgcgccgaaaaatcctggatgggtattgtcaaaaatcgctgtaaaaacggtgaccattactgggttgatgcttatgcaacgccgattaaaaagaatggcagaatcgaggaatatcaatcggtaaggcgtaaagcaaagcctgaatttattactcgggcagaagaagtttacgccgccatccaggctggaaaatctttacgcaagctgggcgattcactatcgctgcccgccaaaatattgattacactctttgccggcttactattgccggtactggtttatctcttaaactactccgccttactcgtactattagccacaatttttagtacctttgttgtcagcgccgcagtcttcgtctttagccaacctttactgctcgcattaacgaaactcaaaaccatttctgaagataaggtcgcgcgctacgtctacaccggtcgaaatgatgaagccgggactttgttactggcggttaaaaaacttgagtctgagaacgcggcattaattggccgcatcaatgatatgtcgtcaaccttaagtgaaaatgcccatagtttaagtgctgccgtaacacaatctgaaaatggcaccttacgtcagtttgaacaaacagagcaggttgcaacggcaatggaacagatggccgtgagtatccaaagcgtatccatcaacgcagccgaaacttctaccgcctctgctgacggactggcaattgccaactccggcaaacaggttgttgatgaaaatgccagcaccattaatgaattgaaacgtctcattcactcggcgtcgcaggtcatcaataacgttgccataagcagcaatgaaattgaaaaaatcctcgacgttattctcgccattgccgaccagactaatttgttggcgttaaacgcagccattgaagctgcacgagcaggtgagcttggccggggcttcgcggttgttgccgatgaagtgcgctctttggccaatcgcacccaagaatccactaaagacatccgcggcgtcattgagcaattacaaagtggtgtccgacaagccgtcagtgccatgcgatccggtgaagcggcagcggaacagagtgtggcaaaaagccatgccacggcgcaggctctggaaaatatcctgaatgcgattagcacgatttccagcatgagcgagcaaattgcgcgggcagtaaatgaacaaacgtcggtggtaaactcggtcagtgaaagcgtgcatattataaaaagtaatgcgcaggaaaacctcgatgccgttaaattaagcggaaaggttgccgaaaagacggtcaatatcaccagaagattggatcagctaaccaatcagttctgggagacacagcaagggatctag

SEQ ID NO: 310695 - DNA, 1017 bp, Proteus mirabilis
atggctgcgcctgagtttatgcgtgaagtgcttgaaaaagcactggctgtgcatcttccagatatgcttactctgcgagagaagtataaagacgtttttgaacgtattattttgcaagatggcaccagtttcgcggtgcatggcgacttaatgcactattttccaggccgttttaacgtacacaaccctgctgcggttgagttgcatgtcacctatgatgtgttcaaaggacaaccacagcgcgtaagcctgaccgaagatattgcgccagagcgggagtatttgccatcagcctcatccttagctggttgcttatttatggcagatgcaggttatttttcaaagatttatatacagcaactgcaagatgcctgtgcatattttattatgcgaatgagtaatagtattaatccaatggcggtttgcaccaagactcagcaagtgaaaccgttgaaaacatggttaaaagcattacccggtgcaggcgtattggatttagatgtgcaatggccgaatggcccggtttatcgttgcgttgcctttgcagcattagatcacaaaaaacgcaatgtattggtctgcaccaaccttgaccgtgagcagtttcctgcggctgttgtgggggatttttaccgtgtgcgctggcaaatagaattattattcaaagaatggaagtcgatgaataatttaaataaattcgatacaagtcatgccacaatcgtcgagacgttaatttggggtagcttgctggtggcaaccttaaaacgctggcttatcaacgcggcaggaaagaagtataaccgggtgctgtcgctttttaccggcgcaaaaactgcccatatatggtggctaccgttctgcttcgatatagtggtaagccgtggtgcggatttagcaaaagctttgaacaacgcgctggcatttttagcacgacattgccaacgccagaatgtgagacgggaccgaataagtggtgtatttaaactgctatataatacaaatgaatcattgagttag

SEQ ID NO: 310696 - DNA, 1449 bp, Proteus mirabilis
atgcaacggtcaatggacactggtgaaatgatgctctccggttgggttcgactgcagcaggaagtcggagttcatgagcaaacagggtttctgatatatcaagccgtgtatgataaagacctaccggctgctacggtggcagagcgccgggcaagtttgctgggttgggtttatgcaccgtttcgcatgactgacttcctagaaggacttatgggagagcaagaacgcgatctggttatagacattttcgatggcaaagaattgcgtgtcgcggcgcaaactcactttggtagtttaaatagagatgatgtttggccagagtttgagtcagtccatcagttagatttgctggggcaaacctggacattacgcattcaagcaagtaagagccttttgcaacgagtcgagaccgggttgccgagagttattgttttaactggtgtcatgttgagtggtatgttgtctgttttagtttttatactaatttcaggccggtcgagagcagaagctctggcgagggagatgatagaggacctttcaatggaaagggttagattgaatgcttttctggaaggtacccgcgtcggtacctgggagtggcacgttcaaactggtgaaactatgtttaaccagaaatgggcagagattattggctacaagcttgaagagcttgggccaatctccatagaaacttggatcaaactcacacacccggacgattttaaaaagtcagaacagttgctcaagcaacactttttgggtgagacacctttttatgagtgcgaggctcgcatgcgtcataaggacggacactgggtgtgggttcttgaccgtggcaaggttgggaagtgggatgatgaaggtaagcccatcattatttatggcacccatcaggatatcacccgcagtaaacttcaactggaaacttaccaccgagaggcctatcacgacgttttgactgacctccctaaccgacaattgtttaatgaccgcatttcgcaggcacttgccctggcagagcgcgaaaaaacgcatctggctgtgttcttcattgatctggatgggtttaagacagtcaacgatatctatggtcatgaagccggcgatgttgtgcttaaaacggtagctaagagaattgaacagtgcatacgcgcatcggatacgcttgccagattcggaggagatgagtttgtagtgctgctacaagatatcgttgacgaacaagaggctatcgataaggcgactaagttcatcgccgaagttaagtcccccatatctctgcctgctggtagtgaagcaaacatttcaatgagtgttggtatcgcgctgtacccacagcatgggataacaagcgaacaactttgtaagcgggctgaccaagcaatgtatcaggtgaaaaaaggctcaaaaaatggtgcgttagtttatcagaacgatgattcaatttag

SEQ ID NO: 310697 - DNA, 1566 bp, Proteus mirabilis
atgaaaaagaaatctacaccacttccggacgatgttgaactgctcaagaaaatgctgcttgagcaacaggccaaattagaacgccaactcgcccagaaagacaaacgcatcgtcaaattagagacgctcaatcaaaaactgactgagcgcattcagcgctttgaagaagtccttaatctggcgcagcacaagcggtttagccccagcagcgaaacctacgaaggcgatggtcaggtctttaacgaagcggaacacattgctgagactgacgttgagcagccatcggaaacacaagcgccagccgacgaaacgacagataaacagcctgccaaaccgcgtcgtcctcgcattaccccagagttgccgcgtattgaagtgctgcacgatatcgacaccaaaacctgcacctgctgcgggaatgaattgcatcggatgggcgaggaagtcagcgagcagattgagtttatccctgctgaaatccgcgtgataaaacacgtacgtccaaaatacagctgccgcacctgtgagcgtgaaggcactgaagtggcgatacagattgccgatgtccctgacaccctcttccccaaaagtatggcgacccccagcttagtggctcaaatcatcagcgccaaaatgcactatggtctgcctctgtaccggcaggaaaagatgtttagcgaggcaggcattgaactgagccgccagaccatgagccgttggctgattagttgcgccgacaagctggaaccgttgttagcgctgatgaaaacggaactgttaaagcaaccggcactgtgggccgacgagaccacattagatgtgctggaggtggataaaagcacctgctacatgtgggtgtacggctgtggcgtagaaggctcagccggtgtaaaactggtgctgttcgattaccaggatggccgcagcggtcagcatgccgtgcagttccttgatggctacaacggctatctacaagtcgatgggtatgccggttatgaacaaacatccgctaccttagctggttgttgggcacatgcgcgtcgtaagtttattgaagcgcaacaggcgcaaggcaaaggtaagaccggtaaagccgactgggcgataaaccaaatccagaagttgtatgcactggaaagcaaactgaaaacccagtcagcacaaataaaacagcagcaacgccaacagcttgctgcaccgctcctgaaacaactctgggattggctggaaaaatccaaagacaccatccccaaagaaagcctggtcagcaaagccatcagctacacacaaaaacagtggccgaagttgatacgctatctggacgatggccaactgaacatcgacaacaacagagccgagcgggcagtgaagccctttgtgattggtcgtaaagcatggttgtttgccaacaccaaaaccggagccaaagccagtgctgcactgtacagtctggtcgaaacggccaaaatcaacggcttagagccttatcactatctaacacagctgtttgagcaactgccaacagcaaacacgcctgaagcattagctaaactgctgccctactaa

SEQ ID NO: 310698 - DNA, 240 bp, Proteus mirabilis
atgttaattgaactgcaaaaacatttcacagaaagggatcatgctttccttatgtcattcaaaagaggacaacctgactgggcattgtttgactatcctaaagcagcagacttgccagcgattcgttggaagttgcagaacattaacaaattggcaaagaatcaagcaaaacatcaagagcaattagataaattgaagcaagtgcttgatgattggcttgttaacgcaaacgccgagtaa

SEQ ID NO: 310699 - DNA, 513 bp, Proteus mirabilis
atgtccatttttggcaaacatctgtcaccgtacgctctgttgtccatatcgggcctgctggcagcgtctgatcaggccataaaatggctggtgcaacaatcaatggcatatggcgagtctatttcagtgacctcattctttaactgggtacacgtatggaataccggtgccgcattcagtctttttgcgaatggtggaggctggcagcgctacttttttatcggaatcgcggtagtggtctcgatttttctgatcaagctgatccttgaaaatcgtcataaaggagaagccatcgcttacagtcttatcctcggtggcgccatgggcaacctgattgaccgggtctttcgcggctatgttgtggattcctttgatttctattggcgagactggcattggccggccttcaacctggctgatattgcaattgtcctcggtgccttacttttagtttccagcagcttgttgggtaaaaaagcaaacaccaatgctgagtcggatggatctgactga

SEQ ID NO: 310700 - DNA, 651 bp, Proteus mirabilis
ttgcgtgatccagcggacgaaggccgcacccatgaaatgaccttgcccggcggatcgggcgcgcggatcggctacgcccgcgtgtccacgccggagcaggacatgagcttgcagatcgacgcgctagagcgcgccggttgctcccgcatttttcaggacgtggcgagcggtgcgaaggccgagcgcaaggggctggacgaggcgttggcctacctgcgccccggtgacacgcttgtggtgtggaagatcgaccggctaggccggtcgctcgcgcatcttgtcggcgtggtggaggacttgcgcagccgaggaatcggctttcggtcgctcaccgatccgggcatggacaccaccacggccagcggcgcgctgattttccatatcttcggcgcgctggccgcgttcgagcgcgagctaatccgcgagcgcaccaaggccggtttagccgtggcggccgcgcgcggccgacgcggcggccgaaggccagttgtcaccgctgccgtgctgaaacgggcaaaggccctgatgcacgacaaggggttgacggtgcgcgaggcggcgggcgcgctcaagataggaaagaccgccctttatgatgcgctccgagccgatgagatcgagcggcaggagaaggcggccaagactcggtaa

SEQ ID NO: 310701 - DNA, 345 bp, Proteus mirabilis; identical to SEQ ID NO: 57068

SEQ ID NO: 310702 - DNA, 2424 bp, Proteus mirabilis
atggatcatagtgtacataacaagctcatctcatttatttggaatattgccgacgactgtttacgggatgtgtacgttcgcggtaagtaccgtgatgtgattttacctatggtggtattacgacgtttagatacgttacttgaacccaccaaagaagcggtgcttgaagaggtaaagttccaaaaagaagagatgcaagccacggagcttgatgatgaaccattgaaggcggccagtggctatgtcttttacaatacatctaaatggacgctgaaatccctattcaacaccgcaacaaataaccaacagatattactcgccaactttgaagagtacctgcttggctttagcgataatgttaaagagatcattgaatgctttaaccttaaatcgcaaattcgtcacatggcctcaaagcaagtccttcttgatgtcgtcgaaaagtttgtttccccttacatcaatttaactcatgaaacggtcgaagacccggatggcaacaagatgccagcccttactaacctgggtatgggttatgtgttcgaagagttgatccgcaagttcaacgaagaaaacaatgaagaagcaggcgaacactttacgccacgtgaagttattgaactgatgacgcacctggtgtttgaccctgtgaaagaccagttgccgcttaccatgacagtatatgatcctgcgtgtggtagtggtggtatgttgactgaatctcaaaacttcattgaagagaaataccctaacgacagccgtgatgtttacctttacggcaaagagatcaacgacgagacctacgcgatttgtaaatcggacatgatgatcaaaggcaacaaccctgagaacatcaaagtaggctcaaccttgtctaccgatgagttcgcggcttcacgctttgactttatgttgtctaacccgccatatggtaagagttgggcgtctgaacagaagcacattaaagacggcagtgatgtgattgacccgcgttttaaggttagcctgaaagactattggggaaatctcgaagtggtggatgccacgccacgttcaagtgatggccagctgctcttcttaatggaaatggtcaacaagatgaaagatccaagcgtaagcccattaggcagccggattgcttctgttcataatggctcatcgctctttaccggtgatgcgggcggtggtgaaagtaacattcgtcgcttcatcattgaaaacgacatgctagatgccatcgttcagttacctaataacctgttctataacaccggcattaccacttacatttgggtgttgaacaacaataaacccgaggcacgtaaaggtaaggtgcaactgattgatgccagcttgctataccgtaagttgcgtaagaacttaggtaacaaaaactgcgaatttgcgcctgcgcacatcacggaaattaccgatacttacctcgcgtgtgtgggcgttgaaagagcacttgatgcaaacaatgatcctgttggcatagccagcaaagtgtttagcaatgacgactttggctattacaaagtcactatcgagcgcccagaccgccgaagagccaagttcactcaagacgcaatagccccactgcgttttgataagcagcttagtgaagtgatggagtacgtgtacgcagagcacggcgaacgtgtttacgaaaaaactggctatggtactgaaaagaaaaagagcttcttgaaatccattgagaaagacattctttcttggtgtgaagataacgacatcagtctcaatgccaaagctaaagcaaaactgctcgatgtgaaacattggctggcgcttaaagcattgcttgaaacggcagaaacgctgatggctgacatcggtagcattgaatttgatgacttcaatagttttaaaacccaagttgataaatcgctaaaagcccatgctattaagctttcagcacctgagaaaaatgccatcctgaacgcggtgagctggtatgacgaaaccgccaagaaagtggtgaaaaagatcgttaaattaacgggtgataaattaaacgacctgctggagcgctatgagtgtgaagtcgctgacctgccagattttggttattaccccgttcctacaacagaaggcggcaaaaaaggcgagttcattacttacgagaccaactcagacctgcgtgacacagaatctgtcccactgaagcaaagcatttaccagtacttcctagacgaagtgaagcctcatgttgatgaagcatggataaacctagatacggtaaaaattggctatgaaatcagcttcaataagtatttctaccgtcataaaccgctgcgtagtttagaggaggtcgcaaccgatattatcaacctagaacaaaaagccgaaggtcttattgcgcagatattgggcgtcgcagtagaaaaggttcaggggtaa

SEQ ID NO: 310703 - DNA, 1290 bp, Proteus mirabilis
atgataaatattgctgaaatgcctaaatatcaaacttacaaggactctaccgagggctggattggtgatgtaccggaacactgggatattagaaagttaaagcatctcttttatgaaaagaagcatcggccaaatatgagcttgaatagcggtgctattagttttggaaaagttgttacaaaagatgatgaaaagatattactgagcactaaagcctcttatcaggaggtattatctggtgagtttttaataaatccgttaaatcttaattacgacttgatcagtttgagaattgctctttcagaaatcgatgtggttgttagtgcaggatatatcgtcattaaagaaaaggaagaactgcaaaagcagtatttcaaatatcttttgcacagatacgatgttgcttacatgaagctattgggttcaggggtacgacaaacaattagttttaaccatattgcgaatagcttgctggtatttccacctctagaagaacaatcccttattgccaactacctcgaaaagaaaacagcacaagtagacgaagctatagctatcaaagaacagcaaattagcctgctcaaagagcgtaagcagatcatcatccaacaggcggtgacccaagggcttgaccccaatgtgccaatgaaagactccggtgtggattggattggtaaggttccagcgcattgggaagtccgtcgtagcaagtttgtatttactcaaagaaaagagcgggcttggaaagatgacgtacagctttctgcaactcaagcttatggtgttataccgcaagaccagtatgaagagttaacgggtaaacgcgttgtcaaaattcagtttcatttagataaaagaaagcacgtcgaaaaggacgactttgtaatcagcatgagaagtttccaaggcggcttagagcgtgcctggtcgcaaggatgtatccggtcctcctatgtagtcctgagagcattagatgaaattgatccttctttctatgggtatttattaaagctaccctcttacatcgcagctttgcagcagacagcaagtttcattagagatggtcaagacctaaattttgacaacttttcaaaggttgacttgtttattccgcccattgaagagcaaaaagaaatagctaactacgtcagcgcttttatgaagtcttctgatgaaggcattgagttgctatttgcacaaatcgaaaagctcaaagaatacaaaacctccctgatcaacagcgccgtgacagggaaaataaaaatcaccccagaaatgattgagcaatag

SEQ ID NO: 310704 - DNA, 1164 bp, Proteus mirabilis
atgttcacggtaaatcatcaaaccaacagaatcagtcctgttaggacaaagaagttcagtgagttgggctttacagagcgcaagcatcttcaggaatggttggcacacgagccttccgcactgggtgaagagctactgattattcaaaaggagtttgatggctttgatgatacccgtgaacgcctagatttactggcactggataaagatggcaacttggtcattattgaaaacaagctggacgacagtggccgagatgtggtgtggcaggcgcttaaatatgcctcgtactgtgcaagtttaaccaaagcgcaaatagttgaaatttaccagcagtacttagaccgctatgagcctgtagcaggagaggttgacctgttaaatacccctgcaagtgcatcggcgagaatatgtgagtttttggatgcgcccgatctcgatgagttaaaactcaacctgggtaacagccagcgcattatgttggttgcggcaaactttcgcaaggaagtgaccagcacagcgctatggttattgggtcaaggcattagcattgcctgcttcaaaatcactccttattcactgggtgaacagctactgattaatattgaccagatcatcccaacgccagaagcgaaagagttgatgatcggtattaatgctaaggaagcggaagaaaaaaccaccgaagtggtactaaaaaaccgccataccgtgcgtcgcgagtactgggagcgtgccttagaggcgtttcagaaaagcgcttgccaactctataacaatattagcccaagcaaagatcattggttatcagcaggctcagggctaagtggatgtccgtataacctgatatttctgcaaaaagagcttcgagtagagctttggatcagccgtggggttaccgaagagaataaatacctttttgattttttgagtcagtccaaacaagacattgagcatacttttggtgcagaacttgagtggatgagactggatgagaagaaatcttgccgtattcagttttcgaccaaagctgatgggtttaacaaagagacttggccccaagcggttgcgtggcacttagagcagatgacaaagttagaaaaagccttaaaaggaccgctgcaaaaagcggctgaggcaatgaaacagaagaattttgattaa

SEQ ID NO: 310705 - DNA, 3018 bp, Proteus mirabilis
atggtcagtcaaaccaatgaacaagcattagagtcggccattgagaaatgtctggctgggatcagtactgaagagctcaaagaggggctgagtcagcagtcactgggtgctggatacttcattggtgctgctagtgactttaatatgcaatatgccattgatgaacgttttttctggcaatttctgcaaaagacacaagaagtagagttggccaaactgcaaaagaacaacccctcagattggcagcgtaagttactcgaacgatttgaccgactgattaagaagcatggcattcttcatttacttaagaaagggctaagcgtagacgatgctcacttcaatttgctctatccagcccctttggcaagcagcagtgaaaaggtaaagcaaaactttgcagacaacgtgtttagttgtactcgccaagtgcgctattccatggcaaatcccctacaagaaatcgacatggtattgtttatcaacggaataccattgataacgctggagttgaagaacgcatggacggggcaaacagcacgttatcacggccaaaagcagtatcgagatgatcgagatgcaacgcaagccttgctgacctttggccgctgcctagtgcatatggcggtcgataccgacgaagtgtatatgaccactaagttatcaggtggcagtaccttcttcttgccgttcaataaaggacacaatcttggacagggtaatccacctaacccaactggccataaaacggcatacctatggcaaaaagtattcactaaagaaagcttggcgaatattattcagcattttgtgcgtctggatggatcaagcaaagatccattaccaaagcgaaccttattcttttctcgataccaccaattggatgtggtgagaaaattggtagaccatgccgcccagcacggtgtcggtcagacttacttaattcaacactctgccgggtcaggtaagtctaattcgattacctgggctgcttatcagttaattgaaacctatcctgcttcgtctgatgtagccggtggaaaaagcctggagcagccgttatttgactctgtaattgtggttaccgatagacgcttattggacaagcagctgcgggataacattaaagagttttctgaagtaaagaacattattgccccggcgaacaagtcttctgagcttaagcaggcgctggagaatggcaaaaagatcatcataacgacgattcagaaatttccgttcattattgatggtatcgccgatctcagtgacaagcgctttgcggtgatcatcgatgaagcacacagctcacagtctggttcggcgcatgacaatatgaaccgagcgatgggcaagtctgaagtcgaagaggccgaagatgcccaggataaaatccttcaggcgatgaaatcgcgcaagatgcgcgggaatgcgtcgtacctggcatttacagcgacaccaaaaaacagcactttagagaaatttggtcaacgccaagaagatggctctttcaagccgtttcacttgtattcgatgaaacaagccattgaagaaggcttcatcttggatgtcctggcaaattatacgacgtacaaaagttattatgagattgagaaatcaatcgctgataaccctgagtttgataccaaaaaggcacagaaaaaactcagagcttatgtagagcgaagccagcaaacaattgataccaaggcagagattatgctggagcattttgttccacatgtcgtgaatgcgaaaaagctcaaaggtaaaggtaagggaatggtggtcactcaaaatattgagacggccattcgatactacaaagcgattaagcggacacttgaggagcaaggaaacccgtttaaagttgccattgctttctcaggaaccaaagaagttgacggtattgaatataccgaagcagatattaatggttttgccgagtcagataccaaagatatgtttgataccgatgagtatcgacttttagtggttgctaacaagtatctgactgggtttgaccagcctaagctttgcgccatgtatgtggacaagaagctcgccagtgtcttatgtgtacagacattgtctcgtctcaatcgaagtgcgcctaaatggggtaaaaaaactgaagacctgtttgttttagattttttcaactcggttgaagatattcagtcagcattcgatcctttctacacagcaacgtcattgtcgcaggctacagatataaacgtgctgcacgagttgaaagatgaaatggacgatgtcggtgtgtacgagtggtatgaggttgaagactttgtgacgcgctatttcaagaatgaagacgctcagacactcagcccaatcattgatgttgcagcagctcggtttgaccatgagctggagcttgaagctgaagctaaagtggactttaagattaaagccaagcagttcgtgaaaatctatgggcagatggcttctatcatgccttatgaaatggtcagctgggaaaaactgttttggttcctgaagtttttaataccgaaattgaaagtggaagatcccgatgcagatgctattgatgagcttctcgattctgtcgatctgagttcatacggtttgcaacgtgtgaagcttaaccacagcattaaacttagtgaccaagaagcggagcttgatcctcaaaatccgaacccacgtggggcgcatggcggtgaaaaagaaactgacccgctggatgaaatcattcgcacatttaatgaacgatggttccaaggctggagtgccacacctgaagagcaaaaagttaagtttgtgaacatcgctgagagtatccgcaatcacccagattttgaatctaaatacaaaaacaacccagatcctcataatcgagatttggctttcgaaaaaatgctcaaggaaattatgctgcaacgccgtaaagacgaacttgagctctacaagttgttcgcaggagattcagcatttaaagcgtcgtggacgcaaagtatgcaacgaatggtaggtatgtag

SEQ ID NO: 310706 - DNA, 1086 bp, Proteus mirabilis
ttgctgaaggcagtctcagagttattagatgggtcaccaggcctgaaaggacgtcaaattgccaaggagctgggactggataagtcccaagtgaactcgtttcttcacaaaaaccaggatacgtttgtgaaaaactcaaatcatgaatggtgcttgatacgggctcagcatgtggaaattgatttcggtacaggttggattgatgagaaagcctttgagagtgctatcggtaagcttgcgtatcaaaaagatgcaaacaagataacatttagattcggcatcgattgtaagtttttgctgatagcattggcccgttttcttgctctcgcgaatcagcttactgcgtatggtaaggatgtggtgatggatactacagcatgtcctaatactcacagttttttcagcagaaatggcttctttgattatcttaatcaaagtgtcacttgtcttcctgaaaggcccgttttgtcagctgctaaaacttatcgggataatagcgataccttggtcgaactaggagaaattgcacagccaacccaaaacaaggagcttgtaattcgtttgggcgacaggtttgtagagcattcttcagctagctatttcttagcggctaagactgttttttcagagcttgtaggcaacgttactgatcacagtgaatccaaaatacctggactagcaggtctgcaagtgtatcgaccatataataaaccaaagcatattcaaacagtcatatccgactctggtttaggtattgccgctaccttgagaacaacgttacaaagtgaacatccgaagttgtacgcacagttttcagcggaaactgttgagaatgacattgcgctcgttcaaaaagcatttacatctggtgaggttagtcgctttggtaaaggccgggggctaggctttaagagtagtcgagagcacgctagcaaagagaaagttatcattgttattaggcagctaactttctcattggctttggaatatgcgaagggtcaactcatcaatgtttctgaagatagagggttggtccctatcacaggaacccatatctgttttgacttctatgttgacaatttctga

SEQ ID NO: 310707 - DNA, 552 bp, Proteus mirabilis
atgaaacagttaactcataaaattcttctttcagaagtcgtaggttctgaccatgcctttggtaacgatgaaggtagtgaagcctatgtgaagattaaaaagatcgttgatggtcacccatcatgcgatatttttgctattagcttggaagggattcgattcactgatgcttcatttcctcgtgaaagtgtaatctcgttggctaaagcattgaaaggagaaaaaggtttttacctttctaatgtaccgagtcgtgaccttctggacaattggtcttatggcgctacagccaaggatcaacctcttctagtcaagagtgatagcggttacgaagtgctcggtgtgaaacttagtgcgactgtcaaagagcttctagattttgttattgcaaaaaagacagtgacttcgtcacatgtatctaagcactttgacatttcagcacagaatgccagtggtcgattaaagaagcttcatgctacaggtcttgtgttaggtcaaaaagaagtggcagagtcaggtggactggagtttgtctaccgatcaattgtgtag

SEQ ID NO: 310708 - DNA, 174 bp, Proteus mirabilis
atggctacaaatcccccatcaggtgacggacacagaaacggtgccgttaaaggtagatctcagactcagacgccaagtggacattgggtaaagcgagatgctgatactggtcgattcatggatgtaaagacatctgacaaaacgccttttaaaggcgtcaggaaggagaaatag

SEQ ID NO: 310709 - DNA, 369 bp, Proteus mirabilis
ttggctaatggtaaaacccatttggtcgtcggggctgcggttggtttaaccgttgccctagcggacaacaaaaaacaagctgtcagtcaccatcctgtaactgccattacggttggctctctatttggcaagcttccagatattctggaaccctctttgggtaaccctcaccatcgccagttttgccacagtctattggtgttaactgcactaggtgttggtctcaaacatttgtatgagtggcaaccggaagaggcaattgataagtgtcttcgcgggctggggctaatcgccggatgtgcttatgtcagccatttgctctgtgatgcgacaacaccgcgctcacttcctttaattggcaaactatag

SEQ ID NO: 310710 - DNA, 1155 bp, Proteus mirabilis
atggtcgttgaagtcacgaggcacattaagcgtcctgttgagcgggagctttgggctcgcgcagctgctcgttgtcagtttagcgggtgtaataaattgttatacaaatcagcggtgacccaggaatcggtcaatgtctctcaaaatgctcatatttacgcattttctgagaatgggcctcgtggttggggactctttaaaaccaagccaaccagcttgaatgacgtcagcaacctcatgttgatgtgctatgactgtcacaaaaaaattgaccagaaaggcagcgaagataggtatccagccgatctcttgattagttggaaaatgcagcatgagcaacgtatagaaatcctcacaggcattgctcctgatcgcaaatcaaatgttgttttatatggtgccaatattggaactgaaagatcaccgattaattatcacggttgtgttgaggcaatgtttccgaattggtatccggcaactgaaaagccagtgacactatccatggtatcagagctgaaggatcactctgaacaatattggcaagcagagtcgcaacacctaacgaagcgttttcaaagtaaaatttcatcgatcatcgaagaggattcttgtaagcatttttcattgttcgcgttagctcctcagccattgttaataaaacttggcgctttgcttaccgacaaaattgaggtcgagacttatcagctgcatcgagagcctaaaggctggttttggcaagactgttcagatgattttgagtacatcatcaacagacctcaaaatatggaggggaagcctgccctggtactttctttgagtgaccatgtgtcgcatgagcgaattactcgggttgtagggccagatacatcgatttgggaagtgactatcaagcaccctcataatgatttcatgcagtcaaaacagcagctctctttgttcagaaagtgcataagaaagctgattgttgaaatcaaaaatacacacggggatgccacgccactgcaaatatttcctgtgatgccagtatcgtgtgccgtcgaattaggacgggccagaatgcctaaggctgatatgccatggcttatttatgaccacgacataaaaacacaacaatttgtaatggcagtcgagcttcgaggagaccttcatgagtaa

SEQ ID NO: 310711 - DNA, 1191 bp, Proteus mirabilis
atgagtaatactaaaagtaacgatgttctaaacacaattctggaaaaaattgagctaccagagagtgcttatgaaaaggctgaaaaacgctataaggatctaggtgattggttacatcgcccagagtcaacatgcgtgaattttgatccccacgtgttttctcaagggtcctttcgtttaggtacggcgattaggcccgattcagaagaacagtatgacctagacatggggtgcaatcttcggcgtggcctggataaaacgtctatcactcaaaagcaactaaagcaccaagtcggtcatgaattagagctttatcgaaacgccagaggaattaaggaagagctagccgagaagaaacgctgttggcgcttagagtatgccgatggtcttagctttcacatggacatagttccgtgtgtgccagagagtgatacaggaagaggacttttgaaaaagcggatggtcgaaaactctaagtttgatgaaaacttggctcaaaacgtgtctcagcttgcagtttcgattaccgacaacacagattccacttatgcagttgtgaatgaaaactggcgtatcagcaatcctgaaggatatgctcgatggtttgaaacgcgcatgaagacggcacggttagtgataaacgaacgtgaaatgcgatttaaagccagtatagatagtctgccatattatcaatggaagacacccttacagcaggttatccaattattgaagcgtcatcgtgacactatgtttaaaaacaatgaggatagtaagccaatatcggtaatcatcactacattggcggctaaatcgtataaaggtgaaagtgatttggcttcagcgttgaatacggtgctctccgagatggatgaccatatttctgcacaagcaccaatgattccgaacccagtcaacccagccgaagattttgcagacaagtggtatgacgaaaaatctgctcaataccgattacaagaaaacttttataaatggctgtatcaagctagagctgactttagtgcgctttgctcaagtgatgatacgcaacgaatagtaaatgcggcgcaaaatggtttggatttgaagcttgattcaagttcggtagcacgtctattgggtattcctgcggtgacaacaaaaccaactttcgcaattcaatcatctgatccaaagccatggtttaagcaatag

SEQ ID NO: 310712 - DNA, 696 bp, Proteus mirabilis
gtgggcctagaggcttttctctcggcctatccgaacattagattagtagatgtccatgcagataagattgagttgcagggagagtatcagttaaaagcacagctagctggaagtcggtttattgagcgaacattttctctaaggattgtatgcccaagtgagtatcctagggctttaccagtggtgtttgatacagctggttactttcctcgtaatcaggacttccatacttactctgatggatcattttgtcttggctcagacctaaaaattaagtcaattttgaaagccgactcgtcattgacaacctttttcgaaaagattgttgtcaggtttctttattcggtgtcccatagggttgaatttggcaactttccctatggcgaactggaccatggtgagaaaggcctgattgatgattattctcagttgttcaatgttaatggtaaagcatcggttctacgggcactgaaagcgttaggtttgcgcaagcgtgaggcaaataaattaccttgtccatgtggttgtggtgatcgtcttggctcgtgtgactatcggtttgtcttgaacgagtttcgtcaagttgagcgccgccgatggtttcgcgatcacctacaagaagcttttacaccgattgaaaaacccaaaaggagagttgggaaaaaaactaaaaggccaagtagaaatacgccttag

SEQ ID NO: 310713 - DNA, 279 bp, Proteus mirabilis
atgagtctgcaaaaactgaaacaacgtgctttagccaatgctgatgttaagaatgagtacgataagcttgagagtgagttcagctttattgaccaattgcttaccatgagaacaaaggcaggacttactcaagaacaagttgctgaaagaatgcatacccaaaagagtaacgtcagtcgtttagaaaaaggtaatgccaatccaagttggtcaactcttctaaaatatgctcacgcatgtggctttgaattaacactcaagccacaaaaaatgagttaa

SEQ ID NO: 310714 - DNA, 324 bp, Proteus mirabilis
atgagctggaagatcgacttttacgatggcgttgaggagcagatcctcgatatgcctccaaaaatacaagctcgcatgattaagcttttagagctgatggaaaagcatggtgcaaacttggggcctcctcatactgagtctatgggcgatgggttatttgaaatccgcgccaaagctcaagaaggtattggtagaggcttattttgctacttaaaagggaagcacatttatgtgttacacgcttttgtaaaaaaatctcaaaagacgcccaaaaatgagcttaatcttgccagagatagacaaaaagaggttcaaaaatcatga

SEQ ID NO: 310715 - DNA, 2019 bp, Proteus mirabilis; identical to SEQ ID NO: 57049

SEQ ID NO: 310716 - DNA, 354 bp, Proteus mirabilis; identical to SEQ ID NO: 57048

SEQ ID NO: 310717 - DNA, 2259 bp, Proteus mirabilis
atgaaaaaacaattaaatacaaactatcgtcttgtctggagcgctgtccaaaacgcgttgattgccgtctctgaactaacccatgcaaaaggtaagaaaacagcgggtatcatcgcactttcagcattatcatcactggcttcaatacctgcctttgccgatgatagccgttgtgtcaatggcacaacagtgaccgataattgcaccgttgaggctggggaaacagtgtcaaatatgaccgttaaggaaaatggcaatttacgagtaaacggtgaatcaaataataccgttttaacaggacagaaaaatccaaccggttcaggggcgtcatttgatgatggaagtcggtatgattcagcgacagaatgggtttatggcacggcgacgggcaccatcatcaatgcaggtgggatccaaaaggtcgacggtggtacagccgaccaatcaaaagtcaattatcacggtgtattagaagttaacaacgggggcgcaatcactaattcaacagtaggctctaatgatgccgttgatgggttaaaaaccgatgaagcctatatttctgttatcggtaatggtagttcagctaagaacacccatattaacaatggtggcgttctgagtgcgtcagaaggagctatcgtcacggatacaaccatcaatgccggagggcgtctagaactttcagtggataatgacctcgataacaacgagtttaggacgaatgcaggcataactacagctaatggtgtaacaattaataaagatggcatactggcgcttgataaggatacaaaagcaaccgatgtggccgtcaatgaaggcggcaccctatgggctgaaaatggcgctattcttgaaaatataacgaccgttggaggagaaactaaagttcaaaatgccacactcactggtagcaacgtctttaatcagcaaggaacattgaccgtctcaggggatgtatctgcggaaatcattgagttgtatgatgccaatattcaatttgagggggcgtctgtttcacaagcctcttatcgccgtaacacaccagagttcaatgcggggcatcttaccgtgaaagaactgaaaggtgaaggtgacaataacaacattactctgcgtatagatgccacatcgggagagcatgacacattacaagtgactgacgctattgacgggcattttaatgtcaatattaacagtcaaggtaaagaaataaacacatcggcgttagattcaagtttcattgaagcaaaaggcagtgatgctcatacgttctctggtgatactgatattggcgcttacaactattcgctttaccaagatggcgatgactggcggctccaacgcagcggcaatttatcggcatcttcgagcaatgccatgatgctcgcaaacgtcacaccaacaatttgggcgagcgaattatccgtcttacgcaaccgcctaggcgaactccacgcagattctgaacaaaatggtgtgtggctgaaatacataactgcccgtaaccgcgttaataataaccagacaagctacaaacaggacatgaacgggtttgtcctcggcggcgatcgacagcttgatgtaactaatggaaaactgttcctcggcagtcagttcggttattcctactcatctcttgatgcagcaagcagcgacggacaagtcaaaagttacagtttaggcctctatgcgacatggttacacaatagcggctactacgtcgatggcgtactcaaaggaaatcgattctttagtgagaataatgcacgcttcaatcaaggtacatcgaaagccaatgatgcgaccaatggaattggattctctcttgaaggggggaaacatattaatatcaatacgtaccaaattgaaccttatgttcaactcgctggattccaaggacaaaaaacacactacacgtttgataatgatcttcatgttaatgcgaatgcaacccgctctttaaaagctgagataggtacaacattgggtaaagaatttacactacctaatggcggtaatgcaaaaccttatattcgtctggcggcaagccaagagtttatcaaaaataatgatgtcactatcaataataccgaacgctttaccaatgatatgtctggcttaacggggaaatatggtattggtatgaatacaaacattgttaaagatctggacatgtatggtgaatttaattatgccaaaggcaacaagcttgaaacaccgtacagtggcactgtggggataagatacagtttctaa

SEQ ID NO: 310718 - DNA, 501 bp, Proteus mirabilis
atgctaatggataaagatattctaaaccaaatatacccttacattggaagtgattcactaaaaaagctattattgatactaaaaaaaaccaatcctaaatttaataatcgtgatattaaaagcggtgatgctttgagcttaacacttagctactgcatagagattgcctataacgagttatttaattcattcgatgataatagcccctcacctcttccaccgcccaagacacccaaatcgcaactactttatggaatttttcagttggtgacatctttacgcgctaaaaacctaagtaacaaaaaaatcatcaactacttgaataaaaagcagatacctacgccagatcatgtcatgaacaaatatagcttagccctaattcaacaacatacccctagatggggactggctgatttaaccagtatccttacagaacaaaacaaagctgaagtgttactttatgaatacctagaagaattgaatcatcgggcacaaaaatag

SEQ ID NO: 310719 - DNA, 192 bp, Proteus mirabilis
atgcataaagatcaactactcaagattagcgatgtagtggagcgctgtaaggtatctaaagcgaccatttatcgctgggtgaaagcaggggaatttcctgcgcaatgtcaactcgtaccgtctggaagaaccgcacgttggttagctagcgatcttcatgattggttggagaaaaggaagattaatgaatga

SEQ ID NO: 310720 - DNA, 1068 bp, Proteus mirabilis
atgaatagtatgtcggcaaagcggattgatgatctcacttattcctgcgaagtgggtcgaaatgtaatgggacaattaataaaagcgagatttgataagttatctattgtctctacctgcgggtctaatatttcgaagttgatagatgaaagaattgagaaaatagacggtacagctaaatatactgtagaacgtcgttcttcgactggcgatatgggcaagtactaccgctcagaagtgttcattcgaagtaagcgcaaccgtaaccagtatttgttaatcaattttcatccaaccggaaaggggaagaggggagaatttcgctttgaattcagtcctcaacactttcgtaaaaaagagcttaatgctctctttatgtggttaggtagcgaaccgttattaggcgaatatttatttcagctcttaaaatcagcgtgggtgacacgtatagattatgcacttgatacttatggacttaacatcgatgattactttatccacctaaagagtgcaagcaaaggtaaggtcaataagaattcatcagatggtggggttggtattaatttgggcagtcgtaactctgaaatttatgcttctgtctatcctaaatgcgatgtaggaaaggatatatcggatgttgtagaggaagttgatgaactcggtaatgttttggttgatgtagaacagtatccgaaatttttacgcattgaattacgttaccagccacaaaaacaaaaactgttattacgtaagatgaataatatgcctaatttacttgaaaaagtgatcttcattgacactaaggtgacatctgaactagccgtgttagtttctgactataaagtgcggacattaccagaaataagggcatacattaaagagaaatacccgaaaaaagtagtgaagaagcttgatcgtttgttaaaaaaacatcatgtggagttgattgatcaccaaaaggtgtgggatcagctttacatactgaaatacgaccttgccattcttggcaatgatgctctttggcagaagaatttacgtgaaaaatgggctcttaaacacggttattaa

SEQ ID NO: 310721 - DNA, 1503 bp, Proteus mirabilis
atgacagcatatatcaccaaagataacattcttgttacagaagctacagtagaagcctataaagcgattgttctgagcgttccctttgataataccgtcgatcaacgtcaaaaacctcaatattacagtgaaattggcttgttcttacagcatattatctgtagtgcgacggttagcaaaaatacgaagaaaaaagcgaggtttaaaggaaataaaaaatggacgtactctgtgccattttccgctgaactggggaaagagaaattccctatgatttttaagcaaagtcgtgatttaggattagagcgcggtttagagtgcttagaacaagctaatattattaagattattccacatagctttgggatccataaatgtcgtgaatttgctttatctaaaagtgtccttaaagccttatttcccggtaaacgaaaggattatcttaaacgcaccgatcgctatacctatttgacgaatatttttgataagcgtaagaaacccgaaacactgtatgaattgatgttaaaaagctattataatgtaaagcctcctaagcataaaacatcgaaacgagccatcgaaaatgccaattttagacagcgtattatcggtgtgtatcaacaactcgaagcattaccgatcaaccttgataaactacaagaatattgtaatgaccatcctactgcaaaaaataagagcttttattttaattttatctctcatttgatggaggtaggtgtcaaggtgatgagtgaaacaccgctaatcgttgagtatcgacaagcgtataaaaccgccaaagtgggtagccgttcttttgaggtaggtacaggttttcaatatttacccagcaagatgaaatgggcatgtttagccaacgggtacaattatgatattaaaggctgccagttagctatcttagagcaagaattcaagaaatatgggattagcactgattcactatctgtactagaaactgactttatcaaagatacgctaggtgtagatgataatctcgttaaaactatccgctacggtactatatttaatgctggctctgttagtttgtcagcgaagggaagtatggtgaaaaagctacgaaagctctattccgacgattatgtatcagaaatactggaacattggaaattagagacaacagagctacgcgaaagcataaatcaactcattgacgagtatctaaaaataggaaagaaaaataggcatgggctttctgtcgtgaatgcggctgggcagccattcaatacgacaaagcgaaaaacaaaaaacgaggagtggaaggcgtggcgtcgtgatgtgatgagacgtaagctactcgcccacatgattcaaggactagaaagccgtgcagtctatgattatgtaaggtcgcacaacggtgtctgtgcactagaacacgatggatttgtgagtttgcatgagctgtctgatggtgattggaaacacgagtatttggagattgtgttgaaacatggttgttag

SEQ ID NO: 310722 - DNA, 5118 bp, Proteus mirabilis
atgagcgtggactcaaaaaagcaaagcaatccgttttcaacaggtggaggtggtgtaaattttgaaactagagttcaagcatcatttgctatcgcactacttactcaatcttgtgttccatgtttgtctcaaaatatgaggcctcaagaactaaaattccaaaataaatatgatggttcgaatactgatgattttgttttagtcgcatcagataaattgggtaataaaagtaaattatatgctcaaataaaacatgaaataacaataagtggatcgattggaagtgatgaaaatagttctattttttcagatgttataaagagtgcatgggaagatttccagaaggattcttttgataaaaaaaatgatgcgattgttttaatcacaggaccacttcctaagctggatatagccaatatgcttccactcttagaatgggctaggtattcatcaagtgcatcagactttattaaaaaatcaaatactaaaggatttactagtgcagcaaagctaaaaaagttagaggctttaagaaagcagttagatcatgctaatggtggtctggcaataactgacgaacagttttgggaatttcttcgagttttttatctaatttcttttgatttagatgctaaacattcggtagttgcccacttattatgttcacttattcaatgtcattctaatgaatcaccggaacttatattatctaaagtcattacgtgtgttcaggaatataaccagaatgcaggaacactaacgcttgaaaatattcctcaagaggttagagatttatttcaagttaatagtaaagttaattttgaaatggattttcttaaactccaagagcgtggacgtcacatttatgatggtatttcaaacaaaatccaaggctttcatgttagtagagatgattatttactagaaatttcagaagcttttgatacaagtgatttcgtatttgtaacaggatcgagaggttctggaaaatcaggcatagtaaaagattttatttcaagcaaaggtaaggatgtaccagttttttatctgagagctgaagacttagaccgaactcatcttaatgatgttttctcatctatcggtatgagttcaaccttaggtcaaattgaaggatatttttctttacttcctaagaaaattctagttattgagtctattgaaaaaattttagaacttgaccatcaagaagcatttattgatttacttcagtttatccgtcaacaggaaggatggaccatcattgcgacaggacgtgattacgcgtttcaactgctttgttttaactttttgcaacagaatcagatcaattttaccagtgtaaacattgaaggtttttctgaagcacaagtacaactagtttgtgaacatattcctgagcttaaaacattaatatcaaatgatgcattagtagatattcttcggataccattttttattgatattgctgttcgtgcgataagtaacggcgcacaatttcaaacaggtgatactgaaattgattttagaaagaatgtttggtcttcagttattgctaaagagcaagaccgaaaatctggtatgccaataaaacgtagaaaaacatttattgaaattgctacacagcgagcaaaaaaaatggtgtttggtattgcagcagatcaatttgatccagtagtaatatctaaacttgaagaggataacttaatttatcgagattcaaaaaattcaactatcagcctcccccatgatgtactagaggattgggcattagaggaatttattgaagataaatataaacataacatagataatttggatgaatttttatctgctataggtaatgagcctgctataagtagagcttttagattgtggttataccgtcgattgcaatttgatgaatctacttatgattttgttggtgatatattaaccaataataatattgaaagtttctggaaagatgaaactattgcggcaattttacagcataattctccaaatatatttttacagtctatgaaagataatcttcttaataatgattgtgctttattgattcgtttttgttttattttgagaattacttgtcaaaaaccaaattctcattttactgattcactctcattagataagaaatctggaatactccggacgttatttttagtaccttacggtaaagggtggggagccctatttaattttatctacgaggttagaaatgaattaagtaaatctatccataatcaaattattgagttaattaatgaatggtatggtgttataaacattaacgatgatcttccgacagaatctagaatcgttggtttaatagctctttggttattagagcctttaaaggatgattaccaaaataaaattggtagaaaaaaaatcattactgttttacttaaagtctctccatcaatagaagcagaatttgatcagttaatggtacaagatgtttttgtttctaaagttaatcctagaagattgagttatgtagaacaattaacaagtttagctttagttggaatacatgtaccaatgttatgtaagaaccggcctgattttattattaagctagcaatgcatgaatggttactacaagaaaaagaaagtgatgagtggtcacgatacaacagaatagagatagatgaatcttttgggctcgataaagaaagagatttctctccatctagtggtttaaaaggaccatttatatatttattgaaatatcatcctagaaaaggtttagattttattcttgaattatgcaatctaagtgcagaaacttatgctcaatctgaatttgcaaatccttcagcagaacatttatatgtaggtgaagtgacagtcaaacaaattgagttaaaactgaacgatgaaatgcttataaaacagtatgcatctcctcacttatggaaaggttatcgaggacaatcgaccttacctaatatactacagtgcgctctcatggctttggaaaattggttgataggctatgttagtaattgtggtgaggaaaatcaaattgagtggatttataatcatatattaaaaaatagtaactctgtaatgactacttctgttttatcgtcagtagctgttggatttccagctaagattggaaaagcagcatttccaatcctatacaatccagatgtgtactctttagatttggctcgaatgatacaggaaagaggcaaaaatacgcttaattggtttggatattttccaaatgatgtaatgagtgaagtctatgcagaggagagaaaagaagcagctcttagaccttggagaggagagtcattagagaacttattaatgagactacaattagactctgagttgcgagaagatgcattaaaaatcatagatcagcttaaagttgaagcttctggtaggaatgaaaaaaatattagatatttagtccatagagtagattcaagaacttgggatgttattaatgatgaagaaaataatcgaattgtgtttaaaacttcctctgaactccctgaagatttaaaacaagatcagaagcaggttacggaaaagcatagtgcaaatagttcaataattagtttgaatttatgggcaagtatattatttaaagaaaaacaatttaagtcagagtattttgcttcatataaggagggattagaagccgcaaagcaattattagtcgatcttaaaaatcgaaaaattcatgatttttcagaaatggcagttgaaacaataacaactgtggtggctgtttgcattcgtgatgatatagaaagtttaagtagtgaaaatatagagtggtgcttaagtataattatggaagcagtctttatgcatgcggatattacagaaggttcatctcagtatgatctaacagatcattacggttcaagtgcatgcgcttttgttttgccaaagttattagcattacctctagatgcagagcgaatagataatttaaaacttgctttagcgacagctttaacacatccaaatgttaatgtttgtgcctcggcagccaaaggtgtgagagagtttctttggccaattgacagtaaattagcatctgattgtctaagtggagttgttgaatatgctaagtttagaaaagaggaaacggatagtcatgcgctttattatttacaaggagagaaattaaacgttgcccttgaaaataaaaaaactcagatagtaaattttcgtctcaaattaattgcgggagattttaaatttagtgtcgatgatatttccttggaaagccattcatcatggtttattcatttacctatgttaatgattccgcttggatctacagagcttcaacaaattaatctgatcaaaaaaattgtaaattttgtttttgactctgaatacaaaaattataagtcaaatgatgatgaaaatataaattatgatatcgaaaagtatattcaagatacttttgttgaacatgttatctattcaaagaattacaattttatgccttataaagagctaataatttctgggtgtttacgggcaccaagttttatttattcagtgaaattatcatttgacgttgctgcagggaaagataatgattttgatgctatatggtcactatggaaagttatagagcctgaattacataagatcgctctaaatgatgttaatgatccttatcaaggcctacagagtgacttaaataaattgctacgcggagagctttatgcagatacttcatggcaagggcatgaaagtgatagaaaatgtatggaaaaaggtgttgagcatttacttgggtttgctaagcaatctgcaaataacagtcatgttttcatggctttatcttcgctgatatatcatttttatgatttgttttttgacaagggtattcaaattctagctgaaaaatttaccaatgactctgctctgatagcaaagcaggttaacactgcattctatttagaaatgtctatagcaagatatttgcaagtagaaaatcgaggaatgttgagtcgtagaatgtataagatttgtcttgttctcttagatggtctcgtagaaacgggttctgcacgagcctattaccttcgagaacatctggttcgttctaggaaaattactgcttaa

SEQ ID NO: 310723 - DNA, 1023 bp, Proteus mirabilis
ttggtaacactagctgaagccagatctaaatgtgatgatgccagaaaactcgtttcagaaggaattaatccaacacaagctaagcaactagataagattagaaaagcgaacgaatctgcaaatacatttcaaatcatcgcaaaagaatggttgcaaatgaaagattgggctgatgtgaccaaataccgtcgccttgatatgttggagcgcattgtatttccttctatcggcacattaccaataagagaaattacatctcaccatattctcaaaatattgcaacgtgaggttcaaagaggtgctccaacagttgctgctgaagctaaacggactatatcctcgatttttgaatttgctgttgccacattaagagctgatagtgatccagtatgggcaataagaaaagctctcccagcaaacaaaacacaacataaaaaagccctcactacggatcaaataggtcaactactcaataactttgataatagccgtggcacctttcaactgaactattgtatgtggttaatgtggtggacgctttctcgtccatctgaagtcgctgaggctgaatggtctgaattcgatcttgataatgcactttggactatcccagctgagcgtatgaaagcacgaagagaacatattgttcctctgcctacacaagctattacgattctaagatctctttatggttttactggtaaccgcaaacatttatttcccggtcgtgattcttgccataaaccaatgtctactaactcgctaaggcaatttcttaaaacgagaggttggagtggtatatatagccctcatgcgacacgtacaacaggcagcacacgattaaatgagttaggatatcgacctgatgctatcgaagcacaattagcccatatggactcaaatagcgttagacgttcatataatcatgcaacttatcttgaagagcgcaaaatcatgatgcaagattgggctgataaacttgatatttgggtaaaacaggtcaacctagaatcaaaatcatga

SEQ ID NO: 310724 - DNA, 510 bp, Proteus mirabilis
gtggaagtatctaattggattcaacaaaacatacgacactcagcacaacttgaacctaatacactcgaagcagtatccgatttcactcttatgtggtcaatttttgaggcttcagaagcttataatgagaatgttgtagatcagattggagctttttcaaagcgagtcgcaaggtatatgccattagatgcgatcgactcccaactatcatattggtctaaacgctatatacatgaaagcggtgagccaacaaagcatttcgattacctctattttagagatgattcacaaactgagaaatcacttgatgtactaagaaataaagaaacttcttttgaagataaaatcgaagtgtgcctcttaattgtctataggtatcgaaataatttatttcatggtattaaagacatcacgttgctaaatgcccaagtagaaaatcttcggaacgcgatagaattactacaaataattatgccatatagcggaagatacctttttctcggagcctaa

SEQ ID NO: 310725 - DNA, 261 bp, Proteus mirabilis
gtgattaatatgaaagatgtaattaattttccaacaccagaaaactacgcagaaaaagttaatacagaaactggaataaaggagttgatgagcaagtcgaatgtagaagaactactaataaaactggatagtgaaggatgtgatgttagtacggcgctcattgaaattacagccatgatgaattatataaatctgagtttgaaggttaaagagaacattaagacgcatattgaatatattgctaatgagttaaataaataa

SEQ ID NO: 310726 - DNA, 1053 bp, Proteus mirabilis
atgagcagtgatgaagagggtaaagggcgaatagagttactgaagagaataggaactaaagttgttatagcagcggttaaaaaggcgacaggatgtgatgttatagaagacatatacgatactgttgcagatgaatttagaaatatataccaaggaattaaacgagataaaatatacaatttttacatgggaatagaagagcttagcgaaaatgaaattgaactaagctcagataattttgcatttttaattcaaaagttaatggaagatgacgaagttggaaaggccaaaatatattcaaggcttgtggttaatatatcaaatagcaattatgaagaccaagataggataaattttatatctatccttagtaagttatcaagttatgagttagaacttgctagaaaatattatatttatggtaattgtgacttggttgggtatgaatatagacataaccaattggaaactttacatgagcccactgacggtcaattattacgatatacaaatggtctagtttttaatgggttaatctacaatcctaacaatagagagtccaaaaaaggttattacaaaaatactgaaaccttaaatcagtttgtgcgattaatctttgatgaaactgaactggaagcagaatcaattggtgaggtagagaaagaaaggtataacattttagcagaggaagacagattgttttctggagaattaggagctaagtttgcttcattaatgaacgataaagatctaactataaaaattgccaacaaaaaagatattgatgagcatttataccatgcagagcatttcataacaggaataaatgaaatacatcaaaaatctggttatagggatatcgaatatcgtaaactgatgtttttttatgattacgattcacttaagaatcacacaagtgtggatagaaaagtattagcggaaaagcgtatcgagcttgaaaatatcaacagtgacaagaaagtgatagagttcctaattaattttgccaatcaaatcattgaaatgaaaaaactgaaagacggccagaagtaa

SEQ ID NO: 310727 - DNA, 1116 bp, Proteus mirabilis
atgagtggtagtgaagaagataaggctatgctaaaactaataaaagatgcgcttgcagagtcaggagtaaaggttgctgaaagtttaccaattattggacctatagcaggcataattaaaggattgatagaaaatagcaaaggattatacgacgccataaacaggcagaaactatatgatttttatatgggtatttatgaattagatgatgataaagaaaaatatataactaatgaaagtttagggataatagtaagaaaactactacaggatgatgaggctgaaaaaacaaaattttattccagattcattgttaatgttgcctcaagtgaatataacgagaataaaaggattgaattaataatcatacttagtaagctaacaagtttcgaacttcaattggctaggaagtattatataaactctaaatatgaaattgataattcaggttttattattgagcagttggcgaatctaagtgatacaagtgatggttttcagttaaaagctattgagaacttgaaagctaatggtcttgtttatgaatcaaaaataaatagaactctaccgtatgaatacaatattgtgactaatgtattagagtcacttgtagagctgatttattcgactgatgagttaaaacctgaatctattaatgctatctatgatagcagagaatcggtagatgtattcgttttcaatgcgtttcatactatagcaaacaaaattagttataagagcaatcttaatattgatgaagcagtgataagcgagagagttagtatatatgaagagcatttggctgaaattgggagagttttaaagaggcataatatatcatacaagattggcgataattacagcttcgaaaggtatagaattaatgcagatgtgctgatttatgttgacggagatctcgatggtttctttaataaaaaagatgaagtgtatgaaaataaaataaaaaatagaatagtagtgtcaatggcaggtagccacagattaaatgatataattgatttcaatgaagatacgaaaaaatatatagagtatgttggtagtgataaaaataatgaaaaattaattgaaataattaataactaccttaaagaataa

SEQ ID NO: 310728 - DNA, 129 bp, Proteus mirabilis
atgattaaaagtaatgaaaataaggcaatgcaattgctatttgttgggttccctaaagcagaaaatgaagtacctgaaatgaaaaaatgtattgatgaattcgtcaatactgttgggcttgctgaataa

SEQ ID NO: 310729 - DNA, 198 bp, Proteus mirabilis
atgaaagacagaccgcatgacacggcgatggcagagcacttccgcgcccatccgacgtatgcagcggagctgcttgctgaagtccgccgcgatggcatccctgctgagctagccattctgttgcggcagatggccacgacctcggcaggtgatgacaggtcgaatgatgccgatacagagcgcgctctatctctctga

SEQ ID NO: 310730 - DNA, 915 bp, Proteus mirabilis
ttggccattttccattttcctttacttttttgggtgccatccacatctgatgacgtttctagagctcatttcaaattgactggccgaaaatgggatgtgtcgatttttgatttgtattctcttgcagcggaaggccatgagatgcgaatgccagtcgaattaatgcaggtctttttgccgcgcgttaatcttgaaattgccgttgaagctgaggagcactcagccgcatgccgtcagttagatattctgcgtgcaatgctatatagcaggggattagctccgacgcttgcgccgttcgcaaccaattattccttgaatgcatatgctggtatcaacgggcgctcctctgatctgacaaaagataaattgcacaagggtttgcagactggcattaatctcaaagatgcgaaagttgaggggtggccgtatgaactttcactgatgtgtttgcgtggcgaccccgagcaattatcgaatacagtgcgtgaggatgtttttttgtcagccgttcaagattcgttactttggcgcaatttagaagataaaaatccgccggctaaagttatacgagctgcgttggccaaagcgcctctaatgcctgatatatcctcatcaatattgcacatgtggcaagcgttagaaaacatcatacgaattcagtcagagattacgtatcgcacgtcgttattactggctgagttgtgcgcaccaattcagccccgttcgttaacctacgacgcggcaaaaaagagttacggagaccgcagtaagatcgcacacggttcaagttcatctgtggatatttctcaatggatgcgggcttgggggttattgcaaaagacatgtcaggcaattttgctacggggcggaatcccgtctgcagatgaactgactagagagcttttggcacactag

SEQ ID NO: 310731 - DNA, 2160 bp, Proteus mirabilis
atgggggggagtgtgagtaattattttaacgacagtccaattgagagacgagaagaagatctatacggtgtcacctctttttcagaggctctcgcaaaaagtatattaaatattaaggatccgattggaacaacgattgctttaaatggagcatgggggtcaggcaaaagcagtacagttaatcttattagagcggagctttctgaagcaaaagattcccatttgattgtcactgagtttaaatgttggtggtatagaggagaagaggccctggcgctcgcctttcttcaacaattaaactctgttttgggtgaacaatttggtgacaaaactcgtaaactagttcgaaaattgggtcgcggcattctccaagccggtcctgttataggccccgcgattgcattaactccggtaggttggttgtctgggttagtcggcggcttgtttgatgtagcgaagcggttgtttccagatgaagagcccctagagacagtttttcgagagctgtcaaaagtacttgaggcagagaatcgacgattcctcgtcataattgatgacatggatcgtctatcttcggaagaggcgcttgctatatttcgtcttattaagtcagtaggacgattgccgaatgtgatgtaccttgttgtttttgacaggcaactagcagaacaagcgattaacgaaaaatatccatcagaagggccgcattttttagaaaagataatacaggccggttttgagctaccaatgccagtgtcgactgacttaaacaatgcggtactcgcttccattgatgagatttgcggaactcccagcgaagatcagatagtgcgcttcatgaatgtattctatgatgtcgttgctccatacataacttcgcctcgccacgttagccgatttcagaatgcaattagcgtaacttggccagcaattgctggagaggtaaatttagctgatttcgttgcgttagaagttttaagactttatgagccgacgctattttctgcgataaagggaagtaaaagcctcgtatgcggaaccaaaacagaaaataatcacaataatgttgatcgattttcgatcttcttaaatgggatagaggaggggcgccaagacgtcgcaaagactgccctccagagactttttcctcgactggagagtataggatatggaggtgaatggataagtgagtggagttcagaaagacgtgtttgtgttgaagctcatttcgatacttattttagattaaatctaagtgatgaggtgttgtctggtaaagctattgatgaattaatagagaaagcaggtgattctgattacattaaaaaagtattcatggctgctgcgaatgcaaggcgcagaactgggcaatcaatggtgccagtttatttcgatgagcttacaactcatggaaagcgggttgataaagataaagtgaggccacttttaagtgcgctttttgaaattcatgatgcaattgatcttaagattgatgctgatagtggattcatggcgatggcgaatacaactcttcgctatcactggttaatcagaaaattaactcgaaatagatttagtattgaagaacgtacggatatgtacttaaaggcgacggaggccgcgtcgctcggttggcttatcgattttgtatcttctgctcgtggggactatcaggtgcgggaagatagacagcctacagcggaagaagattgtcttgtatctgaaaacgtattgcctgaacttacaaaacgggcactaaatgcgatccgaacatctagtgctgatggctctcttttggtccataaggacctactatatatattatatcgttggattgattttatgggcggtgatccaacggaagctcgtgcgtggactgattctcttttggacgatcgaaaggctctcctaatactcgtaaaagtcatgacaggggcatcgtggtctatggggatgggaggttttggctcgcttggagatcgagtgtcaaaacggacagttagagcgcaaatttccgatgactctcctgtgattgatgcaaggaagttccgtgcagccattgagaaaattgcgaacgataaaaactcatcagatgatcaaattgcgtccatccagactctcctgtctgcatgggatcatcgcgctaggggagaagattga

SEQ ID NO: 310732 - DNA, 384 bp, Proteus mirabilis
atgagtgacgaagaacagaaaccgaaggggaatggccgaggaacccgaccccgaggccaacgaatagaggtatgggtgaacaacgacgaaaaggccgagctggccgaccgggctgctcaatctggtttgtcgttgtctgcctacatgaaagcggccggattgaacgcgcctattcgggcaagggctgacctgtcagccgtggccgatcttgtgcgcgtgaatggcgaccttggccgggtggccgggttgttgaaattgtggcttgcggagaagcgtgggcagagtgcccggtctatggacattgagaaggtaatgatcgaatttagagccttgcatgcttctatcagagagaaaatgagcgctatagttgggtctcggaaatga

SEQ ID NO: 310733 - DNA, 210 bp, Proteus mirabilis; identical to SEQ ID NO: 282657

SEQ ID NO: 310734 - DNA, 792 bp, Proteus mirabilis
atggaaatggaatcgcaaaaaacgtcggcttatgccgcccgaaaattcggtcgaggcgcggcgctcgctctagcaatggcgagcgcaggccttggtgtaagtctctacatggcaccggctccggcctatgccatctactgctcgaactgctctacgttctatcagcagatgtacgaatacgccgaagcggtgaatacgcaactgaacaccgcgcagcagttgcagacgcagatccagcagtacgacaacatgattaagcagggcatgtcactgcccagccgcatgttcaacaccatcactggcgacctccagcgcgtggccagcgtctacaactcggcgcagtcgctcggccgcaacatcagcaatctggacgaacagtttcgccagcagttcaagggctatgacagctatctgaactcgattggccaagggcaaaacaacatgccgcagcgctatcgggactgggcacaatccggcttcgataacgcccgcacggccatgcaggccgctggcgtgaataccagcacattcgaggatgagaacgcgatgctggaccagttggtaagccgttcacagtcggccgttggtcgccagcaggccattcaagcagggaacgagattgcggcgcagaacgtgcagcagctccagaagctgcgcgatctggtggccacacagatcaccctgcaaggcaactacatggcgcagcaaaacgaacgacagtccgttagcgatgcctccgaacagcaattccgcagccgtgaaaatacacgcggcccgtctgaggggttctaa

SEQ ID NO: 310735 - DNA, 183 bp, Proteus mirabilis; identical to SEQ ID NO: 17383

SEQ ID NO: 310736 - DNA, 1644 bp, Proteus mirabilis
atgcgacgttcaaccgtttacgcacttgtcggcgcggtgctcttgctatccgcaactagtgcgatggctgccggggtcgatttggcgcagagcaacacgtctatgaacagccttctgcggctgattcagaacgcttcaaaccaatgggcaccgcgcctgcatgattacgccttgtggctcttgggatgccttgccgtcatccagttagtttggacttttgctcctttggtcatgcgcggggctgaactgggcgacatcctccatgaactggtgaaattcatcctcgtgatagggttcttctatgcgatgctcgatcacgcgaccgagtggggcggggccatcgtcaacagcttccggcaggccggggcgcacgcggcagggttgggtagtgcggagctgatgccgggggatatgttctcaactgctgtggacttttcacggcaggtgctgacggccggtgtttcgatgttcagcccaatcacatcggttgtggtggccgtatctgcattgatcgtcctgatgtgttttacgtttatagcggctctggtgttcgtgacgctggtagaggcctacgtcatcatcaatgccgccgtcctgtttatgggtttcggtggctctcaatggacacgcgaatatgcactggctcccattcgctatgccgttgcggtaggtgccaagctgtttgtcctgactctgattgtgggtctgatcatgcaggtttccgcagaatggtcggcagcctacaccaacgacgaagcgtcgttgatgaccttggtcggcctgtctttggtgtgcgcctacctgaccaaaaccatccctgaactgatcggcggcatgattagcggcacgtcgatgggcggcggctctgcaattgggggcatggccgcagccggtgcagccggtgcggcggccgcagtcgctactgttgcaacagcaggggcagcagccccggccgcaggagcactaggggccgcaggaactggcggaggcgctgccagtgccgcgggtggtggactggcctccgcactgaacgccagcatggcaggcggcagtaccgcagggggcatcggtggtgcgacgggcgtcagcagcgctggaattggcgcaagcacaggagggggcagcggtgcggccgcaaaggccgcaggttctcgcgtcgggggtggtgccgcgtcaggatcggcgaatccagtgtcggcggccgcttcgccagctagccaagaagcaggcagcggcttgaaacaagccgccaaacaggccggaagagcggccaagggcggtgacgacgatacggatcagcaggccgtcgctcagcaacggcagatgacaccaaaagaagggaccggcggcaacggcaaggttgttgcgcagggcgccgaggtggccacacgggcgcttggcgtgctgggcgctatcagcgtacccggtatggaaagctcccacgggctttcgctcgggggcaccgggtctccccctcccgtccccggcggcgacagtccaacgcctgacgacggcgcagagccgactacacaagcggaatccaacattattcgtccgacatcggacacagctaggaccggaaatgtcggcgcgctcaatgtgcccggcatggattctggcgttaactctcaatcggaggcgtaa

SEQ ID NO: 310737 - DNA, 327 bp, Proteus mirabilis; identical to SEQ ID NO: 147007

SEQ ID NO: 310738 - DNA, 1059 bp, Proteus mirabilis
atgagtagccgaaacagcggtcttaagcccataggcgcggtaataggcgactctggcgggctactggaacgccttgaaaatatcaggaagcggaacagtgaccgaactccggctgctgaacgcggtagaccgtctaacgtctcgaccgtgcatgaacagatggaaagggcaaaagagcgggacaaagcgttgtcacttgtccgcaagcctccacaaggcgacgctcagccagatttttttgcgcccagcctttatgacgtgggcggccgcgacaatcgcagcgtcatggatgtggccgtgttccgtttatccaagaaggacaagcgagccggagaactgatccgctacgacctgccggatggatacgtggaagtgtccgcaggagcgcacggaatggcctccatttgggactacgacattgtgctgatgatggtgtctcacttgaccgaagctatgaaccgctatcgagaaggaaagggtggcaagccggggagagtgtttcggctgcatgttagcgacatcctcagatttgcccgacgtggtaacggtagtagtcaggttaagggagtggaagccgcgctagatcggttgcggggtactaccatcaagacagtgcgcgaaagcggcaagttccggacaaccgaagccgaggggctgatcgcgcgctatcgtgttctgtcacgcacggacaccaagaagataagttctgtcgagattgaagccccggagtggatttatcgagaagtcaccgagggcaagcggccggaggtacttacagtacaccgggactactttctgatcgagccgggcataggacgctttatctaccgactggctcgccgtgccgcaggcagggatagcgctaaatgggctttcaagaccctttacgaacgcagtggaagcggtggctcgttcaaaaaattctgtttcttccttcgcgggatcatcaaagccgatgacctgcctgaatatgccttgtgcgaagaagcggggaaggatggccctctactggtcatgaggcaccgcaattcctcgtcggaaccgctgggcggttcctaa

SEQ ID NO: 310739 - DNA, 468 bp, Proteus mirabilis
atggcgttaagtgatatgaacacgctaactaaggtattagctgggctactggcaatatctgcattctggctttggtgggtaatagatgattacgacaaattaagcaaagattacaacacagcaaccactcaattatcacaacaagtcgaaatcaacaaagactatcaagcccgtatcactcgattaaaccaactcgatattcgtcactcacaggagttagccagtgcaaagaatgaaatcgacactcttcgtgatgctgttagctctggcaataagcgggtgtacgtcaaagccgagtgtccagccgtcaccaagaattccaccgaaagcggaagcgatgaaaccaccgcacgacttaacaaagcagttgaacaagattatctacgtctcagagaaatgatagttgagaacgaacagcaaactttgtatttgcagaattacatcaacactgaatgcctcgctcaatag

SEQ ID NO: 310740 - DNA, 360 bp, Proteus mirabilis
atggcgtcctataaagtggtaatgacgaaagatgccgaaacagacttagaggacatcaataactatattaccgaccacgacagcatagataatgtagattatgtattagatgagctgcttaaggtcactaatacactggctaactttcctatgaaggtcactaatacactggctaactttcctatgaaaggctgtattccaaaggaattacaaagtttaggtattcgtgaatatcggcaaatcttttttaaaccttatcgtgtcatctatcacacaatagcaaaacaagtggttatctttattattgcggatggcagacgagacatgcaagccctgcttactcggcgacttttagggtaa

SEQ ID NO: 310741 - DNA, 198 bp, Proteus mirabilis
atgaaattaaatagctatattgatatcgaatttaaaggcgaagcaaaagaaataagaatgggaagatttagtgatgttctggaaatcggagaaaacacagaaaaccctaactttgattatataaacataccaaacaaatatgccagagcattaattcgtgagcttgtaaagctatatcctgattgggataagaaataa

SEQ ID NO: 310742 - DNA, 321 bp, Proteus mirabilis
atgacgccacaagaattaattgaaatgacgccagagcagcaacgggcatttaaccgatttgaaaaagcagccaatgattttaaaaaagcaggggggatgttttatacagttttacacaaaatacatggtttgaatggaaaatatgttgaaagtatagaggctgattatttaagtaggggtaagccagatggtgatttagatacgcagcttgatgtttctatggactgcataagtgatagtggatttagcggctttgctgatgatactcacatgataaaactaacgggtgaaggcttggcgcttttgaatgaagaagattaa

SEQ ID NO: 310743 - DNA, 255 bp, Proteus mirabilis
atgaatgatggttttgaggtggatatttattttagatataaagaccattctgaaagaaataaatcaattcaggttagttcatttaaatttgatgatgaaatccaatatttcaacaaacctttcttaataagctacaaagcaaaaaccaagaaaacattaacatgcaaatgccgagctaatgattggcatgataacggccgtgatgtaaatgaatatgaatgcggacagtgcgggatgtttataactgtaatctaa

SEQ ID NO: 310744 - DNA, 309 bp, Proteus mirabilis
atgaataaatacactgaactatctgatttcgaagttaataaaaaggttgctgaaaagttaggactggcgtacgaagtcacaaggtacggcgtggttacaaggatgagcaataaagagcagtggcgtgaattcaatccatgcaacaatccagccgatgcaatgccgattattattgagaatggtattagcatggtacgagttaataatacttggtcagctcgtcaatttaacaatcattgcatagaaattaacggtgataattattatcgaattgccatggaagtttatttattaatgaatggaaaatag

SEQ ID NO: 310745 - DNA, 1905 bp, Proteus mirabilis
atgaatataaaatatcgtgctgatattgacggtttaagagcaattgctgttattttggttatcttctttcatttagataatcgcttaataccatcaggttttattggtgttgatatcttttttgtgatctcgggtttcttgatctcgttaattattaaaacatcactgttacaaggtcatttttcatttggtgatttttatattcgccgattatggcgtttacagccactctatctttttgttttagtagcagttcttgtaatttcaggtattttctatctacctagtgattatcttgatatcactaatagtgaaaaatatgcttcagcttttctgtctaacaaatattttgcaagagcaacgactagttatgcagcgcaagatgcactcttcttaccgttattacatacatggtctttagcaatagaatggcagtggtatctattcttaccttttgtactctattttcttcacaaaattaatcataaagagaaaataaataatttttattttattgtttttattatatttgagtttatgttaggggcttgtgttgcttatttacccgtaaaagtaatcattaatcaaagagttaatagtgttattagtctcatcgccttaggggttatcttttggatagccgctcaaaaagatgtgattgctggttatccgaatttcaatacgttatatgtttgtcttagtgttgcactaattatttatacaggacaacatggcagtattattcaaaaagtgttgtcattaaagccaatagtgatcattggattattatcttattcactttatttatggcactggcctttatttgctattgcgcgttatataggcgtatttaacaccgagatacaaaaagggttatttttagcattaacatttttactctctattttttcttaccttcttattgaaaaaccgtttagaagaaagcgtttgaactttaaatattcgataacattattgtttgttatacctattttattggctttaggattaaatgcattaaatgaaaagtatcatggatttggagtaaggcttgggcaaaattacgttaatttagaaaacaaactcaatcaattcgattatcccaatcgaggtaattgtatgaattttcaagcctctgatcctgataagatgtgtcatattggtaaagtgggtagccagaaaaaagcttttttattaggggattcccatgctaatcatttttggggatttatggatattttaggtaaagatgcggagcttgatgtctatgcgcaagcaacttcatcatgcattactattcctaatatttatctttatgattggtctaatcataagaatacggtttatcaacgttgttatgatcaaacagcaaaatattaccagattattaaacataatcggtttgattatgtgatttttggacaggtttggaataattacgcctcaaatcatgttattaataaaataggtgataaaagaacggttgaggcatctcgtcaacgtgtggaaaaatcgatgcgtgaagcgcttgatatcattgttgctactggagccaaacctgtttttataaaaaccgtttattcaatgcctagtggttttatgacctgtttttatgaaaatgccaagttaagaaaagattttgctgataacaactgtaatcccaaaaactataaaggtgaggggaatacatggatgaaccaattatttgctaaattaaaacaggactatccaagcttaattattatcgatcctaaagatgtacaatgcgataaagatacctgcttaacagatattgaaggagtgccagtttatcgtgatgtaggacatattactgattatgcatcaacgatttttggcatgatgtatattaataagatgggtaatccatttaaagagaaccaataa

SEQ ID NO: 310746 - DNA, 756 bp, Proteus mirabilis
atgaataaaatattaacttggtttaaaaggtatatagccttacttggtattactacttatataggcgtaaccattttacctatagctttttcccttcccgactgcgtgcaaaaattaaccacaccgttagggacaacaatattttttggctttacaatcacatactttataaataaatttatatccaaagaaacaaactatgaagttaaagaattaataaataataaattcccaactctcatctcaatggagagaataggtctaaaggacctatatgttgttatgaatgatggaagaaacttcctatctgttaatgctggtgattttgccaaaagactcacaagagaaaataaaaaaactgtagttatacttatagatccagactctgatgctcagtcatttttatgcaaaaaaaataacaaatcacctgattattataaatcaaaaattgagtcatcgataacagaaataaaatcatttgccgtaaagctacccaaaagtagtacactttatatttacttaatcccaacaatcttatcacaaaacatcattttaactgaaaatttatcgttggtcggtatatataggaacgcaccaggtaaatctaacccaccgccacagtttatatatgaaaactcatctattgatggggagtatgagaacatcaaaaacgatataaatgaattaaaaaaaattaaagatgtgaaagtaataaacgttaaactcatcttaaatgaggaggctacttctaaatag

SEQ ID NO: 310747 - DNA, 1404 bp, Proteus mirabilis
atggggagtgagtggaaaacaactaaattacttgaacattatgagattcgttctggtttatctaaacctgcaaaggattttgggagtggatatccatttttgacgttcaaagatgttttttataattatttcactcctgataaactcggtgatctagtacagtctaatgataaagaacgtgaaaattgctcagttaaacgtggtgatgtatttttaacgcgaactagcgaaacaatgcatgaactagggatgagctcagtagctcttaaagactatgaaaacgcaacgttcaatggtttttgtaaacgtcttcgtccaactcagcaaagtgaattattaccagaatatgtaggatattacctgcgtagttctatatttagacaagcgatgttagcattttcaacgatgtcaacacgcgcaagcctcaataatgaaatgatcggtaggcttgaaatatcttacccacccaaaatggaacaggtaaagatcgctaccattttgaaaaatatagatgacaagatcactctcaaccgccaaatcaaccaaaccctagagcaaatggctcagaccctatttaaatcatggtttgtggattttgatcctgtggttgataacgcactagatgcgggtttttttgaacaggatttagctttctctgatgaattactgcgtcgggttgaagtgcgcaaagcagtgcgtgaaagtgataattttaaaccgttatcagaggatattcggcggttatttcctaatgcttttgaagaatgtgtagagtctgcgttagggcttgggggatgggtgccgaagggttggaataacggatgtatttcggatgtagctcattatagaactaaacgcattaacacttcagagttgacacttactaattacatatcaacggaaaatatgctggttgatagaaaaggtattcagaaggcaacagcgcttccaacggtaaatagtgtgccagcatatacatctggcactattctaatttcaaatattcgtccttattttaaaaagatatggttagctaaaggtgatggtggctactctaatgatgttcttggatttgaagttaaagatcaaggaaccgaagaatatttatttaatttaatgtatcaagattcattttttgatttcatgatggcgacttcgaaaggttctaaaatgccaagaggcgataaaaaagctattctagggttggagcttgtagtgcctccattaaagttgagaaagctattttctaaaaatgtgaatggtttttatacgtcatcaagtattcggaataatgaaaatcatgcattaggccatctccgagacacactcctcccaaaacttatctccggcgagttgtctttgagtaatataaaaatagatattccagaagaaactttaatctaa

SEQ ID NO: 310748 - DNA, 864 bp, Proteus mirabilis
atgaataaactcgaaaatcattttcttttcctccctaaaggggctaaggatgtgtttttatcccatttgaataaacttatcaattactccccaactatcggcctgatgggcaagacaggggctggaaaatccagcttaattaacgcactattccaatcgcccctatcgcctgtaagtgatgtatccggctgtacccgccaagcccagagtttcaccatggcgatgggctgccatgtgatgacatttattgatttacccggtgtaggtgaaagccttgagcgagatagagagtaccaccagctctatcgtaacttactgccagagctggatttaatcatctgggtacttaaggccgatgatagagcgtggtcttctgatgaacagtgttatcgctttctcactgagcaatgtggttatcaaccaagtcgctttctatttgtgctgaaccaagccgacaaaatagaaccctgccgccagtggaatgaactgagccaccagccatcccctgagcaagcggctagcttagaattgaagcaacaagccgtgataactgcatttaagccgaatcaccctgtgatggttgtatctgcaatcgaaaactatcaactgactgtattagcagagcaattaatacaggcgttaccggtgcaagccagtagcggggtagctagacaactgagcagcacttaccggacgcaatccgtagagaactctgcacgtaatgattttgggcaatgcgtcagtgatatcgtcgatacgctgatagacatccttcccctacctgtcttgataaaaagcacgattggtacagtcaaaaacagcatcgtttccgtcgctaagtccctgtggagcgtattcttttag

SEQ ID NO: 310749 - DNA, 3510 bp, Proteus mirabilis
atggatgataactatctaaaattagcctcttattggcgaaattcactagctgatgcggagtcaggaaaaggggctctagaaaaacgagacacgaataatttgactaagtgggaaagtgtttcatcaggtcgccttgatgacattattactgggcgttttttttccgatgaaaaagatgatgtaaacaccgtagatgttattttacgcccaaaagtttttatgcgactaatacaacatggaaaagagcgctttgctggcagtccaacatttgtcaccccgcttgtgacactagcaaaaataaatcgagaaggttttttatttccaacatcaactaccgtcattcctagagatctacttgaaccgctgtctcatggttcattctctattggtgaaatatctgagtatgataaatataaaacgacgaatacatcatcatctatgcattatgatgaatctcatttagaaacagaagaaactgaagaagaaaaagagaaaagatatgaaggctatttccaagggtggaaattatatttagatgactcatctaaattattaaatagtatcgctgactcttggataaacactcacgaacagtatgaacttgccgaatacggatatatactaaaaaaagtagaacctaaaggcgctagtactcatattctttctctttatgaccacttacttgtaaataagaaagaagtcccattatttgagcggtttgctaacttcacttctcctgaaatcgagccattaatttcgactgaagatacctttacttatcgattaggtcattctggggataagttccctttagcgctggctcagcgagatgcactaggtcattttcttaatgccaatgacggcgatattttagcagtcaacggccctcccggcacaggaaaaacgactttacttttatccattattgcaacactttgggctaaagccgcactcgaacaaacaaatccaccaattgtacttgcgacttctaccaataaccaagcagtcacaaatattatcgaagcatttggaaaggacttttccgaaggaaatggcgctatgtcaggtcgctggctgccaaatattaaaagttttggtgcttatttcccttcaagtaccaagaaagcagaagcaatcaataagtaccagactgacgagttttttaaagaaatagaatctaaagaatatattgaaagcgcactagatttttatttaaataaagccaaattggcattccccaataaagattgttcatcccctgaaaaagttatcgcgttgttacatgaacaactctccaagcagtccaataagttaattgagataaagcaaacttgggattctctacaagaaactcgaggaaaaatcgcccaagtatccgatgatataaactcttatcttaatgaccagaccctattactatcaaaaacacaatctaaaatagataggttaaaaattgcttcggtagaatgggataagtatagagcgaatgaatctctatttatttcattattttcatggctaccacctgtccgtaaaaagcgttactaccaagttaagctgttccttgctgataaattaggcagtttaattattgaaaaagaaccaactgaaatcaatgatattgatggtttaattaaaacattactcaatagtgaagagcaagaacaaaagagttatcaaaaaaatatcgatcgcatacatcaaattctccaacaagaaaaagatatattttccaaatggctcaccattgcttctgaacttggatataaacagggtgaagaaccaagcttgttgcaaattgatgaactggctgacacacaaatcagatttcctctatttttgctaactactcattattgggaaggtcgttggctcattgatgtactcaatattgatgatcttaataaggagaaaggcaggaacgggcttaaaacagtggaacctcgttggcaacgtagaatgatgttgacaccttgtgtggtcatgacttgctatatgctcccttcccatatggttatatctgagcataaaggtcagaaaggtttcgaaaatagttatgcatataatcttgctgatttactcattgtagatgaagcaggtcaagtgttacctgaagtcgctgctgcttctttttcgttagctaaaaaagcacttgttatcggagacactgcacaaattcccccaatatggaatatcacaccatcaattgatacaggaaacatgctggaagaaaaaattctggccgaaaatacacaagaacaaatcaatgcagaatatgaatcagtaactgaaattggaaaaagcgcagcttctggtagtgtgatgaaaattgcacaattgtcttcacgctaccattatgactctgatttagagagaggcatgtatctctacgagcaccgacgctgctttgataatatcatcgggtactgtaatgagctttgctatcaaggaaaattattacccaaaagaggaaatagtgataaccatttattccctgcaatgggctatctccatatcgatggaaaaggtgagcaaagaaatacgggaagccgcttcaacctattagaagcagagataatttcagcttggttaatagaaaatcaaaaacgtattgaaaatcattatggaaaacctattcagcaaatagttggaatagtaacgccattcagtgctcaagtttcaactattaaagatgctcttagtaaacaaggaattactactggaactagtgaaggaaccctcactgttggtactgttcactcacttcaaggtgcagaaagagctattgttatattttcccctgtatattcaaaacatgaagatggcggttttatcgatagtgataacagcatgctgaatgttgccgtttcacgcgctaaagatagttttctcgtttttggcgatatggatttattcgaaatccaacccccttcttcaccaaggggattgctttccaagtacttattcttagaggaagggaatgccttacacttcgaatacaaagaaaggcaagacttacaaaaatcgaatactcaaatatacacacttcacggtgtgaaagagcacgatgactttttaaatcaaacaattagtaatactgaaaatcatattactattatatccccttggctaaatttgcaaaaacttgaacaaactggattcattgaatctatgactcaagcgatagccaaaggtatccaaataaaagtgatcacagataaaaattacaatatccaacacgcagatcctgagaaacgtaaagaaagagaaaccaatctttatagtgctttggaacaattagattcttatggcattgctacaaaactagtgcgacgagttcatagtaaaattgttatcggagatgataatttactctgcattggctcattcaattggtttagcgcatctcgtgaagccaagtatgaacgatatgatacctctatggtttattgtggtggaagtttgaaagaagaaattcaagctatccacaacaaccttgaacgacggtaa

SEQ ID NO: 310750 - DNA, 369 bp, Proteus mirabilis; identical to SEQ ID NO: 293913

SEQ ID NO: 310751 - DNA, 2160 bp, Proteus mirabilis
atgatgttgatagcgttttttaaaacactatttaaattcttatttcgagtaagaattgaaggactaattaatcagttttcacaatatgaaaaatgcattattacgccaaatcatacatcgtttattgatggtatattattgcgtttatttttaccgattaaccctgtctttgctgtttacacctcagtggctaatgccaaacataccaaatggctcaatcgttatgcggatattgttcctttagatcccgctaatccaatggcggttcgccaattagttaaagaagtcgataaaggccgtcctgttgttattttccctgaagggagaattacggtaactattggtttgatgaagatttatgaaggtgctgcgtttattgctgctaaatcaggggcaaaagttatccctgttagaatagaaggtgctgaatttagctacttttctcgagtgcgtaaaacgttaaatataaaagcaaagctctttcctaaaattacaataaaagtgctacctgcggttgatttacctatgcctacagcggaaaaatcagcagagcgccgtcgcttatcgggagaaaagctccgtgatattatgatggatgctattatgcaagcacgtcctaatatcacgctctatgaggcatttttacaaggaatgtctcagtttggtcgtttcagtcctcttatttcagatattaatatgaaagaggatagttatcagggcctattgaaaaaaatgttaggtgttagtcgtattattgaacgctataccgagcctaatgaacgaattggccttttacttcctaatactaccgttacggttgcggctttatttggggcgacgatgcgccaacgggttgtggcgatgcttaactatactgcgggtagcttaggtgtacaaaatgccatgaaagcggcatccattaaaacgatttttacctcacgccaatttttagagaaaggaaatttattacatattccagaacagactccggatgcaaactgggtttatcttgaagatctcaaagatagcattactagagaagataaacgctggattgcacagcacttactcactcctcataaagcgatgttagcgcaaaaatcgacggacgcagcagttatcttatttacttctggatctgaaggcacaccgaaaggtgttgttcatagccactccagtttattggcgaatgtagagcaaattcgtgctattgctgacttttcacccagagataaatttatggctgcattaccgttattccatgcttttggtttaacggtaagtgtattagctcctatctgcttaggggcacgagtattcctctacccaagcccactacattatcgtgtagtacctgaattagtgtatgaccaaaattgtacagtattgtttggcacttcaactttcttaggtaattatggcaaatttgctcatccttatgattttgctcgactaagatatgtggttgcaggggcggaaaaactgtccgaatcgacacgagtattatggcaggataaatttggtattcgtattttagaaggttatggggtcactgaatgtgctcctgttgtctccattaatgtaccaatgagtgctaagccatataccgtggggcgtttattaccaggcatggaagggcgtttaattcctataagtggtattacggatggtggaagattacaactgcgtggccctaatatcatgcttggctatttgcgcgttgagtccccttataaattagaacagcctacagcaataaatgccgaaggcatcgaagaagcgggttggtatgatacgggagatatcgttgctattgatagcgaaggtttttgcactattaaagggcgtgtaaaacgttttgcaaaaatagcgggagaaatggtttctcttgaaagtgtagagcaattagcggctaaagcttcagaaggcaaccatgctgtggtggcggtaaatgatccacgtcgaggtgagtcattagtgctttttacaaccgataagcaacttgatcgcagtatgttatcggcattagctaaatccactggtgtggcagaaattgcggtaccaaaagatattcgttttctcaaagaaattcctgttttaggaagtggcaaaacggattttgtctcgttaaagcaactcgctgaacaggaaaataattaa

SEQ ID NO: 310752 - DNA, 1659 bp, Proteus mirabilis
atgtctagtgcttggtggaaagaggccgtagtttaccaaatatatccgaagagtttttttgatagtaatggtgatgggattggtgacttatcggggatcaacgaaaaattagattatatacaatccttaggaaccaacgttatctggttatgtccgatttttaaatctccgatgaaggataatggttatgatattgctgactattctatcgtcgatcctatttttggcgataataaagcgctagataatttaatcagggaagcgaaaaaacgcgatattaaaatcttactcgatttagtattaaatcatacttccaatgagcatccatggtttaaatccgcgcttagcgatcccaatagcccttatgctgattattatatttttaaacaatgggataaatcgataccaccaaataatttacgtacctactttgactgctctgtttggagtcgtgttgaaaatactgatcgttggtattttaattcgttcggtcctgaacaaccggatttaaattgggaggagccacaattacgccaagatattatcgatatgataaacgtctggatcaaaaaaggtgttgctggatttcgtattgatgctattggtaatttaaaaaaatcacctgaagccttgtcggtacatcacttcgaacctgataaagatgatggtagcgcttcattagtaccttgggtattgaaccaaccggggatagatcaatttttaactgaattagcagaaaaaacgtttaagcccgctaactgtatgacggttgctgaaattgatgtaccagaaaaagatctacagaattatgtaggggaaaatggctatttttcaatggtattcgatttcagtattgctgatctagatatttatcatcaaaaaccattcacaacagcgcctattactggtgaaaaattaaaacctgtctttatcaaaagtcaattagacacccagcgtgtaggctggggagctccttatcttgaaaatcatgatcaaccgcgttcattaaataaatttattcctaaagaggcaattgaccccatcagtgccaaaatgttagccacttttttattaacacaacgcggcactccctttatttatcaagggcaagaaataggtatgacaaattgtcctatgacgcttgaagaacataacgatctgcatgtagccaaattatatgaatggggtaaaaatttgggttatagcgatgaacagatgatggcatattttaatgatcgtagtcgggataattcaagaactccttttcagtggaataataagaataatgcgggctttactgtaggaaaaccgtggctaaagataaacccgaattataaaaaaattaatgcagagcaacaacgtcaagataaaacttctctttttgcttattaccaacaactaattacattaagacgtcactcagaaatcagcgatattttaatttatgggatattcacaccacttactgctcctgataatgtgattgcctttaagcgaactcatcaagaaaaatccgttaatatttactgtaattttagtcaggaagaaaaagtattgtcggtaagtatcgaacacctttatctgcataacagtccaatagtgacaaataaacaaggtgatcttgttctccagccctatcaggctgtcattttttcttag

SEQ ID NO: 310753 - DNA, 297 bp, Proteus mirabilis; identical to SEQ ID NO: 151865

SEQ ID NO: 310754 - DNA, 414 bp, Proteus mirabilis
atgcttaaattacatgaagtcaaaatggcgctggccctgacacagaataatcgcttcgccggagccacccaagaaccgagtcattcacgagaaaactattactgtcctcactgcggtgagccagtcacactgcataagacaccgacggagtcatggtttacccattcagtgcccctgacggcagagcattgtccactagtcatcagtaagctcaaaagcttagaagataaagaacgactgaacacacatgctaggtcagtgtccccaattctaaaggtcacggattggttttgtgtacagtgtcgtgaatactttacacacgatcaaaaatgttgcccaaaatgtgatgaggggatttggtgcattcctgcggagaatgttacagatgagcataaatcaataacaaagatataa

SEQ ID NO: 310755 - DNA, 1170 bp, Proteus mirabilis
atgacagttaaagctatagacttgttcgctggtgctggaggtttcaccctctccgctatcaacgccggggtagaagttatcgccgctattgaatttgatagtgcagctgctaatacctataaacagaattttattgaaaaattagaacgaaaaattgacctcagggctggtcctgagcacggtgatataacaaaagttgatccaattactttaagaaaaagcttagggcttaatcgtggagatttagaacttattttgggtgggccaccttgtcagggattctcatctcatagaataaaaaatgcgggtatagatgatccccgtaatgcattactgcttcgttacttcgaatatgtacatgaatttcaaccaaaagcatttctagttgagaatgtcgcaggcttactgtggaaaaggcatgaaaaatatcttcaagaatttattaaattagcagaagaaaatcactacataattaaattcaaagaaattataaatgcagttgactacggtgtccctcaaaaccgtaaacgagtctttatttttggtatccatgaggacttagatgacgaaactattacgtttcctccggagccaacacattattctcgttcgtctggcaaaaaacctacatggttaccagcgtcaacagtctttgaaccaataccaaaagatattaaaaaacgttttgttaacgaatattttgtgaagaaaggtatcctcaactctaatgatgcataccttcttcttgatagtttacctgcaggagaaccagtatctcctaatgaagtttttatgcaaccaactccacaaatgatgattagattcaaagatacgccactaaatggcagcagagtggacgcaggagaaaaacacctcctacgctgtcattctaacggttataaaggccacaaggacgtatatggtcgaattttaattcatcagccaagtaacacgataacaactggttgtaataatccctctaaaggtagatttgttcacccgtggaaaaaccatggtatcacgctacgccatgctgctcgcttacaaacatttcctgatgactttcagtttttcgggaattcaactcaacaagctaggcagatcggaaatgctgtaccaccaaagctcggaagtcttcttattcaagacatatgccgtatattgaactaa

SEQ ID NO: 310756 - DNA, 204 bp, Proteus mirabilis
atgaatcatactgatattttttctgaaaaagacataataaaaagaatcgaaagtggtaatattttggaggaaaaaggcgatgttagtggtgctttgaatctgtatttagatatttgggataatttaccgaatcctaagcatttttttggagatggaatatcattatggttaattaattgtattttggagcatattttagcttga

SEQ ID NO: 310757 - DNA, 153 bp, Proteus mirabilis
atgaaaatcattgtagagcctacaggctgtttaagtttagctgcagctcgtcaatttggtgataagttaaaaggcaaaaaaattggtattattatcagtggtggcaatgtcgatattatgcaatatggtcattttttatcacaaaataattga

SEQ ID NO: 310758 - DNA, 1041 bp, Proteus mirabilis
  misc_feature (984)..(993): n is a, c, g, or t
atgagtattagtcgtcgttcttttattaaggggatgggtataggatgtgttggttgtacggtgggaagtttaccaccaggggccctcgcacttaatccagtaacatctcttaagggtcagtctaaattaacaccaagtttgtgtgagatgtgttcttaccgttgtcctatagaagctcaggttgttaataacaaaactgtctttatccaaggtaaccgaaattcaccacatcaaaaaactcgagtctgtgcgagaggaggcagtggtgttagccttatttatgatccgaaacgcattgtaaagcccatgaaacgcaaaggccctagaggtgccggagaatgggaagttattagctgggaacaggcttatacagaaattgccgaaaagatggcaagcatcaaacaacattatggtgctgaaagtatctttttttcatcaaaatcaggctctctttcctctcatttatttcatttagcggcggcatttgggtcaccaaacacctttacgcatgcatcaacttgtcctgcgggcaaagccattgctgcatcggtaatgatgggtggtgatttaaaaatggatctcgcaaattctaaatatattctttcttttggtcataatctttatgaaggaattgaagttgcagaaacctatgaattaatgacggcacaagagcgtggtgcaaaattagtcagttttgatcctcgattgtccgttgtttccagtaaagcaaatgagtggtttgctatccgaccaggtggcgacttacctgttctaatggccatgtgtcatattatggtaaaagaaaatctttatgataaagattttatagaaaaatttactgtcggtttccctcaattggtggaagtattacaagataccacgcctgaatgggcacaagctcactctgatgttcccgcaaaagatattattcgcataacacgcgaaattgcagctaaagctcctcacgcattagtcatgccaggnnnnnnnnnngccatcgcgcaacctttaataaagatgaaattaatatgcgcagaatga

SEQ ID NO: 310759 - DNA, 375 bp, Proteus mirabilis
  misc_feature (344)..(353): n is a, c, g, or t
atggagttatgggagcatcaaagagaagctcttaactttttaattgaacgtctcaatcaaccagtggcaggtacatcagttgttcgcatgcctacaggtacaggaaagacgggagttatagcctggctttcaatgatgagtaatgaaggtataacactcgtactgacgccgtgggctaatctgcgtgaccagatgattaatgatttaacatcaaaattttggtcaaaatcaggcataccagcacccaatcttaaagtgcgttctcttctgccaagcaatgcggaaaaagtactttctgttgataatgtaaaggtaattgtatcaagcttggcagcacttacagnnnnnnnnnnttacagatctaagaagggataa

SEQ ID NO: 310760 - DNA, 876 bp, Proteus mirabilis
  misc_feature (861)..(870): n is a, c, g, or t
atgactgcgacaccttacagaaatgacttaaaattatttcgaatatcccatcttgaagagtctgtatggcagtttcagcattgccaagctcaggagcaagggatcataagatcccttgatttctactcactagattccactgatgacattaataaaaaaaccacagatttctataggttttggaatgaatctgttcaaaataagacccttgcctccagtcagccaagagcaataatttgctgctctgattcactatcaataaaacatgtggtgcataaattaagggagctcggaatatccactctaggtgtccatcaccgatttaaaaatgaacctagcataggtctttacaaggatgtcccaaatataaacacagatgctgatgtatgggttcatcaatacaagttggttgaaggactggacgatagtcggttctgctgtatcgcactattctgtccaattctcaatgacagaaggttggttcagcaagtggggcgaattctgcgagtaaataaaaatgacagcgcaaacaagagcgctatattgctttccccagaaaagttcaacgtcgagtatagctggcgatcttatcttgaatttgagaaagacgcaaaacttgttacaatcaatcattaccgtgacatagtgaatcaactacttagcatgcaaccagcggccgaatatttcggagggcgatttcggaaaagatttgatccattaagtctatccaaagattataatataacaatatctcctagtgttcttatccgaagtgtgaacgaagacttttccatggatagatatatctcagactgtacagataccttacagatggatgatgcagtgattcttggacatgannnnnnnnnngtataa

SEQ ID NO: 310761 - DNA, 1572 bp, Proteus mirabilis
atgtatgaaattcgactagaagcgcactgtgctgttatcagtgatggctacttactcatttctgatacatcaggcagctacccaattgagtttatcgaagattttactagtggaatcgcaccaagtacactttcctctctaatagataattcttttaagctaactaatctctcaatgagcagtgtaatacctttcgataatgtcgttagggctactgagattcgtagcccagatattgcaaaaatacctgcatcgttgactgaccgtattcaaatctgccgttcagctcgaggttcctcggggattcatggacgtagatatgtggggataaaaaggggaagagttcgtcaagagctatctactaggcagttgcaaaatcattcattgttggcttatatggattggtgtcagctagtttcgaaatcattgaagaatggcagtgtaggagctgatatttttagcaggtatatgcagacttgctctcctccgaatgaattaattgctaaaaccatatgcatagatcttattcgcataggattggagcttcttgggccagatgatgtacttgttcaagcaaagttatctgcaactgatttagaaccaacaggtaaaggcgcaaatctctataaattcacacttgaatttgaagcaatttatgtacctcatatgaattttacagaagagatttttgttgaatatcaacctcacaaaaaacgattttggttcaaatctggtaacgaaaaaaacattagggttgcaatagatagtcaaacccatccgaatggtaaaaacttgtatgattatcttaacctcaaccaggatttaatattgataggattagatagtggtgaagttgtttatcaagggcgtgatttttacaaaattagttacagcacagcagagcaatcattgcttgaccgaattattactctggataaactcgataagtgcaaaacagaaaaaggtacagaggatgaacttaaagtagctaagggtctcaatggtaattctgcacagagtaagttcccagcaggatcgttattcagcgccattgttttagagaaaggcattatccccttcgaagctgacctacttatctgtgatgatctgaatactgaatgctgcgattttcttgctgctgatactaagaataagaagttagcacttcttcatgctaaagttggaagcggttcaaaatcttggaggagaggggcttattggaataatactaaaatagaaagagtcatttattcacctctggactcagcagagggtgaggagctttggaaaaatcttaactccagaataatcaagtcttcaaacagtgaattacatgtcgttttggtaacaacaggctgttgcaatcgccagagtttacaggatgctattaataacaaaaacaaaaggacatctgaaacagctcaactatttcatttgcttgaaggtcttaacggttattcaaggcaacttggcataagattaacgattattgatattccttttgataattctttagttttagaaaaacgtgaaaaatccagaaaaaataaaaaaacaaatccgttaatatag

SEQ ID NO: 310762 - DNA, 2337 bp, Proteus mirabilis
atgaaattgctcaaagggcttgcccaatattatgtagatttaatgatgaggcttgggttaatccgcttctcattactgttagcatccgcattggttgtattagcgatggtcgtacagatggccgtgacattcctacttgccggtgatgtcactagtatcgatctggtacgctctatcttctttggtttgattattaccccttgggctgtctattttctttccgtggtggtagagcaacttgaagaatcacgacgtcgtttatcgcggatggtcgataaattaggcgtaatgcgacagcgagacttagagctgaattcacaattaaaagagaatattgagcaattaaatttagagatccaagagcgtgaaaaagtagaaaaagcccatcttgaactattggaaaaactcaaaagtgaaatgaagcgtcgtgaattgacgcaaattgaactagagcaacaatcttccttgttacgctccttcttagatgcctcgccagatctggtctactatcgcaacgaagataatgagttttctggttgtaaccgtgctacagagctattgaccggtaaaagtgaaaaacaattaattggcttaacaccactggatgtgtatgacgaagatatcgccgtcaaagtgatggaaaccgatgagaaagtctttcgccataatgtgtcactcacttatgagcagtggttggtgtatccggatgggcgtaaagcgtgttttgagttacgcaaagtgcccttttatgaccgaattggtaagcgtcacggcttaatgggctttggacgtgacattacagagcgtaagcgctatcaagacgcgttagaaaatgctagccgtgataagaccacctttatttctacaatcagccatgagctacgtacgccgcttaatgggattgtggggttaagtcgtattttattggataccgaattatcaccagaacagctcaactacttaaaaactatccatgtcagtgccataacgttaggtaatatttttaacgatgtgattgaaatggataaaattgagcgcagaaagatccagcttgataaccaacctatcgactttactgaatttatctctgatttagaaaacctatcgggattattagtccaacctaaagggttaaaattcaccttagaagcgcaagaaacgttaccgcataaaattaccaccgatgggactcgtttgcgtcaaatcttatggaacttaattggtaatgcggtgaaatttacccaagaaggggaaattaaagtacgcatttggcaagaagcgcctgataagttgttctttgaggtgaaagatagtggtattggtatccctcaaggtgaacttgagaaaatctttgccatgtactatcaggtcaacgacagtcaaggtggacgttctgcaacgggaacaggtattggtcttgctgtctcaaaacgcttagcacagcatatgggaggcgatattcatgtggagagtgagttagggcatggttctatctttacgctttccattgtcgctcctgcgattaaagagcaaagtgattttgaagaggatgatgaattattgcttcctgcccttaatatcttactggttgaggatattgagctaaatgttatcgtagcatgttcagtattagagaaattaggcaatacggtagatgtggcgatgactgggcaagaggctttgcaaatgtttaagccgggtgaatacgatttagtgctgttagacattcaattacctgatatgaccggatttgatatttcaagaaaattacgtcaagagtttgatagcagtgaattgccgccattgattgccttaaccgccaatgtcttaaaagacaaaaaagagtatttagacgctggaatgaatgatgtgctcagtaaaccgctttctgtggatgcgttgacagccattattaataaattctggggagatgaagcggtttccgtgacatcgagtgagtcacctcaattgttgagtaaaaatgaagagttactcgatatcgacatgctgaatcaatacatcgaacttgtcggacctcaattaatcacggatggtttagatgtttttgaaaagatgatgccaagttacctgtctgtccttgaatctaatctgacggcacgagatcaaaagggcatcactgaggaaggacataaaatcaaaggcgcggcaggctctataggtttaaaacatttacagcaactggcaaaacagatccaatctccagaattacctgcatggtgggataatgttcaggaatgggtagatgagttagaaagagattggagaaaggatgtagaaagtttaagaaactggttggcagacgctagaaaaaaataa

SEQ ID NO: 310763 - DNA, 420 bp, Proteus mirabilis; identical to SEQ ID NO: 57047

SEQ ID NO: 310764 - DNA, 1587 bp, Proteus mirabilis
atgggttttgatttcgtgaccgaggggcgagcagggcaacgtcatgaagtcaatttagcgttagccacagattggaaaccattaccctggtttgcgatgaatattggcggtaaatatcattactatcatctgacggatacctttttaaataataaacggaagaatagggttaaaaattacgagaaaacagcccctatccgcggttatctgatctcttatcgacgagtattaaccccagaagagtatttactctatcgtgcggttaacaaaattgatgtcgatactttacctgacgagttaaaaaattaccgaaattctgctgagctgagtaaaaaaattagagactttcaacaagcggatttagtttaccctgaaggtggcgctttgctagaggaaatcaaggatcagatagttaggccatatcttcagagaatacagcatgatatggagcatgaagattttattcgtaataaccatggaaagatgcaaataaaaaacgctaaagccatcccgatgaaaagagagtttagcctttggttatttgatgaaaatggcgtgctatctaagagtaagaatattttacttaatggttttcttgatatggaggaaaaagtccctcatctagtgacgggggagttagtctatcgctttgaaaaagatgttattaatcctcaggcattttctctatcagaagatattcaagatccctacgcactggagcctagctatcagcatggcgcattttcccctttaatctctgccaccctttatgccaacgatatggtgcgtttttatggccgttatactgagcaattgcgtttacctaacttatttgaagataccagtggtttttcaggctctaaagctcgctattatggttttaagttaaagccagagcgtgccaaaagcagtgagtttggtgtggttgttgattttacgcattggttgaatatagagcgccatgctgatattaaaattaattactttaaaacgaacattgaaaatgtatttgatagagatgctaattggcaaattagacagttagaaaaacaaatattagaaggtgtagagttacaagcccggtttgataatggatttattttctttgataccgcattagtgtatagccataaaaataaagtctgtgatgaaaatgctttttatgagcttgatgcatcaggattatcgggtattaaaaactgtatgacagggggataccctggcggatttttgcgcacctcaatgcagcctaaatactcagttaacctacatttaggcacgcgctggctaaatgataaattagaattaggtagtcgctggctctattcatcagaagttgaaaataaagatgagaaatggcttaaagaaaatttacctaatagctattttggcataaataataatccgatgcgttgggcaaaagtatttactattgatgcttatgcaacttatcaatatagccccaatttatcttttgaaataacaggaagtaatttattaaatgaatattacattgatccgctgacccgttctggtatgccggcaccaggaagaagtttgcgattaggtgtaacagcccaattttaa

SEQ ID NO: 310765 - DNA, 204 bp, Proteus mirabilis; identical to SEQ ID NO: 306323

SEQ ID NO: 310766 - DNA, 291 bp, Proteus mirabilis
atgggcgataaccaaaaatacacaaccattaaaatacgcaccctttgcacagcttgtggtaatgattgcagtgaacacctaataacggttggtgaaaatattatcctttgttttacgtgtatagataaaaccaaagaaaaggttgacttatacagaaaggaaatagctgaaaaggaaattcaacagatgtatgccgatatgattaaacctgatgacccaccatatagcatgccaaactcaaaaacttatgcagagcgcttatataaagctggatatagaaaggtggagtga

SEQ ID NO: 310767 - DNA, 192 bp, Proteus mirabilis
atgtatctaggctttctcgatattagtattgggctgttttttatttttggtaactggggatttttaggggctgcgcttgccttctactttattaccgatcgctatactattgtgcaagaagagaaaatattaagtgagcggtttccacaagcgtggcgacaatattgccgccacgttcgacgctggatataa

SEQ ID NO: 310768 - DNA, 978 bp, Proteus mirabilis
ttgagaaaaatattacactatattgttttagcgttaggtttatttattattacgctaaatgtatccgcacaggcaccggaaaatttcactaaagcaaaacagctagccagagaacgcatttattatgatcaaaatcaaaacaaccaaggtacgctgtattgtggttgtcattgggagtgggtaggaaaatcagggggacgtgttaatttagccagttgtggttatcaagtgagggcacaagccacccgagcttcacgtattgaatgggaacatatcgtccctgcttgggtttttggtcatcaacgtcaatgctggcaaaatggtgggcgagctaactgtgttaaaaacgatcctatttttggcaaaattgaggctgatttacataatctagcgccttcgattggagaggtgaatggtgatcgcagtaattttagctttggtcaattatcatctcaagcgccttatcaatatggccagtgtcgcagtcgggtcgattttgcttctcgcacctttgagcctcgtaatgaggtgaaaggccaagttgcacgtgtctatttctacttgcatgatcgttataacctctcaatgtcacgtcaacaacaacagctttttatggcatgggataaagcttacccaccaacaccgtgggaaagagagcgagataatcgaattgctaacattgttgggcatcataatccctttgttacgggacaaatgaagtggcagttaggacataaaaatagtggtgcaggattaactgcaacatatcgtcctacaactgacaaaatagaaatgcctaaagcggccacagtctcccaagatgagcagatcaaaggtaatctaaatagtaaaatttatcatttttcacactgtactggttatagaaccatgtcagataaaaatgcggtgtattttaaaaccgaaaatgaagcaactaaagcgggttaccgattagcaaataactgtaaagcgctttag

SEQ ID NO: 310769 - DNA, 1335 bp, Proteus mirabilis
atgggtaagaaaagatacaaatctaaatatgatgtagttgaaacattaaagcaacaaatatttccgttagaatatgaggagttaatacaggatttgtatgataaagcttgtagggggtctagtcagctttgggataaaatcacaaatgtcgatgatttaattcatgatttgcagttaaaaaaagatttctatgcttcagctaataaaggcatgaacgaagcacaagattgtattatttccattattcaaggtagtgataagattgattacccacaagagcttttgctccgagggattgctgacgcaattgcttggcagttattaggtcaacaactatgttatggaagaagattttttaaggctgtaaagcagcctgatctatataattgcaattttgattctgttgtttttgctgtgaaagagctgcgtaaagataaacctgatttagtaccattaatatcagatctaacatcattcattcaagttggcgatttattaatgtttgagcctgagaaaggtatcaggttatgtgaagttaaagaaggagaaatgaattctaaaataggagaattcatgaacttttatattagctcacgttgcgacagatctttattttacttcactaaaaaagaaggtactaacgctctgaagcagcttcaaagaatgtttagacaagcaagtagaatgtcacatgtttctaaagttctttcaacaggtataggtgtagatccagatactcaagataaaatatatataccagaacaattctttgagataaccacatgggatgatcggcttgaaagcgcattagaaaaatcagatgaagaaagttacgttattgatgtaatagataattgtttatttttggggatctactcatccgagcatatgcggaagggggggcatatagcatttaatctttggtttgacggttgcggtggctcatcagattgtcctagggttagtttattagattgtatgaaaataccacttgctttacctatatttagtcgttgcataccggacaaatataaatttgatattttatttggccgaaagcatgtctgtatggggatatctattgatggactaatcaacgagtgtagaaaagaaggattacaggtaagatttgcaactaaaaaagaaaggggacgtctagataatacaagtaacaagccttttaaatataaaggagaagtaattttcattggtaatgctaaagcagagtttgcaataatggatggtttttttttaagggtattatttcatggtcagagagcagtttcattaattaaagtgatgctagattcagctgaagaggctaatattatttag

SEQ ID NO: 310770 - DNA, 441 bp, Proteus mirabilis
atgaaaaaacgatttttatctctttccggattgctgatgctgtcgctgtcatgcctgccgttgaccgccggggcagcagtggtgctgtataccacgcaggatgacgctctgccgcagacggacatcccgtttgaggtggtgtatctggatgcgcctgaacgcctgctggatgaggccctgcttcagccggggacggaactgagtgaagcggatgccccgcacatcaccgccctgttacaaagtccggcctggcaggccagagaaacggcattacggcaggcttatcagggcgtggttcaggcctggcagctgggggtgtcatctctgccggcggtcgtcgttgatgcgcagtgggtggtttacggcaccaccgatattgcacaggcggtgacgcagatacagcagtaccgggaacaacaggaaggaggaggtcaaccatga

SEQ ID NO: 310771 - DNA, 975 bp, Proteus mirabilis; identical to SEQ ID NO: 103770

SEQ ID NO: 310772 - DNA, 558 bp, Proteus mirabilis; identical to SEQ ID NO: 295742

SEQ ID NO: 310773 - DNA, 261 bp, Proteus mirabilis
ttgaatgatagtgattataaggaactatttatcaatactgttcccattgatgttgaaaaactacacttagaagcaactaataaagactttcattctctagctcagacagctcatcgtctgaaaggggtttttgctatgttagatttagaatatctcagagagaactgcgaatatttagaagatgacataaaaaatcataatgaattagagataaaagaacgtatcaatcaactggataaatggatccgacagttgctgtag

SEQ ID NO: 310774 - DNA, 657 bp, Proteus mirabilis
atgaataaccttaatattattattgccgatgatcatccaattgttttattcggcattcgtaaatctttagaacaaattgaatgggttaatgttgttggtgaatttgaagattccacttcacttatcaataacttatctaaattaaatgcagatgctcttatcaccgacctatctatgcctggtgataaatatggtgatggtattacgttgataaagtacatcaaaagacattatcctaatttgtctattattgtactcactatgaacaataacccagctatcttaagtgctgttcttgaccttgaaatcgaaggtattgtattaaaacaaggtgcacctgctgatctacctaaagcacttgcagcattgcaaaaaggcaagaaatttatgcctgaaagcgtggctaagctgttagaaaaagtgaatgccaatggttatggtgataaacgcttatctcccaaagaaagtgaagtgttgcgcttatttgccgaaggtttccttgtcactgagattgctaaaaaactcaatcgtagtatcaagactatcagtagtcagaaaaaatcagccatgatgaagctcggtgtcgacaatgatatcgctctgcttaactacctatcatcagtcactattgataaggaaattaacggagaaagctaa

SEQ ID NO: 310775 - DNA, 462 bp, Proteus mirabilis
atgtgtataagagacagaattaagattatcctacaattaccacaaacaaaattagagtctgatgactcagaaaataacgcgttaatgacggatcacgatctacaattattgacagtgctcattgttgatgatcaccctatcaatcgtttattgttgaccgatcaactgaaaaaaattggttttaataccgcaacggcagaagatggctgtgatgctttagcctttatgcaagaaaatcatgtcgatattattttaaccgatgtcaatatgccaaatatgaatggctatcaattagcgacaacagtgcgtgaattgagtagcactattcctattattggcgttacagcaaatgcgattgccgaagaaaaacaacgttgtattgatgcgggaatgaatgattgtgtttccaagccagtctctcttactgtattaaaagacgtattactcacctatgtggcataa

SEQ ID NO: 310776 - DNA, 492 bp, Proteus mirabilis; identical to SEQ ID NO: 303115

SEQ ID NO: 310777 - DNA, 462 bp, Proteus mirabilis
atgaaatacggaaaactctatgccgtcattgcgatggtaggcattatcgtgggtagttattgggtgattaactggcaagctaataggattaattcactgacagatatcaacaaaaaactggccgtggctctcgaagaacagaagtctattaatactgattatcaagcacgcataatgcgattaaatcagttggatattcaatatacgcaggagttagcgaatgccaagaatgaaattagtcgcttgcgtgatattagcgagcgtcatcctgagcgggtgtatatcaaagccgagtgcccaaaaagcaaaaccactcccgccaccagcttggcttatgcaaccaccgcccgacctactgacaccgctatccgaaattattggttactcagagaacgaattgcagagtcagagcaaatgattaaagggttgcaggattatatcaaacaagaatgcatggaataa

SEQ ID NO: 310778 - DNA, 696 bp, Proteus mirabilis
atgcgcactgagctagaaggtatttttaatgatgaaacctttttagccgatttagatgatgcacttccacaaggctcacagcgagagcttaatactgccggtcgccgccgtatcgtcattatggtcactaaagaagcccattgtattggtgacctcttaatgaaaagtgcttttggtgatctggatgttgaaattgcagcagttattggtaatcacgacacgctaaaacaccttgttgagcaatttgggatccctttccatctcattagtcatgaagggttaacccgtgatcagcatgatgaaaaactgatagcacaaattgaccaatacaaacctgattatgtggtattagctaaatatatgcgtgtattaacccccgcatttgtacaacattacccaaatcaaattattaatatacatcactctttcttaccggcatttattggcgcccgcccatatcatcaagcctatgaacgtggtgtaaaaattattggcgccacagctcactatgtaaatgataatttagatgaaggccctattattactcaaaatgtaataaacgtagaccacactttttcagcagaagatatgatgcgcgcaggacgggatgtagagaaaaacgtactaagccacgccctctattgggtgctctcgcaacgtgtttttgtctatggcaacagaacaattattttgtag

SEQ ID NO: 310779 - DNA, 423 bp, Proteus mirabilis
atgaaacattttattggttctgcttcaccagatactttaaccttaactttatctgcatggtattttaattggtttgatgagctagattctgccgcaataagagcggcagctagtgtagcagcccaagtctctgcaacattattaggttttctaattacggggctatccatactagcttcagtatcagggaatagattactgaaaaaaatgcaagagtctgggcattatcaggttttattaaaaaaaatttttgtagtatcaatttggtatgcatcttcgcttgttataggttgttggacggttatttcaccatttaatttattatttgttagtgcatatatatcgctgttcgtatttttaagctctattctgatgcttggtgatattggttggcgattttggctagtattaacaaacatttaa

SEQ ID NO: 310780 - DNA, 498 bp, Proteus mirabilis
atgtttaccccccttaatcggcgcttatacagaagtaaaattgagctttcaggtaaagaaattaaaaactatctacaagatatatttaatgaacgcctgagccggcacaatattcattttgagtctacgaatgattttttaactaggacaactgaagtttatccatcttcttttttacctgtatttatcaatgttgttgataatgctatctattggttaaatacacagactgatagtgagaatccattcaaaaccatcaagttagatgttgatggtgagtccttgacaataagtaataatggtccagaaatcgcgattcaagataaagatagaatctttgattttactttttcaagaaaaagtagtggtagaggaatgggtttgtacataagtaagcaatctctaaataatgaaggatttgacatccaattaattaatgggagtgctaatgcttctacatgttttgctatcagcaaacaaaatttggaggaagcataa

SEQ ID NO: 310781 - DNA, 309 bp, Proteus mirabilis; identical to SEQ ID NO: 298420

SEQ ID NO: 310782 - DNA, 270 bp, Proteus mirabilis
atgttggttagatttggattagaaaatgaaattaagattaagtccttgattaaagcatattatgaattgcgtagaggcgataaaaatgaacataaatatatacctaatttagataatttgactattaagcaacaaagagaaatgctgttaatgtggttagataaaaaaagggtagattctcttagaaacgaacaagtccgtaaaatgtttagacaaaaaatatcaatctctgttaaagagttagagcaagacatctccgaaatatcataa

SEQ ID NO: 310783 - DNA, 171 bp, Proteus mirabilis
atgcagcaggcattgcaacaattgatgaaaataacattttcggaatggataatattatcaggaaaaataagtgctctttcagaaataaacggcatatgtaatgtacgtgtgcccgttgaaatagaaacccctgcttttagccatgcatcagccaccagctctgtacaataa

SEQ ID NO: 310784 - DNA, 498 bp, Proteus mirabilis
atgactggagttaatgctgatagtaacgggattgtgagaacgggtgatgctacggccttagtaaaagaagatgttacccaatccacaggcacatcaacaaccagcgtaatgagccaaaaggcgtctactgatgcattccaaccaaagggtgattatgcacaagcagggagttcatataccaagtccgagagtgatgcgcgttatgaaaaaagtggaatatataaacaatggcgaaaagtaggggattttaatggtgcatctgccgttgttgagataacgttaagtgaaaatattttaggtaaatatgtttatgtgcagagggatggcggaggagaaacgtatactggatttcttgtaccacccatttcaggtattaagttaggtgttccaatggggcaacagggttattgggatttcattgtttcacaagatggcagaaaactaaaacttacagatagtagttacggttcagctaaaggagtttatgttttagattaa

SEQ ID NO: 310785 - DNA, 453 bp, Proteus mirabilis
atgatatcagactcaattacgaaaattcaaaaattaaatccagtgaagaaaaatgtaactaatattttagaagcggaaaatttcattcttccttgtatatacctcattgaaaatcttgaccttgatagcttaagaatactgttaaagattgctacagagcaagatgatgcaatgtcagatatagcaacacgctcggctttaacaaaattgcaatctaagagaatgatcatgaaaacaactactgggtatgacatgacaaaaagtggtgctttgtacgttcgactaaagtttgttggccatcgtttagatcttgtccgtatagaactaatgaattttcaatatcgtgggaaatctgctgtttgttatgatagaatgagcaaacgcacctttagcgagttggtttttgagaaatcaggaattcaactgggtagtgattcgctgtccttcaattaa

SEQ ID NO: 310786 - DNA, 753 bp, Proteus mirabilis
atgagtgaagaaacctcaacaattatttttgaacacccgcttaatgagaaaatgcgttcatggcttagaattgaaaactcattaattcaattaaatagttttcaatctattaattcattatcttctgcattatctttttttcgtgccgtttcagaatttattgaagttttagatcgcggggagatccgcgcagagctacttaaagagttagaaaaaagacaaaaaaaactgcaacagtggttatcctttcctaatgtcgataaagagattgtcagtcatattattaatgagttatcagaaagtgcttgcgcattaagtaaagcaccacgtattggacaacatttaaaacaagataaaatcatcagcttagtaaaacaacgcctcagtattccgggaggatgttgtagctttgacgtccctactttgcatttgtggttaaatcttcctcaaacggtgcgtactgaaaagttaacttgttggcaggaagggttatatcctctacaaaatgcattaaatgccctattaacacttattcgtcaatcagatacatttaaaccggtattaagccataatggtttttatcaagacagtacggaagaaggtgaattattacggatcaagctacttgccagccagcaaatttaccctcaagtctcaggacacaaaaaccgttatgctattcgctttttgcctcttgacagtgagcatggcacaatcccttctgagctaccttttgagatttcatgttgttaa

SEQ ID NO: 310787 - DNA, 3075 bp, Proteus mirabilis
atggggctttggaaaagtaagaataatataagcttgatggctggtaaagatattgttagtcagggaataaaatattatagtaacaaagaaataacttttaatgcaggacaagatatttttcttgcctccaaattaataaaagaagccgctccttttttcagtgatattcattacccccaactacaatctaaattattttcagataataaccttattttaaatgccgcgcgtgatattgatttaagttcaacagtattaaattcaaaagataaaatcattgtattagcgggtagaaatataaaactgggtgcaaatgcttattccgccatcgaagatccccacgaagatgcgcaagacattcaatataccaccacatccattatgggaaataaaggtatttctattgcatcatcaggctcactcacaacagaaggaagttcacttaaatcagagggggatattgctatttccagtggtggcaatatccaattgggatcagtaagaacacattttcgtaaagagtcggactcagagttagaagaacttcgtaaacaagtcagtactgaaattaatagcggtaatcatctaacactattatctgagggcagtattttatttcaggcctctcaattggctgctaataaaaagatggatattgctgctaaaggtggatttctttatgcacaggcaatggaagaatccagttactatgaagaagaaaagaaaaaatgtaattggtggacactgtgtgcgactaaaaagaaatataccaaaacatttaataacacaacgaataaagttaccgagtttattgctaatgacgatattaatttaattgctaaagatgatatcactttagaagcaagcaaattagagacagcaaagaatgccaaattaaccagtaaaacaggaggcattaattttaaagcggtgaaagatactgcttttaaacaagttattactcgttcaaaagatatatatatcactcaacgtaatcagggatacaccaagggaacatggctattacctgaactctatattggcggaaagctgactattgatgcgccaaaaggcatatctgcagatattaaagccaaaaaagagcaatctttagagcaggcattaactgccttaagtaacacaccagaatatgcttggcttaatgcgctccaacgtcaagaaaatattaattggaatttagtgaaagacacttattccagttgggatgataaaacccagcagttaaatccagttgttggtgcggttattgccatcgcggtaggggttgcaacttatggtacggcaacagctgcctcaataggaggaatggcaagtaatgcaactattgctgcaggagcctctgcgggggttgcgtcaacggcatcagttgcggcacaagccggttttgcttctttagtttcgcaagctgcggtctctttagccgaaaatcaaggcaatatttctaaaacatttggcgccttaagtcgcagtgatacggtgaaatccattgtcaccagtatggccgttgcaggcaccttgcaaggtcttgaccaatttatgggttgggatcaagcaatacaggggggaacattaccgacaacaggtaagttgcttgcgacagataatgccacatggactcaagttgctcaacgcgttgcctcacagtcagtagtgagttctacactggggacagccattcaaggtggcagttttattgataattttaaaactgcgctattaagccatatcggcagtcaatttcacgctgaaggtgccaatctcattggtgataacggtgcggtattagggcatgcaggaaaggttttaagccattctgttgttgcaggagtgagtgctgaaattgcaggaggcagtgtaacaggtgcagtagccggcgccttggcagcagaaatagcggcaatatcgctacaaagtaaattatttgagcctagttatttaaatgaaactgacagacaagttgcattaattcaagaggcactacatggcaatgaaggaaaaacacagctcactaaattaattggtgcactgacaggcgctattgtgactcgtaagcctgagggcgtattttctgcggctaattctgcggagttagtttatcgacataattacagcgaacatatgctttcaaagctagcactagaaaataataaggacataattgcagcgtcaaaaggtgatgttgcagcagcagaaagagttgtaaatcgacaaaatgcagggatgattgcgattgctcttggtttaggaggaagtgcgagcattattggtggtcacactgttattgcagcaacaccagaacttattgctattacgcaagctgcatttagtacatgtaaagctaattgggtttattgtgctaatcagctaggtattaatattgctgggatatcagctccagaagctgcaatcgctggtgtcaccgttggtactggttataaagtattagctagttcagaagaaagtgctaaagctttctctagcatgttagctaatagttcaaagtctttaatgacttcaggaaaattaaatataactgctataaaaccgatagtagaacaagaaaaattattaataactaccaacaaaaaagctattgaaataatcaataacggggagtttataatatattcaggagtaactacgaatggatataaagtatctaatggagccaaaaccgtagtttttaaaaatgaattagaacatcctattgttcaatctaggattaatattaaagtgggagatgttgaatcaggttggttgcatgtacaaaaacgtcatttttcaggagcgcaaaatgctagccaatttacgcttagtgaacaggaaattaaagatatattattaagtcctgctgtcattaagattcctattaataaaacgagagaatcatataataaaaacaccaatagtattgatattttgtatgaaagagtgattcagcttgataaaaatataggaattgataaatttagtaaacagccaactaacataattactatgctcacagataaaaatggaaatttaataactactacccctggggaaataaagtga

SEQ ID NO: 310788 - DNA, 1170 bp, Proteus mirabilis
atgaatcagaataactttaataaattaatttctaggcaaaatacctacagtgctaaatggtgcaacagtaacgccaatgttattccattatcggttgccgatatggatatttctgcaccagattttattattaataaactcagtcagtttaatttaaccggtatttatggctataccgatcttagttctgattggaataatgttgcggtaaattggtttaaatctcaatatgcttggcatgttacacctgaatctgtggtgttttgccctcgtattatccaagccgtctctctctatattcaaaattttactcaaattggcgataaagtgacaaccttgtcacctgcttatcatcctattagcaatacagtttgtgtaaatcatcgccatctactagaaagcccattaatttatcataatggatactatgaaatagattttgacgatttagaagataaatttaaacaatctgtctgttttatattgctctctccccataatccaaccggaacagtatggcaacaagctgatttattaaaaattgctaaacttgctgaaaaatataaagtttttattatttctgatgacgttcatgctgattttgtttttgataatgccatttatcgtcctatatcaactttaagtagctatgtagagcaacactcttttatttgcacatcaccggctaaaaccttcaatttagcggggcttgaaatagccaatattgtgattgctaatccagaatatcgtgagaaatttaaacaatgcttaattgccgcaggtattcataatcctggttacttctctgtccctgctttcttacaagcttataccttacaaggtcaacaatggatcaaggagcttaaacattaccttgctgaaaacaggcagtgggtaaaagagcaatgtgcacgttattttcctgattgggttatcactcaaagccatggcacctacatgctatggatcaattatcaaaaaatgcagttaaccgaacaacaattaaagcattggtttgtttcattagccgaagtagaaatgagttggggaagcggttttggtgcggctggggatggttttttccgcattaatattgctacacctcgttcaatattagaaaccgtttttactcggcttattcgtacctcacctcacgccagtttggaataa

SEQ ID NO: 310789 - DNA, 384 bp, Proteus mirabilis
  misc_feature (350)..(359): n is a, c, g, or t
atgagttttactgatgccgctctatctacgtcaattcttcattgtaaagataaagttgatctaaaattaattattaatgcaaggcattataaagatgctatttttaaaacaaatattccaggagttggctttaagatatcagcgaataaaacaccttttaacttagtaggcgatgaatttaatgtaacacctgaatatgcaaatgtctgtaatgctcaaactagaaaagaaggatataaaaatatatattgtactgatagttggccaagactatatattcaattaataaaaataagcgaaatcgttctagaacctctgagcgacatatttgttatggatgattttcttgnnnnnnnnnnattttcttgtttatacattagataa

SEQ ID NO: 310790 - DNA, 483 bp, Proteus mirabilis; identical to SEQ ID NO: 305267

SEQ ID NO: 310791 - DNA, 729 bp, Proteus mirabilis
atgccagccgaatatatttggagcaaggaagctcctgttgatgaagaaaaaataaaggcattggatttcgggactgctatccattgccttttgttagaaccagatgaatacagtaagcgatacaagataggccctgatgtaaatcgtagaacaaatgcagggaagcaagaggaaaaggaatttctcgaaatgtgtgaaaaggaaggtatcacaccaatcactcatgacgataacaggaagttgatgctcatgagagatagtgcaatagcacaccctatcgcaagatggtgcttagaagctaacggagtagctgaaagtagcatttattggaacgacgaagatacggacattctttgtcgttgccggccagataaaatcattcaagagcaccactggattgttgatgtaaaaagctctgctgacattcaacgatttgaccgttccatgtacgaatatcgatatcacgtacaggactctttttattctgatggatataaatcattaacaggcgaatcccctgtatttgtctttctcgttgttagtacgactatcgactgcggtagataccccgttagagttttcaatttagaccaacaagcaaaagatattggtcgaacaacctacaaacaaaatttaagaacgtatgcagaatgcctaaaaacggatgaatgggcaggcatacgtacattatcactgccctattgggctaaggaattaaggaatgagtaa

SEQ ID NO: 310792 - DNA, 396 bp, Proteus mirabilis
atgatagataaaaaaaaactacatattgctgcaggtgtgatttgtgataagcaaaataatgtatttattacccaacgtcctttgacatctcatatgggaggatattgggagtttcctggtggaaaactagaagataaagagacgccagagcaggcattataccgtgagttgcaagaagaaataggtattaatgtgacacaatgccagttgcttgaaacggtagagcatgattttattgataggcatattacattatcattctttttagtcacagagtgggaaaataaaccttacggtaaagaggggcaactttcccgctgggtacctattatgtccttaaatgccgaagattttccaccagctaatcgctctattgttgccttattgcaaaaataa

SEQ ID NO: 310793 - DNA, 381 bp, Proteus mirabilis
  misc_feature (293)..(302): n is a, c, g, or t
atgaagataaaaaaattagtttggatagccttttttgcattattgattagcgctggcgcagccacattatatattatgcaaagccttcgtgggttagagaacaatgttgtggtaaagcaagatgaaatgctgcttactgttccggcaggaacagggcgtattgcgatggaacaattgcttattaagaataatcttcttaaacaaggagattattttcaaattttattaaaagtaaaaccagaactcagtcaatttaaagcagggacttatcgtttaacaaaaggtatgacacnnnnnnnnnngtatgacactgcgggatgttttgctgttaataaaaagtggcaaagaggcgcagtttacgattcgatttatcgagggtag

SEQ ID NO: 310794 - DNA, 720 bp, Proteus mirabilis
atgatgaaaaaagaaattattgaacactctattgatcggttatgtaatgctttacgattatttggtgagtgttcgttctcggtaaaaaatcttatttatatagataaagaggaagctgtagacaaccatgatagagctttcgaagcaatattagaatcatttcacaccttatatgacactagtaaaaaaaaagttaattatttcaaaaatccttcagcatcacttctaattattataagaaatgcaattcatcatagagatcattcattatttaatagctggaatagagcaatggttagaaatagtggatataaaaaatataatggcgctgaatttctactttgtagttataatcctctaaatgtagattcacatgttatgcaatactattataaacttgatgatattttcactcaattggataatggaaagtatattaagcctgaaaataaaaaaatcatcatagatgggttaagtttaaactctattaaaaactatgctattaataatagatatccatctgaacaagtttatttgaatataattccagttatgtgttcagctgtaagatatacatttgatgagttactaaaaaatggtattgaaccttctggatttgattctgaggtttatttaaatcattttactacaaatggtttttttaatctaaaatcaatcaattatagaccatggagaattattgattttacatcagtttaa

SEQ ID NO: 310795 - DNA, 777 bp, Proteus mirabilis
atgggagaacgagatttttcgcttttttattttgcaactatcgataggtcttatttccttgataagcacactttttatgttgctgaagccagaaagcgtctatttgctcagtttagtgattcatatcttgaagctgaagctctgcaaaaagaacaagattattatgaggcagcaggtaagtgttttgaccccgattatgatgatgaagggggtatttgggaacgggctcatgatgaaggaatttcacattggattgctctcagtgatatgaaaaatacagtttcacttgctctgacagcgggaatgtttcatcagtttgataaggaacttcgcgagaagtgtatccgtgaatttagccactggatcgacactaaaatcgtaacatcaatgatttgggatattggcttcccaagattaattgaaattctagaatggattggcatggatataactagtaagacttattacgagaaaatcgatgcttgccgtcaagtcgttaatgtttataagcatggtgatggtcatgctcatcgggaactttccgctacgcatcccgagtattatcagaatttcaatattctagcaggctaccagttcagtctgggtcatgagcaacttgaagttacagaaacacagtttattgagtttgcagatgcgattactgctttttggaatgatattccaatatactgtatgcgttctgctattcggaaaactccgaaatggatagatctcgaatacagaaagcatgagaagaaaattaaaaatcttagctaa

SEQ ID NO: 310796 - DNA, 1761 bp, Proteus mirabilis
atgcaattattgattgatgaattaggcaaaaatatgcaaaaaaaacaattctcccttacatcacatcatactgacaaacaacatcgtttattaaaatggagcttactcagcttatattttatctctgtccccttattggctgatcccgtcaatcaagcactctctatcgatgcccgcgagcaacaacgccagcaagaacgagagcgcatgttacaacagcagaacaaccccgttgtggatacgcgtattcaacagcctgatttaacgctgcctgattatccgcaaaatgaacaaccctgctttaccatttccactatccgtcttgatggtgagtccgctgccgattttcagtggacattaaaggccgttaacgacgccaaaggccagtgcttgggtagccaagggattttgttagtcctcaataaagtccaaaatgccattttagaaaaagggtatgtgaccacccgcgtgatggcacaagagcaagatttgaaccaaggtgagttagttctcacgcttcaaccgggacggattaatgccattcgttttgatgaaggcacttcatggcgtgggcgtttatggaatgccattcctggtgcctcaggcgatattctgaatctgcgtgatattgagcaagggctagaaaactttaaacgcgtacccaatgtcactgccgatattcgtatcgaacccggcccaattgatggtaccagtgacttagtggtcagttggcaagaaaagcgtcctgtgcgattaagcttcagtcttgatgatagtggctcaaaaagcaccgggcgctatttaggctctgcgacgctagccattgatgcgccgtttgcccaaaacgatatgttttacgccaatatcagtaaagacttgtttgataaaggcccttttggtaaccgttcttacaccctgaactatttcattcctgttggcaattggggctttgccgccaattacaatgaatataattatcaccagaatattcccaatgccaacgaagtgttacgttatagcggtaagagcgataccgcacaatttactctatcacggttactgtttcgcgaccaaatccacaaaaccacccttaatctgcgtacttaccgaaaaaccgccagtaacgccgttaatgacattgatattgaacaacaacgccgccgtaccgcagggtgggaaatcggccttaatcagcgcagcttcttaggcaatgccacactcgatgccaatattaactggcgtcgcggtacaggcgcctacggcgcacgccgtgcccctgaagaagatacccacagcggcagtgcccgcgtgggcatttttcttggggacatcagtttcaatcaacccttcacgttgggcgaacagtcttggcgctggaataccactttacggggtcaatggactcagcatgccctaacaccacaagagcgcatgtccattggcggacgctataccgtgcgtggttttgacggagagcaagtactgtcgggtgaaaaaggcctgttatggcgcaacgaactggcatggaatgttttttctaaagggcaagaactgtatttagccgctgattacgggcgtgttgaaggccaaagtacccaataccttgtgggacatcaacttgccggtaccgcattaggacttcgtggctcactcttctctcgtttgagctatgacctgtttgttggcgtgccattatataagccgaaaaaattcgatacgtcaggagcgacggcaggttttagcctcaaccttgaaatttaa

SEQ ID NO: 310797 - DNA, 11010 bp, Proteus mirabilis
atgaataagcattgttatcgtttaatttttagccgcactcatggggaattacgtgttgtatcggaactggcgaaaagctgtagcaccgattcaggccaaacacgaggcgtaaatggtaatcgtctatgggtcactctacgccgcacctcattactgctgtggttagccttgtggggtacctcagccatggcgagcagcattattgccgataacaatgcaccacaaaaccaacgcccggaggtgatcaatacgcaaaatgggcttccacaagtcaatattgcggcaccaaatggctccggtatttctcataaccaatataaacaatttgatgtcgataaccgtggcgccattctcaataactcggcggtgatgacttcaacacaaaccgcagggatgatccaaggtaacccgaatcttgacccaaacaaagctcctgcgcgcgtgattctgaatgaagtcaacagcaataacccaagccaaattaaaggctttctggaagttgcaggcggtaaagcgcaagtgattgtcgctaacccatcgggaattatttgtaatggctgtggcactatcaatgcaggtcgtatgacccttaccacagggaaacccctatttaatcaagacggtagccttgcaggatatcaagtagaacgcggggttattcgtgttgaaggtggaggattaaatgccgatagtcgccacgatacgcagtatgttgatctgctcgcccgtgccgttgaaatcaattctggtgtgtgggcgaaagaaaaaatagcgatcgttgcgggtaaaaataaggtcgatacgcaaaataaagccactccgataaagagccaaactgcacaacctgaatttgccatcgacatgggccaaatgggtggtatgtacagcggttatatccacatggtgggcaccgaaaaaggtgtgggcgttcgcaatcaaggtgggcacatacaagcggataaaaccttaacggtgaaaagtaatgggcagttagtctggcaatcagcaaaaacacaagaagccgttacccaagccaacggggatattaccttattagccaaagacaaccttatacatcaaggtaaattacacagtggtggcgtcttaaacgtagaaagtcaaacaggttcagtggacaactcggggacacttgctgccctcaaagacgttaatatcaatgcgaaaggcgatatccacagtcaaggtaacgtgctcgcgggcagtgataataaaagtaagattattaataacgccaatatcatattaaccagtgagggaaaaattgatactcgtggcacattgctaagtaagcaaaatatcactgcaacagcaaaatcactggatttaagccaaacacaaatcgcggcatcaaacttggcgctgacatctaaacaaggggatatcgcccttactcaagcaaaaattgatgtgagtgatgccaaactcagtagtgtacgtgatattcatactcagcaaattcaaattcaagcccaacaatggaatatcaacgccaataacctgtttaatcaaaatggaacttgggtacaaacagggcagaatgagagccaattttccctcaaagggcaactaaataatcaaggcggtgcgattgaaacccaccgccttaagctcaatgccgattcactgaataaccaagcaggccgattagttgcgttaagcaaaagccaacaagattggcagataaaaaatagcattaataatcaacaaggtgaagtcggggcaaatggcgatttaactcttaccgcaaactcaattgataatcaatcgggcaccattaaaagccaaactaaactggctttgaatgccaaagagcaaattgataatagcgcaggtaaccttgtggcgggaaatgccgtcaacctgcaagcaggcaaatcgctgaacaaccaatcggggacaattaatagccagcaagttgctgtcaccacggacaatctcaataatgcactgggtaaactgattagccaaacaaccctcgatattgtggctcagcagcaagtgaataatgccaacggttttattggttcaggtgataaactcactctcgctacgcaaaatttggttaacagccaacaagggacggtgcaaagtgagacacaatcaaatattcatgcgaaagaaattgataataacaaaggccaactgttggctggaaaagacattttactcacaactaatgcattatattcagaaaaaggcaatgtgagcgctaaaaatgtcaatattcaggctgatacaataaataatattgaaggtaaaataattggccaagataaactcactatcgcccttaataatttactgaataatacccgcggtaaactgctcacgaataatactcttactgtatctgggcagggtgatattcataatcagaaaggtattttgcaaagtagtgaaaatgccactgtcgcattagaaaacatacacaacgaacaaggaaaaattgttgcaggccaacaatttacaataaatagcaaaaataaacttgataacatgcaaggtgaaataaatgcggaattattaacaatcactgctgataaattaaataatcagcaaggcaatattattgccactaaggatcttgatataacgtcaaataaaactattaataacagacaaggtctagttgaagctggtcagaagttcatagccacaacacaacgtgattgggacaaccaacaaggtgttacacaagcaggtttatcaatgactgtcagcgcaaaaaacattgataatacaaaaggacaattacaatcaggtggtgagttagttttcagtacaacacataatgttattaatacactgggaaaaatagccgcacaaaacgctttgtattggcaaggtacgggatcgagccaatttaataaccgcaacggtaaagtacagagtaatggcaccttaacgctaaatggcggtcaattagcgaatcaacagcaaggtaatatatttagtcaaaaaacattacaactcttattaagaggcgatttgctcaatcaagacggtaagctgaccagtaatgaaaacactttgattaaaacgaacaatctgattaatacacaaggagaaataaacgcattaaataatttggatattcaattaattaatcagttagataatcgtaatggtcgtctttttggtcaatattcacagaatttaaatgcgaacgatattctaaatgaatctggttggatgggaagtctaggatcttggtctgcaaaaacaaatatattcaataatcaaatggggcaaatccagagtcaaaaagacgcacatttaacaacaaatacctttaataatgagaaaggccttttccaatcaagtaataatattatattgcatattgcaaatagcattgataacacccaaggtaaaatcagcgcacaaaaagaaatttattctcaaggtcttcattctaatcaatcaacagatctcatcaaaaacaatgaaggtcagtggttagcggggaatacattaaaactattcgctttgaatattgataactcacaaaaagggttactgtatagtcaaaagcagatgcaacttgttgtcaaaaatgagctgaataaccaacaaggtaatatccaaagtggggataacctcgccttaactgcccaatcactgcaaaatcaatcaggattaatcgacagcctacaggctattaatttgcgtttatctaacttattggataacacgtcaggtaaaataagaagtaaccaacatcagaccatccaagcctcagatattcaaaatcatcaaggtcatatcagtagccaaagtgaacttactgtcaacgccacacagcttgataatgaccaaggtctgttgattagccaacaaaacagtgattaccaccttgagcgaatcaataaccagagcggtaaaatacacagcggtcaggggttaaccgtaacagcagacacactgcaaaatcaacaaggtcaactggtttcaacacaatcactgactatcaatacaacgcaattagataatcacaatcaaggtgttttaagtagccaagcgggtttaaatctcatcacgactaaccttaataaccgtgataatggtttaatttggggcacgacgcaaaatgtgatttcagcaaaaaatatcgataatacccaaggctatttacagagccatggcgcattgaccttagataatctaacgtcactagataaccaaaaaggtcatattttagctaatggggcgattgcgataaatgcgaaagacgcccctcttgcctcgaccttaatattattgaatcagcgtggcgttattcaaagtggtgataaactcacacttaatactcagactttcaataaccaaggaggcacgttacaaagccaaaatgctttaacgcttaccgcaaaacaagatcatactcaacgtaatggcgatatattaagtagcaatcaatccgtttccctttctatttctggtgtatttacgaatttagctgactggttattacctgcttcactgacgataaaaagccaaaatgtgatcaactcaggttcgttagtcagccgtacattaaatttcaatacaggcttattaaaaaaccgcggtcgccttgaagccgatgattttacgtttaatctcacaagtctagataataccgccgctattatgggcgataatgcggttattcacgcacaatcaatcgataacaacagtaaaaatgccgttattgcgatgacgcaatcactcgatttaaccgcgaacaataacctgataaatcataacggagccttgatttatagtggtgataaattatcgcttaccagcccagagattgaaaataaagccagttttattgaagctgaaggcgatgtggctattaaagctgatcaacttcgtaatttacgtgaaggactagagattgagcgagatgctgagaaaaaggattatcgttggcatcgttaccattatttttggcgttcttataattcaaatgtgattaccgacgctaccccttttgcgccgaccactcagaagttaacatttaatgatgataatgaggcaattaataataaatacggcacattaaccgctattgatgcttctaacaaaaaggtgcaagtcctagttaaaaacatcaatgacaacacaccaatgcgcttatgggtgcattacgaatcactgatcccaaatagtgacggcacctataatatgactttttatcagacgacaggatttgaacagataggtggtgtacctactccttatcataatacagtatggcgagaatttacgggccagcctcgaattgagcaatgggatccagagatccatgtcagtagttatgatttaaaattcataagcgattatagtaatttccgtgaacgaacagtctcaggatcattgactcgggataaattgatttctgaaggagttggcgcacgtatcctttcaggtggcaatatgaaccttaatatttcaggactattgcttaatgatgccagtgtgatcacctcaatgggaaatcaatccattgatggaaaagctaaaatagagaataacgcctattccattaatgaacgccgtcgagagtatattgttgatcactatgataaggatactaaacattggtatccaagttttgataacgatgaaaccatcgcattagccaccattgatagtattatttcaggtaatggcgatgtggcgatcaacggaacatcgatcactaataccacggtgaatgcggcacaaattaatgaaattgaagccgcattaaacgcagttaaggcagagcgcgctgagttcgagcgtaatccgctgggatttaatattgatggagtggagaaacaaaccgtcaataccgaaataaaaaccagtgataaaacagatgtacccctgaccgatgcgacctcccctttaacgcgtccgcttttaccttctgaaatcgcactgactgaaaaacaacatttaggcaatgtgatcaccgaacttcctgataacggcctctttcgacaaaatttatcccctgataatccgtttttaattgtcactgatgaacgctttaccaaccgtaataaatttattagcagtgactatttactcgatcgtgtaggttatgatccggcgcaagtgcataaacgcttaggggatgggttctacgaacaacgtcttgtgcgtgagcaagtattaaaactgacggggcgcccttcactttatgaaggcgatgccatggcacagtatcaatatcttatgaacaatggtgtgaaagtcgcgagtgattttcagttacgtcctggcgtggccttaacgcctgaacaaattgcagcattagaacaagatattgtttggttagtcagcgaaacggtagaaaccgcccaaggccctcaaacggtattggtaccaaaagtttatttagcgaataaaacgttagatttattaagccatggcgcactcgttagcggtaataatttacatctttccgcagaaagcattgataatgcagggcaactattggcgaataaaggactagagattgaggccaaccaattcacacatcaaggcggagatattcatgcacaaaatatcacagttcaagccgatagcattcatttaagcaccaacctacaagatgccttgcgtcaagccacaatgagtggaacagatatcaccttacaagggcataatattcaactgcaaggggcaaaactggatgccttaaaagacattaatctaaatgcacgtgataatttaactattactacagcaaaaagtacccattctggtgaatttgatgtgatatcgggttcaatgggtagtcggactgaaaattttatagaagaaccaggtgaacatcgccttgcacatctcagtggtgaatggcaacgtgcacaaggaagcgagttgaacgccggcggtaaccttaatctcaccgcggggaaagatgtcacactgcaaggcagtcaagtcaaagcggatcaacaactgaccgtaaatgcaggcgagaacctcaatatcctcgctgatagtaccacaaccaaaagccaccttgatgccaatagtaaaagcacctctgtgagcaatactcgtgaagaagagcgtttgcaattaagtacactgagtggcgataaaggcgtcagcctaaatgtggggcataccttgacagcacaaggtgctcaagtaaatagcaccgaaggtaaaaccaccgttcgtgctcaagatgtagatatccaatccgtcacacaacaggttgaagacagtgactatcagcattcaggcggaggacgtaaaagttacagtcgtcttgtggatactgcccaagaaaacgtggttggaagtacctttagcggacagcaaggtgttgcgattaccgcccgtgagggtgatattaatttaacaggtagcactttacacagtgaaaaaggggctgttgatttaagcgccacacaaaatattaatctcaataccgcgacagaaacccatacggagtttttagaagaacattcaaagagtaaaggatttttaagttctagtcagactcatactctccaaaatgatcatgtgacacgagagcaaggtagcgtcgtcagtggagagctagtcaatattcaagcgggtaaagatattcaagttacaggctcttcggttgttgctgaaaatgatgtgtcattacacgcaggtaataacgtctctattacagcggccacagaaacagattctcattatttattagaagagaaaaaacgcagtggtctctttagtgatggggggatcggttttacggtgggtaaacaatcctcccgccatgaagtggatgaaaaaggtaccacccaaagccaaagtgtcagcactattggcagcacacaaggtaatgtcaacatcaccgctggcaacaaactgcatgtgggtggcgctgacctgattgcccaaaaagacttaaacctcaccggtgacagcgtccaaatcgacccaggctatgatgaacggactcacactgaaacctttgaaaccaaacaaagtgggtttagtgttgcactctctggcagtgcaggtagcgccctcaatactgccgtcagcaccgcacaacaagctcgcaaagaaagtgacggtcgtttaagtgctctgcaaaacaccaaggcagtattatccggcgtccaagctcagcaagcggttgagttagatgggctgaaaaccgatgcagccaatgcgcacaaccttgccgacaacctcaaaccgggcgataaagactatcaagaaggcgccaccaatacagttggtgtcagcgtgtcttacggcagccaatcgtcgaaaagcgaaacccataccgacagtcgccaatcccaaggcagtaccttaaatgccggacaaaatctgtcgattaccgcaacgggtaaaaataaagacagcaacccagacagcggtaatatcacagtcgtcggcagtgaactcaaagcgggtaaagacttatcactgtctgccacgcaagatatcaaccttgtttctgcccaaaacaccgagcaaactaccagccaaaacagcagtaaaggtagcagtgtcggggttggcgtaggcgtgggtgcaggtggctacggggtcaatatctcagcctccgtcaaccaaggtaaaggccatgaaaaaggcaatggcctcacccacactgaaaccactctggatgcaggtaataaactcaccttaaacagtggacaagataccaccctcaaaggcgctcaagttagtggtgaacaagtcaccatcaatgtcggtcgtgacctcactttacaaagtgagcaagacagtgaccgctatgacgccaaacagcaagaggtcagcgtcggtggcggttacacgataggtggtacgccaaacatcaatatcagtgccagcaaggacaagatacacagtaactacgacagtgtgaaagagcaaaccggtatttttgccggcaaaggcggctttgatgtcaacgtcaaagagcacactcagcttgatggtgcggtgattgcctccactgcggaaaaagataaaaaccgccttgatacgggcacattaggctggaaagatatcgacaacaaagccgactttaccgcagagcacacgggcggttcgatgggcaccggtggcccaattggaggccaacttctcaccaatgccgcaggcgggttactctctaacgccaataacagtggccatgccgaaggcaccacgcaatcggcggtcagtgacggtagtgttattgttcgcaatgaagacaagcaaaaacaggatgttaacgagctaaatcgcgataccgagcacgccaataacggcagtattaacccgatattcgataaagagaaagagcaaaaccgcttaaaacaagcccagttaattggcgaaattggcaatcaggcgatggatatcatccgcactgaaggggatattgctggcctgaaagcgcagaaagaccccgatgcattagcagtcgcgaaaaaacagctggaattagaggggaaaacactcaccgatgacgccattaagcaacaagcctacaacaacgccatggcacaatatggcacgggcagcgacttccaaaaagccgcccaagcggttacagggttgctgcaagggctggcaggtgataatttagcaggcgcactggcaaatgcatcttctccgtacttagcgaccaagattaaagagctgacaactgacccaactactggtgaggttaacaaagcaaccaatgccatggcgcacgcagtattgggtgctgtagtcgctgagctaaataaccaatctgccgctgctggtggtttaggtgctggtggcggtgagttgtccgctaaagtgattatggataccctcttcccgggcaagaaggtttcagacttaaccgaaagtgagaagcaacaagtcagcgcactgagccaattggcttcaggattagctggcggactgactaccggtgatgtggccggtgcgattactggctcgcaagctgggaagaatgcggttgagaataactatctgagcgactcagagcaccgccagaagacgtcactggagctaaaagagaagcaaggtaagatcactgaagtcgagcaacagaaactcgctgagctgcgaattaaagatacagaaacaacacaaagattacttgatgcctgtgcaggcggtgtttcacctgaatgtaccgctgctagaaaagatgcattcaaaacgatagatacctacgtcagtttgacgtatcaaaatccaaaaacagcgcaggctggttatcaagaaattgaaaggctattgaattcgacttcaccggaagcacagcaagcatataatctattggaatcttatactaaagcgtttaaaaactttgggtatacagatgaagaagctcgctcacgtgcgggaatgtatgttggttcgatttatttgcttggtggtacgtctgcagttgcaaactcaggcgcattagtaaaacagtttggaaaagatgttgctaagccaaatgtcaaaccgaatgtaatagcgccaaaaggttcgaataatgggcttgaactagaagttatcaaaaatgaaaccattattactattacttatcctgatgggataagctttcaaatagaattaccaaaacatttagcgacaatggataaatttacccaaaaagcgggagtttcaggtgcccataatgcagatgtattttatagcgcagctaaagacaaaggtttacagattatcagtgaaacaccgacgggagtgaaaggtattacccaaattgaatacaggataccaacaaagaatgcggcaggaaatttaactggtaactataaaggtaatggtgcagaaccatttaagaaaacaatttatgatccgaaaatctatactgaccaaaaaatgttagacttaggacagcaagcggcagctaaaggttataaagacgcaatgacaagtaaaagtggtcaagctaatgcaacagttgatggtgttacctttagaatatatgttgataaatcaacgggaactgtaaaaaattttcatcctaattaa

SEQ ID NO: 310798 - DNA, 276 bp, Proteus mirabilis
atgctaatcgttgtaaagtggctccacatcgactgttaccagtcacaaggcagcaccttaaaggccggacaaaatctgtctattaccgcaacggataaaaataaagacagccccccagatagcggtaatatcatagtcgtcggcagtgaactcaaagatggtaaagacttatcactgtctgccacgcaagatatcaaccttgtttctgcccaaaataccgaactggccaatgacggcagtatcaacccgattcaatcggttacaggattactctag

SEQ ID NO: 310799 - DNA, 255 bp, Proteus mirabilis
atgatttgtgcaatttaccgtagtaccaagcgtgatcaaacttatttatacatcgaaaaaaaagatgatttctctcgaattcctgaggaattattacaaagttttggtgaaccacagtttgcaacgaatgcagacatagaaaaagtcaaacaagcgttgactgaccaaggtttttatctacaagtgccacctcccgtcgaaagtatgttaaatgcttatttagatgaattaaaaaattcagaaaaaactgaataa

SEQ ID NO: 310800 - DNA, 171 bp, Proteus mirabilis
atgagtatcgaaataaaaaaattactacaagcaacaaatgatattgctaacaaattagaagaagttgcagaagaatatcaaataaaaggatctgaattatcagttatcgcagtattaaaggcggtatatgaagaaaaccgccctactggtttacagtcaacggatgcctaa

SEQ ID NO: 310801 - DNA, 198 bp, Proteus mirabilis
atggctgtaactactcgttgtccaaaagcaggctgtgattcaagcagttttgaacttgcaatgaaaactaaagttcgtggttgccaacatcaaatagcctttattcaatgctctgcatgcggagcagctatcagcgcatttagtgttcgagaagattatattcttgaacaagtggctaaaaaattaggcatccgttga

SEQ ID NO: 310802 - DNA, 231 bp, Proteus mirabilis
atgtcagagtattcgaatggcaattcgttaatagggacgctttgctttaaatcaggaacagagtgtcaaactattaaccttacaattaattcaacgattcaagagtcaatgccgcatattgattacattattgcttctcaatattggggtttggcttttactactgtcatttctctttatttattttcattgggaattggcacaattattaaatttgttaagcatgcataa

SEQ ID NO: 310803 - DNA, 834 bp, Proteus mirabilis
atgagcaaaaaaaaaggaattgtaatatctcccccatttgaaccaatatatacgggcggaattagatgcggtatgccaataaatccaatcgaccttagaaaatatctgatgtattgggatgaaattgattatccatcaaatcaattaatcgaaataggttctgaagatattgattatttaatgactactggtcatgtaaagcgtactcgagtcatatttcaaggaagcgtaaactcaggtagaggcgagttttttgtggaagctcaagaagccgcattcaggaaaaacaatacagatgaaccgggatgttggacaatagcccaactctcaaatatacctttttatactaatcatgctgaagttacaggcgtcgagttagagctttatgacatgttacctgtgccaagtgcggatacacctttagatgatatattaacttttaaagataaaagaaaagatgaattaattgctttcagatgctatttagacgaaattaatgaagccattatttcagctaaagatgtacctagagcaaaaaatatgcaattagccaaattagaattagctttaaaagatatagataaaacaatccgtgaatcaggcataaaaaggttaacaacaaacttgaagcatgtaattaactctgatttttcaggaatatttggtgtaggactaggatttgctggaatatcatctttaataggaatgtcccccataattgctggagttgctggcgcgggtttaattacaacagtaaaaacagtgatgagccctcaaaatcaatgccctacaaattttagctatattaatagcataagaaaaaatttcatataa

SEQ ID NO: 310804 - DNA, 2433 bp, Proteus mirabilis
atgtcaaaaattaaaaataatgtttctatcactgaaatgagccggcgtggcttcattcagtctgcagctgttctttctggcgctgctgctgtagctggaacggtatcattacctttctctgctaatgctcaaacaccccagggtattcgtcctgatgagacgtctgaaaccatcaaatacagtgcatgcttagtgaactgtggtagtcgttgcccattaaaagttcatgttaaagatggcgtgatccgccgtatttccaatgaaaccatgtttgatgactcaacctttggtcttcatcagatccgtccttgcttacgtggacgttccgttcgttggaaaacttataatccagaccgtttaaaataccccatgaaacgtgtcggtaaacgtggtgaaggtaaattcgagcgtatctcttgggatgaagcgacttcgattatcgctgataagctaaaatatactatcgatacctatggtaatgaggctatttattaccaatatggtactggatctaccggagcgaatttacatggtagaacagcctgtaaacgtctattaagtacagtcggtggcttcttaagtgactacggtacttactcttattcacaattaaccggcatcgtcccttatgtgtatggtgatatgctggaatctctgttaacagaaatcgaaaactcagatttggttgtgatgtttggtcataatcttgctgaaactcgtatgtctggcggtggtcagttctatgaaacactgaatgcgttagataagagtaaaagtaaagtaattattatcgacccgcgtcgtactgatagtgtcacaacattaggtgcagagtggatccctatctatccgggtactgatgctgcattagtggctgcgttaggttatgtgatgatccaagagggtatcactgatgaggcatttttacgtgaatattgcatcggttgggataaacaaactctgccagcctcagcacctgaaaatggctcttacaaagactatattctcggtaatggtcctgatgggattgctaaaacccctgagtgggcaagtcaattaaccggaatttccgttgcacgtattattcaattagcacgtgaaattggtaatgccagagcggcgtggatctcccaaggctggggtattcagcgtaccagtaatggtgaacaagcttgccgtgcaattatgatgttgccattaatgtctggtcatattggtcgtcctggtactaataccggatgttggggtggtagcattgaataccctgtcgcaagttttgccataccaaatccagtaaaaacccagatcccaacatttatgtggtctgaagcggttgctcgtggtgaagagttaaccagtaaaaatgccggtgtcagaaataaagataagctggatacgggcattaaatttatgtggtgttactccagtaatgtgattggtaaccagcatgctgatctcaataaaacacatgaattactgcaagatgaatcaaaatgtgaatttattttagtgtgggataaccacatgacaccatcagcaaaatatgccgatattttactgcctgatgtcactactgtggaaactaacgatcttatcaataactcttatgctagtggtgcgtatcattatatggtgcgtttacaaaatgccattgagccgttatgggaaaatcgtcctaactatgatgtattggcagatatcgctgaaaaattaggtgttaaagagaaatttactgaaggtagaacctaccaagagtggattgagtattgctataaccaagtaaaagcaaataacccagcgcttccttcttttgctgaaactaacgatatggggattgtggatagaaaacttcctcctcgtagcgcttatgtggcattagaagcatttcgccaagatcctatcgccaacccactaaaaacagcatcaggtaaaattgaaatctattctgagaaattaatgcaagatactgaaggttggatcttaccagaaggtgatcgtattcctgcaattccagaatattgtaaaaatgaagaaggtgttgaaaacgttaccttaaaagagaagttcccactgcaaatgacgggcttccacgataaaggtcacgtccactctacctattttaacgtcgcaatgttacgtgaagctattcctcatcaattttggttaaaccccgttgatgcggcacagcgtggattaaaatctggcgatattgctgagatttataacgaacgtggtcgcttgcatattcgtgtcaaagtgacagatcgtgtattacctggtgtgattgcagtaccacaaggtgcatggcgttcacttgatacaacaggtgtagataccggtggatgtattaatacattaacaagctggcacccatcgccgtttgctaaaggaaatccacaacatactaaccttgttgaagtgaaacgtgcataa

SEQ ID NO: 310805 - DNA, 135 bp, Proteus mirabilis
atgcgtaaagccggctatattaaaggtatcgcagactcagttataaatcatacgttagatttagaccaaatccccgctatgtctgataaagcggtgatcaataccttgataaaattaaaaggtattggcatttag

SEQ ID NO: 310806 - DNA, 198 bp, Proteus mirabilis
atgttattaatttcatcacttaatcgtcctgatattttaagttggggggatttagctattcagcgtggtatcatgcgtttatatcgccatcaaagcttagatagaacacgctttgaacgctatcgtaaacgttattctccttatggttcaacggcttcactctatttatgggcattatctaaagaaagcgcagactaa

SEQ ID NO: 310807 - DNA, 2268 bp, Proteus mirabilis
ttgaagctatttggggttaatgtttcagcgataagtaagctaagtgatctacccgaagatacagaaattgataatatagaagcgtatattcctaattcaaggctaacctttaatattaataaattaacattaaatgcatcttttccccaagttaatatggataagagctttcaaggtgaaattcccgcagaattattagatgatggcgtgagtgctgttatccttaattatatggctaactttattaaaaatagaacgacaggtgattattcaagccataataacaactttttcttgaatcttaatggtggtgtaaatataggcccttggcgtttaagaacaaattattcttataataattcgagtggttcagatcagcgttcttcaagtgattctgaatttagtaatacctatgtaatgcgaaatatcgcttatttaaaatcaatgctgaaaattggtgaaattaccactggggggaatattttttcaagtattccgataaaggggatttctttagccactaaccaacaaatgttaccaagtagtatgcgtggatatgctcctgtggtaagaggttttgccaacagcaatgcaaccgttaccattcgtcaaaatggtcaaattatctataaatcttttgttgctcctgggaattttattattaatgatatttccgccggcggtattggtggggaccttgaaataaccattgaagaagaagatggctctaagcgtgtatatacacaagcctattcatcgctgcctatcatgttgcgtgaagggcaatttgagtatgagtttagtgcggggcaatatgatggtggtatcacgacagattccaaaaaaagtaaatttgctttaggaacgtttagttatggtatcaataactcaattactgcatacggtggtttattaattgccaatggttatacctctggtgttatcggttctggtgtttctcttgggttattaggtgccttatctgcggacgtcactctcgccagagctaatttggataaaacttatcacggtcaatcatatcgggttcgttattctaagagtttattatctacagggacttcgtttgatttaaccgcattacgttattcaactaaagattactatgactttagtgattacaataactcaggttatgaattgcgagaaggtattgcaccttggttaagccaacgtcagaaatctagttttcaaacttcaatttcacaatcattaggaaaatacggttccatgtatcttcgtggtgaaaccagccgttattgggggaatagccgtgttaataatagtgtcacattaggctataacactgttctgaaaggtattgcatttaatatagattattctatttctcgcctaaaaagtgatgacaatacatggccagaaaatagacaaattaattttaatatgaatatgccactgagtgtgttctcaaatgcaagtggcttgcaaaatatgaatgcaagctatcttctgacacatagcaatgatggaagaacttcgcaacaagccggcttaaatggctctgcatttgataatcaactctcttatggtatctaccagaatacagataacaaggcagatagttatagtggcaatatgaatatgagttattcaggaagtaaaggaacgctttctgggggttatagctatgggaaaaatagaaatagctttaatggtagccttattggtggtgttgttcttcactcaaaaggagtgacattatcaaggatgttaggtgacagtattgccatagtgagcgcagataaagcaaagggcgcagaaatcaatggaaatgtgaaaatagatacatttggtaatgccattgtccctcaattaagtccttatgatacaaacagtattagcgtaaatgtcagcacattacctgatgatgtgacacttaatgaaacgtcaatgaaagtctatccaaccgaaggggctattttagcaagacaatttcaaactaaagtgggttatcaggttatttttgatataaaaacagcgcaaaatatagcgataccttttggtgcaatggcttctttgacagatgaaaaagataaacaggtaaataccggtattatcgatgcctatcaaactctttatatgagtgggttacccaatgatgggaatgtcgtggtgacttggaataacaatacgggcaaacattcatgtcaatttagttattcagagcttgaaaagattgaagtatcacaacaaaacccaataagaatggtgaccgttaattgtcaataa

SEQ ID NO: 310808 - DNA, 1146 bp, Proteus mirabilis
atgaatagtttgattggctcttctgtttatcgtcgccaactcacttgtggcacattaagcgtaacgccaaattgctcattagaacatcttgatgaactttttgatattgcggaaagacgcaaccctaagcgcgcttttttgtttgtcagtaaagtattagggcgccatattcctgtttcacctaagaaaatgcgtgaaacttatcaacaaatggccaaacaatttcctcaatcactcgaaggccctattctttttattggtatggcagaaactgcggtcggtttaggtgcgggaatttttgatgaagtaagagatcgctatcctcaagcgctctatcttacttcaacacgccatcctattgctgatagtgaattattctgtaaatttaaagaaaatcacagccatgcaactgatcacctactttatttgcctcataacctagaacaacgccaatggatcctgcaagcgaaaaccattgtgttaattgatgatgaagcaaccacaggtaatacctttcttaacttgctgtctgcattacgtgaagaaggtaagttaacacaaattaagcagattattgctgtcacattaaccgattggagtggtgatgctctgcaaaagcgttcaccattacccataacaaccttctctttagtgcagggaaaatggcaatggcaagccaatcccgatgcaccattacctgttatgccaaatgtcaatattactgcctcaggacaggttgctatcacaggaaaacaaagctggggacgcttaggcatgacaacccctgctaatgatcttggcctatttattcatgtttctgagggtgaaaaaatattggttttaggctctggtgaatttgtctgggaaccctttttattagcagaacgcttagaaaaacaaggggctattgtaaaatatagctcgacgactcgctcacctattgccactaattttgctatccaatcagcgataacttttactgacaattacggattaggcattcctaactttgtctataacgtggctcatcagcaatttgatcgcattctgctttgttgtgaaacccctgccgaaagtattgatagtcaacttattaaggctctctataaagttgcccctattgttgaagtaattagctatgactaa

SEQ ID NO: 310809 - DNA, 525 bp, Proteus mirabilis; identical to SEQ ID NO: 310367

SEQ ID NO: 310810 - DNA, 1008 bp, Proteus mirabilis
atgaaaatattagtaacaggtgcagcaggatttattggctaccatttaagccagcgtttgatagaaatgggttatcatgttgtcgggatagataatctcaatgattattatgatgtgcgcttaaaagaagcacgattagctaaacttaatcagttggataacttccaatttgataaaattgatattacagattcagtgagtattgcgcaattatttgctgatcaccgttttgatcgagttattcacttggcggctcagcctggcgttcgttattcaattgaaaacccaatggcatatatcgatgctaatattgtaggccatattaatatattagaaggttgtcgccatcataacgttgggcatttgatttattcgtcatcaagctcggtatatggtttaaatcaaaagcaacctttctctacagaagatagtgttgatcatccggtatcactttatgctgcgacgaaaaaagccaacgaattaatgtctcatagctattctcatttatatcagctacccacaacaggactgcgattttttaccgtatatggtccttgggggcgtcctgatatggctctatttaaatttactaaagctatgttagcgggtgagcctatcgatgtttataatggcgggaatatgacccgtgatttcacttatgtcgatgatattgtcagttctgtggtacgtttaattaatattattcctgaacccaacccaaattggaccgtagagcagggggaaacttcatcaagttctgcaccttataaaatatataatgtgggtaatgggcaacctacaaagttaatggattttattacagcaatagaaaaatcactcaatattaaagctaaattgaacttaatgccgatgcaagatggtgatgtactttcaacctgtgctgattgtagcgatttagctcagacaacaggtttttcacccaacactgcagtagagtatggtgtgaagcagtttgtggattggtatgtagattattaccagcaataa

SEQ ID NO: 310811 - DNA, 498 bp, Proteus mirabilis
ttgttttttattgattatattcagaaaaaagaggagaagaatagaaagattatttctgaaaaaagattaagagaaattttaatcttttttttaagacatattgatacatacctaccagaagatattaagataagtattgagtatcctaaaggagataataataaagatgaatttttatatgggatacattatgaaaaaaatcaaaaataccttgaaagattaattgcatattttaaagagattcaattatctaaaaatgatgaaaataagataaaggccttttgtaaaagagaaattgcaactgtaaggtgtttaacccccgttgttgctactcttcatgatcaaaattttaaatcatggattagaattatgttttatatggatgctatcattgctaatgaatatccagtagaggaaagtatggctaagattattagccatatgaagaagtttgaaaaagcgtcatttgataacggttggcttgttaaagatgattaa

SEQ ID NO: 310812 - DNA, 1464 bp, Proteus mirabilis
atgtgtagtgatgaccaacataaaatatggatttgttcgtcttgtatcaaagagtcatatctacaagaaaaaatcaacattaataataacaaagaaaagtgccattattgcaataatatacgagcatgtttttctttggagtcagtaggtgacatagtagaacaagctgtaagagaacattttattcgcacaccaactgaaccttcagacctagaatattccatgagtaaatgcagtaaatatgaatgggaacgtaagggtgatggtatagatgatattatccaagaattacttgaaacagaagatataatagcatatgacatccgtgagtatattgaagataaaaactatatttacgatagtaccggagaggaaacagagttttcatctgaatcatattatatagaacgagaaaaagtagatacagagtatctagatactatatgggataattttgtcagctcacttcaaactgagtccagatatattaatcacactgtaaaggacaccttagacagtatttttagtggtattgaaaggatgagtgctggtggaggccaagctataattgttaactctggacccggcactaagattgattccttatacagagctaggtggagtaataatcaagcgacatcggaacaaatgatagttatccctgataaagagctcggtcctccaccctataagttcagcggctttaaccgcatgagtgccagaggcatatcagtattctacggcgctagttctgtctcaacggcaatttcagaaattcgcccacctgtcggtagtgaagtgatatctgcaaaatttcgcatcatacgcccactaaaactgttgaatcttaaagcgttaaaaaccgcttgggaaagtggcagtatgcttgaccccgactacattatgaaacgagagcaaatcacctttcttcgaaccttgaccaataaaattgtgaatcccgttcttccaggtgaagaagagttcagttatatcccaactcaggtaattgccgagtacctagcaaattcacctgaacttaatctcgatggtatcctatatccatcggtacaacaatcagcatcagatactctctcgaattttaatgttgttttattccacaaagcttcccgtgtaaaatatttagaactaccagctaaagaagagtgttatgttaattactggcaacaatatgatgaaaatgacgatgaattagacatttgtgtgattcaaaaaaatgaattaaaaaaaaccgctcccttatatgatagtgatacaaaaaataaagatgagcgagaaccatccttagaaatagagctcaaaactgtcgaagtacacactataaaaagtgcaaactttaattacacatcaaatccagttaagcgtagaaaatttatcacaagtgggtcaataaacaatcaaaacatatcaaatgagaaatgtaatgatttagattttgactcataa

SEQ ID NO: 310813 - DNA, 219 bp, Proteus mirabilis
atggcgccctcctatttttccagcaaaatgaacattgttattgctcaagatctctatcctgaacaattagaaggcgatgagcctgagccgttagttcaaatacgttggcctatcgccaagatgatggacttattagatcatcccgactttaccgaagctcgtaatgtcagtgcactctttttagcacaacgttatttgcaacaagtttgtccaaaataa

SEQ ID NO: 310814 - DNA, 399 bp, Proteus mirabilis
atggaatcgataatccatctgatcactttcgaagatgacagcacaaaagttcaacttaaagcagtgctttcttctttagcggcaaatgtgaaaacctattcaaatgaacaggcatttttaaagtactatttttcatcaactaaaggggctcataaagagtgcatcataattaacactaaaagtagtgcatcgccatcaattgcgttggtaaaagagttaaacaaattaaagaatatcattcctgttataattatttcgggagatgcatcgatagaaagttgccgtaacgcatttaaagcgggggctttcgaatatttaactcgccctttaaacgtcaatgagcttcttaatattgtgtcagaatcttttttacactatggtaatggagatgatccttga

SEQ ID NO: 310815 - DNA, 624 bp, Proteus mirabilis
atgttaaataaaaaaatagcatcggtgatgctatcaacaattattgctgcttcttttgctacggctgctaatgcagatactcgtgttgcacaagcaaccgcgacttggcaagcaactgcaattaaagatacaaccagtatgttagttgtcactccattaaaaagtctgacttttaattatgctgaaggccaaaaatcatttaaccaacaaaatggtgcatttgatattgctattcaaggccaatctggcgcaaccgattttaaattatcatcaaaactgattgctaatacgttagcaagaacaactgatgattcaacattaacagttggtgttaaatggaatggggaagacctttctaaaacaactgatgtcgtgttaattgatacatcaaaagggttaacctcaggtttagataatttagctgctgatggtatttacaatggctctgagcgcgctacagatcgtggtgaattcacttttgtaattgccagtgcacaagcagcaggagcaacagccgattttaaatcactggctgatggtgtctgggatggtgatgtgaaagtgcaatttactgccacttgggatggtgacttttctaccgttaaacctaatccagaaccttaa

SEQ ID NO: 310816 - DNA, 1266 bp, Proteus mirabilis
atggcactgactgacgcaaaaatccgggctgcaaagcccactgacaaggcttataaactcactgacggggccggcatgttcctgctggttcatcctaatggttcccgttactggcgtctccgttatcgtattctgggtaaggagaaaaccctggcacttggtgtgtatccggaagtttctctctccgaagctcgtacaaaacgggatgaggcccgaaaactgatttcggagggggttgacccttgcgaacagaaaagagctaaaaaagtagtccctgatttacaactctcttttgaacatattgcacgacgctggcatgccagtaataaacaatgggcacaatcacacagcgataaagtactcaaaagcctcgagacacacgttttcccctttatcggcaaccgggatatcacaacactcagtaccccggacctgcttatccctgttcgtgctgcagaagctaaacaaatttatgaaatcgccagtcgtctgcagcaaagaatatctgctgtaatgcgttatgccgtacagtctggcatcatcagatataacccggctctggatatggctggtgcattgaccacggtaaaacgccagcatcgccccgctcttgatctttctcgcctgcctgaacttttgtcgcgtattggcagttacaaggggcaacctgtcacccagcttgccgttatgctgaatttactggtttttattcgttccagtgaactcagatacgcccgctggtctgaaattgatattgacaatgccatgtggactattccagctgagcgcgaacctctgccaggcgtaaaattctcacaccggggctccaagatgcggacaccacatcttgtgccactcagtaaacaggctgtagccatactgacagaacttcagacatgggcaggtgaaaatggtctgatatttacgggtgcacatgacccgcgtaaaccaatcagtgaaaacaccgtaaataaagccctgagggttatggggtatgacacaacccgggatgtctgtggccatggattccgggcgatggcatgtagtgcgttaatagaatcaggtttgtggtcccgcgatgctgttgaacgtcagatgagccatcaggaacgtaacggtgtacgtgctgcttacattcataaagcagaacatctggaagaacgccgcttgatgctacagtggtgggcagattttctggatgcaaacagggaggagtgtatcagtccgtttgaatatgcaaagattaacaatccgctgagaaggtga

SEQ ID NO: 310817 - DNA, 648 bp, Proteus mirabilis
atgaatgcacgaaaagcggtactggcagacaatccggaattgatcctgcgtgtgctacaactgagatttgacgagtcactgtcgtacccgcgcatttctgcgcagaccggtatcagcaaaaccgccattttttctctggtgaggcgatttcaccagatattcactgactggcctctttccggggaatattcctgcgtgcaactggcccgggctctgttcccggggcgatacccttcagccccgacagtaactcagactgtgaaaacagagaaaaaccgccggaaccgattttcaccggagtttaaatggagacttgttcagcaaactcttttacccggtgcctgtgtcgcacaaatagctcgtgagaatggaatcaacgataacctgctctttaactggcggcatctctggcgtaacggcggcctgcagccgcccggcgaacatgaaacatcgctacttcccgtgacgttaacgccggagccggataataaaatcccggaccccgtgcaggttgagcagataaatacaccgaccgacagtctgtgctgcgagctggttctgccggccggaactctcaggctgaaaggtgaactgacaccggcgttattacagtcacttatccgcgaaatgaaagggagcagccactga

SEQ ID NO: 310818 - DNA, 348 bp, Proteus mirabilis
atgatatctctccctgccggttcgcgtatctggctggttgccggtatcaccgacatgcgaaatggttttaacggcctggcatcaaaagttcagaacgtcctgaaggatgacccgttctccgggcatctgttcatcttccgcggacgccggggtgaccagataaaagtgttgtgggctgacagtgacggactgtgcctcttcaccaaacgcctggagcggggccgcttcgtctggccggttacccgtgacggcaaggtgcaccttactccggctcagttatctatgcttcttgaaggtatcaactggaagcccccgaaacgaacggaacgcgctggcatccgcatataa

SEQ ID NO: 310819 - DNA, 1572 bp, Proteus mirabilis
atggacacctcacttgctcatgagaatgcccgcctgcgggcactgttgcagacgcaacaggacaccatacgccagatggctgaatacaaccgcctgctctcacagcgggtggcggcttatgcttccgaaatcaaccggctgaaggcgctggttgcgaaactgcagcgcatgctgttcggtaaaagctcagaaaaacttcgcgctaaaaccgaacgacagatacaggaagcacaggagcgaatcagcgcacttcaggaagaaatggcggaaacgctgggtgagcaatatgacccggtactgccatccgccctgcgccagtcttcagcccgtaaaccgttaccggcctcacttccccgtgaaacccgggtcatccggccggaagaggaatgctgcccggcctgtggtggtgacctcagtcctctggggtgtgatgtgtcagagcaactggagcttatcagcagcgcctttaaggttatcgaaacacaacgtccgaaactggcctgttgccggtgcgaccatatcgtgcaggcaccagtaccttcaaaacccattgcacgcagttatgccggagcggggctcttggcccatgtcgtcaccggaaaatatgcagaccatctgccgttataccgccagtcagagatataccgccgtcagggtgtggagctgagccgtgccacactggggcgctggacaggtgccgttgctgaactactggagccgctgtatgacgtcctgcgccagtatgtgctgatgcccggtaaagtccatgctgatgatatccccgtcccggtccaggagccgggcagcggtaaaacccggacagcccggctgtgggtctacgtccgtgatgaccgtaacgccggttcacagatgcccccggcggtctggttcgcgtacagtccggaccggaaaggtatccatccacagaatcacctggccggttacagcggtgtgcttcaggcagatgcttacggtggttaccgggcgttatacgaatccggcagaataacggaagccgcgtgtatggcccatgcccggagaaaaatccacgatgtgcatgcaagagtgccaaccgacatcaccacggaagccctgcagcgtatcggtgaactgtatgccattgagtcggaggtccggggatgttcagcagaacagcatctggcagcaagaaaagccagagccgcgccactgatgcagtcactgtatgactggatacagcaacagatgaaaacactgtcgcgtcactcagatacggcaaaagcgttcgcatacctgctgaaacagtgggatgcactgaacgtgtactgcagtaatggctgggtggaaatcgacaacaacatcgcagagaacgccttacggggagtggccgtaggccggaaaaactggatgttcgcgggttccgacagcggtggtgaacatgcggcggtgttgtactcgctgatcggcacatgccgtctgaacaatgtggagccagaaaagtggctgcgctacgtcattgaacatatccaggactggccggcaaaccgggtacgcgatctgttgccctggaaagttgatctgacttctcagtaa

SEQ ID NO: 310820 - DNA, 201 bp, Proteus mirabilis
atgggtgttaatatggcaaaaggtgaatcaggacgcatcgtcctagaagttgagccagaactaaaaaaagctctctattcagttcttgcaatggaacaaaaaactcttaaagactggtttgttgataaggctcaagaacatatatgcgagaaaaaatcagagctcatagagagattttcgaaggtagacaatgaaatttaa

SEQ ID NO: 310821 - DNA, 1626 bp, Proteus mirabilis
atgaaatttaaagcagatcaaacctcacaaaaacttagaggtggctattacaccccacaaaatttagctgattatgtaactaaatgggtcttaagtaagaatcctaaaaccatacttgagccgagttgtggtgatggtgtgtttattcaggctattgctaataatggttataactctaacattgagttattttgctttgaattgttcgacactgaagcatctaaggctctcgaacgctgtaaactgaacaatttttctaatgcaacgattactgagggggattttctagtctgggctaatgaatgtcttaagaaaaataagcagatatttgatggagctttaggtaatcctccattcatccgttatcagttccttgaaagaaatttccaagaacaagctcagttggtcttcgaacatttagatctaaaatttacaaagcacactaatgcttgggttccattcttactttcttcattagcccttctcaaacaaggtggaagaatagggatggtcataccatcggagattagtcatgtaatgcacgctcaatcattgagaagctacttaggtcatgtttgctctaagattgtcatcattgaccctaaagagatttggtttgaagatacattacagggggccgttattctccttgcagaaaaaaagcaatatccagatgaagcatcgcaaggtgtaggtattgttagtgttagtggttttgaattccttcaagaagatccaaacgttctgtttaatgatacggcaggaataaatggtgaaacagttgaaggtaaatggactaaagcaacactcagtattgacgagcttcagctaattaaacgggtaattgctcatccagatgttcgtaaatttaaagatatagctaaagttgatgtaggtattgtgacgggggccaacaattattttcttgttgataatgaaacagttaaattatataaattagaacgttttgctcaccctatgtttggcagaagccaacattgccccggcattatttatgatgagaagcagcacgttgaaaaccaggaaaagggtttaccaaccaattttttatatatagatgaagagtttgaatatctttctaaaagtgtcaaaaattacataaagttaggcgaagtagaggaataccacaagcgttataagtgccgtatacgtaagccttggttcaaggtcccatctgtatatagcacagagattggaatgttaaagcgttgtcacgatgcgccacgcttaattcataacagagttagagcatataccactgatactgcatatagagtttcttcaacagttactagtactgagaacttagtgtgtagttttttgaaccctataacggtcattacagccgaactcgaagggcgcttttacggcggtggcgttcttgaacttgtcccatccgagatagaaaaactatatatccctatcgttgaaggattagaacataacattgaagaactcaacctattgattaaagatggtcaaatagagagggtaattcgacaacaaggttcactaatcttagacaagcttggtttcactcaagaagaaaatgaaaaacttgtagaaatatggaagaagcttagagatagaaggctacgtaagtag

SEQ ID NO: 310822 - DNA, 951 bp, Proteus mirabilis
atgttttcaaaatctgaacaactaggtaacattgtaggaaaaagtaatgttgcaaatggcattcagacaagtgcaaataaatactacattcataaagaaatcaaatctgaaaatggttttatttattttgaatatgatggaattgaataccacattgaaaaagaattaactcgcccttacttcgaaacgaatcgttcaggtgatgatagtttctatacttataaagacgttgaacctaattcatttgttgtttacccatacaagaaagtgggtgaaagaatccagttcattgaatacgatgaactaaaacgtcaatatcctaagttatttgagttcctgcaggttgtaaaagtccatttgaatgataagaaacgctctattaagcctgacccaactgggcctaatgaatggtacagatacggacgtagccaagcattagaaaactgcgatgttgatcaaaagctgattgttggtattctatctaatggatataagtacagcattgataaccatagaacttttgtttcttctggaggcactgcgggctatagcattatcaacgttcctaataacgttagatactctatctattatatccaagcaatccttacatcaaagtaccttgagtggtttgcttcaatatatggtgatatttttagaggtagatttgttgctcgtgggacaaaagttcaaactagaatgcctattcctactattgattttgatgatccaaaacagaaagaaatacatgatacgatcagttcaaagcaacagtatttgaataaactgtatagccaaactcaaaaatcagctgatagagataaaatcatattcgaaaggcaatttgaacaagaaaaaatccaaatggattatttgattaagaatctttttgacttgggggatttagattccgagattccaacagtagaagatctatacaaaaacctataa

SEQ ID NO: 310823 - DNA, 1287 bp, Proteus mirabilis
atgagtgaagttatctcaatttttgaatatgacctgttggggagtggaaaagcggcttcagttggcgcaaagttgttgcctcaacaggtctttgattatttagaaacacttagcctaacaagtgagcaaggaagccagtttcttaaactcacctctcgttcaggtttcaaattgctgcaggtgcaaaactacgcggggatgctttctacacctcacggtttgcagcttgagatactgcccaagattggtaaaaacctcacgcttgcgagtgcgcgagaaacattcattacgatgctaagtcacctgcctaggtttcgacacattcaaacccagcaggccactattcaggcgcaacgcatgcctttactcgagatttttatcagccaatttttgcaaagcgtcagccaattgcttaaacaaggtttacgctccgactatgtgagcgagaaaggtaatctggcttttatgaagggcaaactgatgctctctgcacaactgcgacataacgcggtaaatcgccataagttttgtgtcgattatgatgagtatatgcctgattgtgctgccaatcggctcttacactccacactggataagttacttagtctgaagctgtcatcagagaatcaacgctggctttacgaactgcgctttgcttttgacggtattccacttagtagggatatagagagcgatctgaacagcttacgcattgagcgtggtatgactcattacagcgagccaatagcttgggcgcagttgatcctgagaggaatgagcccaagtgcattgcaaggaaacaccaaagcgatatcacttttgtttcctatggaagcggtatttgaatcctttgtggcacagaccctaccctacgaattaccttctcacctaaaagttttttctcaagcagcaacgtattctttggtaaagcatggacttaaagattgctttaagcttcgcccagacttgctgattcaatctcggcaaccgattcaaaccaaaatggtgatggatacaaaatggaagcaggtgaatagcagccagcaaaaaaaatcactttatgggctagcgcaatccgacttctatcaaatgtttgcctacggccaaaaataccttggcggaacaggcgaaatgtacctgatttaccctgcgcatgatgactttagccaaccgataccgcagcactttgctttttcagagactttaaaattatgggttgtgccataccggataatggcaaaacgtggtgagaggatgatgtgggcaagtgatgtgttagctacatag

SEQ ID NO: 310824 - DNA, 2058 bp, Proteus mirabilis
atggatcttgtagatagtgtcgaagctggtaagctgacgatcagagaattgattgatgccctggtgaaagataaaaattacacagcttccaagtgggagcagcgataccgggaatttacgaccttgctacaacaaacctcaacttttgctgagcctgaaacggatgatttagtcaagaggctctggtatgaacgtgataacggtattgccagtattcgtcagggcgttccatcattagcagaatatcagcaaagcctcccattgcttagagaactcaccgaacgtgttcgtcaacaaccaaatgaagctacctaccaatacgtaggcagtgcactgcagcaggccaaagagatcggacagcttaaacgcatgtattggagtttaagaaatcgtgtctttgccgcgttctcgccagaaaactacaccagtactgtggatgagaatgctttcaataaagcagcagaattcctaaatcaacgcttccatctcggtttggtactgactggaaattggttacagaaaaactatgaattgaaacaagccatacacgcccaatctcctgacacagatccctattacgtgaatatggctatctggcatatctatgaattgctccgtgagcgcgataatgaacagaagcaagagaaagtagcaagcagtgagcccatcgagaacaagactattccacattcaccaactaacgtgatcttctttggccccccaggcactggcaagaccttcacgttgcagcaaaaaatgaaagagtatacttctcatgcagttcctgctgatcgtgaagcctggctggattctcgtcttgaatcgttgaactggatgcaggttataacgctggtgctgctcgatcttgggaaactagccaaagttcgccaaattattgaacatatgtggtttcgacgtaaggcattattaaacggtcgtaatggcaatctatcgaatactgcctgggaggctttgcaagcctatacaattcccgaatcgttaactgttgattataaaaatcggcgtgaacctgccgtatttgacaaaacagataacagcgaatggtttctagttgattcacagctcgagcaagtggaggatttgttagcgctccacgccgaacttaaacgtggtccaaaatctgccgaagccatccagcgttttgcggtggttacgttccaccaatcttacggctatgaagaatttattgaaggtatgcgtgcacgctctgacgagagtggcaatatatcttatcccattgagccgggtgtttttatgcgcctttgccaacgtgctaatgccgatccagcacatcgctacgccattttcattgatgagatcaatcgcggaaacatatccaagatctttggcgaactaatctcactcattgaagtagacaagcgtgctggtatgcccaatgcaatgagtctgcaactgtcttatagcggtgatcactttagcgtgcccgccaatgtcgacatcatcggagccatgaatacagcagaccgttctttagctctgctggacacggctttgcgccgtcgctttgactttgtcgaaatgatgccagatctttctttactgagtggagctaaggtgaaaggcatagagcttgagtcgttgttagaaaaactcaatagccgcatcgaagctctttacgatcgtgagcatacactaggacatgcattctttatgccggtaaaaaatgctctcgataccggtgatgaagaaactgcgtttaaacaattgaagatcgcatttcagaaaaagatcattccgcttttacaggaatactttttcgatgactggaacaagatccggttggtgctggcagacaatcaaaagcaagacgacaaccagcaattcgtgattgagaaaactgacgatctcgatacgctttttggtaacaaccatggtttacgacgccataatcagcaatcaacaacttacgagctcaaagatttcgatcaaggggtctggaatatgccaaaggcttatcgttcaatttatcagccacagcggaccactcctgatgagcaggtcgtaaaccatgagtga

SEQ ID NO: 310825 - DNA, 240 bp, Proteus mirabilis
atggaggcccagtgcgcgctgatgaccgtcacttctgacctgctcccgatatgccggaatataacggtcagagaggcatatttcgatgcccctattctggagcagttggttatggatgccataggctatgtaagcgctttgtgtcaccggacgaaacggcgcagtaccagaagcacccaggatgtggaacaggtttattggttacctgacagcgaagatagactcaaagagcagtcctga

SEQ ID NO: 310826 - DNA, 570 bp, Proteus mirabilis
atgacatacgagtacaaccccttctggcaacaacgtatccgtgagacggtgctgcgcgcactggatgttcatccccgtctgacggcattgcggattgacctgcgtctcccggatgtaccggcagcaactgacgcagcagtgatatcccgcttcatcaatgccctgaaagcccgaatcgatgcttatcagaagcgtaagcgccgtgaaggcaaacgcgtacatcccacaaccctgcattacgcctgggcccgggaattcggggagcttaaaggcaaaaaacactatcacctgatactgctggtcaaccgggatacctggtgtcgtgccggcgattaccgcgaaccggggtcactggccgggatgattaaacaggcgtggtgcagtgccctgggggtggatgccggatgctatgccacactggcgaattttccgtccaggccggtggtgtggctggatcgtggtgatgacgttggtttacgggatgcgctggatcgtgctgcttatctcgcgaaagagtacaccaaagtcaacggcaccggtgagcgcaattttggctgtagccggagttga

SEQ ID NO: 310827 - DNA, 603 bp, Proteus mirabilis
atgaaaccacagtatcagacccgttatgaatggctttgcgaaagttaccagaaatggctgaccggcttcacccggcatgcagtatccaggggaatgtgccatccgaacatctactacttccataatctgatggccggatggatatcattcaatggtgaaaaaccggagattgccatcgttccccagagcctgcaccggctcatttacggtaatgacaaacgggccacaccgcctctggatgatgatctggtggtgagtttatgtaccagcgaacatctgctggtgcatcatccgatgctggaaggcattctgctgtctgaatgtgagcgcctgggacagcattctctggcaaacagactgatcagcctcttccgtcagttcagtggtaccgaactgcgcctcaagctgatctggttgtgctggtatgacttaatgatcggcaacagcctgaaagactggacagagaatctgaaacgcaaatcagaaaaagaactggcggaatgggtcatcgaacgacagactgaaaatgaacccctgacgtatctgatggatcagtatgtgcttctggcataccgcacaacggttgatacggctcactactga

SEQ ID NO: 310828 - DNA, 1023 bp, Proteus mirabilis
atggctaaagaatattcatacgatcccacaggccctgtaaaaacccgggatttgcgggtgtgcaaattttatgcaaaactattaaaaaacaaatttaatgatttacctgatatctcctgtcaggacatcgaaatttgcagacatgaattaaacaacgcaattcaccaatgtgcacccaatgaaattgccataaggagtttaatgtcagccctggagagtatgcgggaagaaaatattcttccggatgaatcattcaactggttaaaaaagaatgagagagccacattctggttatgggcaacactccacaacatggatgatattgagctaaaatacatgtgtggctatatcaatgaaagcctgcatgacggtattcccaccatctggtatcagcgtttaaatttaagtctgtcaccaacaaatcatcaggacagaataaaccttatcatcgcatttatggatgagcttattttccctgcacctccagtgatgcacagaaaaaaaacattgatggagaatctgaaacaaaaatggaaaacggtcttcgccagaccattgccattaaaatggttgccggttaacgatgaggacgctgtattgtgggcctgggaatctctgaaaaaacaccagtccggaacattcggttctttcgggaatacaggtcctctactgactcaatggttctctcctgtcagccattcagaacgcgctctggctttacaggcagctctcgatgtctgggatgcacctgacagcagacgtttgtttttgcttaatctgaataaagcctggaatcagcaaaaattacgtaaatcccgtacagataaaaaagcaatcaacacttatctgaaaaacgaaactaaaacccggctcgatttaatggcggaacacaacagattgcgtattggagatatgctggagaaactgattaatgagtactatcaggaacatttttgcaggcaacacaaccacacagaaacagaaacccggctgacgacaaattctgaagcacattcaaaataa

SEQ ID NO: 310829 - DNA, 393 bp, Proteus mirabilis
atgttacagatagtcggcgcgctgatcctgctgatagcaggatttgccattcttcgccttttgttcagagcattaatcagcacggcttctgcgctggcagggcttatattgctgtgtctgttcggcccggccttactggctggctatatcatcgaacgcataacccggttgttccatattcgctggctggcaggcgtatttctgacgattgccggaatgatcatcagcttcatgtggggacttgatggtaaacatatcgcgctggaggctcacacctttgactctgtgaaatttattctgaccaccgctctcgccggtggtctgctggctgttcccctgcagatcaaaaacattcagcagaacgggatcacaccagaagatatcagcaggtaa

SEQ ID NO: 310830 - DNA, 2082 bp, Proteus mirabilis
atggcgtgttctgcatgcgcaccattgatcgcgttacagtacgatatttcaccgtcactgatgtggtggggcgggttgttgtactggctggctgcattagtgacgctgctatgggcggccagccaaatccaggcgctgaaaaaactgacctgtgccatcagccagacactggaagaacaaccggtgctcaacagtaaatcgtggctgaccagtttgcaaaacgattacagccttcctgactcactgacggagcgcatctggctgacgctcatttctcaacggatttcccggggagagctgagggaatttgaactggcagacggaaactggttactgaacaatgcctggtatgaaagaaacatggcagggtttaacgaacagttgaaagagaacctgtcattcacacctgatgaactgaaaacgctcttccggaaccgcctgaatttatcaccggaagcgaatgacgattttctcgatcattgcctggacggcggtgactggtatcccttttcagaaggtcgccgttttgtatcattccatcacgtggatgagcttcgtatctgtgcctcctgcgggctgacagaagtacatcatgccccggaaaatcataagccggatccggaatggtactgctcctctctttgtcgcgaaacagaaacactgtgtcaggaaatttatgaacgcccctacaacagttttatttccgatgcaacggcgaatggtctgattctcatgaaactgccggaaacctggagtacaaatgagaaaatgtttgcttccggagggcagggacatgggtttgccgctgaacggggaaaccatattgtcgacagagtccgtctgaaaaacacacggatcctcggtgataataatgccagaaatggagcagacagactggtcagcggaacagaaatccagacgaaatattgttcaactgcagcccgtagcgtcggtgcggcattcgacgggcaaaacggacagtatcgtttcatgggaaataatggccccatgcaactggaagtcccccgtgatcagtatgccggcgctgttgaaaccatgaggaataagatccgcgaaggtaaagtacccggtgtaaccgatcccgcagaagcgtcccggctgattcgtcggggacatctgacttatactcaggcccgtaatatcacccggttcgggaccatcgaatcggtcacttatgatattgccgagggttcggttgtcagtctggcggccggagggatcagttttgccctgacggcatcggtcttctggctcagcaccggcgatcgcgatgttgccctgcagacagctgctgtccaggcaggaaaaaccttcacccgcacactggctgtctacgtcacaacccagcaactccaccggctcagtgttgttcagggtatgctgaagcacattgatttttcgactgccagcccgactgtccgactggctcttcagaaggggaccggtgcaggaaatatcagtgccctgaacaaagtaatgaagggtactctggtgacatctctggcactggtagctgtcacaaccggccctgacatgatcaaaatgttgcggggacggatctccggtgcgcagttcatcaggaatcttgccgtggcatcttccggtgtggcaggtggtgctgtcgggccagtggcgggcggaatactgttcagtccactgggaccatttggtgcactgacagggcgtgtggttggcggtgttctggggggaatgattgcctccgctgtatcaggaaaaattgccggagcgctggttgaagaagatcgcgtcaaaattctggcaatgattcaggagcaggtgacatggcttgccggcagtttcctgctgaccggacatgagattgaaaatctgaacgagaatctggccagtgttatcgatcagaatgctctggagatcattttcgccgccggtatacaacaacgggccgcgaccaatatgttaatcaaaccactggtggtcagtatcatcaggcaacgccccgtcatggaatatgaagcatcccatctcggcaatatggttaaccgactggaagaagcattacccccggagttaccggcataa

SEQ ID NO: 310831 - DNA, 456 bp, Proteus mirabilis
atgattcacctgttcaaaacctgcatgattaccaccttcattctggggttaatgtggtctgccccactccgggcacaggatcaacgttacatcagtatacgcaatacagatacgatatggctcccgggaaatatttgtgcttaccagttccggctggataatggcggaaacgatgaaggatttggccccctcaccatcactctgcaactcaaagacaaatatggtcagacgctggtgaccagaaaaatggaaacggaagcttttggtgacagtaatgccacgcgaaccacagacgcatttctggaaacggagtgcgtggaaaatgtcgccacaaccgaaatcattaaagcaactgaagaaagtaacggccatcgtgtcagtctgccgttatcggttttcgatccccaggactaccatccactgctgattaccgtttccggaaaaaacgttaactga

SEQ ID NO: 310832 - DNA, 234 bp, Proteus mirabilis
atgccgggttacacagagtatgtcctggctgaaggatctttctcatacgggcaggcggttgctgtcataacagcttaccgcaatgtgtttatccaggatgacccgggaatgcatttccgtcgggttatccgcaacgcggaaggtcagcgacgctggcgctgccggaattctgaacccgatgccggaaaggtgcttaatacgcggctcgccagtgacggtcttctcagacaataa

SEQ ID NO: 310833 - DNA, 312 bp, Proteus mirabilis; identical to SEQ ID NO: 29742

SEQ ID NO: 310834 - DNA, 645 bp, Proteus mirabilis
atgagcagaattatcaccaccaccgtgtatacactgcatgagctatcctccaccgcacaggaaaaagcccgcgactggtaccgtcagcatcatgctgacagcaactggtatgaaaacgtgtatgaggacttcagggcggtctgtggcattttcggaattgacctccgccagcgcgttttccggctcagcaacggcaggtttatggaagaggcgtgcatctggttcagcggattctgcagccagggggacggagcctgttttgaaggacgctggcactggcagccagcaacagccaggaggctccgggagtatgccacacaggaccatgaactccatcgtatcgcggatgccctgcaggcggtgcagaaacgtaacttctggcaactgcaggctgaaatccaccaccggggacgttactgccatccgtacagcatggatatcactgttacccggaacagtccgactggtcaggctatgacagccgatgcggaagccgctgtcagcgaagccctgcgcgacctggccttctggttgtaccgtcagctggaaaacgagtacgacaggctgacctctgatgccgctgttgatgaggcccttctcatcaacgaatacaccttcaccgaagccggtctgcgcgccggctga

SEQ ID NO: 310835 - DNA, 378 bp, Proteus mirabilis
atgaacacattacccgacacacacgtacgggaggcatcgcgctgcccgtctcccgtcaccatctggcagacactgctcacccgactgctggaccagcattacggcctcacgctaaatgacacaccgttcgccgatgaacgtgtgattgagcagcatattgaagctggcatttcactgtgtgatgcggtgaactttctcgttgaaaaatacgcgctggtacgtaccgaccagccgggattcagcagctgtacccactctcagttaataaacagcatcgatatcctccgggcccgccgggcgaccggcctgatgacccgcgacaattacagaacggtaaatgacattacccaggggaagcatccggaggcgaaacaatga

SEQ ID NO: 310836 - DNA, 1536 bp, Proteus mirabilis
atgttttccagattatttgtaaaaaaacatactccagctatggtggcaggtggcctggtatttctgttcattgttctgctgacatttttctggaaaaaagcagagctggtgaatgacagccagaccagagttaatttcgcacttggctatatagaaaacattctcaatcagaacaacagcatcagcccggaagcagaacatttgcttctgaataactgtaacgcagatactcagcgtgaattaagcaatctgctgctgaagcgcccccaacttcgtgcactaagcctggcaagacaagaggctgtattttgcagcacccaccccggtttgcctgtcggtccagttgctgaaaaggaacggtggcggcacgatatgctgattcgttttcctgaagatacaggtactctgccctggatcctgttaaaaacaccttacaaaaacggtacggtcattaccgccacggattattattttattcaggacatcatctctgtggttcatgcggttcctgcaatacaattccgtttgggaaacacggtcctgtcagccagcggaaaaaatgtcactctgctcccggacgacagcggcatacaaaaagaaagtcattcaaaaaaatatccgttctccctgatttataccatcccggtgaaaatgcaacttatctacgcctggagacaggcctggtatatgttccctgttgccatcttcggtggaatactcacagcctttctgctgtcccgccgtcgtccatccaccccgctcgatatgctgaaaaatgcacttgctcacggagagttcagaccttattttcaacccatcatttcagctaaaaatcaccagctgaccggctgcgaagtactgattcgctggcatcaccccgtcagcgggattatcccaccagatcagtttatcccgctggcagagtccaccggattaattgccccgataacgcaacagttgatgtctcaggtcgaacatagccttaatcctgttgcacattttttaccagatcaatttcatattgggatcaatatttcaccagcgcattttctgtccccggggctggaagatagctgtataaagtttctatccaccttcccgaaagggaaagtgaaactggttctggaactgacagaacgaaaccagctatccgtcacagcagaatcaaaagcgttatttgcgaaattacatcaacagggagtattgtttgctctggatgattttggtactggctatgcaacccacagctacctgcagtcgtttcctgtcgattacatcaaactcgacaaagggtttgtacaaatggtcggcgtggatgaaatctccgggcatatagtagaaaatgttattgagctggctcgtcggttaggtattgatatcattgccgaaggcattgaaaccgaatcacaggagttgttcatgacagagaaaggaagcagctatctgcagggataccgctatgcacctccactacccgcggaacagtttattgctgagtgggtatacaacagcagaaacggcaaaaaccagagataa

SEQ ID NO: 310837 - DNA, 678 bp, Proteus mirabilis
  misc_feature (662)..(671): n is a, c, g, or t
atgagcgtggatatatctgcatatcgtgaatggttgagttattcagaaatagtaacgcttttggcggataaacatgggatagaaatatctattggcgatattgcaagacttgttgcagatgaggcaatttctccatctatatactttcaaactccaactccagcaagaaaggtttcattgaaaactgttccattatcagtagcactagatgatcctgacgcattgataaaggctaatttagaaatgctgaatagcgacgccgtaatgccagaaaccttaattcagcacgcaatcccaataaataatgagatagttagaattgatggactatgggatgctatgttttgtggtgtgattaagcacttcaatgaatgcctttatagccaaggagttggacttaatgaaccattgagaagtttgtatggtgtaagagggattgtgttaattaaaggaaatgacttataccagatattatctcccgttgatattggtgagtctttaaagatagtagaggctatgaaattagctcatgcagatcgtttgaatcctttagttgacaaacatatagctcaattaacccatcttcttaatttggtaaataatggcgattatgctcatcaactcatgccttgcacaaggttgccaagtggcgcattacctgnnnnnnnnnntaattaa

SEQ ID NO: 310838 - DNA, 276 bp, Proteus mirabilis
  misc_feature (260)..(269): n is a, c, g, or t
atgaaaaaatacgaccttatctattgtgatcctccgtgggattacaaaaataaagtttcaaacggtgctgctaaaaatcattatccaacaacctccctcttcaatttaacccatatccctattcattctattgcatctgataacgcagttcttgccatgtggtatacaggtaattttgtactcgaggctattaaattagccgaagcgtggggctttaaagtccgcacaatgaaagcttttacatggattcagtttaaccnnnnnnnnnnggattaa

SEQ ID NO: 310839 - DNA, 1320 bp, Proteus mirabilis
atgctacaaagtcgtaatgtgcgtctcgcttcattagatattcagccattccttgaaaaagagacagtatcagatgaagaattaaaagccttttatgaccaaaatacctctatgtttatcgctccagcacaagttaaagtgagctatattcagttagaagcccaaaaagatttaagcaacatcactatttcagatgatgaagttaaagcttattacgatagtaatatcagtgaatttactgttcccggacaaaaaaaatacagtctacttgtcttagcagatgaaaccgctgcgaaagaagctgaagatgcgttgaaaaatggcgctgacttcgtcaccttagtaaaagaaaaatccattgatactttttctgctaaacaagatggttcattaggctggatcactattggtcaagagctaccagaattagcaaatgcgagtttgactgagaaggggcaaatttcacagccagttaaaatcagcaacggttatgctattttccgtcttgatgatattaaaccttcggtggtaaaaccttttgatgacattaaagctgacttattagtaaaaatgcgtgaaaacaaagccattgatgatttcttcgcattgcagcaaaaagtgagtcaagccgcttcaaatgataacgacacgctagcgacagcagcaaaagcagggaacgtcactgtaatcaatacagattggtttgatgaaaacaatgtaccagcagccttgaataacgaaaagttaacacagcttatctttggtggttcactggttgatgacaatggccctacaggcatgaactcagatatggttacccttggtaatgatagtgcttatattgttcgtgtcgaaggatataaacctgcatcaacccaaccattagataaagtacgtgacaaggttattacactggtcaaacagcaaaaagcttctcaagcgatgaatgcgcaagctcagaaactccttgcagccttaaaagaaggtaaaggagaggcggcattgaaagaagcaaatatctcgtttggtgaggtagaaagcgtggttcattcatcagccacagatccgatacaaagtgctatttttgctatgccaaaaccagcagaaggtaaaaaagagtacggtatgtctaatgtaccaggttcaaaagtggtcttaatccaattagatagtgtcactgatggtaagccaacggcagaacagcttgaatttatgactaatctctatcgcgcccaaatgggagaagaagctttacaacttatgctcagcgatttaagagaaaaagcaaaaatcgagatttttgataaagattatcaataa

SEQ ID NO: 310840 - DNA, 543 bp, Proteus mirabilis
atgaagatagttccctttcgtggcgaatattttatgctcaactcaaataaaaattatttagttaatcatcttatttatcctgtgccgaatcctgatttcccatttttaggtgtccattttacacgtatgtataacgggcatcgtgacgtaggccctaatgccgtattagcctttaaacgtgaaggctacaagaaaagtgatattgacttaaaagatctcactgaagtactaacctataaaggattttggaaaatagccggaaattatttaggtgaagggatggccgaattacgtcgttcctattcacgtaagctgtttgcccaaaatgcacaaaagcttattcctgctctacgtgaagcagatattcacccaggcccggcaggtgtacgcgcccaagctttaactcgcgaaggaaaattagttgatgattttcactttgttaaaggcaaacgttcattacatgtatgtaatgccccttctcctgccgcaacagcatcgattgaaattggtcgtgaaattgtaagagagcattttttattataa

SEQ ID NO: 310841 - DNA, 3549 bp, Proteus mirabilis
atgaaattaccggttttctccatttcaaacattacgagttcggtaaaaaaactcttttttgctgataaatctaaaattgcctcctttttgctatttttattggcattacttcccgctttgctcattatttggatctggtggtgggggccaacatttcgttatcaagattccataccgtttagcgaggtcaccacacgttggttagcaaccgtcgttattgtattgcttgttgtgagttggattggtctagcaacatggcgtcgagttaaaaaattggaagcattaaaacttgatgtcgaattggctgtagttgatccggtaagacaagatcttgattttcaaaaacgttatttaaactattggaaatcacaatttattcgccacttaaatggtcatactaaagcggtttatttacgcccttggtattttgttttaggtgctaaccaaagtggaaagcatagcttattaaaaaatacggtaaacccattagatattgcgcctagcgacaatattgttaacgaacaaaatattgcattaaatattcaatgtctattaaccgacaatgctgtactttttgtccctaatggtgatctattaacccagccggcaaatcaggctgataaacctcaactttatcaccgtttgtggggcgatttactcaattggatcaaaactaatcgcccaagacaaccaatgaatggcatcgtcttaactgtcgataccctatcgttattaaccaatagtaaggagcaaaatagtcagctacttgctgatttacaaatgcgtattgaagaaatacgcatgacatttaatagtcgcttgcctttatatatcgtcttaaccaagctagatctattacgtggttttgactcaatgtatcaatcattagatgttcaacaacgtaatgaagtactaggtgtttctttcaaccagaaagcaaaaagtaattggaaaaaggaattaaatcatttttggtcacaatgggtaggccaaatgaacagcgcattaccagaaatgatgctacaaagagcagaaggtaaccagcgtagtgatctatttagtttcgtgcgccaaattgaagggttacaacattctgtatgcacattaattgatgcattgctcatcaataatgagcaacataatatctgtttaagaggggtttatttaacttctgcattgcaaatcggtcaaatcgatgatgtgtttagccaaacagcgtccgaacaatatcatttaccgacagcacctcttactacatggccaattaatgatagccacccttattttactacccaattatttagtcaagtgctatttagtgagcctaatattgcagcagaaaaccattattgggttaaaaaacatcggactcgcctattagtcaccactgctgttagctttgtcggcttaatcgcaatttggaatggttggagccactattacgacaaaaactatcgtgctggagaaaacgttcttaatgaggtaaaagcattccgtgctattgagaacaatgttcagaaagatactgatggtagcctacaattaccggtgctcaatccattacgtgaagcaaccttagcttatggtaatcatcgtgataaaaatgtgctcttttctgatatgggtctttaccaaggtcaaaaagttggcccacaagttgaacaagtctatttacaactactcaccgatcgttttttacctgcggttatgtctgggttgttaaatgaacttaacagtgccgacaaaggaagtgaagataagttagagatattgcgtattatgcgcatgttagaagataaaagtggccgtaataatggcatggtagaagattttatggccgattattggagccaactgttcactggtcaacgtgaaaaacaactgcaactaaaagcccatttgcgctatgcccttgagcacacagattggaaacaagagcgtgaaaaaggatttgtttcagccactaaagcctttatgccttttgctggacctataaaaaatgcacaagcagagttaagtgtattgtcactttatcagcgtgtatatcaagccttacgcttaaaggctaatcaagagctttcagcgcctttaaatttacaacatcaaattggcccaagttttaatacggtctttacggctattgatgatgataaattagaaattccacaattcttaacgcgctcagggttattaaactattttatccgccaaaatgataaattggtcgagctaacattacttgatgcttgggttcttaatctaaccaccaacacacaatatagtgaaagtgatcgtaaagaaattcagcgtcaaatcagtgaacaatatcttagtgactatacggctcaatggcgtaatgccatgagcaatttagaaattcgtcaatttgattcaatacaagatgaaattaccgctcttgagcaaattattagtggtgaacaaccattacgccgagcattacaagttctacgtgataacacggttattccaactattgatgaaaatttaccacttgatgaacaaaaaacactgatggctgagccatcttaccgtttattaacccgcttagatcgcgaatttactcctcaaactgagatattagtcagtaaccaaggggaaaatttacagaatctgaatcaaaaactaaatgacttacatcgttacctattggggatccaaaactctccagtgccggggaaagcggcgcttaaagcagtttcgatgcgcttaaacgataataatcgcgacgctatttttgagctatcacaaatggcgaaaacattaccagagccgcttaaccgctgggtcgatgagttatccgtacaagcatggaatgtagtccaaaaagaagctattcgttatatggaagttgaatggaatgaaaatgttgtcaaacaatacaatacttatattgccggtcgctatccatttaacccagcagctaaacaagatgttcctttaagtgaatttgaacgtttcttcaaaccaaatggaacattagatagcttctatcaacaaaatctgcgtttattcgttgagaataacttagttaacgatagtgatagccaatcattgatccgcgctgatgtattagcacaaattgaaatagccaatcgtattagagaaaccttctttaatgcccaaggtaatttagaagcacaatatgctattgagccactgtcattaagtggtaataagcgtcgtagcatcttaaatcttgatggacaattgattgattacgctcatagtcgcagccatgtgacacacttggtatggccaaactcaatgcgttccaatattgaaagtaaactgactttagtgcctctttccggtgataaatcgccacgttcaatcagtttctctgggccatgggcacaaatgcgattagttgataatgcaaaactcatcaatatcaaatctaactcattcgatattcgcttcacaatcgacggtggtgatatgacttatcgagttatagttgatgaatctaataatcctttcttcggtggattattcacaaaattccgtttacctgaaacgctttattaa

SEQ ID NO: 310842 - DNA, 1464 bp, Proteus mirabilis
atgatgaacaatacttcttatgcatggaaacaacagctactgacagcacttgatgaacagcaagtcagtagtgctgtcaatgataatgatgccgactgggaatatattgacagtgaaatgataaagttcggctcacttagtcatggtcaattagatattaaagagatccagcgtcgctgtttacacctatttgaaacgcagactaaagattttcggatcttagtccatttattacgtactttacagcatgctggagagccaaaagaattagtattggcagcacagatcctaactgattttaatcgtcaatattggcaaagttgctacccaaccaatatgaaattgaaatcacgtttagccaatcaagttttgaaacgttttgaaacagcgagtgagagtttttgtcatgcagccaacagcgcgatgcgtgatgatattctaggctcgttcgcctttctagcgcaattttggcatgaacaaagcccggcacttgcagaacaaattgatgatttaagcagagattataatcgtattgaaaataacgatgcgccgattattgttgcttcacctgtcgagaaagaagaaaaagtacagactccgccggttagcgagtctatagaaacaccgacaaaaaatagcttaacaccaactattaacgttaaccatcaagatgaaagacaatggaaacaaacattacttcaagtagctgatgttatctgccaacaagcccctgaaagttcagtaggatatcgtatacggcgttatgcaatttggcacgctattacggtcttacctcaagctaatgctcaaggtaaaacgcctttagcccccgtatcaattgaccgtgtaatggattacaaagctcaactgactcaagcgtccattacgctattaaacaatattgaacagagtctctcactctctccttactggttagaaggccatatgttagctgcacaagtagcagctaaattaggttatggggaagtagaaagtggcattattgaagagttacgtatttttttagcgcgtcttcctgaacttgttaacttgcacttttcggatatgacacccttctttcctgaaagtgtacaacagtggttagagcaatataaccaaactgaaaacggtcaattgccaccatcgaatacgaatactgcaatcctagagcaagaggtcttgcaatgttatgagcaacaaggtcttgaagcagccctgaagcttattgaattaaaccttgctagcagatcagagcctagagatagattttatggacaattattgtctgcacaactatttgaattgtcaggtatggattatatggctacacagttataccaacaacttaatacctctgcctcacattattcacttgcagattgggaacccaacttaatacgacaactcatgcaaaaaatagacaaaaagacagaaataacaatgactatggatagggatcaataa

SEQ ID NO: 310843 - DNA, 651 bp, Proteus mirabilis; identical to SEQ ID NO: 307889

SEQ ID NO: 310844 - DNA, 4935 bp, Proteus mirabilis
atgtctgatattcatgatacgaatcgcgaacaggaaatacttgatagcgctgttgcacaaggtggcgcatatgaaatattgcgtaaacgccttaccgagcaaggtcagcagttacatgtaaaagccactgaactcaatcagcatcgattagctgaatttggtcaaagccaaatggatatcattggccgtattcgtattcgaacagagaataattgccaagcaagagatattgttcgcgttggtgaatggttactatttggttataacgttttcctcggtttaaaacgagaaacgcatcttgaagatgttttttcactttatcgcttaattgataatgatggcgagtttgatgttgaagcggttgcttatgaaggcacttttttaaatgataatcgctttatccaagattttaccgagttatacacttactataaaaatacgcaactactacagctagttgagcgtgatggtaaattactcgctagttttcaaattggtgatcgtattaccgatgtacgcgtcttccgttggtcgatatccagtgacaaacaacgtattgaatatattgataatcgtggcgaacgcgatatagcactcccccctgcttacgattttgattggataaaaacacaacgtgaagatacggtaaatggacgttttcctcatatcaacattttagatacagtctttgtagaaaccactggtggcgatctgactgtcaaatgtgaaaacaataccgaagatggtttaggaatttatcgtgaagcggtcttagataaaaaccagtcccttgatgatgcacaaattaaatatgcacaaactggcagtttaattttattaaaagtgcttccttaccgcgaagagaattggcgttatttagtctataacacactaacacaaagtgttcagcgtattgatgccattgggcaagcttgtgtgcaacttccggaagatcacggtatcattttccctggtggctactatctacaaaatggcgattacaaaacctttgatcaaccaatggaaggtatgtattttcgtcgtttacgtcgttcacctaacggcgaagatgtgctgtatgtcttctattcaccgacacaaggtcgtctcgcgctatttaattacaatatgattgagcgtaaattggcgacaccattggtcggtcatggctatgccatgctagaagatggcaaaatggtgctatttgaaggggaaggcgaagaagctacccgtgttcacccgatgcaagtttggcaaacgcccttctattctgaagaatttgccgataaacaaccgccacgaaacggcttttatgggcgtattggtaatgccgatttagttcgcgggatctcagaaattttacatgtcgctaaagaaattgaaggtagccaagtttccatcgctcgttatgagcaacttagccaacaaccaaaaagcttattagatctctattactggtttaatgatgaacactgtctaggtattggccccttactaaaagagatcgctcaaacaagtgaattagtgcttgatgaatatgaaaaagtcgaaagtattcgtcaacaatcagcgaaatcaatgcaagaagcgatcaaccgtcagaaatctctgttatcactgacactgcctgatagttggaccgatattcaacaatttgttgatagtttaaattcgctcaatacacaccatggacaccttatttctttgcgtgaattccgttatatggatttaacgcaattaaataaaatggaaacggaaataaccgaggcacagcaacgtgtttcgcaagccacagcccaatttcttgccagcgacaaagcgctacagccttttaaaacacagcttactacttttgaacaacagatagaaaaagcacaaaacagtgctcagcttgatgtaccaatgaatgagatggcgcagatgtcagaagatttagacatgctgtcaaatctgatggcatcactcacctttgaggatgtgacgcaacaaacgcagattattgatgccatctcccaaatttatgcacaactcaatcaatcacgagctcgcttacagcaaaaaagaaaatcacaaagtagcgtagaaaccgtcgctcaatttggtgcgcaattccgcctatttagtcaggggatcaccaatgctttatcactggcaacagatccggaacgttgtgaagagcagctttcacgattgctagtacagctagaagaattagaaagccaatttagtcagcatgatgaatttcttgatgatatcttgtcaaaacgtgaagagttattagagacttttgaggcgcataaacaatcgttacttgatgatcgacaacgtcgttcacaaagcttattaactgctgctaatcgtctcttagaaaatctgcaacgtagaacaactcggttgcaatcacaagatgaattaaatgctttttttgcctctgatcctttagcattaaaaacacgtgaaatcattgaaaaactaagagaaatcaatgacaatgttaaagcagatgatattgatgcccgtcttaaatcgtctcgtgatcaagccatccgtatcttacgtgataaaacggatatctttgaagagggtggcaatgttattaaattgggccctcatcaccgttttagtgttaatacacaagagctagatcttactattttaccgaaagaagataagctttggttatatctaaccggtaccgatttccaagagccaatcgaccatccagagcttgaaacactgcgcccttactggaatgcgacattaagttcagaatctgaaacggtgtatcgtgcggaatatctcgcctattcaattatctatgctgcatcaaaacgtcaagatggattaaccctagaaatcttaaaagaagcactgagtgtacctgaaaaattagaaaagttagtacgtgatttcgcaacacctcgctataaagaaggctatgaaaaagggatccacgatcatgatgctatcgccattctaaagaaacttctacctgtaggtgaaagtgctgatctgcttcgttataacccaacagcacgggcaattgctgctattttctgggaaaaagtacaaactaatgaatacccagcattatggccagagcgcgcacgaacggcagtgaatattcaacaactgtttcataatgatgatgcattaattgatttacaggcagaaatagaagcggatatccgcctattccttactgataatccgattaaatgtggatcttatgttccgatccaagccgctgaatatttaagttttgcactagcaagaacaccaatagaattggtttacagtaaatatgccaaagagctcgttgttgccttacaaaaccgattagaagccgctcatatgtggattgattttaatcgttcacaacaaaatttagcctcacgttatgcacaacgttgggcattgatccaaaattggctacaaggattgtgctctcaagccgattatgctcatctaaccccttatattccgggggcaattgccattattatgttagataaaatcgcctctgcacgttatagcgaggttgatttatactttaaggtaaacggattattaggtgagcatcctactattgaaaatcaaacactttcattgagtttagatgattatttcagtcgtatgcgcggacagcgtaaaacctttattcccgcctttaatcattatctgactttacgacaaaaaattgttcttgaagagcgccagcgtttaaaactggatgagtttaaagcaaaacctctcagttcatttgtgcgtaataaactgattaacgatgtctatttaccaattattggtgacaatatggcaaaacagatcggtgcattaggtgaagggaaacgcactgacttgatgggattattattaatgatctccccaccaggttacggtaaaacgaccttaatggaatatgtagccgatcgtttgggactgatctttatgaaaataaatggccctgctttaggtcataatgttttgtcattagatcccgaacaagcgccaaacgcaacagcaaaacaagagctagaaaaactcaatcttgcccttgagatgggcaataatgtgatgttgtatgtcgatgatattcagcatacacaccctgaattcctacaaaaatttatctcgctatgtgatggcacacgccgtattgaaggggtttggaaagggaaaacccgaacctatgatatgcgtggtaaaaaattctgtgtggtgatggcgggtaacccttataccgagtctggtgaactatttaagatccctgatatgttagctaaccgtgctgatatctataatcttggtgaggtattaggaggaatggatgacgcctttgcactcagttatattgaaaatagcttaacctctaactccgttcttgctccccttgctttacgtgatctaaacgatctctatctttttgttgataaagccatgggtaaatcagtttcaaccaattccctcagttatccttattcggatgcggaaattaatgaaattgtgatggtattaaaacatctaattactttgcgtgatgtaattttaaaagtaaatcaacaatatatagcaagtgccgcacaatccgataaatatcgtactgagcctgcattccgcttacaaggcagttatcgcaatatgaacaaattaagcgaaaaagtctctgcggttatgaatgagaaagaaattgaacgcttactcgacgatcactatcttggcgaagcccaattactcacaacgggtgctgaagagaacttattaaaactggcggaaatacgtggcacattaaccgaacaagatgctattcgttggcagcaaatcaaaaaagattttatgcgcaacaaagcattaggtggcgataatgctgatattggcgatcgcgtagtgtcacagttggcgaatttagtagaaagtgtgcagagtttacgctaa

SEQ ID NO: 310845 - DNA, 201 bp, Proteus mirabilis
gtggcattaccagaggtcatgactaatggaatttgtgtttcatgtgcgagaagatgttgcaaaggattagctggtaacataacacccacttctgttaatccaggtgcaatcagttcacttaatgaaataggggcgatttctttaggaataagtacgataggtgctgcggtactggttaatgtttctatcacttttgagtaa

SEQ ID NO: 310846 - DNA, 276 bp, Proteus mirabilis
  misc_feature (260)..(269): n is a, c, g, or t
atggttaataagaatactaataaagatatcgtttattttctctttccaagtgtcattgcattgtcattgacgctgtccttttcatcatatagcgcaaaccgatttaatcctgcatttttggctgactctcctgatgccgtcaccgatttaagttattttgaagcaggcaaccgcattaaacccggtgattatcttcttgatattgtttttaatcatgagtatctgcgtagtgaaaatattcattttattagtcaagatannnnnnnnnnaagataa

SEQ ID NO: 310847 - DNA, 189 bp, Proteus mirabilis
atgtggtgtttcgctaaaaatagctctattcccattcgccctttacgtgtcgctaagcttattgaagccattacatccgtaatggataatgaatcaacagctttaggcgttctaacatcacttaatacaacactttttggagaaaaatacttaggtaagtcagctaatctcatacaatattccctttga

SEQ ID NO: 310848 - DNA, 432 bp, Proteus mirabilis
ttgctcactgagaatagccagcttaagggtgataatctcgcccttaaacaaaatgttatcagtcatcaagacgccattgaacattatcaggaagaacttgcccgcttatcagaattggataaacaacacacaaaggcgctgaccgatgcaaaaaataatattagccggcttaatgatgagttgcgcaataatactaaacgggtgtacatcaaagccgattgccccaatcccgataatcacaccaccgccaccgccggcatgggtaatgcaacctccgcacgacttaccgaaacagctcaacaagattatttacgtctcctcgaaatgatggcggagaataaggcgcaaacggaatatttgattgattatacaaatcaattattacaatacatcaataagttaaaccatgaaaaagcctgcaaacctgcgtga

SEQ ID NO: 310849 - DNA, 1527 bp, Proteus mirabilis
  misc_feature (33)..(42): n is a, c, g, or t
atggcaaggtggggcaagcaaagacatccgttnnnnnnnnnngtctataattcagcgacgttacaacctgatcctagcactatactatcaggggatacctctgagctaaccttaactttatttgataaatcaggtgaacaagtgaggatcacaaatgacaatgtcagtattaacattcttacaccaaagcttggttcactcaataaaacaacatttgacgccaagacaaaaacatataaagcaaaatttaatagcgctgggttaggtactgcacaatttaacgtttcgataaatggtattgttcgttctgatattaccgcgagtattatcatcaaaaaagcgtatgaaagtgcatcattaactgcaatgccttcatccatctatacaggtaaaacatcggaattaacactgacatttaaagatgccaacaataaacctattgaagttaatggtgccaaaattatcttacgagatggtgaagcaggacaattaacggatacaacttataacgaggccaaaaaggtatatacagcgacatttactggtacgctagcaaccaatgctaattttaatgcatcaattaacaataatattgatacatcaatcaaaactacggtaacagttaaggagctatccttagatagtttcaactatcaactgatcagtaaacctaactctatctatattaatgatgaatcaacattagaattgaaaataacagatgctaatggcgctgtagttcaattggatgatgtcagtattgctcaatcatcaaataaccaatacggcactctcagtaaaacgacctataacagcaaaacaggcacttataccgcaacttttaccggtaaaaatgtgggaacagaaaccttctatgtggttattcaacaaaccgtgttaagcgaggtgaaaacaactgttacagtggataaagtcataccgatcaccgatattgcttatattgattcgaataattactcatttgaattaaatgaaggattccctacaacaggttaccaattctcaagtttcagttttgtgatgaaaaatggaaccaaagcatcggattatacatggaaagcaaatcaatcatgggtcactctgactcaaaatagtaacaaaatgaatgtcatgttctccaaagcaccaaacagtgaaaataaaacggtaactattacagcacaacctcgtgtagaaggtgtaggaaccgcattctcctatacatttacactaaaacgttggtttacattctatggtggacaaccgttacctgctccgagagcatggaaaatatgtacagataatggattagataccacaccttcatccttacttacctcaggtacaaataaacgaggtataggaactgttttctcagaatggggtaaaggaggttcagttttccacgcatggtcttccgatatcaacgatcaacaacaggttggtttagtgaatctttatgatgggtcagttaaataccttaactcatattttcaatatgaccctgtatgtaaaacagacttgtaa

SEQ ID NO: 310850 - DNA, 2433 bp, Proteus mirabilis
  misc_feature (2416)..(2425): n is a, c, g, or t
atgtatgtaggggattcatctaaagttgtcatgaccatcttggatgataataatcagccaatggaagtcgataatgcaaaaattcagatgattagagtcaataatcaaacaggtaacggcgttatctctgaaacaatctataatgctgcagataaaaactattcggctcaatttcaggcaacagaaacaggtaaagtgactttctacccttatgtcgcgaataccccttaccctgatagtaaagctgagacatccattctttctcattcagagaaatataaaattgtttccttaacggctgaaccagaacaaattatccaaaatcaaacttcagtgatcacggcagtagtgcaagataatcaaggtcaacccgttactgataaaaccgtcgaaattgttttaatcacaaatagcggaaccttgactaaaacgacgaaagtatcaggaaaagcgggggtttaccaagccacttataccggaactgaaccaacaacggcaacttttaccgtcaatgtcgatgatatacaaaataatgatactaaagtaaatgtaattgtttggggaagaaatgatgtcaatgcaacacttgttgccaataacccgtcattggatctaacacaggtagagcataactcgttattaacacttacactaacagataaaaataataatccattacctacggataacgcggttattttacaagaacaacccaattacgggatcctagatgcgactaaaaaaattagtgcaacccaatatacagccaattttaatgcaactaaggtaggtacggctaaattctttgttgaattagaaggatttcgtttaaaaacaacagcagaaattaacgttattgatagtaaacctacaattgatttgaataatgccaccattgcgtccaatcctagccatatttatagcacagaagaaaagcaaaatggccatacacgtagtaatgacaataacaattggcgtacatccactattactttagatataaaagatcaatatgggaatttattctcccctgatgtccctatcgatatcgtgattaaaaatacccaaaatggacgtgtaagcgaagccaaagaagtcaaacctggagaatatcaagttgtttatacgccgactgagcaaaatataccttttaccgcgactttctatgcggtaataaacaatgtacaacaaaatcaaatttcaaccaccgttgatgttgaaccgttaatacataatgtaaaaatgggcgcaagtttaattccaatcccttcacatattactgtgggtaatgcatcaatattaaatgtgatcttctatcaagacaataaaccttacattccttccggcaccgttgaaattagactcgctgatgattcaaaagcgttaggccatatggaggcaacaacgaaaagtggccatatctttcaggctaaattcatcggtgaaaatgtaggtaaagctaactttgaaatatttgttgataagcagcagtatactgaaggtaatatcaacgcaaccgttaatgtaacagaatcttatcgaggaaaattgaatgcggagccgagttctattccggtaaaacaaacttctgtattaactttacaaattcaaaatcatcttggtcaatcaataaaagtcagtgatgatgatgtacaaatcattatgttgcaaggtgatggtaataccgcagaaggtactattagtgaaacaacttatgatgccaatacaaaatcatatcaagcgactttcactggcactaaacaaggcaaagctcagtttatctcgatcattgatggacaaacttataataatacctcaactactgtcactgtaaagcctgcctataattcagccaatatgggaagagaaacttctccgatcacattgaataaaacctctgatgtttatttaaccctactcgatgcgagtggtcagcccattcaagttgataatgcaaaaatcatgttaaatacaccgaatttaggctctttaactgtgacaacatgggacaataccaataaacgctatgtggctacctttacaggctcagcgataggtaatgcagagtttagtgcttatgtcgataatcaaaaaatagcagatgttactacttctattcaggttaatgatagccctgatgcattttataatccgagtctagtaccatctccaagtgttattacagtaaataataaatctgaaattaggttaactattcaagatattaacggcctgcctattaaaggaaatagcgccaatattatcttagaaacaccaacattaggttcattatctgaaacagtatgggatgaaagtataaatgcatataaagcaacctttactggtaatcaggtaggtaaagcaaacttctcagctattattaatggcaaggtggggcaagcaaagacatccgttnnnnnnnnnngtctataa

SEQ ID NO: 310851 - DNA, 1149 bp, Proteus mirabilis
  misc_feature (1114)..(1123): n is a, c, g, or t
atgacgcaaaaaaaaccagaaacctcactgctattaagtggtcgatcaaaaaaatattcacaaggcgcagtaaaccctattatacagcgaacttcatcggttatttttgatacggttgcccaaaaacgtgaagccacccaaaaacgagctgaaggcgctctattttatgggcgaagaggtactaccacgcattttgcactacaagaggcactaaccgaactagaacaagggactggttgcgcattatttccatcaggtgcggcggctattactcaatctattcttgcgtttattgaacaaggttgtcatatccttgtgactggttccgcttacgatcccacgcaaaatttttgtgatcagatattaagtaaattttctgtcaccacaacctattttgatcccttaatcggcactgaaattagtcaattattacgccctgaaacaaaaattgtttttctagaatcacccggctctattacgatggaagtgcaagatttacaaggtattatcactgcggtaagacactataacccaaatattattataatgattgataatacgtgggcagcaggtttattacttaaacctcttactttaggtgctgatatttctatccaatcagcgaccaaatatattattggtcactcagatggtatgttaggttttgctgttgctaatcaacgttgttggccacaattacgtgaaaacacgtatttattaggccagtgcgcagatccggatacagcttatatggcagctcgtggtttaagaaccttagcagttagaatgaaacaacatgagcaaagtggattagaaattgcgcgttggttaaaacagcacccgctagtggataatgtctaccatccagcactctcttcttgtccggggcacacctattttcaacgtgattttactggaagtaatgggttgttctcttttagtctaaaaaagatcctcaccactgaggaattttcacgttttcttgataacttatccctgtttaaaatggccttttcatggggtggatttgaatctcttattttaggctatcatcccaatgatattaaagcgatgcgacaatatgacactcagcccactctcgcaggaaccttannnnnnnnnngtacatatcggcttagaaaatattga

SEQ ID NO: 310852 - DNA, 1275 bp, Proteus mirabilis
ttggagcatgtgtcgacaacaacgctcattatcatacttatcggtatgatctttgcctcagcctatttttcaggcactgaaactagcatgatgacgatcaatcgttatcggctacgccacgcggccaagcaaggtaatcgctcagccaaaagagtagaaaaactattacagcgtcccgatagattgattagcttagtattaattggcaataacctgattaatattgtcgcctccgctctcgccactattgtaggaatgcgtttatatggtgatgcaggagtagctattgcaacaggtgtattaacctttgtcattcttatttttgctgaggtactaccaaaatctatcgcagcgctttatccagaacgtttcgcttatccaagtagcgttcttttgtcacctttacagaaaatcatgttgcccgttgtgtggttttttaaccaaattactttggtgtttatgcgcattttcggtattaaatcccccgtaatacagggtaatgcggtatcaaaagaagaactacgcaccattgtgaatgaatcaaaatcgaaactgtcacagcgtaaccaaaatatgctgatttctattttggatttagaaaaagtgaccattggcgatattatggtaccaagaaatgaaatttttggtattgatgtcaatgatgagtggaaatccattgtcagacagttaactcactccccccatgggcgtattgtcctttatcgtgataccctcgatgacgtcattggtatgctacgagtacgcgaagcttaccgtcttatgacagagaagaaagaatttactaaacaaattttgattaaagcggctgataaaatctattttatcccagaaagtacaccacttagcttacaactagttaatttccaacgtaataatgaaaaagccggtattgtcgtcgatgaatatggtgaaattcaaggattagtcactgttgaagatatcctagaagagattgtcggtgattttactacctcaatgtctccttctttagcagaagaagtgatcccacaaaaagatggttcactattagtggatggcacaactaatatccgagatatcaataaagcctttgcttgccatttaccagaaaatgaagcacgaacaattaatggggttattattgaagagttgggtgatttacccgtagtaggtgccaaaataacgattgatggttatgaatttgaagtgttggaagtgcaagacaatgtgattaagaaagccttgatccgccatcttacgccctctcgtcactag

SEQ ID NO: 310853 - DNA, 495 bp, Proteus mirabilis
atgccgaatagtgaagaaagaaaatcaacctcatactattggatctacggtataatggtgaagtttgtcagtgaaacgtatgatctaataaggctgtttatgatagataaaaaaaaactacatattgctgcaggtgtgatttgtgataagcaaaataatgtatttattacccaacgccctttgacatctcatatgggaggatattgggagtttcctggtggaaaactagaagataaagagacgccagagcaggcattataccgtgagttgcaagaagaaataggtattaatgtgacacaatgccagttgcttgaaacggtagagcatgattttattgataggcatattacattatcattctttttagtcacagagtgggaaaataaaccttacggtaaagaggggcaactttcccgctggatacctattatgtccttaaatgccgaagattttccaccagctaatcgctctattgttgccttattgcaaaaataa

SEQ ID NO: 310854 - DNA, 681 bp, Proteus mirabilis; identical to SEQ ID NO: 297282

SEQ ID NO: 310855 - DNA, 243 bp, Proteus mirabilis
  misc_feature (219)..(228): n is a, c, g, or t
atgatgaaaaaagttttacctatcgccatcgttttaatgggttcactctcttttggtgcaatagccaataattcacatatgaatatgagtactaatgtggcacagagtaactctcctatgaaccaagagctcatggattcaatgaataaaatgcatgaaaatatggcaaaaggaatgaatagtgctaatgcagatgttgcatttgcgcagggaatgatnnnnnnnnnntttgggagcaattga

SEQ ID NO: 310856 - DNA, 432 bp, Proteus mirabilis; identical to SEQ ID NO: 310848

SEQ ID NO: 310857 - DNA, 627 bp, Proteus mirabilis
atgaatatcgcagagcttatccgaaaaatacaaaacctgatccgcactggcgttgtgattgatgtcagtgcggaaaaaggctgtcgagttaaaacgggcgacaatgaaaccgactggcgtccgtggcttactacacgtgctggtaacgcgcgctcatggtgggcgcccagtgttggcgaacaagtgttattgctatcaatcggtggcgatttaactacctcgtttgtgttgccggcgatatttagtgatgatttttcagagccgtcaacctcattaaccgcgcatcgtcatgagtataaagacggggcagtaattgaatatgagccggcaacaggggcgctaatagtcatgggaattaaaactgccgtgattgaagcccgcgagtcggtcaaagtcacgtcacctgacattacgtgtgtcgcgacaagcaaaatcaccttagatactcctaccgttatttgtaccaacaacttaactacgggatcactgacggtgcaaaaaggcggcactatgaccggtgatattacccatgttggtgggaaaatgtcctctaatggcgtggtggtttcaacccatacccacggtggcgtgcgtactggtgatggtaatacggggcaaccgcaatga

SEQ ID NO: 310858 - DNA, 576 bp, Proteus mirabilis
atgaaaaaggccataaaagcctggaccgatgcttataatgaattaaataaaacctataaagatttcaccaagtacacccaagttgaaaaaggtgaagatgcctctaaagacaatggtgtgttattaggtgataccactagccggatgattatgtctgagctaaaaagctttatcactcgttctcaatcttcatctgagattgatacccttaataaaatgggcattaaatttaaagtagatggcacattagaagttgatgataaaaaactcgataaagcattaaaagaaaaacctgctaacgtcaaagagttttttatgggtgatggtaaagaaacaggatttggtactcaaacctataattacctgaaaaaaacgctgcaatccaacgacggcacccttgatattgccactgatggtgttaaaaaacgtaaaaaatcgttagataaccaaattaaaaataccaaacgtactattgaagcgacgatggaacgttataaaaaacagtttcaattattagataaaatggttaatgccatgactaactcaagtgcatcaattgaacgtttattacgctaa

SEQ ID NO: 310859 - DNA, 927 bp, Proteus mirabilis
atgtattgggcaaacgatacacctcgtgataaaccgatttatatcgatcaatgggggcctgaacatgaagccgatatggcaatcaagttcctcaaaaatgaaaataatcaatttagagataattcaaaaccatttgcattagtggtttcaatgaacccacctcactctccttatgatcaagtaccgaaaaaatacctcgatgcttatcaaggtaagacatcaaaagagttaaatacacgccctaatgtacagtgggacagtgaatatcaagaaggttatgggcctcaatatttcaaagaatatatggcaatggtcaacggtgttgatgagcaatttggtcgcattgtcgatgaattagaaaaacagggccttgcagataatactctcgtcgttttcttctctgatcatggcagttgcttaggatcaaatggacaagcaacaaaaaataatccgtatgaagaatcgatgcgtgtccctatgatgtttcgcttaccgggtaaaatcaaaccaggttttgatgatgcattaatgtcagcacctgatatttacccaactattttagggttacttggtttatcagaatggatccctgattcagtagaaggcacagatcttgcagatagagtcatcacaggcaaaggcgacacagcaaactctcagctttatctttttattccttatggtgaaccttcattcggtaaacgaggtgtaagaacaaaaactcatactttggtgatagataggcaagatgggcaaccattaaaatatactttatatgacaatgtgaacgatccatatcaaatgaaaaatattgccaaagataatatgcctttaattgataaattaattaaagaagaattaaccccttggttagaaaaaacaggagatttttatattagcgaattaggtttatatatagcgccataa

SEQ ID NO: 310860 - DNA, 972 bp, Proteus mirabilis
atgaacccattaacgacattacgtgttgcaagcgtacaactacaacataaggctaatgataaagattataatttagccaaaatacatcagtttattgagatggctgccagtgaaaaagtgaatcttctagtatttcctgaaatgtgtatcacgggatactggcatgtccctaaattaccggcgcaacaggtttatgcattaagtgaaaaactggctgatagcgcatcattaaaatccattaaacaaaaagcacaacagtatgcaatggctattggtgttggattaattgaacgggataacaataataatttgtataatacttgggttgtttgtatgcctgatggttcattacaaaaacatcgtaaattgcatgcatttgaacatccggttatttgtagcggagatcaatacaccgtatttgataccccatgggggattaaaatgggtattttaatttgttgggataataatttagttgagaacgcacgggcgacggcgttattaggggcagatattttattggctcctcatcaaactggcggaacccactctcgtagtccacacagcatgaaacctattccaatggcgttgtgggaaaatcgtcagcaagatccacaagcgttacaagctgcttttcaaggtgaacatggcaaaggatggctaatgcgctggttacctgctagagctcacgataatggtatgtttatcatctttagtaatggggttgggcgtgatgaagaagaggtgagaacgggtaatgcgatggttatcgatccttatggacgtattgtaaaagaaagctgtgcgatagaagacgatatggtcgttacggatattgatttaacgcttttgcctgaatcaacagggagacgctggttaacgggcagaagaccagagctatatcagatcctcaccactcgacaaggtaatgaacaagatccgatttccgttcgttttggtaacaaagactaa

SEQ ID NO: 310861 - DNA, 333 bp, Proteus mirabilis; identical to SEQ ID NO: 289919

SEQ ID NO: 310862 - DNA, 516 bp, Proteus mirabilis
atggttgatgaggttatctttgcgattactgctgataatgaattttatttaaaagggagtggttttgctgaaacactctataaagcaaacaacatggatgcatacgtctatctaaaaaaaggtatccccattacattacgttattatcgtattacgcaagcaatatggcgtaatagcgctaagctcaatcaatatatcgattttgcatatcattatagtactcaggagtttttagggcagcaaaagcagcctcgtcgtatcaaagatttacccaatttgggcatagcattagagaaaaagctgaatcaagttgggattaaccgtatcgaggaattacgtacgatcggtgcgaaggcatgttatttaaaactgattgcgcaacctaagcaaggaaatagcgacttattacttgcgttagcaggtgctattgttggctgtcatcggtctgtgttacctagtcaattaaaaatggaattgttaaattggtataaagagttatccgttaaatcctattaa

SEQ ID NO: 310863 - DNA, 405 bp, Proteus mirabilis
gtgaataaatttatctttagccagcgcagtaaaaataatcttagtggcgttaatccgctattagtgaaaattgcttatcgtgcgttagccatttctacggtggactttgcagtgattgaaggtgttcgcacacttaaaaagcaaaaagaaaatgtgaaaaaaggcgtttcaaaaacattagacagccgtcatttaacaggcgatgccattgatattttgccttctgcgattaaaccagggatggaatggcacccgcatttttttgagccggttttaatggcatttaagcaagcggcagatgaagaaggggtaacattacgttttggtaaaaactggaaaagtgatcccagtttacccgttgaaacccgctttcctgattatcctcatattgagatcccacgatga

SEQ ID NO: 310864 - DNA, 315 bp, Proteus mirabilis
atgaagaagatgccctataaagatccaaataatatgaattggtttactgccttattaattgccggtatggcggtttttggtggtattgccagttatgccaataaaatagtgaaaggggaaccgttccgctttgccatcttatttgcacaaattgttgtctctatgttttcaggggcattgattttattcggtgcaagttattaccagtggcaacctgaaattgccggcgctattgccggtatggcgggctggtctggtgctgcattggtcagtgcgttagaaaaaagattcttaaggaaggtctctggtgaataa

SEQ ID NO: 310865 - DNA, 210 bp, Proteus mirabilis
atggataaaaaaacactatcagcatttatggcatcaatatgtttaacattaggtttagggttatcaccactctcttatgccgatgatatatcgccttcaacatcaaccatgttgattgaaaaaggggatcaaaaagagagtgctgtcagtgaggtaaacgctagtgcacaaggaaagttggatattaatagtgcaacacttgatgaataa

SEQ ID NO: 310866 - DNA, 561 bp, Proteus mirabilis; identical to SEQ ID NO: 298949

SEQ ID NO: 310867 - DNA, 678 bp, Proteus mirabilis
atgaaaaagatatttgcttttattatttttttattcccacttattgcttattctaatggtgtttcattaggtgctacgcgtattatttataattctaatattaaacaaactaatcttgttgtgactaattcagataaagagaatagttttctaattcaatcatgggtatctgataatcaaggtaataaaaataatgattttattgttacccctcctttatatattcttgacgctaataaagagaatgctttaagaattatgtatacaggtgaacctttacctgcagatcgcgaaagtttattttggatgaatgtcaaagctattccttctttagatgaaaagcttgctaatgaaaatacactacaaattgccatccagagtcggataaagcttttctaccgtcctagtggattgtccgcttatactgaaaaatatgccaatgaagtgactttttcctataaaaatggggagttaattgcccataatccaacaccttatcatattactatggtcaatttagccgcagccgacagtcaacttccttcaagtattatgattaacccattttcacaattaacattaggaaaagttaatcagaatgctaataccatttcattccaaaccattaatgattatggcgcacagactcctgttttaaaaaaagaaatcgttcattaa

SEQ ID NO: 310868 - DNA, 2532 bp, Proteus mirabilis
atggttaataagaatactaataaagatatcgtttattttctctttccaagtgtcattgcattgtcattgacgctgtccttttcatcatatagcgcaaaccgatttaatcctgcatttttggctgactctcctgatgccgtcaccgatttaagttattttgaagcaggcaaccgcattaaacccggtgattatcttcttgatattgtttttaatcatgagtatctgcgtagtgaaaatattcattttattagtcaagataaccatgttattccttgtttaaatcgagatgattatcaatcactcgggatcaatattaaactatttgctgattttgagaaattctcggcaaatgaatgtattgatattgaaaaaatcattccagattctgttgttaattatgatattgagaaacaagctttaaatattcaagtccctcaagccgcgttagatctgaaagcgcgcggttatattccaccagaaaaatgggataacggtataacagcaggtattttaaattacacctttagtggcgctaatagctggggaaattctcataataatagctactatttaaatctacgtagtgggatcaatattggtgcttggcgattacgcgattattccacttggaattcgtcaaacgggaaaaaccaatggaaccatatcaatacctatctgcaacgcaatattgtgtcattaagaagccaattacaaattggtgatagttatacctcatcaacactttttgacagtgttaattttcgaggtatttcattagaaagtgacgacactatgctacctgatagccaaagaggatttgcacctgtagtcagaggtattgctaaaggcaatgctaaagtggtgatccgccaaaacggttatgtgatttatcaaacctttgtttctccgggtgcttttgaaatccgtgatctctatccaacgtcaaatagtggcgacctctatgtcaccattgaagaaaatgatggtagcaaacacagctatgttgtgccttattctgctgtacctattttacagcgagaaggccaaaaacagtttgtcatccaagccggtgaaatacgccaaaataaccaaaataaaaaacctcgctttatacaaggtcatcttatttatggcttaccctatgacaccactgtctatggtggtgcattagcaacaaaagattaccaatcttatgccctaggagcaggtaaaaatatgggtaccctaggtgccttctctaccgatatcacctttgctcatagccaattgccaaataactcaacatcagatggttattctttacgttttctttatgccaagtcgttaaaccaatttggcacaaactttcaattgctcggttatcgttactctacttcgggtttttacacattagatgagacattaaatacgcgtatgtccggttatctgtatgaagataatcaaaaaaaaccgttgagttattttaatttgcataatcgcaagaaagggagcctacaaattaatttatcacaacaactgggggattatggctctatttttatgatgaccaactggcaaaattattggggaactaatgagaaaaatgtcctagtacaaaccggctacaatggcaatattaaagggctctcttataacgtcatttatagttataacagaatgatgaatagtggtcagcgtgaccaaacattgtctgtgggtctttctatcccattacaattgctaatgccgacaagttatcaatccatcaatagcacttatctcacatataattacagccacaataataacggttactcgacacataatgcggggattgctggtacattattggaagacaatacccttaattacagtgttcaacaaggttatagcaatcaaggcggaaactataccggtagtgcggcgttgggttatcaaagtcgctatggcaatttaaatgctagctataactatcatcaagatgctcaacaaattaactatagcctcgctggaggtatgctactccatagtggcggattaaccttaagccaacccttaagcgctaatgccattttagtagatgctcgtaatactgcggatgtaccgattgataatgcgacaggggtttatactgactggcgagggtttgccgttattccctatgctaccgcttatcgacaaaatcgagtggcattagacaccaccgcattacccgataatgttgaaattgagcaaaacattaagcaggtgatcccaacacaaggcgccgtcattaaagttcagtttgatgctaaaaaagggtatcgcttattactgacgctacaacaccaaggtcgcccactcccttttggggcaatagcaactgataaacaaaatcatctgtccggtattgttggcgatgatggcttgctctacttatcgggtgtccctgattcaggaaaattagagatccgctgggggcataatgcctctcaatactgtcaagtgaactatcaattacccgcctctcaacttgatgaaccttttgtgaaaatgacacaggagtgccaataa

SEQ ID NO: 310869 - DNA, 519 bp, Proteus mirabilis
atgcacaaattaatgcttattgtagcgttgtcattactgtttaccactaagggatctgcttacgatacattggtacacattaatgccagagtaacaggaaacacatgtacggtagagacaaactcaaaacgtattaccgtaaaattaggccaaatcgccacaaaagattttatttctacgacgataacgcaacaacgtacgcctgttatcccttttagtattaaattagtcgattgccaacctgaagccagtgctgtgaaggtcagttttaatggtcgtgccgatcctattgataacgccttactcgccattgatgcaacgggtgccaagggagttgccatttccattatggataactcaggagcttccatcgatattaacgataaaagccagtcttataccttattgcctaaccaagataataccctgcaattttatgctcgctatgtagcgactcaacttcctgttcaagccggatcggcgaatgcaacagcaacctttttactggagtaccaataa

SEQ ID NO: 310870 - DNA, 1074 bp, Proteus mirabilis; identical to SEQ ID NO: 295977

SEQ ID NO: 310871 - DNA, 318 bp, Proteus mirabilis; identical to SEQ ID NO: 307023

SEQ ID NO: 310872 - DNA, 1044 bp, Proteus mirabilis; identical to SEQ ID NO: 309338

SEQ ID NO: 310873 - DNA, 780 bp, Proteus mirabilis; identical to SEQ ID NO: 309339

SEQ ID NO: 310874 - DNA, 861 bp, Proteus mirabilis; identical to SEQ ID NO: 309340

SEQ ID NO: 310875 - DNA, 1116 bp, Proteus mirabilis
atgactgagaaaacatctctgacaccactagtcgaattaaaatccttaagtaaaggtttcgacggaaaacaaatcatttcccgcctcgatctgactatcaaccatggcgagtttttaaccatactcggcccttcaggctgtggtaagacgacggtattacgtttaattgcgggcttagaagacgcggatgatggacaaattatcctagatggacaggatattacccatattccagcagaacagcgttttgtaaataccgttttccaaagttatgccctgtttccccatatgaccgtatttgaaaatgtggcttttggtctacgtatgcagaaaacacctgctgcagagatcaatagtcgcgttatggaagcgttacgtatggtgcaactggaggactttgcccaacgccgtcctgctcacctttctggtggtcaacagcaacgcgtcgcgattgcacgggcggtggtcaataagccgaaggtattgttgttagacgaatcattgtctgctctggattacaaattacgtaagcagatgcaaaatgagctaaaagccttacaacgaaaactggggatcacctttattttcgtcacccacgatcaggaagaagcactgactatgtcagataggatcgtggtaatgaaagaagggcgtattgagcaagacggcacgcctcgagaaatctatgaagagccaactaacttattcgttgctcaatttataggtgaaatcaatatctttgatgcacgtgtcctacatcgtattgatgagacacgtattagagcggatgttgaagggcacgaatgcgatatttacacgcaattacctgttactcaaaatcagcaactgaaagtgttactcagaccagaagatctgcgcgttgaagagatacacgatcttgaaaaccttccgggacttatcggttatgttcgggaacgtaactataaaggcatgacgctagattctgttgttgaaatggaaaatggcaagatggtgatggtgagtgaattctttaatgaagatgatccggatgttgatcactcgttagaccaaaagatagcggtaacttgggttgagagctgggaggtcgtgctggctgatgaagaaaacacgtaa

SEQ ID NO: 310876 - DNA, 1275 bp, Proteus mirabilis
atgaatattgaaaggaaaatactagtcaaactaaaaaatatacattcacttgatcaaaataaaaaactattacgctctggttaccataatcaatataatacatttttatctaatatttcttttgttccagtattatcatcatcacaattaccacctaaaaatcatctttctcttacatcaaatcatttaaatgattactattatttaaatttacctaatgataacacatatacattagatgaaattattaaaatattaaaacaacatcctgatatagaatatgtgcaaaaaattccaaaattacctgtacagccacctaatattacgccggatttaactcgccatcagcattatttaaaaaccccaaaaataaaatcaaatgaaataactgggttaggtattatagacgcttggaataaaaatgcttatggacaaggtatacaggtggccgatattgagtgggattttgatttatcacatcccgatttgttagctaataatatcacgccactttttcctttaactgaaaaaaccgatcaagccgaccatggtacggcagtggcggggttaattatggggaaaaaagacggtaaaggtattactgggcttgcttataaattagatatgttttatgccatatcagaattaagcagtggtcgtattgaagcaattattgccagtaaacagaaattacacgcgggtgatattgttttatatgagatgcagacagtttgtgaacatcatgcttatgttcctgctgattatgaaatgcatatctgggaggcaactcgtacattaacagaagcggggattattgtgatcatggctgccggcaatgggggggttgatctcgatttacctttttatgatagctatcgtcaacgtagcgataaccactctatacgtgtcggtgcgggctcgccttatacgctaaatcgtttacctttctcaacgcatggctcccccattcatgtgcaagcatggggagaagatgtgactactgccggatatggtgatctttttcatggtgatgggaataacaaatatacggctaattttagtggaacatcatcagcctgtgcattagtcgcgggggcggctgcagttattcaatcttggtataaagataaaaccaacactgtgttaacgccaatagagatgcgagagctactgattaaaacaggaacctatccatcattaaatgaaaagattggccctttgcctaatgtgaataatgccatcttacatttaaaaaatttaatccaatataattaa

SEQ ID NO: 310877 - DNA, 1035 bp, Proteus mirabilis
atgcacgaaaatacaccaaccgataaaacactagaaaacaagcaaacacagggcactcaagggaattacccacttaatcgcttctctgttgcacctatgctcgattggactgatcgccattgccgttatttctttcgccagcttaccaaaaatactttgctgtatactgaaatggtcacaacaggtgccattattcatggcaaaggtgattatttaaaatatagcaacgaagagcacccgatctcattacagcttggcggcagtgatccacaagcgttagcgcaatgtgcaaaattggcacaagagcgtggctatgatgaaattaatttaaatgtaggttgcccttctgatcgggtacaaaatggacgctttggtgcttgtttaatgggtgaagcacaactcgttgcagattgcgtgaaagctatgcgtgatgtggtcgatattcctgtgacggtaaaaacacgtattggcatcgacaaccaagatagctatcaatttctatgtgattttattgataccgtcagccgtgataataactgcgatacctttattattcatgctcgcaaagcttggttatcgggattaagccccaaagaaaaccgcgaagtgcctcctttagattatcctcgtgtttatcaattaaaacgtgatttctcgcatctcactatggcaattaatgggggaattaagtcactagaagaggcgcaggagcacttaaaatatatggatggtgttatggtaggtcgcgaggcttatcaaaatccatcaatattggctcatgtggatcacgtgctttttgataatcagttacctgttactaatgccgtcgctgccgtaaaagccatgtatccttatattgaaaaagagctctcacaaggcacttatttaggtcatatcacccgccatatgttgggaattttccaaggtattcccggggcaagacaatggcgtcgtcatttaagtgaaaatgcccacaaacaaggtgctgatttaaccgtgctagagaatgcgctcaagtttgtgaccgaaaaatag

SEQ ID NO: 310878 - DNA, 984 bp, Proteus mirabilis
atggctaaacgcattcagtttgcagctcatggtaatgccgatgtactcgagctaacttcatttacccccgcccctctaggcgataacgaagtacaggttgccaataaagccattggcattaattatattgatacttatgtgcgtagcggattatatccagtagagcatttcccaagtggcttaggaactgaagctgccggtgttgtgattaaaacaggcgctcatgttacttcacttaaagaaggggatagagttgtatatgcacaatctccattaggcgcctacagcgatacgcataatgtaccagaaaataaagtagcccgcctgcctgataatatctcttttgaacaagccgccgcctcttttttgaaaggattaacggtttattatctattcaatgaaacatacaaattacgtgcaggggaaacctttttattccatgcagcggctggtggcgtcgggctaattgccagccaatgggcgaaagcgattggcgctaaaatgattggtaccgcaggcagtgatgagaaagtggctaaagctaaggccgcaggtgcatggaaagtgattaactatcaaactgaatctattgttgaacgtgtccttgcgctcaccaataaccaaaaagtacccgttgtgtatgattctgttggcaaagcaacttggttggattcgttgcactgtttgcaacgccgaggcttaatggtcagttttggtaacgcttctggtgcggtaacaggggttgatttaggtattcttaataaattgggttcactttatgttactcgtccttctatttccggctacattacgacgcgcgaagagttagatgcagcaagtgaagcactatttacgttaattggtcgtggtaaaattgatgtcagtgtgccagataatcagaaatttgcattagctgatgctaaagccgcacaccgttatcttgaaagtcgtcaatctcaaggttcaagtctattgatcccatag

SEQ ID NO: 310879 - DNA, 1380 bp, Proteus mirabilis
atgtctgagataaaagatcgccaaatggaagggttgaagcttcccccccattcgctagaagccgaacaatcggtgttaggcggtctaatgatagataacgagcgttgggataatgtctccgagcgtgtcactgccgatgatttttatagccgacctcatcgcactatttttgcgcaaatgcagcgtttacttgaactgggtaaacctattgatctgataaccttatcagaagcactagaacaaaacgcagaattagaaagcgttggaggctttgcttatttagcagaactatccaaaaatacgccaagtgcagccaatattaacgcttatgccgacattgttcgtgagcgtgctgtcgttcgcgatatgatcaaagtcgccaatgaaattgctgatgctggatttgatccccaaggacgcaccagcgaagatctgctcgattttgctgaatctcgcgtctttcaaattgccgaaacccgcgccaataaagatgaagggccaaaagcaattgatgccattttagaagaaaccgttgaaaaaatagagcaactctaccaaaaacctcatgatggtgtgacgggggtatccagtggctatcaagatctggataaaaaaactgccggactgcaaaaatcagatttaattattgtcgcagcacgtccttctatgggtaaaaccaccttcgcgatgaacttatgcgaaaatgcggcaatgacggaagaaaaacctgtacttatctttagcttagagatgccaggtaaccaaatcatgatgcgtatgctcgcttcattgtctcgcgtggatcaaacccgtattcgtactgggcaacttgacgatgaagattgggcgcgtatttcaagtaccatgggtattttgcttgaaaaacgtaatatgtatattgatgattcctctggtttaacccccaccgaggtgcgctctcgtgcccgaagaatttatcgtgaacatggcggtttaagcctaatcatgattgactacttgcagttaatgagagtaccttcattatctgagaaccgaactttagaaattgctgaaatttcacgctctttgaaagcattagctaaagaattacaggttcctgttgtcgctctgtcacagttaaaccgtagtttggaacaacgtgctgataagcgcccagttaactctgacttacgtgaatcgggctctattgagcaagatgccgacttgattatgtttatctatcgtgacgaagtttatcacgaaaatagcgacctaaaaggggtggcagaaattatcattggtaaacagcgtaatggccctatcggtacggtaagactaacctttaatggtcaatggtctcgctttgataactacgcaggccctgcttacgacgacgaataa

SEQ ID NO: 310880 - DNA, 1092 bp, Proteus mirabilis
atgaaagcggcaaccgcagtaatagatcgccgcgctctgcgtcacaattttcagcatgtgagagactatgcaccacatagccacctgatagctgtcgtgaaagcaaacgcttatggtcatgggttattagaaacagcatatactttaatggatgatgctgattgttttggcgtagcacgtatcggtgaagccttaacattacgtagtggggggattgtgaaacccatcctactacttgaaggcttctttgatgctgttgatttacccattttggtggttaaccatattgagactgttgttcatagtgaagagcaactcgaagcgttagaaaatgccgatttagaagaacccgtaaaagtctggatgaagctcgatactggaatgcatcgtttaggcgtccgtcctgaagaagctgaggctttttatcaacgactttgtgcttgtaaaaatgtccaacaacccgtcaatttggtcagtcattttagtcgcgcggatgagcctgatattcctgaagtcacacaaaatcaaattcagctatttcaaacctttatccaagataaagcgggtgataaatctatcgctgcttctgcgggaattttattttggccacaagtccattatcaatgggttcgccctgggatcatcacatacggtatctcaccaacgggtgataacagaacaggtaaagattttggtttaaccccggcaatgacactaaaaacgagccttattgcggttcgtaaacataaagcaggtgaacccgttggttatggtggtacatgggtaagtgaaaaagatacttatctgggtgttattgctatcggttatggtgatggttacccacgtagtgcaccttctggtactcctgtttggatcaacggtcgaaaagtgccgattgttggacgcgtttctatggatatgatcagcgtcgatttgggatctgagctaattgatcgtgtcggtgatgaagctattttatggggagatgtgctacccgtagaagaaatagccaaatatagtggtattagcgcgtacgaattaattaccaaattaacttcgcgcgtcattatggaatacctagacgaacaatag

SEQ ID NO: 310881 - DNA, 1194 bp, Proteus mirabilis
gtgtttcaacaggttgaagcgtttgcgggagatccgattctctcattaatggatgtctataataaagatccacgtcaagataaaattaacctaagtattggtctttattatgatgaagaaggcaaaacccccattctaggcactgtgtctgtggcgcgtcagcagcttaatgcgatgacacctaccgcaacactgtatttgccaatggaaggactcgccccttatcgccacgaagtacagactctcctttttggtgctgataacccgcttattgcagacaaaaagattgctaccatacaaacattaggtggctccggagcgctaaaagtcggcgcagattttctacatcgctattttccaagctctgaagtttggatcagtgatcccacttgggacaatcatgcgtctatttttgcgggctccggttttaaagtaaattattatccttattttgatcccgaaaccaaaggggtcaaattcgatgcattaatcgattgctttaaaaaacttcctgaaaaaagcatcgtactgatgcacccatgttgccataatccaacaggatccgatctcaccaaatcacaatgggatcaggtcattgagatcctcaaagcgcgtcaagcaatccctttccttgatattgcttatcagggatttgctgaaagtttagatgatgatgcttatgcggttcgcgctatggcaaaagcggggttacctgtattagtcagtaactcattctctaaaatcttcgggatttatggggaacgggcgggtggcttatcgattgtatgtgataacgcgaaagagtgtgagcatgtattagggcaattaaaagcgggcgcacgtcgtatctattcaagtcctgctaactatggcgcacaactggttaatcaagttttatcagatcatgtattaaccgcacaatggcaaaaagaagtggctcatatgcgtgaccgcatcaaagagatgcgtgtaactttagttaatgccttaaaagaagcattacctgagaaaaactttgatcatttattaacacaacgcggtatgttcagttataccggcttttcaccagagcaagtagatagattacgtgaagagtttggtatttacctgattggtacaggtcgtgtttgtatggcgggtgtcaataacaataatgtgcagcgcattgcacaagcctttgcagccgtcagttaa

SEQ ID NO: 310882 - DNA, 1350 bp, Proteus mirabilis
atgagccagaacaataattctcatttatggtcgcagtttattcgtcaattacgtgaaggtgttaagccagcagtaggttgcactgagccgatttcattggcattagctgcggcaaaagcaaccgcattattagctgagcctgttgttggtattgaagcgtgggtttcgcctaatttaatgaaaaacggaatgggcgtaacagtaccaggaacgggaatggcgggattgcccatcgcggctgcattaggggcgacagggggcaatccggatgctggccttgaagtattacttacagcatcaccacaagctatcgctcaggctaagacattggttgctgaaggaaaagtgacggttggcgtgaaaacgccatgtagtgatgtactctactccgaagcaaaagtatatggtcagtcaggttatgccattgtcagtattgctaaagagcatacccatgttgtgctctgtgagtgtaatggcaaagttgtttttgaggatgataaaacgagtttgactcatgccggggatagcgtagaagaaaagccttttgcgacggtttgtgctgaagatatttatcgctttgcactcaatgtacctatagatcaagtcgcctttatgcttgatgcggcttatctaaatggtgctttatcagaagaaggactaaaaaatagttatgggttggcgatagggcggacgctggtttcacagcaagagaatggcttattaggtaaggatttactgagtgaaatcatgataagaacgtctgccgcttcagatgcacgtatggggggcgctgtattacctgctatgagtaactcaggctccggtaatcaaggcattgctgcaacattgccggtaatggtagttgctgaatttattcaagcagatgacgaaactttattacgggcattagttttatcgcacttaatggcgatttatgttcatagccatttcccacctctgtctgcattgtgtgcggcaaccactgcatcaatgggggcggctgcgggtatggcatggctactgactaaagatttcaccactgtaagtatgtcaatcaacagtatgattggtgatattagtggcattatctgtgatggcgcctcgaatagctgtgcaatgaaagtatcaagtagtgcggcgagtgcgtataaagccgttttaatggcgatgcaaaatcaaagtgtagcgggcactgacgggattgtcagtgatgatgttgatagttcaattgcgaatctctgcgcattagccagtcgtgcaatgcaacatacagatattcaaattattgagatcatggaagaaaaagcacgccgtaatgccggggaaaagcagcaagctgtcaatgcataa

SEQ ID NO: 310883 - DNA, 1332 bp, Proteus mirabilis; identical to SEQ ID NO: 309350

SEQ ID NO: 310884 - DNA, 2835 bp, Proteus mirabilis; identical to SEQ ID NO: 309351

SEQ ID NO: 310885 - DNA, 525 bp, Proteus mirabilis; identical to SEQ ID NO: 309352

SEQ ID NO: 310886 - DNA, 531 bp, Proteus mirabilis
atgaatgaagagaaattgctcgctcaggcagaaaagatctgccagaaacgaggtgttcgcctgacttcacaacgtctggcagtattgcgtctgatcatgcaacaacctaccgcaatcagcgcttatgatttattagatttattacgccaagtagagcctcaagctaaaccacctaccgtatatcgtggattggaatttctacttgaacaaggttttattcacaaaatagaatccaccaatagctatgtgctttgtcatcattttgatgatgctgagcatacatcggtgatgttaatttgtgatcgttgcttatcagtcacagaaaaaagtagtcataaaattgaaggggcgatcagtacgctcgctaaagataatggctttcatttacgccatagtgtgattgaaattcatgggctgtgcgctcagtgccatgaagcccaagcctgtacacatccggaaggttgtcaccatgatcatagtatggatgataatcttaagcagaaaaaaaccggtgactataagcctcgttaa

SEQ ID NO: 310887 - DNA, 612 bp, Proteus mirabilis; identical to SEQ ID NO: 294227

SEQ ID NO: 310888 - DNA, 372 bp, Proteus mirabilis; identical to SEQ ID NO: 294226

SEQ ID NO: 310889 - DNA, 2484 bp, Proteus mirabilis
atgtcagcttggcgtaaactatattataacacattgaatttaccactgaaattgttggtaaaaagtaaacgagttccgactgatcctatcactgagttaggcttagatacgtcgcgatctttcctttatgttctgccttatcactctaaagcagacttactgacattacgtcagcaatgtttatctcttggcttgccagatcctctgcaacccatagaaattaacggaaccaaactgccagcctacgtctttattgacgatggtcctagagtattccgttactactctcccgatccgcgtaaagattcagtgaaaacattccatgcttatcttgatgctcatcgtaacaatccgcatcttgatattgaaatgttacctgcttcagtgatgttcggtcgctcaccgggtcgagaaggtcataatggcgtcccccatttgcgcttattaaatgggatccaaaaatttattgccatcctctggctaggtcgagatagttttgtccgtttctcgccgaccgtatccatgcgccaaatggcgaatgaacatggaaccgataccagcattgctcgaaaacttgcgcgtgtggcacgtattcacttttcacgtcagcgtttagcagcagttggcccaaaactacctgcacgccaagatctcttcaataaactattggcatccaaagccattgaaaaagccattgaagatgaagcaaaagcgaaaaaaattacgcttgataaagcacgtaaaaatgccactgatatcatggaagagatcgccgctaatttctcttatgaagcggtacgaatgactgatcgtgtattaagctggacatggaataagctctatcaaggtatcaacgtttttaatgcagaacgtgtgcgccaacttgcgcaagatggacatgaaattgtctacgtaccttgtcaccgtagtcatatggactacttattgctttcctatgtactttatcatcaaggattggttcccccacatattgctgcgggtattaaccttaatttctggccagcaggaccgattttccgccatttaggggctttctttattcgtcgaacctttaaaggaaataaactttattcaaccatcttccgggaatatttaggtgaattattctctcgaggctactctattgaatattttgttgaaggtggacgctcccgtacaggtcgactgttagatcctaaaacagggacgctgtcaatgaccatgcaagccatgttacgtggtgagacacgccctatttccatcgttcccatttatattggctatgagcatgtcatggaagttgccacttatgccaaagagttgcgtggtgcgacaaaagagaaagaaggttttatgcagatgatcagaggattgcgtaaactacgtaaccttggtcaaggctatgtcaattttggtgaacctatttcgctatcacaataccttaatcaggcagtgcctgactggcgcgatgatattgatcccattgagccacaacgtccaagctggttaaatcctgcagttagtgcgttagcggataatattatggttaatattaataatgccgcttcgattaatgcgattaaccttgtctctacggcgttgctagcgtcccgtcagcgagcactaactaaagaacaattattagagcaaatagattgttatctacagttactgcgtaatgtgccttactcatcagatatggttgtccccgataaaagctcagagacattattagcacacgccttgcaaacagataaattccaagttgagcaggatagtcttggtgatattatcatattgcctcgtgaaagtgccgtattgatgacttattatcgcaataacaccattcacttaatggttacaccatcattaattgcgagcattgtcttgcatcacgagcgtatacaccgtgatgacttaatgaaacaggtagaattaattttccctcttatcaaagctgagttgtttattcgctatgaaaaagaggagttacctgatgtggttaatacactgattagtgagctttgtcgccagcgtctaatttgctgtgctgatgatggcatattacggatcaatccagcacgtattcgcccattacagcttttagcagcaagtgttagagaaacgctacagcgttatggtattacgctctctctactcaattttgctcctgaaattagccgtgcactattagaaagagaaagccgcattttggcgcaacgactttctgtattgcatggtattaacgcacctgagttctttgataaagcggttttctccactttagtttctacactgcgtgaagaaggttatctcaaagataatgaagatatcctcaaagcagatgcctctgcactttaccaagttattgcgaaattaatgtcaccagaaattcgtttaaccattgagagtgtaggcgttactgaagataacaattcagcacaagcgattgaggaaaaccctgaatccaacatggataagtag

SEQ ID NO: 310890 - DNA, 855 bp, Proteus mirabilis
atgacgcacaataaatggcaggcgtatagccgtttaatgcgtatagataagcctattggagcgctattattactttggccaacgtattgggcattatggatcgccgctaaaggctttcctgactggcatatcctaattgtatttactctaggtgtgttttccatgcgtgccgctgggtgtgtaataaatgactttgctgacagaaaaattgatggcaacgttgaacgaactaaaaatagaccattacctagtggtgctgtaacggagaaagagagcaagattatctttattgtcttggtgctgttttcgtttggattagtgcttacgttaaacaccatgaccatttggttatctattgccgcacttgcactcgcatggttttatccttttgtaaaacgttttagtaatttgcctcaattaattttaggtatggcctttggttggtctatccctatgggatttgctgcagtttctgaaacactacctttagtatgttggttactctttttggtcaatattatctggtctgttgtgtatgacactcaatatgccatggtcgatcgcaatgatgatttaaaaataggggtgaaatcgacagccattctgtttggtcgttacgataaaatcattattggtattttacagttagtaatgttggcattattagtggcgattggcattttgctgaatatgaaagggatctattattggtcattgttactcgtgacagccctgtttatttatcaacagaaattaattgctgaacgggaaagagccccttgttttcaagcgtttatgaataataattatgttggttttgttttatttgcaggtattttatttaattatttctaa

SEQ ID NO: 310891 - DNA, 510 bp, Proteus mirabilis
atgtttaaaaaatccataattactcacgcacctattcactggttatcagatgaagagcgtgaagaagtcgcagaaaataccttaagttggctgctggaattaggttcaatgacacgacgttttgagcaacattgccatcaagtgacggtaatgccatatcaagaaggttttattgaatatatcgagcctgctgatgaacaaaagtgtttaccttatagccgacgctattggttaagagaaatcgtcctttgtggggataatgtaccttggttattagggcgaacattagtgccggaagagacattaacgggtgaagatcgccaattagtgaatttgcgtacggtgccattaggacgttatctgttccaggaaacaaccttaagtcgtgattttattcatattgggcaacaaaatggacattggttacgtcgttcccgtttccagctttcagataaacctttattattaactgaggtgtttttgcctgcatcacctgtatataagcagtag

SEQ ID NO: 310892 - DNA, 1647 bp, Proteus mirabilis
atgaaaaatgtaaacccaactcataccttagcttggaaggcattagaagaccattttgccgtgatgaaagatacagaaatgaaaacactgttctctcaagatccatcacgctttaacaccttttcaagaacgttttcagaccaaattctagtcgatttttcaaaaaaccgtatcacccaagaaacattagataaattacaggctctggctaaagagtgtgatgttgctggtgcgataaacagcatgtttagcggtgaaaaaatcaactgtacggaagatcgtgcggtactccacaccgcattacgcaaccgtagcaatacaccggttatggtcgatggcaaagatgtgatgccagaagtcaatgctgtattgcataaaatgaaagtatttagtgagcgtgtgattagtggtgaatggaaaggttacacaggtaaagcgattactgatgtggtcaatatcggtattggtggctctgatttaggcccgtatatggtgacagaagcactgcgcccttataaaaaccacttgaccatgcattttgtttctaatgttgatggcacacatattgctgaaaccttgaagaaatgcgatccagaaacaacgctattcttgattgcttcaaaaacctttaccacacaagaaaccatgaccaatgcacactctgcaagagattggttcttatctgcggctaaagagagtgcttttgttgcgaaacactttgttgcgttatcaactaatagtgctgaagtagaaaaatttggtattgataccgcaaatatgtttgagttttgggattgggttggtggccgctactcattatggtcagcaattggtttgtccattgtattatctattggttatgacaactttgagcagttactgtctggtgctcatgctatggataatcactttagaaccactgaagctgaaaataatattccgatgatattggcgcttattggcatttggtataacaatttttttggtaccgaaactgaagcgattctgccatacgatcaatatatgcaccgttttgctgcttacttccaacaaggtaatatggaatccaatggtaaatatatcgaccgtgatggaaacaaagtcagttaccaaaccggacctattatttggggagagccggggactaatggccagcatgcgttttatcaattaattcatcaaggaaccaaactgatcccttgtgattttattgcaccagcgatcagccataatccattatctgatcatcatgcaaaactaatgtcgaacttctttgcacaaaccgaagcattagcatttggtaaaactcgtgagcaagtcgatgcagagtttgcctcagcaggaaaagatcccgcaaccatgggatatgtggcaccatttaaagtgtttgaagggaatcgtcccaccaactccattcttttaaaagagatcactccctattcattaggcgcgttaattgcgatgtatgaacataaaatctttgtacaaggtgtaattttcaatatcttcacctttgaccaatggggcgttgagttgggcaaacaattagctaatcgcatattgcctgagttaaaaggtaaggaaagtgttaacagtcatgatagttcaacaaataatttaattaatcgttacaaagcatggcgttaa

SEQ ID NO: 310893 - DNA, 11010 bp, Proteus mirabilis; identical to SEQ ID NO: 310797

SEQ ID NO: 310894 - DNA, 1761 bp, Proteus mirabilis; identical to SEQ ID NO: 310796

SEQ ID NO: 310895 - DNA, 708 bp, Proteus mirabilis
atgaaaaaattattacttagccttactatgctggcgataatatctacgccagtgttggctaaatcccctgtagctaacttaaaaatcaacggtgatattaagccaccaacttgtactattaatggagcaacacaaagtgatgtgattttcgattacggagtcataagcccaacacttatccctcaatcgaaaatttattcttatcctgccagtatggttcaaaatacagttacagttgaatgtgatgcaaaaacatatttaacctttgttgcgtctgatacttatgataatacagaattaagcgttaataatacgtcagactggtttcatttagtagataaagcaaatcctgaaactgcggttggggcagcttattttgcatgggataatgtgactgttgatggcaaacctgcgtatatttcacgagcaaacgatgctgctatcacagggactaactactataatgtcctatataaagggccaaccaatggttggacatcaaaacaacagacagaatcggttgataaaggctctctggctctaatttcaggtgaaattttccaagcaaatttcagacagggaattgaaagtaatcctactcaaacctttattttatctagagatgaattaagtaaaaaaggaatagatttatctaatggattagattttatgggtgaagctgttctcacttttaactttggtgtctaa

SEQ ID NO: 310896 - DNA, 498 bp, Proteus mirabilis
atggctaacggatcagtaaacaaagtaattcttatcggcaatttagggcgtgatcctgaaattcgctacctgccttctggtggtgctgttgccaatttagctgtggccacatcagagaaatggcgtgacaaacaaacaggtgaaaatcgcgaaaaaacagaatggcatcgtgtcgttttgtttggaaagcttgcagatatcgccagtggctatttgtgtaaaggctcccaagtttatatcgagggccaactacaaacgcgcgaatgggatgataacggtgttaaacgctatacaacagaaattgttgtaaagattggcggttcaatgcaaatgctaggtggtgctagtaaatcagcaggttcacaaccggcacagcaaaacccgccacctgctcaacctcaagcacagagtagtcagccaccaatggattttgaggatgatattcccttcgcacctattgggcttatgtatccacgccatttaattaatgtggtttaa

SEQ ID NO: 310897 - DNA, 390 bp, Proteus mirabilis
atgaagtattggaaattttacattgtcattgtgatggcggggattgttgctggtggttgcgtgctgattaatgcacaagcgaaaagaattaatacactgatagaaaataataaaaagcttactgtcacactcgaagatcagaaagctatcaatgccgactatcaagtgcgcatagagcgactaaatcaacttgatacaaggcacacacaggagcttgttaatgcaaagaatgaaattaatcagttgcgtgatattagcgagcgtaatcctgaacgggtgtacatcaaagccaacagtccaaaatccgaaggcgttaccacctccggcgtggctaatgcaaccaccgcccgacctactgacaccgctatccgaaattattggttactctga

SEQ ID NO: 310898 - DNA, 669 bp, Proteus mirabilis
atgagcaaagaattatttatatctggcgagatttttgatgcagaggattatccttttacactctttaagtggctagttcttaaaaagtttgctcagattgatacaaaaacaagcattactacctataacaagctctctcaaattggattggatgatagtgcgacactaaaagatattgggtttaacattccattaaatactctgctagttattgatgtttatgctaaccgaaatcaatcattgccaactccagagattatgaaaggtaaaagtcaatctgggttgcttatagcaattaaagggcaagacaatacaaagtgtaattttattttcatgaataacagttggtttgctcattgtgaatacaatacttatttcagcaatccggttagtgcttggaagttattgagcgcaggtaatcccatagctatgacatcatctgatgttaacggggcaatcgggaacatatcaatatcaggtgacttttattttgactcctcgcagaacgcagcgctaaccgactcccctgactctggagctatttttgtgtcagtaaaagcagtagaaacaggaaagatttttgaggtgaatagaaactcaggaaccccaaggaaatacataaggcagaataatgaaaaatggttttcaatacccattgttgaggtttag

SEQ ID NO: 310899 - DNA, 792 bp, Proteus mirabilis
atgttaatttatagaattattattttaaatatttttatgtctgccgattatggcaaaagcgctagtaatatgttagtgccaaactctataactaacataatacacattaaagataatgtatttgattacttttcatattatatttcacactacgtggatttcggtctatatattatttctttcctatctttaacactactatttctattatttaaatcaagaaataaaacaagaaacgttatattatttttattttcattttcttttgttttccttttttgtttatttgataaagtaatattgcagcctagagtttttatctggtcagggggcgccgttgtcacatcaatttatttaataaataaaaacaatagtttaggattgatatcaaaatctattactatatgtttttgtttatattctattgttatttcatcattttactcactggcttcttataatataaataaaatagaggaaagcatattagcaacttcaaatataaagtacgaaaatttaaatagaatttatgtatttggctatccagataggggatatatagcaaataaaataataagaaaatataaatttttagatgctatgcttaccccaaacttatactcttggcaagcaacgttctacgcaaaatcaaagggttatgacatatacataggaaagtataatggagatgaaattagctgcgtaaacaaaatatactctaataacaaatactcaatgcatgatattggaggaaacttaatattaaattttaaaaatattgattgccgataa

SEQ ID NO: 310900 - DNA, 207 bp, Proteus mirabilis; identical to SEQ ID NO: 14480

SEQ ID NO: 310901 - DNA, 1074 bp, Proteus mirabilis
atgaaacgtataaaaagaaatcctgaaaaatacgctccccttgaggtctattcagaactcagtcgtggacgagattataaactacatgttcaagaagattttgatgcgttcatgacaaactttggtgaactattaaaagcgtcacaaaataatgaaagtcttgttcatggcaaaagagttgaagctctctttgggaaccttgtcgctgggctcggtggctgtaaattcatcaaatctgaagatacaggagaaggcttcgctaccgatgcagacatacaaccaccagattataaattgattcttaatgatggcacatctatattcgttgaagtaaagaattgcaaccaatcgagacctcaagcttcactccttctgcataaagaaaacattgataaaattgaaagatacagtgaacttcatggtatacctgtctattatgcgatctactatcgttgtatcaaccgctgggcaatgctccccaaaagtgcatttatcgaacttaagcgtaaatatgcaacaaacttagttcattcactggcaaacaatactatgggcatgcttggtgacttgatggttggcacaaaaccaaatttaattttcgagcttatagcggataaaaacaaagacacatcaattagcgataataatcaagcaaaattcatcattggtgatgtgaaaatctactgcgatggtaatgaagttaatgacagctacgaaaaaaatatggcattttatttcatgcgctttggagattgggactgtggtgacgcagaagccattttagaagaaaatggcaaattacatagcgtaagatatacttttaaacctaacgatcccgataatgccgaactaaatggctttagcttcataggtaatctcagttctatgattacaacagcgttcaacgagctgacagtaaacgaacaacaggtaaccgccatcgatacaatattggagccacatgatttttcaataactatacctagagattacaaagggaagaacttacctttgtggcttataagccaacaacccaatactgacttcaacacgctcgataatactggtcaatag

SEQ ID NO: 310902 - DNA, 1005 bp, Proteus mirabilis; identical to SEQ ID NO: 31749

SEQ ID NO: 310903 - DNA, 3111 bp, Proteus mirabilis
gtggtatgcccatgtgaaaatgaacatcgccctgtttatccggtgcgttatgcttattctaatttgtttggcgataaagacgcaaaagcggctgttcccccttctatttcaacgttactttctgcctcgtcaatctctgacacaaagggattttcggctcgattgctgcgcacaggttggatttatgtctttgaagaaggggaatttcctacccgccctgatacaaaagggcagttactgatttttaagcatactgttcaacattacgacaatgggtatgtctattcggatgacgataactccactgaggctataaatgcaaaagaaaaaggggattcagaggaaggttttatcccttgcttacgtgactcactaacgaaatcggtacaagaacaatcttgtcaatatccgtatttaccgattaaaaaagacgtcatgaatgcattgtttttattcagtgatatccctctgtctgattatgtcttagataaaatggagacggatgcatcttatcgacaagcctttatgcaaaaaatcaatttaattgattttaatgcaaatcctcacgcgcttgagctgaatgctgaacatattgaatatttgattgaagaatataaaactgaatcagagcagttttcagcctttactgaatacacaaaatccatcggtgatccgctgccaaaagagtatttctcccatattacgggaataaatagcgccagtaaaagtaccgatactctgctaaaccaagcaacacaaaatttagattacaacgaaaaaagttgtctagtcgctctgtatgatcctgttggttatcagaaagatattttatcactttataccttcgtgactgtcacatatgcgatgtttcaatattattggcagtatccaaataaaatcggtcactatctttcggcattagaaactcagtttaataatcccgaggttgctaaaacagagcaaggaaaatcattaaaagataagtttaccaagcatattgatattcagggctggaaaacgtattggccacaaattgaagccggtaataaagagtttgaaacattgcaaggcaatatcgttcaactctatcgtgattttttaagcaacccaaccgtcaaaaatcaggtaggtggcattaaaaactatcttgaccatgcttttttaataaaagagcaatatcaaaaaacgaatttttggcaccgagcttttttcgatgaattaaaagcctacagccagctgcatgaacagttattgacccctctaaaaagttcaccatcagggcgagtcacgcttgatttactattgtcaattgataacgatgatggggatatctggaaagagtatatcactagcttactagacctattgaacgaagataagataaaagataaagcgctcagtgaatttaaaaagcatatcttaccgtcattaaattcagccgtcatgatatgttgggatgcattgggttatgcttatactcaagcacatgccaagttaaataacgccaaaaattatgttcgtcgtattagtcaagcaggcctcaattttcttacgcataaagtactccctgcttttttagggtattttggtatagctgtgagttttgacgagcttacgaccttaagcgctgaagaatttagaaaaagaatgaattcactggaagggattaagcagccactcaaaagtttctcaaagaatatgaagaagatgtttgattgggatactcgatttaaatcagcgggtctaaaacagattatcacaaccgctaaatttaaattaatggaaggctacagtgctatgtatttacctacagataagaaatccttaaacgctcacatgaaattagcactagatatttatacactactcacaagtatcattgaatttagtacagtttcacatacgaaagagtttgataaacaagacccattaaatgccgctgccgtgaatatatttcgtgttcaaatggtggcacatattttaaataccgcagaagcagtagttgaaatacgccaagcagctcgaggttatgcgacatcagtgacttttccgccgcttcagcggttattgactaaaattcagttgcctgaaatccaaaccaagttagggaaagtgggcttaaaagggcttggatataccgtggcaattttaggggtcgcattacccctcgcggaggcatcaacagagttttataatcatgattacattacaggctcagcaaaaattgcggaagcggtagggacattggctttttcagtggggctagcagcatggggtgccactgagggtgtagttgcaactaccattgcggcatttgcgtgggagttaatagttatcggtgcgatcgtctatggcgtcggtgcggcaatttacacctattttaaaacagattcgtttgaaaagttattgaagcagtgtttttggggtaatggggataagtattttgcggggggagataaaacaaatgacaatcctagagtatcaagaaatccagataaaaatttacagcttaaaaaatatattagattttttgaaagctatcatcattactacaatatagagttacaagaatttgccaatcttttctttacctcacagttacaagtcaaagcaatactaaaacccgcttttgagccaagctatggtacagcacactactctattcaatatcaatttaaattatccaattttcaatatggtatttcggaacttgagtatcaattggtagaaaagaaaatgccacatatttatccctcagagactccgattaagtatatatctaaacaaggtaatacagtggttaaatataaaggagctgaatatttagcttcacaacaaacaaaatttaataccgcatttgaaatggctttacaaaacaccattgaaatagctttacaaaagaacacaatactaggtaatgggcagcttactctaaactttgagatagaagcaggtatatttacgggggatccgataggaaagtctattccctctatttactggtattacattgtagatcgcattaaaggcgaaattgcaccactacgttaccgaaacggcaaccccgacgataaaatatatggctgtattgatgaggaaggcacggaatga

SEQ ID NO: 310904 - DNA, 621 bp, Proteus mirabilis
atggcaaatacgctccgaagcacggtagagacggccgacgatccggtcgtgggtttcgaccactgcgtcggccaacatcgcctgccattccgagacgcaaacagccaagatcgcaagccgcctgtcctccgggagatcgcgcatgccgtcggcataataccgttcaccctgcctgcgcagacgagtcacccgatgggcaggaacgccggcaagcagatcctcggggagatcgacgcgttgcagatattcgagccggtcgagcagccggttggccgacgaagagttcgagccaggctcgaactggcgcagccacacaaaacgggtcacccgatcatcagccgtctcctcgagcaatgccagcaactgttctcggatcgacataggcagccgactggcgatcctcgtctcgatgcgtcgctcggcatcgacgagagccgcggcacaaagccgctcgatcgtggatgtcgcgggaaggacagtgcgggtgcgtcggcactcggctacgaagcgacgggcgatatcctcgttcgacaccgccatctcggcttctcggaacaaccattccttcagctcgctcgcaccacgtccggagaaggtgcggaagccgtagagcccccgtaa

SEQ ID NO: 310905 - DNA, 1005 bp, Proteus mirabilis
atgagtctagatattaaccagttagttttgcaccaacttattaagcgtgatgagcagacattagaagtggtactacgtgattcactcttagacattgagccggttgttcaagagatggtcgaagagttacatcgtgtttatagtgcaaaaagtaaagcctatggtttatttaatgaagagagcgaattagctcaagcattacgtttacaacgtcaaggtgaagaagaatttttaggtttttctcgtgcagcgacggttagacttaaagatgagttagcgaaatacccttttgctgaagggggaacggttcttttttgtcattatcgttatcttgcggtggaatatttattaatcgctgtattgaatagctgtaatagcatgtgggtcaatgacagtcttgatgtatcttcaacacgctatttagatattcctcatgcagatattatcgctcgtattgatttaactgaatgggaaacttcacccgattctttacgttatttaaccttcttaaaagggcgtgtaggacgcaaagtttcagatttctttatggactttttaggggcgcaagaaggtttaaatactaaagtacaaaataaaggcttattacaagcggttgatgacttttgtgaagcatcagacatgaataaacaagagcgccaaacttgtcgtgaacaagtctacagctattgtaatgagcaattgcaatcgggtgaagagattgcattaactgaacttgcacaagagttaccgccattaggtgatcaaaactttgcacagtttacagaagaaaaagggtatgaattagcggaaacttttcccgcagatcgcagtacattacgccaattaatgaagtattcaggaagtggtggggggttaatggttaattttgatgcgaaactgttgggggaaagaattttttgggatcctgctaccgatacactgacgataaaaggaactccacctaatttacgtgaccagttacagcgtagagtctcagaaaaatag

SEQ ID NO: 310906 - DNA, 834 bp, Proteus mirabilis
gtggaaactaaatttttatcagacggacgcaaggttgctgtcctaggaaagttaaatgctacggaaagcatagtacaagaaattttcattactgattcaggggtagagataccaagcggtgagaacttcacaacgaaaaaccttcatgatgaaccagtaaaaagccacaaagaaagagagcttgaaagggttgaacaaggaataaataaagctaaacaggagcgagataaaataaatcaagaaattgacgaaattaaaataaaactttctggatatcgtgatttatttaaaagtgtatctgttttagctaaaaacattgaagaacaggatttcactcacttcctagatgtgattactggaaaggttaaatatgcagttccaagtaattacccatcaccaagtagaattgaagatgcaatggaatacatgagttgcatagataatcactacggaaataaaaaatataatgggcttaagctaataactctcctcggtaactctaatgggaatatcggttacaaattaaatcgatggcctgatggcagtggagatgatacatcggtcgaattcttcaatgatattgagtcagcaagagattatatcaaatcatgcttcatggaaagattcgataaaattaaagtcagcctaagtttttatgaaagtctccgaaaaaatgggattgaatttagttcggaagaatttaagaaaataaaagaaaaaatagagtctggattgcatgatgaattttctagctttcaaactgcgtttgagaaaaggaaggaagtgctcgaccaagatatctcaaaactaaataatttatccagccaaccctag

SEQ ID NO: 310907 - DNA, 198 bp, Proteus mirabilis; identical to SEQ ID NO: 310806

SEQ ID NO: 310908 - DNA, 1014 bp, Proteus mirabilis; identical to SEQ ID NO: 300109

SEQ ID NO: 310909 - DNA, 705 bp, Proteus mirabilis; identical to SEQ ID NO: 61560

SEQ ID NO: 310910 - DNA, 855 bp, Proteus mirabilis
atgaaccatttgatgggtaaaagactttttttattaggtacaatcttctttttttctgctgacgtctttgcagcttgtattcagaatcctaatttaaaaaatattcaggctcggatccccaataaaacctattcaattcaatatgatgatatagggacaagagtattagatgagtttcagattaattatgccaatgggcctataacaactttttcaggtaacgatgggcggtgtgggaacgcatcaatcactgccaattatactaatggctggttgcctaatgcgaataaaatagcacagaccaatattgcgggtattgggatacaggttaaatttgctggaataggtgcattaaatacaacgtatttgaccccaaaggacccaagtggcaatacttggaacttaacttcactttatttgcctcttaatgcaataaagataaattcattaaaatgtactgcaaaatcatcaaattataatattaatatggggacttggtatgatactcaatttaaaaatattggtgatgtcagtaaaagtgtagatgttcctattacattaaactgtgcggctggcactaacattaaagcgacagtgacaagtagtgctggatatatagatgcaaatacagggaaattaaacctatcgggcactaatcgagccactggtgttgccattcagttattagataaaaacaataacccgataaaactaaatacaaaaaatagtctacaaaatggggtctcctccggtgattatatatttggttggaaagcaagatatataaaaacaggtaataaaataacgcctggtagtgctaactcaacagcaacagtaaatatcttatatgagtga

SEQ ID NO: 310911 - DNA, 273 bp, Proteus mirabilis
ttgagatgtgagaataaattaggaaccttaacggcgttaatttcagttagtcaagtcatggataacttatatcctgaaaaaaaaattgattgggaattagtacctgaaaactatttaattgctcttttttcacaatctttattaacattattatttcctttttctaaagagccaatgtcatcatgtgttgataatatctgtttaggtgctgaaaaaggatcttgctatccttgtgttgataccacattaggtcatgtttttatttgcgattaa

SEQ ID NO: 310912 - DNA, 1716 bp, Proteus mirabilis
atggcgcaacaagcaattaaaagagcaataacatattcggtcgtaataggtacacttctctcagggcataatgttattgcctcagaaagtgaaacgccactgctattcacatcagaaacacctgcattagtacccgcattcacagaagacgtggcaacacaagatacattaaattcaccatcagtgagtaagcaggaagttagcactaaactacaatcttggttaccaagcgaatataaaccactttactttaagcaactcgtggatgtttatcaaagcaatgatttagcactgatttggcaagatgaacaaattacaaaacaactagagcagcaactggcagaggttgccttaactggaattcaaccacaatttggacgttggttaacgctattagaaacagcacaattaacgccagaagcacgagatattattttatctgacgcttttttaggttatatcagctttgttgaacagattaatcaatcaggaacaacactgttatatcgcgctgcgatacaagcattaccggcaccaactgtgcaaactgtcgagcatttccaactcaatctacaacaaaataccttagggcgctttgtcgtctcctttgcaccctcacacccttactatccattaatgaaagaggaagtgcgcaaacagcttcatcaagaggttatttggcccgtcatggaagggaaaaattcattaaagccaaaccaatcggcagaagaagttattgcattaagacaaatattgcgtaacttaaatttactgcctcaattggctgaaaatgagcaagaagtagcaacaacgatttatgatgagcctttaattgctgctgtaaaatcgtttcaagcggcccatggattagaaactgacggtattattggtagacagacgcgtaattggttaaatatgacaccaatacagcgtgctggaattatggcattaaatatacagcggttacgcttaaccccacctattggtgacactggaatttgggtcaatattcctgattactccctctatttttatgctaataatcaactgattttagattcaaaagtgattgttggtcgaccagatagaaaaacccccattatgagtagtgcgcttaataatgttgtggttaatccgccttggaatgtacctactagtatgacgcgtaaagatatagttccaaaaggaaaggctgatcctagttattttagccgtaaaggttatacgatttattcagggtgggggaatgacgcttatccaattaatccttacgatatagattgggaaaacatctctgcggctaattttccatatcgcatttggcaagcccctgggccaactaactccctaggtcgatataaatttaatatgccaaactctgaagcaatttatctgcatgacacaccaaaccacaatttatttactaaaaatatgcgagcaattagttcaggttgtattcgtgtgaataaagcggcgcaattagcgacgatattattaggtgatgcaggatggaaacaagatagaattgatgcagccttaaaacgaggttcaacacaatatgcaccaattccagaacgtatccctgtctatttatattatcaaacagcttgggtagcagaagaaaatgcccctcaatatcgagcagatatttataattatgaccaaagcattaataatgcaacctcttttttagagaatattaagaaatatttgtaa

SEQ ID NO: 310913 - DNA, 1464 bp, Proteus mirabilis; identical to SEQ ID NO: 310812

SEQ ID NO: 310914 - DNA, 486 bp, Proteus mirabilis; identical to SEQ ID NO: 298414

SEQ ID NO: 310915 - DNA, 417 bp, Proteus mirabilis
atgaaaaatgaaactaatattcgccgtggcagacattgtgtgttcctgatgcacatccatttggtctttgtcacaaaataccggcgaaaaatatttgatcaggatgcaattgaaaaattgcgaggctactttgccagtgtttgtgctgattttgatgttgaactggttgaaatggatggggaacgggatcacgttcatttactgattaattacccgccaaaactggcgatatctaatctggttaacagccttaaaggggtatcgagtcgattacttcgacgtgatcgtcctgatattgcccaacgtgattactacaagggggttctttggtcgccaagttatttcgcggggagttgtggtggcgcaccaatatccattatccgccagtacattgagcaacaggaaacaccgagttag

SEQ ID NO: 310916 - DNA, 270 bp, Proteus mirabilis
atgcgcatggacaaattaaccaatgctacctacggaacggctggcttaactgccttttttgcaagtctctcattgtatgaatggggctttgtaatagggatgggatttagcatgcttcttggattagcaacttatctgatgacacggagagaacagcgaaaacgaacagcattatttgctgaattggttcatcgaaattgttctagtgatccgcgagaaatcgaaaaaatagtcggtgagatgctgactaaagctaaaaaggacatctaa

SEQ ID NO: 310917 - DNA, 468 bp, Proteus mirabilis
atgtcgcatcggtttttaagcaaagaagatggatcttggatatatgttctgatgagtggaacagatatcaataggttcaaagtcggtaaaacaatacaacatcctgtcaagcgtatgaaagacattcgaaccggagatccaacgctagcgctgcaagtggcttattttgtaccggcgttactaggtattaaattgggggaattagaaagtgccatccatcagcaacttgcagcaactgtaggaaggatatctttttttgatgaagctttgtctgagtggtttcatggagatgcgcgaaacgcctggtctgagctggatatgatatttgaagaattcgggttcacagttacagactactatcaacccggtcaaaataaaattgtacgattctgggggtccgatatggaaacagagtatccactcagatttaacttatacaattgtgataatggcgaaattgatttttaa

SEQ ID NO: 310918 - DNA, 222 bp, Proteus mirabilis
atgtgtgatgaacaattaaaaatgacaatgagcaccttaatgcgacaagttactcagcaaggcaagcaaattgctgagttacaaaaacagctcgctagcatgcaattaacgagctgtgaattagagactattaataatgccacattaatggctatttctaataatctcattgaaataaaaaaagttaatggctttactatttgccggatatcgccattttag

SEQ ID NO: 310919 - DNA, 237 bp, Proteus mirabilis
atgcaatacgagtttgaaaaatacacaggtatcacacttattcctgaaaacatggcctatgccacccctgcattgttcgctattcttgctgcattgatcactggagatgacgaagaaaagcaaaacaaactttatgagctaattgataaaacgataaaaatgaacgaggggaatccctgcgaaactcaaatagccattgcagggcaatttgctaaaatggcgatatccggcaaatag

SEQ ID NO: 310920 - DNA, 1968 bp, Proteus mirabilis
  misc_feature (1938)..(1947): n is a, c, g, or t
atggataattttttattagaaaaactacgtaagaataaatttatttcttatctattaattatggtacagtttttatttcctactgtattgtcattaacaccaacagtacatgcctatgcctccgcaacagaaaataaaaacacaaatagtgaacgctggttagctcaacaagcaagtcaagcaggggcaatattatcaagtgagaatagtaaagattccgcttcacagtatttttttaatcaggctaataataaaataaatcaagaagttgaaaattggttaagtcaatatggtaaagctcaaataaatctaggtgtagataaaaatttcactctaaaaaatacagaagcaaagataattattccgttatatgagaataataattatcttctttttaaccaaacagcattccatcgcagttatgatagaaaccaaggtaatataggatttggtattcgtaaatttgacgatacccaactatatggttttaatacccattttgatcacgattttactggtaataatagccgtatcggtattggccttgaatatcgtcgcgactatttttcagtgagttcaaattattataataggctaacgggctggaaggactctagcatcaaaaaaggatatgacgaacgccctgcaaacggttgggatattagaactcaaagttatcttcctgcataccctcaattgggtttaaaagctaattttgagcagtactatggtgataatgttgatttattcaataatacatctaatttaacaaaagatccttttgcatttactgcaggactaaattacaccccatttcctcttatcacctttaatgccgaacataaattaggtaaaggtggtgataatgatactcaacttagtctctccttaaactatcaatttggtacaccaattaaaacgcaattagatcctagtaatattaagccattgcgtctacttgaaaatagcaaatatgattttgttgatagaaataataacattgtttttgattataaagagcaaacttacctttctctcaaaacccctgatttaatcgaaggatatagtaatgagcaaaaagtcattaccattagtgtagaatcaagtgcagggcttgattatattgatgttaatggcgctgattttattcaaaatggcggtaaaattattaaacaagcgccaaatagctatttactctatttgccttactataaccaacaaaaaggggctacaaatacctataatattgtcgctattgcatacgataaaaaaggccgctcatcatcgccagaaacaacaaagattgttgtattaaaagataataacgctgaaaatgcgactatttctgccacaccacaaaaaataggtattgatgaatcatcaatcattactttaagctttacaaatcatgaaggtgaattggttgaaataaatgatgcccgtatcgttcttgataatggtgttaacggagtattatctgatacacaatacaatgccaaaaataaaacttaccaggctaagtttattggcgtaataccagaaacagctcgtttttatgctttctataatcaagtaattcatcaagatatatcaacaacggttagcgtagaaaaaaatacttctcgttatcagcaagtcacattaaaagcagataaaaatgccattacactaggcaattcaacactattacgccttactttctttgataaaaataagcaaccaatcgaggtagataatgcacaaattttattaacaaatagtgagcaaggtgatatttcaaacacaacctatgatcctaccacgaaacaatatacggctacatttgtaagcaaaaatgtcggggatgcgattttccaaccgtcattaaataatgaagttatttctgatgttaaagaaatagtgaacgtttctaccttcaaaaatattaatttaactacnnnnnnnnnncagttaatgaaatgtatgtag

SEQ ID NO: 310921 - DNA, 3912 bp, Proteus mirabilis
atgtatgtaggggattcatctaaagttgtcatgaccatcttggatgataataatcagccaatggaagtcgataatgcaaaaattcagatgattagagtcaataatcaaacaggtaacggcgttatctctgaaacaatctataatgctgcagataaaaactattcggctcaatttcaggcaacagaaacaggtaaagtgactttctacccttatgtcgcgaataccccttaccctgatagtaaagctgagacatccattctttctcattcagagaaatataaaattgtttccttaacggctgaaccagaacaaattatccaaaatcaaacttcagtgatcacggcagtagtgcaagataatcaaggtcaacccgttactgataaaaccgtcgaaattgttttaatcacaaatagcggaaccttgactaaaacgacgaaagtatcaggaaaagcgggggtttaccaagccacttataccggaactgaaccaacaacggcaacttttaccgtcaatgtcgatgatatacaaaataatgatactaaagtaaatgtaattgtttggggaagaaatgatgtcaatgcaacacttgttgccaataacccgtcattggatctaacacaggtagagcataactcgttattaacacttacactaacagataaaaataataatccattacctacggataacgcggttattttacaagaacaacccaattacgggatcctagatgcgactaaaaaaattagtgcaacccaatatacagccaattttaatgcaactaaggtaggtacggctaaattctttgttgaattagaaggatttcgtttaaaaacaacagcagaaattaacgttattgatagtaaacctacaattgatttgaataatgccaccattgcgtccaatcctagccatatttatagcacagaagaaaagcaaaatggccatacacgtagtaatgacaataacaattggcgtacatccactattactttagatataaaagatcaatatgggaatttattctcccctgatgtccctatcgatatcgtgattaaaaatacccaaaatggacgtgtaagcgaagccaaagaagtcaaacctggagaatatcaagttgtttatacgccgactgagcaaaatataccttttaccgcgactttctatgcggtaataaacaatgtacaacaaaatcaaatttcaaccaccgttgatgttgaaccgttaatacataatgtaaaaatgggcgcaagtttaattccaatcccttcacatattactgtgggtaatgcatcaatattaaatgtgatcttctatcaagacaataaaccttacattccttccggcaccgttgaaattagactcgctgatgattcaaaagcgttaggccatatggaggcaacaacgaaaagtggccatatctttcaggctaaattcatcggtgaaaatgtaggtaaagctaactttgaaatatttgttgataagcagcagtatactgaaggtaatatcaacgcaaccgttaatgtaacagaatcttatcgaggaaaattgaatgcggagccgagttctattccggtaaaacaaacttctgtattaactttacaaattcaaaatcatcttggtcaatcaataaaagtcagtgatgatgatgtacaaatcattatgttgcaaggtgatggtaataccgcagaaggtactattagtgaaacaacttatgatgccaatacaaaatcatatcaagcgactttcactggcactaaacaaggcaaagctcagtttatctcgatcattgatggacaaacttataataatacctcaactactgtcactgtaaagcctgcctataattcagccaatatgggaagagaaacttctccgatcacattgaataaaacctctgatgtttatttaaccctactcgatgcgagtggtcagcccattcaagttgataatgcaaaaatcatgttaaatacaccgaatttaggctctttaactgtgacaacatgggacaataccaataaacgctatgtggctacctttacaggctcagcgataggtaatgcagagtttagtgcttatgtcgataatcaaaaaatagcagatgttactacttctattcaggttaatgatagccctgatgcattttataatccgagtctagtaccatctccaagtgttattacagtaaataataaatctgaaattaggttaactattcaagatattaacggcctgcctattaaaggaaatagcgccaatattatcttagaaacaccaacattaggttcattatctgaaacagtatgggatgaaagtataaatgcatataaagcaacctttactggtaatcaggtaggtaaagcaaacttctcagctattattaatggcaaggtggggcaagcaaagacatccgttcaagttaatgaagtctataattcagcgacgttacaacctgatcctagcactatactatcaggggatacctctgagctaaccttaactttatttgataaatcaggtgaacaagtgaggatcacaaatgacaatgtcagtattaacattcttacaccaaagcttggttcactcaataaaacaacatttgacgccaagacaaaaacatataaagcaaaatttaatagcgctgggttaggtactgcacaatttaacgtttcgataaatggtattgttcgttctgatattaccgcgagtattatcatcaaaaaagcgtatgaaagtgcatcattaactgcaatgccttcatccatctatacaggtaaaacatcggaattaacactgacatttaaagatgccaacaataaacctattgaagttaatggtgccaaaattatcttacgagatggtgaagcaggacaattaacggatacaacttataacgaggccaaaaaggtatatacagcgacatttactggtacgctagcaaccaatgctaattttaatgcatcaattaacaataatattgatacatcaatcaaaactacggtaacagttaaggagctatccttagatagtttcaactatcaactgatcagtaaacctaactctatctatattaatgatgaatcaacattagaattgaaaataacagatgctaatggcgctgtagttcaattggatgatgtcagtattgctcaatcatcaaataaccaatacggcactctcagtaaaacgacctataacagcaaaacaggcacttataccgcaacttttaccggtaaaaatgtgggaacagaaaccttctatgtggttattcaacaaaccgtgttaagcgaggtgaaaacaactgttacagtggataaagtcataccgatcaccgatattgcttatattgattcgaataattactcatttgaattaaatgaaggattccctacaacaggttaccaattctcaagtttcagttttgtgatgaaaaatggaaccaaagcatcggattatacatggaaagcaaatcaatcatgggtcactctgactcaaaatagtaacaaaatgaatgtcatgttctccaaagcaccaaacagtgaaaataaaacggtaactattacagcacaacctcgtgtagaaggtgtaggaaccgcattctcctatacatttacactaaaacgttggtttacattctatggtggacaaccgttacctgctccgagagcatggaaaatatgtacagataatggattagataccacaccttcatccttacttacctcaggtacaaataaacgaggtataggaactgttttctcagaatggggtaaaggaggttcagttttccacgcatggtcttccgatatcaacgatcaacaacaggttggtttagtgaatctttatgatgggtcagttaaataccttaactcatattttcaatatgaccctgtatgtaaaacagacttgtaa

SEQ ID NO: 310922 - DNA, 243 bp, Proteus mirabilis
atgtataactggggggctgatcctcaagagggtgaattaacattatcgacagagagtggtgaattagtaacaacaaagttaccgactctatcaggtaattatcccgcttattatcagcaaatttatcgtgcgattgcatttggtgaagagagtcctgttactgtgtcacaagccattaatgttatgcgtttaattgaagccgggagcctttcaaatcaatcaaaaaccacaattaagctgtaa

SEQ ID NO: 310923 - DNA, 705 bp, Proteus mirabilis
atgccgcattcaacccccctcattaccaccattgttggtggattagcacttgcttacatcttaggcatgattgctcaacggctaaaaatctcacctttagtaggatatcttgctgcgggtgtgctcgctggcccatttacccccggcttcgttgctgatacctctttggcgcctgagcttgctgaaatcggtgttatcttactgatgtttggcgtaggtttacatttttctttaaaagatctaatggctgtaaaagctatcgcgatccccggtgccatagcacaaattaccgttgctaccttattagggttagggttatccactttctttggctggggtctatttagtggcattgtctttggattatgcctttcaacggcaagtactgtggtattgctacgcgcactcgaagaaagaggtttaattgatagccagcgcggtcaaatcgctattggttggttaattgtcgaagatctcgctatggtattagccttagtactactaccagctattgccaatatgcttgaaagtagtgaccaaacaagtatttcacagttattaattaacttaggtatcactattggtaaagtagttgcctttattttaattatgatgattgtcggtcgtaagcttattccgtggatcttagctaaaacggctgccactggctctcgtgagctttttaccctatcctatgtgtgttag

SEQ ID NO: 310924 - DNA, 528 bp, Proteus mirabilis
atgataaagtcattaaataaagatgattttaattatcatcgattgatacaacatggaaataattctttgaaaatattcatatttagctttctctctctgattatcttacccatttctgtttcccaagcgataacaccgacacaaaataaacagctggtggcttatgcaacggatctacctagagccgttatttatgatccagcctaccgtaaaattaattatcctaatggtgatgtgcctgctcattatggggtgtgtagtgatgtgattattcgtagttaccgaggaattggcattgatttacaaaaattgttacatgaagatatcaaagccaattttgcactttaccctagtaagcgtatctggggacttagtcgacctgatactaatattgatcaccgcagagtacccaatttggaagtttttttctcgcgtaagggaaaggtgaaacctattagcaaagaggcgtcagactacttgcctggtgatattgttataatgggcgtcctcatattggtctcgtcatag

SEQ ID NO: 310925 - DNA, 1026 bp, Proteus mirabilis
atgaaattattattaacaccctatattcagcctgatcttggtgtcgttttattgaagcctgaagcggagttgcttgagcaactaaaacaacattctcgtgtgattattagtgatgtaccaaagagtttagataaatggccttctggtgcattaacagggaacgaacagccattattgaataacaagggcattgttgattttttgaataatgaaaaagtgatccaatctatgggagggttggcatcgatgaatatgtggataggcaggaatatccattgctgccagattaacgataagcatgacagttatcatcatcatgaattaacaaccacatggcataaagacggtgtgatacgaacctgttggtatcatgataatcatattcgtaattcatcggcggggtgggttgctgaattagcgtataaaaatcgtattgattggatgatagacactattcgcagtcgtttgagattagatgatagccattcgctgacgatacctgatttttttgcttttgctgtgatgcataaactggttgataaattacctgatgccatattgcgccgtattctaaattggtctgataaacctaaagaacgcagggtgcatggcggttttcctgaagctgatattgttccaaatgaagtgacagcactatcagcaatgaatgcgcgtttagatgctataaaacccgttattaatgtagctgtcgatcctgaacctccagcctcatttcttcttaaacctaaaatgcgccgttgggagaatacccaatggcttcaatgggtaaaaacacagccttgttgtgtttgcggacaacaagctgatgatccacatcatatcatcggccatggtatgggaggcatgggaacgaaagcccatgacttattcactattccattatgtcgcattcatcatgacgagttacatcgtgatcccaaattgtgggaagccacttatggcaatcaaatcgaattgttattttcttttttaaaccgttcattaggaatgggagcattggtttaa

SEQ ID NO: 310926 - DNA, 807 bp, Proteus mirabilis
atgaatggactaattgttattgatggtgttcaaattcgtcgagataccgcagggcgttattgtttaaatgaccttcatcgagtctcaggtggtgaaaaacggcatcaaccgtcgaattggagtgctttgactcaaactaaagagttggttgatgaaatttcaaccgctcctgagatcacaggagcggttcccattgtgaccattgttggtgggcttaaccaaggaacatatgtttgcaaagaattagtgtatgcctatgcaatgtggataagcccatcatttcatttaaaagtgatccgtacttttgatgcattgataacacagcaacacggcgaaaagttagccgataaagttcaagctggagtcatattgcttgaatcgatggcaaagagcctgaatttctcaaactcttcgaaattaggggcgtatcaaaaattacaagctatggcaggcttaccagaattagcccctgtgtatgcgattgatgcaccaagcggatcaatggatggttcaagtcgtccaacagtagctttatcaacactgattagaaaacatcaattacctatttcagcccaacaagcttataaacgattagccgatctcggcattgttgaacgtttatctcgtccaagtacgaaaaccgcaaacaaagtgaaagagttctggtctgtgactgcacggggttgtcagtttgggaagaacatgaccagccctaataatcctcgtgaaacccaaccccatttttttgaaagtaaaacggatgaattgatccgtatggtgatgctgaataagcgggtgagtgcatga

SEQ ID NO: 310927 - DNA, 1065 bp, Proteus mirabilis
atgagtgttaaattatctagttatgtttgggatggttgcgcccatgcaggtttaaaactcacatcagtcgctatcatggcaagattagctgatttttctaatgatgaaggtatttgttggccttctgttgtgacgattgctcgtcaaattggtgcgggtgaaagcacggtgcgcacggcaataaaacagttagaaaaagaagggtggttaaccagcgaaaagcgcagaaaaggcaatcgtaacgcaagcaatatttatcagctgaatgtagagaaactataccaatcagcaaagaaagcgctttctcaaccaacaaaatctgacgtgtcaaaacctgatgcatcaggagttgacccatcaaaatttgttgcatcaaattctgttccttcagaatcgagcaaaaatagggattttgaaccgccagctcctgagggcgatccatcagtaacttcaaaatatgatccattaataaattattcttcgtcgcagaattctggcgaatccagcgaccagcccaaaaatgattttttaactcgttatcctgaagctgtgatttacagcgccaactttcaaaaatggggctccgctgacgatttgaagtgcgctaaatggttattcagccgtaaatgcgaagtgtttcaagagatgggattaaaaacgcctaaaaagcccaatttcattgattgggctaatgatattcgcttaatgacaacgattgatgggcatactcacaaagaaatttgccaattctataaacgaattacgcaagatgatttttggaaaaagaatgttcagtgtcctcgtacactcagggctcaatgggatgatttaaccttacgtttggcgggtaagaaaaaaatcacaatcgactccgtagagcgtgatgaaacattccgactcatctggggtacgggttggaaacctaaaaataaaatccaagaattagccgctattcaggctaagaaaaatggtctaggccgaatgaatgaggttgcaggtttagctgcgtggcgaggtatttggcaacaagtcgcagaacaagttgctcaggaagttttgctataa

SEQ ID NO: 310928 - DNA, 180 bp, Proteus mirabilis
atgcgaaatgaagatcccaatcgtcttgatcgctattacagaaaccctcgagggctccttgttcatgtcattcgttatgatcgagaaaaacagcgcgttatttttatgattgatggttgtgaatacgaacaatgcgagccggttcaaagatttaaagagagatatacccgagttaagtga

SEQ ID NO: 310929 - DNA, 477 bp, Proteus mirabilis
atgagtaatcaatcaataaaacaggtagtgaaagaaatgtgcaaagcactgccgggtggacgttctgctatggcaggggctttaggtatgtcactcgagacgtttaataacaagttatacgaaaaaaatggctgtcgtttctttgatattgatgaacaagaagccatggaagacatttcaggcactaagttgctggtggaatatcatctagatcgccatggcatgagtgcattaccaaaaatagaagcggaaaagatagatcaagtagagctatttgatatgcgaatgacattggctgctatgcaaggatcactcgccgttttaattcaagaaagccttgttgatggtgttttaacggatgaagaaatagggcgtatttatcgaaaagcagggaaagtttttgcgtatgcaattgggttcttggattcactgaaagtgttgtacggtgaaaaacaggaagcgactaagaaagggtga

SEQ ID NO: 310930 - DNA, 228 bp, Proteus mirabilis
atgcaaacaccattaaggaaagttcgggtagaactaaatctaacaatttcagaagtagctaatgccattaattgtgatgttggaaacctttcacgattagaaagaggtattcaaacagcttctttggaactggctgaaaaattagcagctttttatcgtgggaaaataactgagttagagatcttatacccacatcgttaccaacaacaaaataacaaaatcttttaa

SEQ ID NO: 310931 - DNA, 657 bp, Proteus mirabilis
atgaaaataggaacaaaaattagagagttgagaaagaaaaaaggattaacaatccttcaattagccactgctattaatagtgatgtgggcaatatttctcgccttgaaagaaatatacaaggctatacagaaaacactttagtaaaaatagcagaagcacttggcgtatctgttgctgatttatttactgaaaatgcacctgagccagataaaatagaacttattggtaggataccttctggtttggttcaagttagaggtgaagcattcttaggtgttgatggcgctgttgatatgattgaagatcacaacggctggctaaaaatatacagtgacgatgctgatgcgtacggtctaaaagttaaaggtgatagtatgtggccacgcattcaatctggtgagtttgttgtagttgaacccaacaccaatgtcagagctggtgatgaagtatttgttcgtacggttgaaggccataacatgattaaaatcttcaacaaaacgagagatggtgactatcagttttctagtatcaataactcacataaacctatcactctatcgccagatcaagttgatactatgcactatgtatcagccattgttaaaccaattaagtatatagacgtctgcgaaaaaactggtcgagcgttgctttaa

SEQ ID NO: 310932 - DNA, 882 bp, Proteus mirabilis; identical to SEQ ID NO: 302590

SEQ ID NO: 310933 - DNA, 450 bp, Proteus mirabilis; identical to SEQ ID NO: 302589

SEQ ID NO: 310934 - DNA, 525 bp, Proteus mirabilis; identical to SEQ ID NO: 302588

SEQ ID NO: 310935 - DNA, 252 bp, Proteus mirabilis
atgtcaagaatggtgactcttgaagcgtgggcaaggttggaatttggagatgcctctccttgcatgacggtattacaaaaatacgcaaagaataaccttattgcaccacctgcaatgaaagtgggccgcaagtggatggttgatagagaagctcgttatgtgggctatctgtctctccctcaaattcctactaaatcaacggaacgacttaagaggataattacagatggctgcccgaccacgaacccataa

SEQ ID NO: 310936 - DNA, 2634 bp, Proteus mirabilis; identical to SEQ ID NO: 305442

SEQ ID NO: 310937 - DNA, 2439 bp, Proteus mirabilis; identical to SEQ ID NO: 302968

SEQ ID NO: 310938 - DNA, 174 bp, Proteus mirabilis
atgagtaagcagatggttttagttgcaaggacaaacaaggttggctctgactctgaatgtgggctgggaattactgaggacgaatgggataaattaaccgaagaagaacaatcaggatatgtcaatactgcaattgataatcttgttgattggtatgtgaagacagaagattaa

SEQ ID NO: 310939 - DNA, 273 bp, Proteus mirabilis
atggaggaatggacaagccagagcggtgagaaaaaatcagcgccggtaattatcgttgatcaattagattttggcggtaacagtggtaatcaggcaggaagcaagaagtcgcagcagaatcaaggatggggacagccacagcaaccgcaagcaccaaaacaagcatcgagtaatcaagcaccacaaagtgaacctcctcaagattgggatgacgatattccctttgcccctatcggactcccctacccacgtcacgctatttatgtgatttaa

SEQ ID NO: 310940 - DNA, 1509 bp, Proteus mirabilis
atggcacaatatggcacgggcagcgacttccaaaaagccgcccaagcggttacagggttgctgcaagggctggcaggtgataatttagcaggcgcactggcaaatgcatcttctccgtacttagcgaccaagattaaagagctgacaactgacccaactactggtgaggttaacaaagcaaccaatgccatggcgcacgcagtattgggtgctgtagtcgctgagctaaataaccaatctgccgctgcgggtggattaggtgctggtagcggtgaactgtccgctcatgttatcttaaacaccctcttcccgggcaagaaggtttcagacttaaccgagagtgagaagcaacaagtcagtgcactaagccaattggcagcaggtcttgcaggtggactgactaccggtgatatggccggtgcaattactggctcgcaagctgggaaaaatgcggttgagaataactatcttagcgactcagagcaccgccagaagacgtcactggagctaaaagagaagcaaggtaagatcactgaagtcgagcaacagaaactcgctgagctgcgaattaaagatacagaaacaacacaaagattacttgatgcctgtgcaggcggtgtttcacctgaatgtaccgctgctagaaaagatgcattcaaaacgatagatacctacgtcagtttgacgtatcaaaatccaaaaacagcgcaggctggttatcaagaaattgaaaggctattgaattcgacttcaccggaagcacagcaagcatataatctattggaatcttatactaaagcgtttaaaaactttgggtatacagatgaagaagctcgctcacgtgcgggaatgtatgttggttcgatttatttgcttggtggtacgtctgcagttgcaaactcaggcgcattagtaaaacagtttggaaaagatgttgctaagccaaatgttaaaccaaatgaaagctcattaactggtaaaccttcacctaatgtagtagaagatacgattagaaagaatttagaagcaaatcagaaaggaaatgaatcttcgaagtttgcggattacttgactaaagaagaacaggtatttgctaataaagctcagaaagagcttattaatgaaataaatatgttttcttctaaaagtcaggcttctaaaaatgcaacaatgatcggagcttatgattcttctacaggtaaaacagccgtaggtaatagtaatgcaaatattacagcagattcattacatccgacgacagtcagctacatagaaaagcagctgggcgttaagataggagagtttacaagtttttgtaaaaacaaggctggagcatgcgcagaggtatcagcagcggatcagcttattaggcagggttccaatccctcaaagattaagtttactgaagcattaagacctagagatgtttggcgaaaagatgatatcccagcagatgcaataattccatcttgcgacaactgcagtgttacatggccaaaaggaaagtaa

SEQ ID NO: 310941 - DNA, 603 bp, Proteus mirabilis; identical to SEQ ID NO: 297664

SEQ ID NO: 310942 - DNA, 741 bp, Proteus mirabilis; identical to SEQ ID NO: 190889

SEQ ID NO: 310943 - DNA, 747 bp, Proteus mirabilis; identical to SEQ ID NO: 298037

SEQ ID NO: 310944 - DNA, 471 bp, Proteus mirabilis
ttggcaataaccgaagccattcaagccaatttagctatttacaaacctaaagagtcattagttgacagaattaataatattcactgtgtaacattgcatgagtggttggataaatatcaagatgggttaaagaaaagaggattgagggaaaaaacgttatatgattacaactctaaaataaaaataatcaagttaaatattgctgacgctccgctcaatgaaataaccacaaaggatattgctagctttatctcaaattattctaaacgctctatggcaaagttaatgagggtcactctgcttgatgcatttaatgaagctatagcagaaggtttactaaatgaaaatcctgtatcggtaactagagcaccgaaaacacaggttaatagagctagattaaccttggatgattttaattacgcaataaatcatacaaataaaaaatacaatagaaaatatgaaatggagtga

SEQ ID NO: 310945 - DNA, 282 bp, Proteus mirabilis
atgaaaggaacaacgttaactgagctaattaaaagatatgactggcaagcaatagcattagcctatagacaagctccgctcggtagtaacaaagataaactatttcactttttgcgcagtaaatatctaaagaaacactaccctagaggtagggtcattgcaagactgactaaagtacaaaacgaatttattgattatcgaaaaagtgaagaataccttcaaaagaaaattgatgaatacaatgtaaaatatcaacaggaggcatctaatgcagggaactaa

SEQ ID NO: 310946 - DNA, 837 bp, Proteus mirabilis
atgccaaaagcacaaggtatgcagatggaacaaacagaaaacgatcaaactagtgctgagcaaggccagttatttcagttggaatttacggattttacaccatctagccttggtacagttcacttatctggttttgctattgcttctgatgaaatggaatatgcgataaaaagtatgaatagtggcataccaataccagtatcaaacccaaatcaagttccagcttctgaatggttttgtacgtgtttagccgaattgtgtggcattgcaactccagtttgtaaaatactgaagtgtttatctaatggtgaatatgtttttggttctagaattgaattggcagcttggaaaactgggttaaatgacgttcaatggataaatatcctatccagtgctaatgatggattaaaaagacaaatgtgggctatatatgcctttgaccaatttgtccataacgtcgataggcatttcaataattatttatatatgcaaaatacattagggaatacaatcgttaaaacttttgattttagtttaagctcatttgttattgggtggccgagaacaacttctagaacactccctactgattcaacaacatattgtaactggttatttgcaaagaattttcttggtgattcagaccaatttaaggcatcagctcttgccgtgttggataaaattgagaaaattggcagctctaaaatatctgatatacttgatagtatgccagggcaatggatgccaaatcatcacaaggaacattttataaaatggtgggacagcgaggaacggcgactaagaatagaagctatccgtcaggagataaattcatga

SEQ ID NO: 310947 - DNA, 816 bp, Proteus mirabilis
atgaatacatacaggtacagcctaataagacttacccctaattttgaaaaaggggagactattaatgttggactcgttgtgtatttaaatcaaggaatagatgtaaggataataaacagcgagtctaaattaaaagctatagatactaatttagatcttcattacctaaatgatttaactgactcgttaatccatctttctgaattagttgaggatgtcgagttattaccaaaattatttaaagggtctctatcactatcaagttttggtatgttttcagtctcatcaaacgaaacgtacgacgataaaattaagaacttaatggatcgccttataaatcctcataaaaagaaatacaaaagggttaaaagaaatatattcttcgatataaaagaagtatttaaaaaacaaggtattcttgggcaatcagaaagtgacatctttaatcataaggttgtaactaattttaccattagccatgatgaaggtttggttgctgactttctactaaagaatggaaagtatcacttaaccgaaacgatagattttagatctgaaaatatcaagaaacaaatgggtgaagctgccgttagtgctattactatcagtaaagcaaacgaagtttacctaaataacatagattcatttgttatatatgcagcagagactattgctcaagaacaaagtgcaagaaaacaattaaatctcttagaaaagcattgtgataacctaattaactcatatagcaaatcagacatggatttttattatgacagaatgcttaatgcagcacatgatatattaagtaatcaatag

SEQ ID NO: 310948 - DNA, 183 bp, Proteus mirabilis
gtgtataaaataacctatgaactaaagacaaaagataattcaaatacgtatgaatttactgttgacagggtcagcatagtcgacgaaaaagagaaaattgagctagctcgaactgactcagccaaatatcacaagttagggatggcatcaatcaagatcattaatacagagaagattaaatag

SEQ ID NO: 310949 - DNA, 216 bp, Proteus mirabilis
atgtcaaacataaaaaatgaagaactattatctcgtataattgctttagaaggcgcggttgcatatacagccactgcatgctcatcttttaacccgcaattaaaagataatattgtttctgcattaaaagaagatgccagtaatcctgataactcatcacataaagaggctattatccggatagctgatattattgattcatttaagattaaataa

SEQ ID NO: 310950 - DNA, 549 bp, Proteus mirabilis
atgagtaaaaaacttttagttccccttattatgacgagtctatcgctatgcgcagtaagtgcacaagccgtaggtgaaaatacgctttcattaggttatgcacaaagtcatgtcaaagcggatggcgataaactaaaagagaaaccgaaaggatttaatgtcaaatatcgctatgaattcgataatcatttaggtgttattggctcttttgcttatacacatcaaggttatgactatcgcttaggatctcactctatgggaaatggtgatcttgattattattcatttactgtggggccaacctatcgctttaatgattatattagcgcatatggtttattgggtgttgctcacggtaaagctgaaatggagttaaatgcccttggttatcatgaaaaagaaagtcaaagtaaatctgcgttcgcttatggtgcaggacttcaatttaacccatatcccaatatcgctattgatgcttcttacgaatacactaaatttcatgatgttaaagtgggtacatggatggtcggtcttggctatcgtttctaa

SEQ ID NO: 310951 - DNA, 228 bp, Proteus mirabilis
atgaataaatccttagtttttaaaggtgacgaaattcctctatttgataatggtgatggaaaaatctggtttaccaacaagcaactttcagaattacttgggtacaaagatgagtcatcagtaactcgtatctttaatcgaaataaagacgagtttaccgacagtatgtctcagacggtcaatttgaccgttagtagggataagccaataaaggtgaattttctttga

SEQ ID NO: 310952 - DNA, 351 bp, Proteus mirabilis
atgtctaaacattatcatattgcagtattgcacggagatggcattggccctgaagttatggcgcaagcacaaaaagtgatcgatgcggtaaataaacgattttcactgaatatcacgaccaaagagtacgatattggtggtattgctatcgataatcatggcacaccattaccggcaaccaccttggctggatgtgagcaagctgatgcgattttattcggctctgtggggggcctaaatgggagcatttaccggcagatcaacaaccggaacgtggcgcattattacctttacgtaaacactttaaattattctgcaatctgcgcccagctcgtttatataaaggtttag

SEQ ID NO: 310953 - DNA, 345 bp, Proteus mirabilis
  misc_feature (285)..(293): n is a, c, g, or t
atgaaaaaatcatggttatccgctttacttttagcgggttacctatcaataccaacacaagccttggcacaacctcaaataggaaatgccgaggctttgttgcaaaagatgggtaatacaacgcaaaccgctacttacgaattatcttttattaatatcaattctcaaggtattgttcctattcgttatcgtcatgcacttgtcgatggtaaaccagtagcacaattaatgcagatggatagcactcgtcgagaaatcgtgcaacgagggaatgaaatcagttannnnnnnnnccacctctctattcgtcggcagcgtcagatgtgtataagagacagggtttag

SEQ ID NO: 310954 - DNA, 681 bp, Proteus mirabilis; identical to SEQ ID NO: 303340

SEQ ID NO: 310955 - DNA, 333 bp, Proteus mirabilis
  misc_feature (318)..(327): n is a, c, g, or t
atgatcaacgtatcacgcctttatatacatcctgtaaaatcaatgaaagggactcgtctttctcaagcctttgcccgtgagagcggcttcacgtttgatcgtgattttatgataacgacccctgaggggacatttatcaccgcacgtaaataccctttgttgctgtgttttattcccactgtaatgacaaatggtatttatattcaagcacccgatggtgaaggaattgccattacttatcaggattttcaatcttcattacaaccaactgaagtgtggggaaatcattttaccgcttatgttgccccagatgaaatnnnnnnnnnnaaataa

SEQ ID NO: 310956 - DNA, 222 bp, Proteus mirabilis
atgaaaaagaaagttatgttaaaaatgatgtttcctgtcagcattatatcacttgcgctgacctcttttctttctcatgcggtaatacctccagaaggtactcttcttgcgaaacaacaagatattgttattaataatggcactgaagtttcctcccttgatccacataaagtggaaggggtaccagaaagtaatattattttacacttatatggggcctaa

SEQ ID NO: 310957 - DNA, 333 bp, Proteus mirabilis; identical to SEQ ID NO: 309782

SEQ ID NO: 310958 - DNA, 936 bp, Proteus mirabilis
atgcaaaatcgcattccttatcgcatttcgggtgaaacctcgtttttttcccgtgaagagatcaaggatattttggcttacttaagagtgatcactaatccggatgatgatgctgcattcttacgtatcgtcaataagcctcgtcgtgaaataggcccgatgactatccaaaagttgggggagtgggctaaagtccgtgataaaagcttatttaatgcctgttttgacttgggattaagccaaacgttaacaggacgaggtttaagtgcattacaggctttttcacagtggatggcgcgaattgtacaacaatcagagcgtgagcctttgcttgctgtacgtgatttgcttcatgaaatggattatgaaagttggttatatgaaacctctagtagcgcgaaagcggctgaaatgagaatgaaaaatattaaccagcttttttcttggatgagtgaaatgcttgagggggatgagttacatgaacccatgacgctctctcaagtggtcaaccgttttactctgcgcgatatgatggagcgtggcgaaaccgatgaagagttagatcaagtgcaattaatgacgcttcacgcctcaaaaggactggaatttccacatgtttttctggttggcatggaagaggggatcttgcctcatcaaagtagtatcgatgaagataacgttgaagaagagcggcgtttagcttatgtcggtattactcgagcacaaaagacattaactttcacattatgtaaagagcggcgtcaatacggtgaattaattcgtccagagcccagtcgttttctatatgaattgcctcaagacgatctccattgggataccaataaaaagaaagtgttaagtgctcaagaaaagcaagaaaaagggcaaaaaggggtcgctgggcttaaagcgatgttggcgagacataaaccttag

SEQ ID NO: 310959 - DNA, 246 bp, Proteus mirabilis
atggatggggaacgggatcacgttcatttactgattaattacccgccaaaactggcgatatctaatctggttaacagccttaaaggggtatcgagtcgattacttcgacgtgatcgtcctgatattgcccaacgtgattactacaagggggttctttggtcgccgagttatttcgcggggagttgtggtggcgcaccaatatccattatccgccagtacattgagcaacaggaaacaccgagttag

SEQ ID NO: 310960 - DNA, 1362 bp, Proteus mirabilis
atgattgaaattcttatcggcgccctcgtcgctgtgggtgttgggcgttacattgttaagggatattcgccaacaggtgtgctacttactggtgggctattattgcttatcatcagtgtgattatgggcaaatcagtattaccagccagtgtcacaagtaccggttatcgcttaatcgatattgttgagtatgtaaaaaatctacttatgagccgtggtggtgatctggggatgatgatcatggtgctatgtgggtttgcttcttatatgactcatattggtgccaatgacgtggtcgtgaaacttgcctcacgcccattaaaaatgatcaactcaccttatcttttaatggtagcggcttatattgttgcatgtttaatgtcattagctgtttcatccgcaacaggtcttggtgtgttattgatggcgaccttattcccagtgatggtcaatatgggaattagtcgtggtgcggcggcagctatctgtgcttcacctgcatcaattattttagcgccaacctctggtgacgtgattttagcggcacaagcttctgaaatgccacttattgattttgcgtttaaaacaacactgcctatctctattgccgcaattcttgggatgtgtattgctcactttttctggcaacgttatcttgatcgtaaagagcatatcgaaacagagatgttagatgtgaacgaaatcaaaactcacgcccctaatttctatgcgattttacctttcacacctattattggtgtattagtttttgatggtaaatggttaccagagcttcatattgttgccattattattctttgcatgatgttatctgcggttattgaatttatccgtagctttagtgctaaagaagtttttgccggtttagaagttgcttaccgtggtatggctgatgcatttgcccaagtggtaatgctattagttgccgcaggggtttttgcgcaaggtttaacaacggttggctttattcacgcgttaattgatggtgcacaatcattaggctcaggggcgattgtcatgatgattgcattagtcttaattaccatgctcgcggcaatgacaaccggttcagggaatgcgcctttctatgctttcgttgaattaattccgcgcttagcaagtaatatgggtgtgaatcctgcttacttaactattccgatgttacaagcatcaaacttaggacggactttatcacctgtatcgggtgtggtggttgctgtatcaggaatggcaaaaatttcaccttttgaagtgatgaaacgcgtttctgtaccagtattggtcgggcttgtgattgtgattgttgcaacggaaatactggtacccagcacattaggttga

SEQ ID NO: 310961 - DNA, 1581 bp, Proteus mirabilis
atggaatggatcgtagatccgacgatatgggtaggtctttccacccttattgttctcgaaatcgtacttggtattgataaccttgtttttattgctattctagcagataaactcccagcaaaattaagagataaagcacgtatcacaggattattgtgtgctcttattatgcggattgtactgctatttagtctctcttggcttatcaccctaaccaaacctcttatcacactgtttgatcatcctttcagtgccagagacttaatcatgctcctcggagggatattcttacttttcaaagccacaatggagcttaatgaacggctagaaggtaaagatcataacgagggaaaacaacgtaaaaccacgagtttttggtctgttgttgcgcaaattattgtactagatgctgtattctctctagactctgttatcactgcggtagggatggttgaccatctcggcgttatgattgctgctgtaactattgcgatgttcttgatgatcctcgcaagtaagccattaaccacatttgtcaataatcacccaactattgttattttatgtttaagcttcttattgatgattggttttgccttagttgcagaagggtttggctatccaatacctaaaggctatttatacgctgccattggtttctctattatgatagagatatttaaccaactcgcacagtttaaccgtcgacgcttcttatcagcttctcgctctttgcgtgaacgtacagcggaagcggtattgcgcattattaatggtaaaccagaagcctctgaacttgaccctcacacttctgatttagttgctaatacagaagaggtgtttgatcctcaagagcgccaaatgattgtgcgcgttctgggtttaagccagcgaaacgtcaatagtattatgacttcacgccatgatgttgaatatgttgatctaaaagccacccaagatgatattcgccaattactagaagaagatccccattctcgtctcgttattaccgacgaagaaaatagcgacgaacctatcggcgtggtaaatgttattcaattattaaatcaacagttacgtaatgaaccattagatttgcgtttattaattacacaacccttaatcttccctgaggggttatcactattacaggcattagaacaattccgtaatgctcatactcactttgcctttgtggttgatgagtttggctctgtcgaaggcattgttaccttaaccgatgtaatggaaaccatcgccggtaatttaccagtaagtacagaggaaaatgactctcgtcacgacttagtacaaaatgaagatggctcatggactgtcaatggttttacaccgctggaagacttagtgctttatattcccattaagttggatgaaaaacgtgagtatgaaaccttggctggcttattgatggaacatttacaacgcgttcctgccgtcggtgaaaaagtggttattgatggtattgaatttgaaccattagatgtacacaatcaccgtattaataaagtacgtattgttgaaccaacacctgaagacgaagaaaacgtcgacgaagcttaa

SEQ ID NO: 310962 - DNA, 705 bp, Proteus mirabilis
atggcgtggcatagcgataaatatggcttacgcagtgaataccgctgggcactttcagaagataatctttggcgagtgattgaaaacaaaaccagcgaaggcgaaagctatcgtcttgaatatgatgatatcaacctcacacgaaccgcttattggcacgatggttcaacctcattttggcaacttaatcatgatcaccaaattattcattataccgaccgtacaggcattaaaacggcgctaatttgggatgagtttggattaccttgcggttgtcgcaatgcgttgggtcatacacatctcagtgaatgggacgcattgggccgactactcagcataacggatggtaatggtaaccaaacgcactggcaatatcagaatgaacgcgagcgccttatcactgtattttggccggataacacagagtcgcgtttagcgtatgacagtttggggcgactggttgaagaagctcacttaggcgaccgagtcttcacatccgcaccacgcacaatattactcgactatgatgcggcgggtaaccttgtcaaacgtgagaccttaactgatcgctaccaatatcaatgggatagtatgaaccgcctattggtcgccagcaaacagcccaatcaacgtggtcttgaaatgggtttgcaagcgaatcaaagtccattttacctacgatgcacttggccgcattactcgtga

SEQ ID NO: 310963 - DNA, 1224 bp, Proteus mirabilis; identical to SEQ ID NO: 309830

SEQ ID NO: 310964 - DNA, 393 bp, Proteus mirabilis
atgaaagcaatatcgatcagacagccgtgggcgtggcttatcgtcaatggttacaaagacattgaaaatcgtagctggcgcactaaataccgtggtcaggttttaattcatgcgtcacagggtgtcaaaaaagccgaatacgaaagagcaaaggagttaacggagcgtttggggattactctgcctgatgcatctagctttgaatccggagggattgttggtgtagctacaattactgattgtgtggaacaaagcgaatcgccgtggttttttggtgaaaaaggatttgtattaactgacgcaagaccgcttaaatttattcaaatgaaaggtaaattgagtttctttgaaacagggattgagcctgaggaggcatctaatgcagggaactaa

SEQ ID NO: 310965 - DNA, 168 bp, Proteus mirabilis
atgccttacattgataatagtttcggctctgatatcgcagaagcgctcaatgatgaaatatctgaaaatatgagtgaatttgcatttagcaaactagaatctattaaaaataaattaaccgaagaaaatcaacttattgtcgacaaatttcttaaagaatatcggtag

SEQ ID NO: 310966 - DNA, 357 bp, Proteus mirabilis
atgtatgaaattctcaaatccggtggttttacgactggtggattaaactttgatgccaaggtacgtcgtcaaagtaatgataaatacgatcttttctatgggcatatatccggaatggacaccatggcaatggcattacgtattgcagcaagaatgatccaagacggtggacttgataaatttattgctcaacgttatgcgggatggagtgctgaacttggccaaaatatcctacaaggcaaattaagtcttgaagaagtggcaaaatatgcacaaagcaataccttagcgccccgcttacaaagcggacgtcaagagatgctagagagtttagtgaatcgttatatttttggttaa

SEQ ID NO: 310967 - DNA, 1854 bp, Proteus mirabilis
atgactgttaaatcttcgctgatagcaaaacaagtcaaacaagatttattaccttttgactatcggttcgccactacgtggcgcatagcgttactatgtgccttaatggctgtgatcgctatggtttatgaaatccctgaatcagcaatcagctgttatttaattatctatttgattaaagcggatgcggtacaaaatatattactctcccttggggtcattattttatgctccattgtggttggtgtggcgttagtgctgtttaatctcactattcaaaatattattttacgcttcttttttatggcttttttctcagccatttttatgtatttagcttcagcaagtagtctcggtgatataggtaatttagttgctttggtgatcgcctttttaatgacgctaattgaagatatcccatttggtgatgctgcaaccagaggattgctttatgcgttattaatggccgtttcgccgatgctattggtgattatattcaattatttttttggtattagcccacggaaattactgcttaataaaatttcaacacgctttatggcagcccatgattttttcttagggaaaaaaactaaccagataacgctgagtgaaatactaggaacacaagcagaatgccaacgttatttgatggttatgaaaatcctttatctattaggtaaagaagatatccaatggttagaaaacatggttgataactcctatgcaatattagttatgtcaataacaatggatgacaatacctcaacatcgttacgttttatgttagcgaaaagatgtaaatatattgcggactgttttgccaaccactcgttagataacattaaagatagtgtgcaacgtcttcagccaataaagagaatcgctttattggataaatttaatactattttgctaacaaaacgaaccactaaacccattaaaaaagccacacccttttttgtaagcgatgcatttagtaatcctaatcataaatactttgctattaaaacaactcttgccgctattttatgttatttgttttatgattattttaaatggcaaggtatccatacagcgatgatcacttgctatgtggttgcacttacttcagtgggcgaaacggttcataaacttacactaagaataatagggtgtctgattggcgcattaattggcatgatctcactgctttatattattcctaatatttctgatatttttcagttgatggtattgatcttcttctgtcttttacctgccgcctgggttgccgccggtaatgaacgtatctcttatgctggcgtacaagtagggttagcctttttgctaacgacactacatggctttaaaccgagttttgatatggatgtggtttccgaccgtattttgggtattttattaggcaatattgttatgtatgtcatttttactcgagtctggcccgcgagtatcgtcaatacaatatacaaacagctcgccacgattttagatgactatacaaagttaagatgctctgccaataaaagtgagtgtttagatttagtcgcctctattaatgagactattgcacaatctaaagataatattgatttactgctgtttgagagaaaagataaagaaagaaacaaagtactcaccttgttttttaaacagtcattaagcaagatttcttacatcagtcgccatagttatgctgataggtttatttttgatgataatggtgagtattccgatacacttcctttatctccagatgattttaagaaaaatgtcttaactgaagaaataaagatgttgcccatcaatgaaagagaacaagtatttaaacagttaataagagaaaataaatga

SEQ ID NO: 310968 - DNA, 1035 bp, Proteus mirabilis
atgtcagatgcacaaaaaaatatagatttatataaagaaatcgatgagattgcggaaaaggccattgaagcctttgagttatcatatgttaaaactgctcattctaatctccacaaaccgctactgagatggtgtgattttcttttgcgctatatagtcccagcaaaacgaatgattttaaaatcagaccgattccctattaatatttctgacgaagcaaaagtgggactgcaaagaatagaggatttatttgttacaggtggagatgtcaatccttatcagagtaaaacattgacgcttttcaatgatacaagtggtaaaaaagaaaagaaaagaaccgatgggttatgggcagactggggtatccatcacttacatcttccattagagccagttgagtcttcaaaaaagtactccaagcgatctgaatggatattgtttttgaaagtatacaataatgcagtacttttcattgatataaaacatcacgataaagacattgaacccgatctattttcccaaagaaaccttatggaaacatttatacgcaactggccaaagcaagctgaattgtatgaaataaaacgagctatcggattagctaataatatatcaattactgattcaaatattgcaaatatgaggaacaatggaatcaatatccccttcgaaatgaacgggaaaatttatgcgccagctggtatgggaatgacaactgcaattactgctgctcaagcttcactactcagcaataaaatctatagctacgcaagagaaatagaaaaggtattaatggatgaaggccagtttttcatgaaagaattaaaatcccgtggtatacatacccctgaatttcagataatgatgcttgatgatggcggattggggatacatgagaaaggtgcaaataaggtttggaaattcccccgggaaaaccctgatgagcccaatgatctgttctgcttgttcaataacacattaatgccaatatgggccggcccaatagtattacgacactggagaaattccccctag

SEQ ID NO: 310969 - DNA, 1245 bp, Proteus mirabilis
atgttttcagaagaaagacgacaggaaatctatagcattattagggaacagaaaaaagttaaagtggctcagctagcggaaagattcaacgtcacattagaaacgatccgcagtgatttgaaatacctcgaaaatgaagggttgatcaaacgttgtcatggtggcgccatactagggaaacaagaaataaaaaagatcagtaaatttagtgatagttttgatatctcatgcttactacacgatttattgatcgtcaaagaacataaaaagaaaacaccagaaggtaaagtgtgtgtattaggctcttttgtggtggacattattgctaatgttgatgcatttcctcgtgtaggggaattggtaaattcaaaaggaaactcaataggtccgggtggaaaagggacgaatcaagccatttctgccagtttttctgatgcaaaagtgcatttaattaccaaagtcggtgaagatcattttagtaagtacgcttataaatatttgcaagagagcggtattgattcatttactatttttcaaacagaaatagagccaacaggtagctcaattagctatttagcagataaaaccaaaaataatattacggctacctatttaggcgcaaataacacttttaccctgcaagaggtcgatatatcactgccttatattagtgaagctgacgtgttattactgcaaggggaaattaatattgatgctaatgtgaaagccgcttcttttgctcattctattaataaaaccgtcatacttaatgtcgctccgtatagcgatgatttaaaacaactttatttatatgtagattttattacgttaaacgcttaccaagcttcagattggtcaggtattgaaattaatacgattaatgatgccaagcaagccgtagagattattgccggtaacgaaaagaaaaaagtgattatctacatagatgaattaggcgtggtgtattttgatgggaggaatacttttcatattccgccactaccttctctacgtgttgatacgatggcagcaacagatgcttttaatggtgcatttgcctcaaaaatagccgcaggaggcacaatgccagaaagtgttttatttgctagtgctttcttgtctgcatttatagaacaaaaaggggtgacttcaatgccttcactatcacaagtacaagcccgtcttaaattaagaattgaagatattcgaccacaagtaatctgcaatgagaaaaggtgcatataa

SEQ ID NO: 310970 - DNA, 717 bp, Proteus mirabilis
atgaagcggaatatcgacgatttcgataatgaaactgattttattattagtattgttacagtcatcgcttgggttttaattggagttattgtagctattgggtatttgactgtcgaaaccaaaggtgaaggcattatgctaaactatattactacattttttacagctttatcagggatggggatagccgttggttttatagtgtatatattgcaaaaaaaagacaaaaaaaaagactttcatcagaaatttaaacattattgcaatgtaattactgaagaaaagaaaaatataatagaactttatggtaaactcgaaaaaatagaaggagaattaaaaaactcaaaattagaatatatcacccttcgttttagaaaagacgcatatacattcataataagagaatcaaaaaataaagataaagaattatattcgttctttataaattcagccattattcaaatgatgagtcaaacttgcaatgactcactaaaaattagccataacctctatttacctctaaaaaagctaatagatgaaacaataactttggaaaggagattgtacgctgtattcttgaggtttaacgcaattaatgaaaaaacagataacatagaaaagaaagaaagagagaaaatgttaaagtatgagctattcacgaaaagaaaaaagaaattagaggaaatcaatgaaataacaattccacccctgcaatag

SEQ ID NO: 310971 - DNA, 927 bp, Proteus mirabilis
atggatacgttgagccaactcttatacctttctcaagggcaattgcaattagatgtgttttgtcaaatgaaagggcatttttcattaccgcatgtttcatctgttgaacatgaaactatttttcacttagttctatcagggcagtgttatgttcagattgaaaaatcagcccctatacttttatccgaaggcacttttttaatgttaaacagaaggcaatcacataccctttggagtggagaacgagatatagaacctctcccttttttgcataaaaataatggcttcttacctgttaagtacacaaaatctgaagatcagactcaacatgttgatttgctttgcgggcgaatgacttatgctaaaggaagcgggttactattattaaatgggtttcctgatatggtagtggcaaatttggtggaaatgccagggctaacagtattgaatttatttagccagttgcttcgagaggaagccattaatgcaaatcaaggggcggctgcgatattaaatgggcttgctcagactttattcgcttttgcattacgtgtttatgggcaaaaaccagatataaactcaagttggttagcattattagctgaacctcggttaagtcgtgtatttaattctatgttaaatgaaccacaaaaagggtggacacttgattctttagctaatgccgcttcaatgtcacgagcgacttttgtgcgtcaatttaaagcaacggcgaatacgacacctggcgaggttctacaatccattcgtatgctaaaagcactttcattattacaacaaaataaatatacattatcagatatcgcagaaagagtcggataccaatctgaagctgcatttagtaaagcatttaaaagtgtatttaattgcagaccagggcagtggaagaagcaacagagtacagtgtaa

SEQ ID NO: 310972 - DNA, 585 bp, Proteus mirabilis
atgagtttttacgccacaattattctcgcccttgctctttctatggacgcatttgccgtcgctgtctgtaaaggcgccaccttacataaacctcattttcgtgaagccctccgcaccggttttatctttggtattattgaagcaagcaccccgattattggttgggcattaggtttatataccagtcaatatattattcagtgggatcactgggtcgcctttggtttattggttatattgggtggacgaatgatttatcagagtttaaagcgtggtgatgattgcatttgtgaagaggctcctcaacgtcacggttcactctctttaattgcgacaggtattgccaccagccttgatgcgatggcaattggtgtcggcttagcctttctacaagtcgatattgtccataccgcgatgaccatcggtatgatgaccatgattatggcaacactgggtatgctgatcggtcgctatattggccctgtgcttggcaaaaaagctgaaattatcgggggtatggtgttgattgctatcggctttaatattctttttgaacatcttgatctgtttatgtacgcacattaa

SEQ ID NO: 310973 - DNA, 642 bp, Proteus mirabilis
atgactattgaaacagtgttttcttcgctaaaagattatctgctaaaactaaatgatgagcaaaaaatcgaagctatcaacaaaatcaaattatttcttcatcaaattagtccgttcaaaaatgaacccatagattgtgttctttggataaaacaaaatcaagtcgtagcaaatgactacaaccctaatgttatgtctcccacagaaaagagattactcaaaacctcattgataaaagacggttatactcaacccgttgtagtattatctgcacaacaaaataaaactaaacaattgcagtggcaaatcgttgatggctatcatcgttatttattaagtaaagaaaccgccttaaaaaaacgaattaataattatttaccagtcaccatccttgatgttaaaaacaacacaatatcagatcaaatagcaaccactattcgtcataatcgagcaagaggacaacatcaagtcgcagctatgtcagatatagttagagatctatctcgattgggatggagcgataaacggattggtgatgaactaggtatgtcacaagatgaagtattgcgcttaaaacaaatctgtggattagctgaattattttcagagcgccatttttcagaagcttggacagtaaaataa

SEQ ID NO: 310974 - DNA, 417 bp, Proteus mirabilis
atgcctgtggaaaaagttattcatgctgcaaaactagctggcgctcatgatttcatttcagaattacgtgaaggttataacacaattgttggtgaacaaggggctggtttatctggagggcaacgccagcgaatcgctattgctcgagctttagtcaataatcccaagattttaatttttgatgaagcaaccagtgctttagattatgaatctgaacatgtcattatgcgtaatatgcacaaaatttgccaaggcagaacagtcattattattgctcatcgtttatccacagtaaaaaatgcagatcgtattattgtcatggaaaaaggacaaattatcgagcaaggcaaacacaaggaacttctctctgatcccgaaagcctatatcactatttacatcaattacaatcagattaa

SEQ ID NO: 310975 - DNA, 618 bp, Proteus mirabilis
  misc_feature (604)..(613): n is a, c, g, or t
atgtggtattacagtccaaaattaacgttagttattttattttcattaccttgttatgctacatggtctatttttattagccctattttacgccgccgtttagatgataaatttgctcgtaatgcggataatcaatctttcctagttgagtctgtaacagcaattaacacaattaaagccatggctgtttcacctcaaatgacaaatatatgggataaacaattagcaggctatgttgcagctggatttaaagtaacggtgttagcaactataggtcaacaaggaatacaattaatacaaaaagccgttatgattattaatctttggctgggtgcacacttggttatttctggtgatttaagcattggtcaattaattgcctttaatatgctagcaggacaaattgttgctcctgtgattcgtcttgctcaactttggcaagattttcagcaagttggtatttctgtgactcgcttaggtgatgtacttaattatcctactgaaagttatcaagggaaattaacattgccagaaattaacggcgatatctcatttcgtaatattcgatttcgttataaacctgacgcgccaattattttaaatnnnnnnnnnncttaa

SEQ ID NO: 310976 - DNA, 984 bp, Proteus mirabilis
atgacaattaagaaacttgaagatggtcgatatgaagtggacattagaccgactggacgtaatggaaaacggatcagacggaagtttaataaaaaacatgaagccattgcctttgaacgttatgtaatggccaatcacagcaaaaaagaatgggggacaaaattaaaagacattcgcccattagatgaactcgttgagctatggtggaacatgttcggtaaacatagcgagaacggaaaatctaactacaacaatgcaatgcgtgtctgtaagggtatgcatagtagcaatgtatctcaagttacatcaaaaagtatctcattttatcaaaatgagcgttttgctaaggggataaaaccctccactattaatcgagaactgtatgctatacgaggtatattctctcaattaattaaaatgggattatatgaggctgaaaatccctttattgaggccaagaaattaaaaataaatgcgagtgagatgtcttacttaacccttgatgaaacccgaaaactactcgctaatctggaaggtgattattataacattgccgtattttgtttaagtacgggggctagatggggcgaagcaatgaaactgaaacgagagcatatcattgaaaacaaagtacgttttacttacactaaaacaagaaaagcgcgcattgtccctatatcgaaagaactctgcgatcaaatatgcaaaggaaaaaaagacctcctattttcctccgtttcatatcaagtatttagaaaaatactaaaaagtgtaaaaccttctttgcccgacggacaagctacacatgtgttgcgtcatactttcgctacgcatttcatgatcaacggcggtagcatcatcacattacaaagaattctagggcatgccagtttaaaacaaacgatgacctatgctcattttgcacccgatttcttacaagatgcgattgtaaacaatccattaaaaggaggtctcagtttatag

SEQ ID NO: 310977 - DNA, 1359 bp, Proteus mirabilis
atgaaccgtaaaaacctgtttactcgcacagctctcgctgccattgtaggaacactttcctcttatgcaagcgctgccggttttcagttaaatgaatattcaacttcagcactaggtcgtgctttttcaggagaaggcgttattgcagatgatgcgagtgtaggtagtcgaaaccctgccgcattgaccatgtttgatcgtcctgagttttccgttggtgctatccatattaatcccagtgttgatattaaaggtaaatcccctttaggtaatcatgccagcactaatgctggcgatatcgccccaagtgctttagttcccaatattcactttgttgcgcctatcaacgataaatgggcaattggtgcatcaggtactactaactttggtttagctaccgactttaaaaaagattacccagcaggtttaattggcggtaaaactgatttaaaaaccatgaacttaaatttaagtgcaggttatcgggtcaataaacaatttagtgtcggtttaggcttaaatgcactctatgctgatgctgaaattactcgccatgtgggtgaagctggtaaactattgggtggtgccttatcccaagatcctaaatatcagggattaggccgttatttatcaggcttatcaccaagtgatcgttttgcacaattaaaaggagatgcttggggctttggctggaatgccggtttattatatgagtttgatgaagataaccgtatcagcttcacttatcgctctaaagtaaaagtgaaatttaaagatggtgattatcaaagtgacttaaaaacgatccctcttcctggtggcaataccatcgtaggtaccgaaggtggcacaatcaaaggtaaacttgatcttaacctaccggagatttgggaatttgccgcttaccaccgtgtcgcgccaaaatgggctgtccactataattttgcttataccagttggagcgaatttaaagagctaagagcaacacgtaaaagtgatggccagcaactcttcaacaaagaagaaggcttccgtgatgcatggcgtattgcattaggaaccacttattaccatgatgataattggacattccgcaccggtattgcctttgatgatagtcctgttcctgctgataaacgctctatctcgatccctgaccaagatcgcttctggttaagtgcaggggcaacctacgcatttaataaagatatgtctgtggatgttggtttagcctatatgcacggtaagaaagtgacgattaaagagaagctatctgaaagcttaccattgccagcttatgaatttgaatcatcaggtaaagcatggttatacggtatgaactttaactatcgcttctaa

SEQ ID NO: 310978 - DNA, 1101 bp, Proteus mirabilis
atggcacaagttattaatactaattatctgtctttagtcactcaaaataatctaaatcgttcacaaagcgcacttggtaatgcaattgaacgtttatcttcaggtatgcgtattaacagcgcgaaagacgatgcggcaggtcaagctattgctaaccgcttcacttcaaatattaacggtttaactcaagcatctcgtaatgcgaatgatggtatttcagtgtctcaaaccactgaaggtgcattgaacgaaatcaacaataacttacaacgtattcgtgaattaaccgttcaagcgaaaaacgggactaactctaactcagatatcacttctatccaaaatgaagttaatcaacgtttagatgaaatcaatcgtgtttcagaacaaactcagtttaacggtgtgaaagtactgagtggtgaaaagtcaaaaatgaccattcaagtcggtactaatgacaatgaagtgattgaattcaatttagataaaattgataacgacacattaggtgttgctagtgataacctgtttgatgctaaaacagagaaaaaaggggttaaagcagcaggtgatgctatcgatgcaaacgctctgggcatttcgggcggtacaaaatacgcgactagtgtttcagtaaaagagtataaagtagatggtaaggtttctgctaataaagttgtcttaaaggatggtagcgacgagtacgtagtaagtaaatcagactttcaattaaaagcaggtactactgatgaagttgagtttactggtagtaaaaccactaaatttaaggcagatgcaggtaaagatgttaaagttttaaatgttaaggatgacgctttagcaactttagataacgcaattagtaaggttgatgaaagccgctctaaattaggtgcgattcaaaaccgtttccaatctactatcaataacttaaataacactgttaataacttatctgcttcacgtagccgtatcttagatgctgactatgcgacagaagtgtccaatatgagtaaaaatcaaatcttgcaacaagcaggtactgctgtactggctcaagcaaaccaagtaccacaaactgttctgtctctgttacgttaa

SEQ ID NO: 310979 - DNA, 864 bp, Proteus mirabilis; identical to SEQ ID NO: 305671

SEQ ID NO: 310980 - DNA, 210 bp, Proteus mirabilis
atgttctttgaatgcataccgatttcggtatattgcaaactttttgacgaaacaactgatgcaataaataaacggttacaaagacaattctggcatgaaggagttcaagttttaaaagtggaaggatccaaggagcgctggattgatataattgaggtaaataaatgggcaagaaaaaacaaacaaaatacccattaccaagaggtgtga

SEQ ID NO: 310981 - DNA, 366 bp, Proteus mirabilis; identical to SEQ ID NO: 300693

SEQ ID NO: 310982 - DNA, 1017 bp, Proteus mirabilis
atggattatcaatggagtaaaaataaagacaatttattgcaagcgatgggcccagaatatgatctggattggcgaaatcctaattatcattatcctattgatatcagtttacaaaaaccggtgacaaatcaattacaaaaacacgaccagttagggatctatttgcaagatcagatccaatggaaaaactggatcttattagggggattacgccaagattgggcgcaagttcgtacctatgatcacatcaaaaacagcaaagaccaacaagacgatcagaagctaaccggtcgagtgggtctactctatgcctttgataatggtatttcaccttatattagttatagcacctcttttgaacctaatttacagacacgaagagctccgggtagtgcaccatttgagccaagtgaaggacgtcaattagaagcaggaataaaatacctcaccccaaatgaacagacattagcaacactctctatttaccaattacaacaacgtaatgtgactaactataacgctgaaaaagcctattttgagccagtaggtgaaattagaagccgtggtattgaagcgcaaattaatagccaattaactgaaaatatatcatttattagtagctatgcttataccgatactgaagtgagaaaaaccatcaccgcaggtacacaaggaaaagaattaccacgggttcctaaacatatggcatcattttgggggcagtatgatgaaacatcagggctatttaatggtgctaaagcgggctttggtgtgagatatatcggtgtatctcaaggcgatactaaaaatacgattagtgtacctgcagtcactttgtatgatgccatggtaggttattctttaggcgaattatcctcctctttaaaaggggctgaagttcaactaaatatgaataatattgccaacaaacactatgttgcctcttgtgctggtgaaactgcctgtttttatggcattggcagaaccatgacagcaacgataaattaccgctggtga

SEQ ID NO: 310983 - DNA, 381 bp, Proteus mirabilis
  misc_feature (328)..(337): n is a, c, g, or t
atgataagattgacaccattcaacccatcagtgtctgactatatcatcaatcgctatgctactgatgaaacctctctttcactttacttttcagctcttaaaacaaatcaatcaattaacactttattctctttgcacagcaataggaaaatcaattcagatgtatttgtttcagtacttgagtcagtactcaatgccgttgatcttaaatgcttaaatgattactcaattcatcttcttcattcggtcatacattccaatttaatctccaccaataaaaatagaatggtctatccgagcttatttttaaacattaaagaagaatatnnnnnnnnnnaacttacgattacgaagttggtgagtgcgtgttatgggctgtaa

SEQ ID NO: 310984 - DNA, 417 bp, Proteus mirabilis
ttgaaagttcatacccaaggtggcgtcgttacaacagctgaaacgttaatggtaatagtgccagaaaatgacacactggaagttacagcattagtgcaaaataaagatattggttttattaatgttgggcaaaacgtcattattaaagtagaagcatttccttatactcgatatggttatttagttggtaaagtaaaaaatattaatttagatgcaatagaaaaccaacaattaggacttgtttttaatgtcattgtttctattgaagagaataatctatcaattggaaataaaaatattccattaagctcaggtatggctgtaactgctgaaattaagacagggatgcgaagcgtaataagttatcttcttagtcccttagaagaatcagtaacggaaagcttacatgagcgttaa

SEQ ID NO: 310985 - DNA, 801 bp, Proteus mirabilis
ttgcatgtttcatcactcactcctgcgatcctaaaaaattggatacaaaagcaaactactgtattaaaaactattcgtaatcagttatcttttttacgaagctcactagatgaggccattactgatggaattgtatcaatcaacccagtcagccttgtatcggcatcaagatatcaatcaaaaaataacagtgctgaaagtaactatattgtcgacccattatcaccaaaggaagtctctgccctactcaccgtggcaaagtacgagcaatggaaaaacttattccagtttgccattaatactggattaagaagctctgaattatgtgcattgagatggagtgatattgatttcatagaaaatactgcacatgtacaatccgccagtgtcgtcggtattattaagaaaaccaaaactaaagccggcactagaaaggttgaattgaatagcgaagccctaagcgctctgaatgaccaaaaacaattcacgttcatgaaggatggcgtaattttcgaagacccaaaaacaaataaagcctgggcaggtgctgacgcaatcaggaagaaagcatgggtaccaacgctgaagaaagcaggtattcgatatcgtaatccttatcaaactaggcatacattcgccacacgtcacataagtcaaggaaccaacttgttttggctagcaaaacaaatggggcataaaggtcccgagatgttgtttcgacattatgggggctatcttaaagagtatgacggtaagacagcttataatattaagtatcaacatttgccttcagctaattaa

SEQ ID NO: 310986 - DNA, 447 bp, Proteus mirabilis
atgaattttggcccatctcgccgtgagcattatccaaatctgcctttctggcgattagttcgcgatggtttttgggagttgcaactaccaaaagagagcgatctatcaaaagataataagcaaccatcgaaaaataaattaattcagcaaaatgtgttaggtggatttgaccaagaaagctatcagcttcttataaaaaagccaagtttaatcaataagctagcacaacagattttaagtgaacacttccctgataatgttcaagacgttattgctaaccgtcttgatttttccctacaagaaattcgccaaaaccgagatcccacttttagaaaaaatatcttacgtgcttacaattatcagtgtgctatatgtggttataatctacgttatgatagcgccgtggttggcctagaagccgctcatttgacatcctccacgccctaa

SEQ ID NO: 310987 - DNA, 456 bp, Proteus mirabilis
  misc_feature (433)..(442): n is a, c, g, or t
atggggttgactaatgaagaaaacatagataatacaagtaactttattaatatttctgtagggcgagcttgggtttctagtagagatatattgggtttttataattcgttaaaagatgtttatcagcctgcaagaacaggactttatgaatttttgaaaagcgatcataatcaagattacctgaagttaattttattagatgaggcaaacctttctagtgttgaacattattggtctgactttttaagtatgtgtgatcctgaaggtaggaatagaaaaattgatttgggtataccttcagatgaagaacgatacataaaagtttccaagggagtacgttttattgcaactataaataatgatgcatccacagagcgtttatcccctagattgatagaccgtgttcctgtaataggtttgaatcataatttgnnnnnnnnnnaatttggattttaa

SEQ ID NO: 310988 - DNA, 186 bp, Proteus mirabilis
atgcctgaaataatgccagtgatagctccaactaatgcacttattggtgctccaatgagtgatgccgttgaagctgcactaatacccgcagatatagtacctaatgcagtattgatagtggttaatgatgcatcaatagctcctgtttctttgcggaaagctgcaagtaagctatctccttcgtaa

SEQ ID NO: 310989 - DNA, 156 bp, Proteus mirabilis
atgatggattcgatgggaggaaaaacaattagggtaaccctctgtgggcgaggtaaccgcattattcctcattcgatgatagtctccggacagatgtcaacaacctcactaggtaagcagtatttttatattgatgtgagggagtatggtgggtga

SEQ ID NO: 310990 - DNA, 483 bp, Proteus mirabilis
atgcttgctagccaagttttatgggatgatggtgtcactgctttgtttagctcatattcttattttggcaaatataacaatcaaaataagatagaacacaaaatcagttttaattcaggtgctaacttaggtgcttggcgagtacgtagtaaaagttattatcatcatacggataagcaacagcaatttaagctatactcattatatgcttatcatcaattaaatacgctgttggcaacgcttaatgtgggggaatttcgaccaaccagtagaatgttatcaacagataaattaattggatttcaacttatatctagtgatttgctctctggtaatgatctctatatgaatagtcctattatagaagagattgcagaatctcatgctgaaattaaagtgaaacaacaaggaagaaccatttatgaaactattgttcctcctgggccttttattttaaacgatctaccaatgaattggtattag

SEQ ID NO: 310991 - DNA, 576 bp, Proteus mirabilis
atgcgttgtgttgaagcatggtcgatggtcattccctgggtcggttttccattagcgagcttactttctttggttgaacccaatagtcgtgcaaaatatgttgcctttgaaacgcgttatgcaccacaggagatgcgcggacaagatagtcgcttcattggcggcggtttacaatacccgtatgtcgagggattaagactcgatgaagcaatgaatccactcacattattggcgacaggggtatatggaaaatccttgccaaaccaaaatggtgcacctattcgccttgttgttccgtggaaatatggatttaaggggatcaaatccattgtcaaaattcgtttaactgagtcaatcccaccaacaacgtggaatctttcagcaccgcatgaatatggtttttatgcaaatgttaatccagatgttagccatcctcgttggtcacaagcaacagaacgctttataggcacaggtggattaggtcaagttacaagacaaccaacattattgttcaatggctatggcgaccaagtcgcacatttatataaagatttagatttacggagaaatttctaa

SEQ ID NO: 310992 - DNA, 423 bp, Proteus mirabilis
ttgtttggccaggataaattaacactgcaaaccgatacactgaaaaataacagtacaggttcggttgaaagtaataccttaaaaggtgttattgcgtcgagtggtgatactgaagtgacggttaatcgtgattttgaaaacaatggcgtcatttctggtgtagaacatttacgtgtaaatataaatggtaaatataccaatgccagcaatagtattatgtcaggtaaaaatagtttcgaattaggtgtgacaggaaatattattaatcgcggcattcttaattcaataaaagacacgactatttctggtgagaatattactaatgaaaaatcaggtattattgttggtagagaaagtattactatcgataataaaggcacttttactaataaaggtaaagttgtcgggccgttaaataaataa

SEQ ID NO: 310993 - DNA, 423 bp, Proteus mirabilis; identical to SEQ ID NO: 310992

SEQ ID NO: 310994 - DNA, 384 bp, Proteus mirabilis; identical to SEQ ID NO: 294841

SEQ ID NO: 310995 - DNA, 363 bp, Proteus mirabilis
gtggcgattatttgttctgattataccatcagcaaacatttttattgtcaaatactggggcttaccctattaaatgaaaaataccgtgaagaaatacaatcttggaaagctgagcttgcgttaggtacagtctaccaaattgaattatttagcttcccagatgcgccagcacgtttaagttacccagaagcacgtggtctacgccatgtggcatttgcagtggacgatcttgatgcttcagttgcttatttacaacaaaataatattcaatgtgagccaatacgtatagatcctagtagccaaaaacgttttaccttttttcaagatcccgatggcttacctttagagctttattcaatatag

SEQ ID NO: 310996 - DNA, 201 bp, Proteus mirabilis
gtgtatggacatcatgcatcaacttatgcgaataaagaaaatcttaccccattaataaatgagattagcaaaataatttcagctgctggtagttttgatgttaaagaagagaaagctgcggcatctttattacagctatccaataatattagtggttcttcgtataatagtaactcaataactttaacctcattagcataa

SEQ ID NO: 310997 - DNA, 6105 bp, Proteus mirabilis; identical to SEQ ID NO: 293497

SEQ ID NO: 310998 - DNA, 171 bp, Proteus mirabilis
atgctaagacactcccaacaaaaagaccaagcagtaaaaatcacattaccagatggatcatacggttttgtttcaacagatagacgttgccatgtttcatacgattttccagctcacgtcaaaattgaacctcagcctgctcccgcggagcaacaaaggagcgaacaataa

SEQ ID NO: 310999 - DNA, 537 bp, Proteus mirabilis
gtgtctagattttcttatacagaagatatgaaagtttggatgagtaataattatttattattaccggatgatttaattgaagagtttaaaaaggaatttggtgaactacgaacattcaaatcacttcacagttttcgtaaaagattaggattgaatacaggaagaacagggaagtttattaaaggacatgttcctgttaataaaggtactaaaggattgactggcgcgaataaaacatcatttaagaaaaataatcgcccttttaattatcaacccataggcgctgaatcaacaactaaagatgggtatataaaagtgaaaactgctgaaccaaacatttggaaattaaaacatcgtttagtatgggataaacttaattgtcatattgataatttaatgatgatctcaaagcgagaaaatgctgttattaataaacattactcaggagcacctgcggagtataaacataccacattacagttagcaaaaataaaattagctatttcagatagaacaaagaggcaagaccaatgctaa

SEQ ID NO: 311000 - DNA, 1035 bp, Proteus mirabilis
atgtcagaaaatacagaacgcaataaaacaacagaaaatcaccctattaatgataataaaagaacagataatttgaatcgcttctctgttgcacctatgctcgattggactgatcgccattgccgttatttctttcgccagcttaccaaaaatactttgctgtatactgaaatggtcacaacaggtgccattattcatggcaaaggtgattatttaaaatatagcaacgaagaacacccgatctcattacagcttggcggcagtgatccacaagcgttagcgcaatgtgcaaaattggcacaagagcgtggctatgatgaaattaatttaaatgtaggttgcccttctgatcgggtacaaaatggacgctttggtgcttgtttaatgggtgaagcacaactcgttgcagattgcgtgaaagctatgcgtgatgtggtcgatattcctgtgacggtaaaaacacgtattggcatcgacaaccaagatagttatcaatttctatgtgattttattgataccgtcagccgtgataataactgcgatacctttattattcatgctcgaaaagcttggttatcgggattaagccccaaagaaaaccgcgaagtgcctcctttagattatcctcgtgtttatcaattaaaacgtgatttctcgcatctcactatggcaattaatgggggaattaagtcactagaagaggcgcaggagcacttaaaatatatggatggtgttatggtaggtcgcgaggcttatcaaaatccatcaatattggctcatgtggatcacgtgctttttgataatcagttacctgttactaatgccgtcgctgccgtaaaagctatgtatccttatattgaaaaagagctctcacaaggcacttatttaggtcatatcacccgccatatgttgggaattttccaaggtattcccggggcaagacaatggcgtcgtcatttaagtgaaaatgcccacaaacaaggtgctgatttaaccgtgctagagaatgcgcttaagtttgtgaccgaaaaatag

SEQ ID NO: 311001 - DNA, 618 bp, Proteus mirabilis
ttgaaaggattaacggtttattatctattcaatgaaacatacaaattacgtgcaggggaaacctttttattccatgcagcggctggtggcgtcgggctaattgccagccaatgggcgaaagcgattggcgctaaaatgattggtactgcaggcagtgatgagaaagtggctaaagctaaggccgcaggtgcatggaaagtgattaactatcaaactgaatctattgttgaacgtgtccttgcgctcaccaataaccaaaaagtacccgttgtgtatgattctgttggcaaagcaacttggttggattcgttgcactgtttgcaacgccgaggcttaatggtcagttttggtaacgcttctggtgcggtaacaggggttgatttaggtattcttaataaattgggttcactttatgttactcgtccttctatttccggctacattacgacgcgcgaagagttagatgcagcaagtgaagcactatttacgttaattggtcgtggtaaaattgatgtcagtgtgccagataatcagaaatttgcattagctgatgctaaagccgcacaccgttatcttgaaagtcgtcaatctcaaggttcaagtctattgatcccatag

SEQ ID NO: 311002 - DNA, 267 bp, Proteus mirabilis
atggctaaacgcattcagtttgcagctcatggtaatgccgatgtactcgagctaacttcatttacccccgcccctctaggcgataacgaagtacaggttgccaataaagccattggcattaattatattgatacttatgtgcgtagcggattatatccagtagagcatttcccaagtggcttaggaactgaagctgccggtgttgtgattaaaacaggcgctcatgttacttcacttaaagaaggggatagagttgtatatgcataa

SEQ ID NO: 311003 - DNA, 162 bp, Proteus mirabilis; identical to SEQ ID NO: 303541

SEQ ID NO: 311004 - DNA, 414 bp, Proteus mirabilis
atgccacgcgatcatcatctcacctttacattatttggagattttgttgaaaataaaagtaaaagaaaactttttattgcaggtaattatttacctaatttgccaaatgaaaaacatggtatcaacattcattatcagtatggcgatttaactgcttttggtcgtgccatttactataaaaaacagaaagaaagtggtggtttattgcgtggtggtgatttaattttcccttcttataccctcgttgatgccgggatcggaaaaaaattcccgttggataaacttactgtttctgttgatgtagtgattaataatctaactaatgtcgaagcaagacccgctagctctcaattaaaatatttagcacctctaccaggtagaaattatggattaaacgttaaagttgatttttaa

SEQ ID NO: 311005 - DNA, 612 bp, Proteus mirabilis
atgtcattagaagaaaaaaatatcgataaaccaagaacaaagccagccgaagttcgtttagaagagttaatgaacgccgcagaaacactatttcttgaaaaaggatttgatgccacaaccgtcagcgatattgtaaaacaagcgggggtcgctaaaggaacgtattatcactattttacggcaaaaacagatattctcgacgcactgcgaactcgatatatggattggtatattgataaagttgagcaagcaatggcaagctgccaaattcaagattttcgcgctaaattaaaacagtggtgtgaaactagcgttattgcttatgttgaaaaacaagaattacacgatatgctttttcatcaagtctttcatcaaagcggtaatattcatgaaaatagagcgctacagcagttacaaaagatattaatgggggggacagagaataaaacgtggcaagtcctacagcctgaattaacctgcacgcttatttatcatggtatgcatgctgccgttgataatttagaacacagtacggaatacacatcacaaacattaggtgcgctattatatcgacaatttacacaattattactgtctcttatacacatctga

SEQ ID NO: 311006 - DNA, 231 bp, Proteus mirabilis
atgagtttatcagtaatcaaagaacctttttttgcacagaaaaccaagacatcatttggtactccacccattaatatatacacacaccaaaatttaccatacttagatatgagtaatacccaatcccccagttcaaatttgtttagggttaattctttcgctctttctattggctcaggaacaataattgatgctttggataaagtagtaattatgagctcaggactgtaa

SEQ ID NO: 311007 - DNA, 252 bp, Proteus mirabilis
atgaaaggatataatggtcaacgaagggttaatcgctcaacctcacatccgtcggactttacccttcctgaatctattagtttagtctctgataatcagactaatgtttgttttattgactataaagatattccatcaatgactgaattggagaatgtaatatttttaagtgaaatagctaatggtgaacgtaagcctataattccaacaatatatgttcaaattaaagaagatacagattgtataccttaa

SEQ ID NO: 311008 - DNA, 432 bp, Proteus mirabilis
atggagacgagcacatttcctttaacgtcattccgtgtgctctatccgcagtttgacggtgtgggtgatgatgaaatatttatcattgctcaatctgcgttgaactatttctctgcctgtaagggtgtttgtactaacgagctgtggatgctcgttgttgcacacatgctaacactcagaaaaatgattgctgatgatgagtcgcccaccggtgtggtgacgagtgtaaccattgataaggtaagtgtgtcatttacggcaccgcctgccggttctgattggtcgcactggtttaaaatgaccacctttggccagcagtttttagcactgattaagcgttgtagtgtacctcaatactttggtggtggcggtgagcgttcagcatttcgtggtgtaggagggcggtttacacgaggagggcgattacgttaa

SEQ ID NO: 311009 - DNA, 249 bp, Proteus mirabilis
atgcgtctggttttctctcctgaatttgttggcgcaaacggtggggctgatgtggcctatatgttcgcagatagcattgatgatggttcaacggcaaccagtgcggtgatccttcaggtggtgcctgtgaaataccagttattaggttcactcaaccaaattaaagggtatatggaagatgcaaccaatgcgactgcaggtgtatttgtgacccgtccgtgggcggtgacacgcttaaccggcatttaa

SEQ ID NO: 311010 - DNA, 342 bp, Proteus mirabilis
atgcctctttacgcatattgcacattatcgaatgaccagaactataccgtgaaagacgggaaagtgtttattgctggtcaagctaacgtgatgacaaagcacatgtacacaccgcgtggccgtatgacggaaatttctgatgagcaatataaacagctcaaagaaaatcacgttttcaatcttcattgtgagaatggttttattaccgttgagcctcgcaaagaagatcccgaaaaagtcgccacagatatggaagccagtgaccaatcagcgcctgacacaccagaatcgttagaggctgaaaagttagacgttcctaaaaccaacaaaaaaggtaagtga

SEQ ID NO: 311011 - DNA, 432 bp, Proteus mirabilis
atggagacgagcacatttcctttaacgtcatttcgtgtgctctatccgcagtttaacggtgtgggtgatgatgaaatatttatcattgctcaatctgcgttgaactatttctctgcctgtaagggtgtttgtactaacgagctgtggatgctcgtggttgcacacatgctaacactcagaaaaatgattgctgatgatgagtcgcccacaggtgttgtgacgagtgtaaccattgataaggtgagtgtgtcatttacggcaccccctgccggttcggattggtcgcactggtttaaaatgaccacctttggccagcagtttctagcactgattaagcgttgtagtgtacctcaatattttggtggtggcggtgaacgttcagcttttcggggtgtaggtgggcgatttacgcgaagagggcgattacgttaa

SEQ ID NO: 311012 - DNA, 459 bp, Proteus mirabilis
atgactaaattagcgcaattaaaagcggtttatgatgaattggctaaaaagcgattaagtgttggtttctttgaacacgcaaaatatcccgatggaacaccgattgcttatgttgcttctattcaagagttgggctatccggctggtggcattcctcctcgcccatttttacgtccgaccatgaatgacaaaaagcagggttatagtcagttaatttttcgagcagtgaaagcgtctgttaaaggcaatatcacgctggataatgggctgacacaaattggtgcgatggttgcgggggatgtgaaaatggcaataaaagccgtcacaacaccggcactggaggagtcaaccgttaaagcaagagcacgtcgccatagcaaaggtaaagccaccgataagccgttagtcgataccggccaaatgcttcaagcggttactttcgcagtggaggataaataa

SEQ ID NO: 311013 - DNA, 249 bp, Proteus mirabilis; identical to SEQ ID NO: 311009

SEQ ID NO: 311014 - DNA, 342 bp, Proteus mirabilis; identical to SEQ ID NO: 311010

SEQ ID NO: 311015 - DNA, 432 bp, Proteus mirabilis; identical to SEQ ID NO: 311011

SEQ ID NO: 311016 - DNA, 459 bp, Proteus mirabilis
atgactaaattagcgcaattaaaagcggtttactatgaattggctagaaagcgattaagtgttggtttctttgagcattcaaagtatcccgatggaacacctattgcttatgttgcttctattcaagagttgggctatcccgctggtggcattcctcctcgcccatttttaagaccgacaatgaatgacaaaaagcaggattatagtcagttaatttttcgtgctgtgaaagcctctattaagggaaacatcacgctggataatgggctgacacaaattggtgcgacggtagcgggagatgtgaaaatggcaattaaagcagtcaccaccccagcgctggaagagtcaacggtcaaagcaagagcacgtcgccatagcaaaggtaaagccacggataagccgttagttgataccggccaaatgcttcaagccgtgtcatttgtcgtggaggataaataa

SEQ ID NO: 311017 - DNA, 249 bp, Proteus mirabilis; identical to SEQ ID NO: 311009

SEQ ID NO: 311018 - DNA, 342 bp, Proteus mirabilis
atgcctctttacgcatattgcacattatcgaatgaccagaactataccgtgaaagacgggaaagtgtttattgctggtcaagctaacgtgatgacaaagcacatgtacacaccgcgtggccgtatgacggaaatttctgatgagcaatataaacagctcaaagaaaatcacgttttcaatcttcattgtgagaatggttttattaccgttgagcctcgcaaagaagatcccgaaaaagtcgccacagatatggaagccagtgaccaatcagcgcctgacacaccagaatcgttagaggctgaaaagttagacgttcctaaaaccaacaaaaaaggtaagtaa

SEQ ID NO: 311019 - DNA, 432 bp, Proteus mirabilis
atggagacgagcacatttcctttaacgtcattccgtgtgctctatccgcagtttgacggtgtgggtgatgatgaaatatttatcattgctcaatctgcgttgaactatttctctgcctgtaagggtgtttgtactaacgagctgtggatgctcgttgttgcacacatgctaacactcagaaaaatgattgctgatgatgagtcgcccacaggtgttgtgacgagtgtaaccattgataaggtgagtgtgtcatttacggcaccccctgccggttcggattggtcgcactggtttaaaatgaccacctttggccagcagtttctagcactgattaagcgttgtagtgtacctcaatattttggtggtggcggtgaacgttcagcttttcggggtgtaggtgggcgatttacgcgaagagggcgattacgttaa

SEQ ID NO: 311020 - DNA, 459 bp, Proteus mirabilis; identical to SEQ ID NO: 311012

SEQ ID NO: 311021 - DNA, 213 bp, Proteus mirabilis
atgatcgccaattcattgccctttgttgaagctctccgcaaacaaggcattggcgttcagcgggcaagcggtattcgaacaccttattttctgaatgaccagggcaactacgaacaaaatccctcatttgatttcaatgtgacatttaatcgcacacttcatcctgatacagacgccgtgagtgcgttgtatcccgatatctatcgtatttaa

SEQ ID NO: 311022 - DNA, 1488 bp, Proteus mirabilis
atgtctatcaaacaaactcgctatgtcgatatcgcgagtgcggtgattggcgcgtctgctgtaccgatgcgtaagctcacggctcgtgttttttcaacaaaccctaaaattcctgctggtaaagtgcttgagtttgccagtggccaagttgatgagttgctaggcgccgattctccagaagcgcattttgcgcgtcagtatttcagctatgtcagtccagcaccagcaagcaagcccaaagaactgcaaatcgcctcttatgagccggttggtcgagcgcctactttgtttggcgaaaagacaggggatttggccgatttaaaattaattaatgacggtgaacttaatatcactattggaaaggtgacaaaaacaatcaccggaattgatctctctgaatgtacgtcatacgcggatgttgcgacagctgtacaagcaaaattaaacgcagaaagtgagcctcaatttgctagcgcctatgtcacgtttaattcattagacagcgcttttgtcattagcggtggtgtgcaagagcgtgcggatattagtgtacgccaatcggtgcttgctgatgcgatgaatatcagtcatggcacatcatcggccggtaatcctgcacaaactccgttacaagcctttattgcttctgaggctgtttctgactcttttggtagcgcaacgtttttaacggaactctcattagagcatgccgtagagttggcgcagtacgtggcaggcgaaaatgtgaagtatcaattgcacttgtctgtgaccaatcaaaatgcagaagattttagcggggcgctggtgggaacggcttcaacagccttaaacctgaaaacagcggataacttctttgttcaagcgttacctatggccattatgtccgccacagattatgaccgaaccaatgcaacaactaactatatgtatcgtcaatttggtgtcacattcccgtctcaaattacgaccgatatcgatgctgatcgcttagataaactacgggtgaattattacggagaaacggccgtatcgggttcgcatatcagtttctatcaacgtggcttcttatgtggtggggttgccaacccattagatatgagtgtccatgccaacgagcaatggctaaaagcctatattgcgcaacagtggtttagtttacttatggccacacgcggagtacccgccaataaagacggtgaagcacgggcgatgatggtgattgcaggggcggtgaccaaggcgattaataacggcacgatcctagcgggaaaaaccttatccgatgtgcaaaaaatcgcagtgacagacgcttctggtgatgatttagcgtggcacgatgtacaaaacaaaggttattggtacaacgctcaaattgttgaaaatacaggccccgctgatttgcctgagtacgtgatgaaatacgtattgatttacggtaaaggcgactgggttcgtaaagtcgaaggctctcacaacttagtgtaa

SEQ ID NO: 311023 - DNA, 213 bp, Proteus mirabilis; identical to SEQ ID NO: 311021

SEQ ID NO: 311024 - DNA, 762 bp, Proteus mirabilis
atgagggcggttgaatatggtcctgttgaatgcggggccggccaacttaattctgtggctagctcagtattaggttgggagaaagtcaataatcccactcatgcggttgttggccgttatgctgaatctgatatcaaagcaaggcgacgacgtaagcaaactctggctaaaaataccgtcagtgtcgcggaagcgatcacctcttcactgtatgaattagagggcgttaattcactgtcttttcgagagaactacaccgatgcggtgctcactattgatggaatttctctattgcctcacagcatttacgtttgtgttgaagggggcgatagtaacgaaattgctaaatcattgctgagaaccaaaaccattggatcggcttttaatggtgagattgaaatcggtgttgtagagccagtgagtggacaagaatataaagtgaaattttcacgccctaaagagatcactgttttttgtcgagtgacagttaaaaaatcagccgttgatgcgcaaactattatccccagtgccatagaacaatggacgcgtggagagttggacggcgataacggtttgattgttgggcgtgaagtatcgccttttgagatagcgtatgcagtgaatactgttgaacctcgtctgttcgtgactaaagttgaattgtcactggatgggaaagtgtggaatgttgcattaattccgattgccattaatcaaatcgcacgcttgcaacggggtgctgtgcaagtggtgattgtatga

SEQ ID NO: 311025 - DNA, 459 bp, Proteus mirabilis; identical to SEQ ID NO: 311016

SEQ ID NO: 311026 - DNA, 432 bp, Proteus mirabilis
atggagacgagcacatttcctttaacgtcatttcgtgtgctctatccgcagtttaacggtgtgggtgatgatgaaatatttatcattgctcaatctgcgttgaactatttctctgcctgtaagggtgtttgtactaacgagctgtggatgctcgttgttgcacacatgctaacactcagaaaaatgattgctgatgatgagtcgcccaccggtgtggtgacgagtgtaaccattgataaggtaagtgtgtcatttacggcaccgcctgccggttctgattggtcgcactggtttaaaatgaccacctttggccagcagtttttagcactgattaagcgttgtagtgtacctcaatactttggtggtggcggtgagcgttcagcatttcgtggtgtaggagggcggtttacacgaggagggcgattacgttaa

SEQ ID NO: 311027 - DNA, 342 bp, Proteus mirabilis
atgcctctttacgcatattgcaccttatcaaatgatcagaactacacggtaaaagatgggaaagtgtttattgctggtcaagctaatgtgatgacaaagcacatgtacacaccacgtggccgtgtgacggaaatttctgacgagcaatacaaacaactcaaagaaaatcacgtttttaaccttcattgtgagaatggttttattaccgttgagcatcgcaaagaagatcccgaaaaagtcgccacagatatggaagccagcgaccaatcagcgcctgacacaccagaatcgttagaggctgaaaagttagacgttcctaaaaccaacaaaaaaggtaagtga

SEQ ID NO: 311028 - DNA, 459 bp, Proteus mirabilis
atgactaaattagcgcaattaaaagcggtttatgatgaattggctaaaaagcgattaagtgttggtttctttgaacacgcaaaatatcccgatggaacaccgattgcttatgttgcttctattcaagagttgggctatccggctggtggcattcctcctcgcccatttttacgtccgaccatgaatgacaaaaagcagggttatagtcagttaatttttcgagcagtgaaagcgtctgttaaaggcaatatcacgctggataatgggctgacacaaattggtgcgacggtagcgggagatgtgaaaatggcaataaaagccgtcacaacaccggcactggaggagtcaaccgttaaagcaagagcacgtcgccatagcaaaggtaaagccaccgataagccgttagtcgataccggccaaatgcttcaagcggttactttcgcagtggaggataaataa

SEQ ID NO: 311029 - DNA, 432 bp, Proteus mirabilis
atggagacgagcacatttcctttaacgtcatttcgtgtgctctatccgcagtttgacggtgtgggtgatgatgaaatatttatcattgctcaatctgcgttgaactatttctctgcctgtaagggtgtttgtactaacgagctgtggatgctcgttgttgcacacatgctaacactcagaaaaatgattgctgatgatgagtcgcccaccggtgtggtgacgagtgtaaccattgataaggtaagtgtgtcatttacggcaccgcctgccggttctgattggtcgcactggtttaaaatgaccacctttggccagcagtttctagcactgattaagcgttgtagtgtacctcaatattttggtggtggcggtgaacgttcagcttttcggggtgtaggtgggcgatttacgcgaagagggcgattacgttaa

SEQ ID NO: 311030 - DNA, 342 bp, Proteus mirabilis
atgcctctttacgcatattgcaccttatcaaatgatcagaactacacggtaaaagatgggaaagtgtttattgctggtcaagctaatgtgatgacaaagcacatgtacacaccacgtggccgtgtgacggaaatttctgacgagcaatacaaacaactcaaagaaaatcacgtttttaaccttcattgtgagaatggttttattaccgttgagcctcgcaaagaagatcccgaaaaagtcgccacagatatggaagccagcgaccaatcagcgcctgacacaccagaatcgttagaggctgaaaagttagacgttcctaaaaccaacaaaaaaggtaagtga

SEQ ID NO: 311031 - DNA, 213 bp, Proteus mirabilis; identical to SEQ ID NO: 311021

SEQ ID NO: 311032 - DNA, 1260 bp, Proteus mirabilis
atgaccaaacgacaatatgatttaaacggctggctggaagtgaaagataaccccatctctaaagttggggtttttgattatttagggtttgaaattggcgcaccgatacccgaaaaaatttacaaggtgtatcgcccacaagaagaactggccagcacagagacaattaattctttcaaattaatgccctttgttgatgagcatgaaatgttagggaaagacggtacacctgcggagacaaaggggatacaaggggtcatcggggagcgagtctattttgaatatccctacctcagaggcaatatcaaaatcctgtctaattcagcgcttaaccaaattgaaggaggaaaaattgaattatctccgggttatcgctgtgtttacgatttcacaccaggcgaatttaacggtgaacgttatgacgccatacaacggcatattagagccaaccatcttgcgttagttgatgaagggcgcactggcgctgatgttgctgtgcaagaccattccgttattaccatagacacaaaggaacttattcgcatgaacgaagaagaaaacaaagagaagcaaaccactgatgagggtgcatttacgcccgagcaattggaagcgttaaaagccattatcaaggaagtcatcaccagcactcaacctgcaacagataatgatccagaagaagagaaaaaaccttcaactgattctgatcctgacgaagagcagaaagcagaagaagcagtggaaaaagccgaaattgccacagaagaggctgaatctggcgaacctgaagcagtcgagaaagccgaagtcgccattgaagaagctgtcgaagcgattgaagaagccaaagagcatcttgaccaagccactaccgatggacttcatcgtcgtttaaaacgcctaaatcgtagcatgaccgccatggacgaaatggcatcgctaaaacgtaaaattaagcgattagaaaaagccaaacccgcaatggatacgggggagttactcaaacaaatcggtgcgcgtgattcgttagcgcataaattaacgccatttattggtgtgtttgaccactcagccatgactcaacaacaagttgccgagtacggtgttgaaaaactgggtattcaatgcagtaaaggtacagaagccattgctcttgatgcttggatgcaagggcgtgtgcctgattctcaaaagaccagctcaacaatggactctgcagtgagcaataaatcaattatggataaatggggagctaaataa

SEQ ID NO: 311033 - DNA, 1260 bp, Proteus mirabilis
atgaccaaacgacaatatgatttaaacggctggctggaagtgaaagataaccccatctctaaagttggggtttttgattatttagggtttgaaattggcgcaccgatacctgaaaagatttacaaggtgtatcgaccacaagaagaactggccagcgcagaaacaattaactctttcaaattaatgccttttgttgatgagcatgaaatgttagggaaagacggcacacccgcagagacaaaggggatacaaggggtcatcggggaacaggtttactttgaatacccctaccttagaagcaatatcaaaatcctgtctaattcagcgcttaaccaaattgagggggggaaaattgaattatctccgggttatcgctgtatttacgatttcacaccaggcgaatttaacggtgaacgttatgacgccatacaacggcacattagagccaaccatctcgcgttagtcgatgaagggcgcactggcgctgatgttgctgtgcaagaccactccgttattaccatagacacaaaggaacttattcgcatgaacgaagaagaaaacaaagagaagcaaaccactgatgagggtgcatttacgcccgagcaattggaagcgttaaaagccattatcaaggaagtcatcaccagcactcaacctgcaacagataatgatccagaagaagagaaaaaaccttcaactgattctgatcctgacgaagagcagaaagcagaagaagcagtggaaaaagccgaaattgccacagaagaggctgaatctggcgaacctgaagcagtcgagaaagccgaagtcgccattgaagaagctgtcgaagcgattgaagaagccaaagagcatcttgaccaagccactaccgatggacttcatcgtcgtttaaaacgcctaaatcgtagcatgaccgccatggacgaaatggcatcgctaaaacgtaaaattaagcgattagaaaaagccaaacccgcaatggatacgggggagttactcaaacaaatcggtgcgcgtgattcgttagcgcataaattaacgccatttattggtgtgtttgaccactcagccatgactcaacaacaagttgccgagtacggtgttgaaaaactgggtattcaatgcagtaaaggtacagaagccattgctcttgatgcttggatgcaagggcgtgtgcctgattctcaaaagaccagctcaacaatggactctgcagtgagcaataaatcaattatggataaatggggagctaaataa

SEQ ID NO: 311034 - DNA, 192 bp, Proteus mirabilis
atgactaagccatcagcacagtttggagacttagcaccgttaggttttttatcaacgacgattttacctgctgagttttttgtgtacgttggctggcagagttcggaagttaatctcgataaagatgacatctttgaagataacgaaataatctcatcaggatcatatttcataccattaacagctctatag

SEQ ID NO: 311035 - DNA, 228 bp, Proteus mirabilis
atgtattatggttttgatatgggcggcacaaaaatcgagctcgccgtttttgataaagatcttactcaagtatggcaaaaacgtgtaccaacgccaaagaatgattatcaagctctattaaatgtttttaaaacactcactttagaagctgataatgatttaggctgtaaaggaaaaataggtatcggtgttcctggcatcgtcaatgcaaaagaaggaactatataa

SEQ ID NO: 311036 - DNA, 459 bp, Proteus mirabilis; identical to SEQ ID NO: 311016

SEQ ID NO: 311037 - DNA, 372 bp, Proteus mirabilis
atgtttggtaacttaaacagtatcgcttcacgctatattccccagcaaaaggtgctctggtttcggttcaaggaacgtgggcctgatgatagaggaaattaccagaactattattatgatcccgtagaagttcgtggcagttggcaagcggtcgatacccaagatgttcaatcaatgggattagatacgagccaagtgtaccgacgcctatatacctctcatgatattaaagctgtgcaacgaggtacatctcctgattttcttgtattcaatggtcgaaaatatgatgtggtgggcgatgcagactggtacgaacaagatggctggaaatcggtgatctgtatcgaggcgggtatttatgacggattatga

SEQ ID NO: 311038 - DNA, 516 bp, Proteus mirabilis
atgacggattatgaggttgatgttgctattcgcaaacaactcttgttgcagttaaaagcagtcgatattgagatcccggttaaagccggtttccaatctaccaagcaaggccgtgaagataatatggtgatgtttttccccatcaatgaaaacggtcacggttggcagagccgaaaatataatattcaaggcaataaagccaatcaccaagaaaaccagttatctgaaaaaacgtaccaggttcaggctttcgttacccagttaggccattattcagcgagtgatattaccgctattgtcagaatgatcgccaattcattgccctttgttgaagctctccgcaaacaaggcattggcgttcagcgggcaagcggtattcgaacaccttattttctgaatgaccagggcaactacgaacaaaatccctcatttgatttcaatgtgacatttaatcgcacacttcatcctgatacagacgccgtgagtgcgttgtatcccgatatctatcgtatttaa

SEQ ID NO: 311039 - DNA, 213 bp, Proteus mirabilis; identical to SEQ ID NO: 311021

SEQ ID NO: 311040 - DNA, 348 bp, Proteus mirabilis
atgaccgccatggacgaaatggcatcgctaaaacgtaaaattaagcgattagaaaaagccaaacccgcaatggatacgggggagttactcaaacaaatcggtgcgcgtgatgcgttagcgcataaattaacgccatttattggtgtgtttgaccactccgccatgactcaacaacaagttgcagagtacggcgttgaaaaactgggtattcaatgcagtaaaggcaccgaagcgattgctcttgatgcttggatgcaagggcgtgttcctgattctcaaaagaccagctcaacaatggactctactgtgagcaataaatcaattatggataaatggggagctaaataa

SEQ ID NO: 311041 - DNA, 498 bp, Proteus mirabilis
atggcaattcctaaatcagtagcaaacggcttaatttctggtgttgttggtgaaattagtcatgcaggccctattcgcgctgtttcagccattcttagttcagcggatgaaaagctgaatattttcggtcgcgcctatacctacaaagatgattcagtggaatccgttcaagtagggggtaaaggggcatttgcggggatcatgattaaccctaaagcctatcgtatcgaagaagcgttcgctcgtaacggtacgcagggcgaattcctgacaatgggtgaggttttcgttgaactaaaagaagtggcaggaaaaatcaacgcaccggttgtgttcgatgaagctgacggctcgctatcttctaaagccactattagtgctggtgatcgcgtcattggttttatcagccgacaccttgagtcaacagaaagtgctcatttgggcattattcgtttaacagaaatcccatatccagcatctccaaaggaaggtgaataa

SEQ ID NO: 311042 - DNA, 357 bp, Proteus mirabilis
atggaattaataaaaaacactaaaaaaccgactgttttctatttatctgaagggattatatcaacaggggttatatctggctggcctaaaaattcaacagatggaacaacacatctcacctatacatttcctaattacagtgatcggtcagaaaatataagaaagaaatacccgataacagaaagtcaaaaaaaagaaacgctatataaaattaaagaccgagagaagatacgagataaaaaaaggcatacctttatattttttggctacaccaatgacgatatttcctcatcaacaagaagttatcacagaaattttacaattggcttcagatttcgcagaccttacttttactag

SEQ ID NO: 311043 - DNA, 720 bp, Proteus mirabilis
atgaatcctgaagatgaaaacaaagacaaaccaaccactgatgaaggtgcctttacgcccgagcaattggaagcgttaaaagcgattatcaaagaagcaatcaccagtgctcaacctgtgacagacgatgagccagacgataaagataagtcttcaactgattcagaccctgacgaagagcagaaagcggaagaagccgtagaaaaagccgaaattgcgacagaagaggctgaatctggcgaacctgaagcagtcgagaaagccgaagtcgccattgaagaagctgtcgaagcgattgaagaagccaaagagcatcttgaccaagccactaccgatggacttcatcgtcgtttaaaacgcctaaatcgtagcatgaccgccatggacgaaatggcatcgctaaaacgtaaaattaagcgattagaaaaagccaaacccgcaatggatacgggggagttactcaaacaaatcggtgcgcgtgattcgttagcgcataaattaacgccgtttcttggtgtgtttgaccactccgccatgactcaacaacaagttgcagagtacggcgttgaaaaactgggtattcaatgcagtaaaggcaccgaagcgattgctcttgatgcttggatgcaagggcgtgttcctgattctcaaaagaccagctcaacaatggactctactgtgagcaataaatcaattatggataaatggggagctaaataa

SEQ ID NO: 311044 - DNA, 342 bp, Proteus mirabilis; identical to SEQ ID NO: 311010

SEQ ID NO: 311045 - DNA, 249 bp, Proteus mirabilis; identical to SEQ ID NO: 311009

SEQ ID NO: 311046 - DNA, 804 bp, Proteus mirabilis; identical to SEQ ID NO: 298782

SEQ ID NO: 311047 - DNA, 216 bp, Proteus mirabilis
atgaaatcaggcatggtaggtatacccaaagccactgaaaaagggttatccgttacctacttaattgatggcgcctcagaactaggagggatgctacgacttgagagtaaattcaattctgcacttaatggcgactatatcattgagcaactgaaatttgatgttgcttcacatgatgatcctttcttttatcaggctacctgtaaacgagcataa

SEQ ID NO: 311048 - DNA, 693 bp, Proteus mirabilis
atgaataaacccaatacagatattgctagcgagggttcgttggcaggtgcgctctcgtctgcatttcgtaacttgatgatgaatacagaggacatgctccctgcaacagtggttagttataacgataaaaccaatcgtgctgttatcaaaccactggtgatgatggtaacaacggaagggggaacagtcgggcgtgcaccattggccaacattcccgtttttagatttggtggagggggtttctttattcgcgcaccgattaaaccaggtgattttggttggataaaagccaacgacagagatattagcctgatttttcagcgtgggggattggaggatcaacctaataccgcacgcctccattcattcagtgatgcaatgtttttccctgacacgattaaaggttgggcgattgatggaaaaaacattgatgccttggtgatccaatcaatggatggctctgtgtgtttatccctgcatgagggtaaagcggttttagattcgcccgttcttgaagtcaatgtgcctgaaaccacatttaatggcaacgtcacagtgaatggcaatcagtccgtaaatggtaatagtgactctagtggtggcacgatgaaacacaatggaaaagatatcggttctactcatcaacatagtggtgttgagaccggtcatggaaattcaggagcgcctctatga

SEQ ID NO: 311049 - DNA, 693 bp, Proteus mirabilis
atgaataaacccaatactgatattgccagtgatggttcgctggcaggtgcgctatcgtctgcatttcgtaacctgatgatgaatacagaggacatgctccctgcaacagtagtcagttatgacgataaaaccaatcgtgctgttatcaaaccactggtgatgatggtaacaacggaaggaggaacagtcgggcgagcaccattggccaacattcccgtttttaggtttgggggaggcggtttctttattcgcgcacccattaagccgggtgatttcggttggataaaagccaatgacagagacattagcctgatatttcagcgtggaggattggaggatcaacctaatacagcacgtctgcattcatttagtgacgcaatgtttttcccagacaccatcaaaggatgggcgatagatgggaagaacattgatgctttggtgatccaatcaatggatggttcagtctgtttctctttgcatagcgataaagtggtgctggaaacccctaagtatgaagtcaatgcccctgaaaccatatttactggcaacgtcacagtgaacggtaattacgcggtaaatggtaatagtgattcacaagggggaactatgcgacataacggaaaagatatcggctctacgcatcaacacagtggtgttgaaaccggtcatggaaatacaggagcgcctctatga

SEQ ID NO: 311050 - DNA, 216 bp, Proteus mirabilis
atgaaatcaggcatggtaggtataccgaaagccaccgaaaaagggttgtctgtgacttatttgattgacggtgcctcagaactagggggaatgctacgacttgagagtaaattcaattccgcacttaatggtgactacatcattgaacaactgaaattcgatgttgcttcacatgatgatcctttcttttatcaggctacctgtaaacgagcataa

SEQ ID NO: 311051 - DNA, 459 bp, Proteus mirabilis; identical to SEQ ID NO: 311016

SEQ ID NO: 311052 - DNA, 717 bp, Proteus mirabilis
atgaacgaagaagaaaacaaagagaagcaaaccactgatgagggtgcatttacgcccgagcaattggaagcgttaaaagccattatcaaggaagtcatcaccagcactcaacctgcaacagataatgatccagaagaagagaaaaaaccttcaactgattctgatcctgacgaagagcagaaagcagaagaagcagtggaaaaagccgaaattgccacagaagaggctgaatctggcgaacctgaagcagtcgagaaagccgaagtcgccattgaagaagctgtcgaagcgattgaagaagccaaagagcatcttgaccaagccactaccgatggacttcatcgtcgtttaaaacgcctaaatcgtagcatgaccgccatggacgaaatggcatcgctaaaacgtaaaattaagcgattagaaaaagccaaacccgcaatggatacgggggagttactcaaacaaatcggtgcgcgtgattcgttagcgcataaattaacgccatttattggtgtgtttgaccactcagccatgactcaacaacaagttgccgagtacggtgttgaaaaactgggtattcaatgcagtaaaggtacagaagccattgctcttgatgcttggatgcaagggcgtgtgcctgattctcaaaagaccagctcaacaatggactctgcagtgagcaataaatcaattatggataaatggggagctaaataa

SEQ ID NO: 311053 - DNA, 342 bp, Proteus mirabilis; identical to SEQ ID NO: 311010

SEQ ID NO: 311054 - DNA, 249 bp, Proteus mirabilis; identical to SEQ ID NO: 311009

SEQ ID NO: 311055 - DNA, 579 bp, Proteus mirabilis
gtgactgaatcattagagcaaggccgtgagcgtgtgggttactacggatttaatagccctgaaacgcgcgtctttggtttgatgaatgagcctaacttacccgcctatgaaaccgcaaaaggcaaatggaaaggcggaacatttgcagatattactgctgatattaccgatatgttctcgcgtattgaaacgagttctggcggtattatcaaagatgatacgccaattaccttaacattgccgttgggctttcgttctgcactgaatgttgctaatccggtggcacgtggtgaaacagtcaaacaatggataaatgaaaactatcctaatatgcgtctggttttctctcctgaatttgttggcgcaaacggtggggctgatgtggcctatatgttcgcagatagcattgatgatggttcaacggcaaccagtgcggtgatccttcaggtggtgcctgtgaaataccagttattaggttcactcaaccaaattaaagggtatatggaagatgcaaccaatgcgactgcaggtgtatttgtgacccgtccgtgggcggtgacacgcttaaccggcatttaa

SEQ ID NO: 311056 - DNA, 342 bp, Proteus mirabilis; identical to SEQ ID NO: 311010

SEQ ID NO: 311057 - DNA, 249 bp, Proteus mirabilis; identical to SEQ ID NO: 311009

SEQ ID NO: 311058 - DNA, 459 bp, Proteus mirabilis; identical to SEQ ID NO: 311012

SEQ ID NO: 311059 - DNA, 459 bp, Proteus mirabilis; identical to SEQ ID NO: 311016

SEQ ID NO: 311060 - DNA, 459 bp, Proteus mirabilis; identical to SEQ ID NO: 311012

SEQ ID NO: 311061 - DNA, 408 bp, Proteus mirabilis
atgttctcgcgtattgaaacgagttctggcggtattatcaaagatgatacgccaattaccttaacattgccgttgggctttcgttctgcactgaatgttgctaatccggtggcacgtggtgaaacagtcaaacaatggataaatgaaaactatccaaatatgcgtctggttttctctcctgaatttgttggcgcaaacggtggggctgatgtggcctatatgttcgcagatagcattgatgatggttcaacggcaaccagtgcggtgatccttcaggtggtgcctgtgaaataccagttattaggttcactcaaccaaattaaagggtatatggaagatgcaaccaatgcgactgcaggtgtatttgtgacccgtccgtgggcggtgacacgcttaaccggcatttaa

SEQ ID NO: 311062 - DNA, 348 bp, Proteus mirabilis
atgaccgccatggacgaaatggcatcgctaaaacgtaaaattaagcgattagaaaaagccaaacccgcaatggatacgggggagttactcaaacaaatcggtgcgcgtgattcgttagcgcataaattaacgccatttattggtgtgtttgaccactcagccatgactcaacaacaagttgccgagtacggtgttgaaaaactgggtattcaatgcagtaaaggtacagaagccattgctcttgatgcttggatgcaagggcgtgtgcctgattctcaaaagaccagctcaacaatggactctgcagtgagcaataaatcaattatggataaatggggagctaaataa

SEQ ID NO: 311063 - DNA, 297 bp, Proteus mirabilis
atgattaaccctaaagcctatcgtatcgaagaagcgttcgctcgtaacggtacgcagggcgaattcctgacaatgggtgaggttttcgttgaactaaaagaagtggcaggaaaaatcaacgcaccggttgtgttcgatgaagctgacggctcgctatcttctaaagccactattagtgctggtgatcgcgtcattggttttatcagccgacaccttgagtcaacagaaagtgctcatttgggcattattcgtttaacagaaatcccatatccagcatctccaaaggaaggtgaataa

SEQ ID NO: 311064 - DNA, 297 bp, Proteus mirabilis
atgattaaccctaaagcctatcgtatcgaagaagtattcgctcgtaacggcacgcagggcgaattcctgacaatgggggaagttttcgttgagctaaaagaagtggcaggaaaaatcaacgcaccggttgtgttcgatgaagctgacggctcgctatcttctaaagccaccattagtgccggtgatcgtgtcattggttttatcagtcgacaccttgagtcaacagaaagtgctcatttgggcattattcgtttaacagaaatcccatatccagcatctccaaaggaaggtgaataa

SEQ ID NO: 311065 - DNA, 297 bp, Proteus mirabilis; identical to SEQ ID NO: 311064

SEQ ID NO: 311066 - DNA, 297 bp, Proteus mirabilis
atgattaaccctaaagcctatcgtatcgaagaagcgttcgctcgtaacggtacgcagggcgaattcctgacaatgggtgaggttttcgttgaactaaaagaagtggcaggaaaaatcaacgcaccggttgtgttcgatgaagctgacggctcgctatcttctaaagccaccattagtgccggtgatcgtgtcattggttttatcagtcgacaccttgagtcaacagaaagtgctcatttgggcattattcgtttaacagaaatcccatatccagcatctccaaaggaaggtgaataa

SEQ ID NO: 311067 - DNA, 321 bp, Proteus mirabilis
gtgctctggtttcgatttaaagaacgggtacccgatgagcgagggaatgaccaaaattattattatgatccgatagaagttcgtggcagttggcaagcggttgatacccaagatgttcaatccatgggattagatacgagccaagtgtaccgacgcttatatacctctcatgatattaaagccgttcaacgtggtacatcccctgattttctcgtattcaatggtaagaagtacgatgtggtgggcgatgcagactggtacgaacaagatggctggaaatcggtgatctgtatcgaggcggggatttatgacggattatga

SEQ ID NO: 311068 - DNA, 249 bp, Proteus mirabilis; identical to SEQ ID NO: 311009

SEQ ID NO: 311069 - DNA, 408 bp, Proteus mirabilis
atgttctcgcgtattgaaacgagctctggcggtattattaaagatgacacgccaatcaccttaacattgccgttaggttttcgttctgcactgaatgtggctaatcctgtcgcacgcggtgaaacagtcaaacaatggataaatgaaaactatcctaatatgcgtctggttttctctcctgaatttgttggcgcaaacggtggggctgatgtggcctatatgttcgcagatagcattgatgatggttcaacggcaaccagtgcggtgatccttcaggtggtgcctgtgaaataccagttattaggttcactcaaccaaattaaagggtatatggaagatgcaaccaatgcgactgcaggtgtatttgtgacccgtccgtgggcggtgacacgcttaaccggcatttaa

SEQ ID NO: 311070 - DNA, 417 bp, Proteus mirabilis
atgaaaaatgaaactaatattcgccgtggcagacattgtgtattcctgatgcacgtccatttggtctttgtcacaaaataccggcgaaaaatatttgatcaggaagcaattgaaaaattgcgaggctactttgccagtgtttgtgctgattttgatgttgaactggttgaaatggatggggaacgggatcacgttcatttactgattaattacccgccaaaactggcgatatctaatctggttaacagccttaaaggggtatcgagtcgattacttcgacgtgatcgtcctgatattgcccaacgctattactacaagggggttctttggtcgccaagttatttcgcggggagttgtggtggcgcaccaatatccattatccaccagtacattgagcaacaggaaacacctagttag

SEQ ID NO: 311071 - DNA, 417 bp, Proteus mirabilis
atgaaaaatgaaactaatatttgccgtggcagacattgtgtattcctgatgcacgtccatttggtctttgttacaaaataccggcgaaaaatatttgatcaggatgcaattgaaaaattgcgaggctactttgccagtgtttgtgctgattttgatgttgaactggttgaaatagatggggaacgggatcacgttcatttactgattaattacccgccaaaactggcgatatctaatctggttaacagccttaaaggggtatcgagtcgattacttcgacgtgatcgtcctgatattgcccaacgtgattactacaagggggttctttggtcgccgagttatttcgcggggagttgtggtggcgcaccaatatccattatccgccagtacattgagcaacaggaaacacctagttag

SEQ ID NO: 311072 - DNA, 186 bp, Proteus mirabilis
atgactcaacaacaagttgccgagtacggcgttgaaaaactgggtattcaatgcagtaaaggcaccgaagcgattgctcttgatgcttggatgcaagggcgtgttcctgattctcaaaagaccagctcaacaatggactctactgtgagcaataaatcaattatggataaatggggagctaaataa

SEQ ID NO: 311073 - DNA, 186 bp, Proteus mirabilis
atgactcaacaacaagttgccgagtacggtgttgaaaaactgggtattcaatgcagtaaaggtacagaagccattgctcttgatgcttggatgcaagggcgtgtgcctgattctcaaaagaccagctcaacaatggactctgcagtgagcaataaatcaattatggataaatggggagctaaataa

SEQ ID NO: 311074 - DNA, 318 bp, Proteus mirabilis
atgaaagtcatacccttaaaagctattccaaaccaacgcttatccgtcaatttgaaaggtgttaattggacgctgacaataaaagccggtcgccatgcgatgtatctcgatattgaacgagaaagtgaggttatcgccgtaggcatgcgtgcggtggcaaacacacctatcattccttatcgctatctgactgatggtacaaatttagcgtttataacagaaaatgatgatctgccctggtatgaatcatttgatagaacccaatcgttaattatttggagtgaagatggacttacgacgaatacgggtggggattga

SEQ ID NO: 311075 - DNA, 318 bp, Proteus mirabilis
atgaaagtcatacctttaaaagctattccaaaccaacgcttatctgtcaatttagagggagttaattggatgctaacaataaaagccggtcgacatgcgatgtatctcgatattgaacgagaaagtaaggttattgccgtgggtatgcgcgcggtagcaaacacacctatcattccttatcgctacctgactgatggcacgaatttagcatttataacagaaaatgatgctctgccctggtatgaattatttgatagaacccaatcgttaattatttggagtgaagatggacttacgacgaatacgggtggggattga

SEQ ID NO: 311076 - DNA, 255 bp, Proteus mirabilis
gtgaccaaggcgattaataacggcacgatcctagcgggaaaaaccttaaccgatgtgcaaaaaattgcagtgacagacgcttctggtgatgatttagcgtggcacgatgtacaaaacaaaggttattggtacaacgctcaaattgttgaaaatacaggccccgctgatttgcctgagtacgtgatgaaatacgtattgatttacggtaaaggcgactgggttcgtaaagtcgaaggctctcacaacttagtgtaa

SEQ ID NO: 311077 - DNA, 213 bp, Proteus mirabilis; identical to SEQ ID NO: 311021

SEQ ID NO: 311078 - DNA, 237 bp, Proteus mirabilis
atgaaatattatctagaaatcagagaccctgacgatagctcttgtgttgctgactcgtttgaaagtaccgaaccgttcatgtcatttagtgttggtgacactataaatggccactctatcaaacaggaagagggtctatctcctcaccttattattactgaaattgagcattttatttttatagtaggtgacactacccaccataaagtaatgctatatacgaaagtaaaaaaataa

SEQ ID NO: 311079 - DNA, 468 bp, Proteus mirabilis
atgaagtattggaaattttacattgtcgttgtgatggtggggattgttgctggtggttgtgcgctgattaatgcacaaactaaaagaattaacatactgacagaaaagaacaaagaacttacagccacactcgaagagcaaaaggctatcaatactgattatcaagtacgtatagagcgactcaatcagcttgatataaggcacacacaggagcttgttaatgcaaagaataaaattgatcgcttgcgtgatcttagcgagcgtaatcctgagcgggtgtacatcaaagctgagtgtccaaaatcagaaggcgctaccacctccggcgtggctaatgcaaccaccgcccgacctactgacaccgctatccgaaattattggttactccgagatcgaattacagagtcagagcagatgataaaagggctacagggctatattagaatggagtgcttaaatactaaatag

SEQ ID NO: 311080 - DNA, 273 bp, Proteus mirabilis
atggaaacggcttcctcaaaaacagagacaacaagctatcccgcaactagtgctggcgctcgccgagcaggtatgacagaagaacaatggcgtgcagcaattaaatttgacggcaatgatgtgggctgggttatcatgagtatcggtatggctatcggtgcagggattgttttttttacctgtacaggttggcttaatgggattgtgggttttcttactttcctccgtgattggttaccccgcaatgtaccttttccaacgcctatttattaa

SEQ ID NO: 311081 - DNA, 144 bp, Proteus mirabilis
atgttaaaagaataccttcccccagcaatttttgttcgcacaatcccccttgataaacttgttcctgaagatgaccttattcataaagtcgataccattatggactttgaatttatttatgatgttgttgcttataccgagtga

SEQ ID NO: 311082 - DNA, 156 bp, Proteus mirabilis
atgaataataaatacaaagcggaactaattaacgggaaaccggttattttattaaatggaaatatgattgagaaaggatttacttcaattccagatgcacaagcaaatgctgataaattaaatcaagcatcaataaaaaataaccaagtcgaataa

SEQ ID NO: 311083 - DNA, 222 bp, Proteus mirabilis
gtgaaagtaatgacagataaagaattagttgatgtagcaataatattggctggtaagttttattcaatgatgggatattcacatagagagggttttaaatactgggaatcacctcacccacaagaaagactggtctttgatatggcttgtgaagcattggaaataattagaggctccaatgtaatggatgcgattgataatatggaagatgaaaatgaataa

SEQ ID NO: 311084 - DNA, 498 bp, Proteus mirabilis
atgtcctggttcgctaaaataatctgtacttttgcggtactccttgcggggtgttcggtcgcgcaaccatcggattataatgccggcagtatagacggatttaaccacaccgaatattcaatatccgattttaaaatcaatggagcaatggggtcaacgagcggaacagtgtgttgtgttatgatccctaaaaaatggacaccagagctaaaagcttatatttcatgggagacaatcaacacgaaaggactagcaatttcaccgggtttcaaggatgttgaaaaatataagcaatatcgtgaagaagtaaataaacgaagggaataccacgaagcagttgtccctattgcccaatatgataaatcctgtgggttacaagtgcattttttgccctgcaatgaagtgaaagtcgtctcatcatgctattggtatggtatgccagaatatcctatccaagcaccgaaaaatatgaaggagccagcggtatgtccgaaataa

SEQ ID NO: 311085 - DNA, 2319 bp, Proteus mirabilis
atgtccgaaataaaggtagatcccgtttttgcgccaccaagctttcctgatggtggacgattgaacttaacgctcgctcaactcgaggaaaattatcgcttgcgcaataaagaaactcgtgattaccaacagtctgacctcgataatagagggagttgcgtcaaatccttacatattagtttcttttttgatgggactaataataataaaaataacgataaatcatccactccccgtcatcccacaaatattaccaaactctttgatacgacatatgacgataaacaagagtattttgcatattatatgcccggcgttggtaccccatttcctgaaattagagagtttcaatacagttcggaaggcttaaaatatgcaactggtggtgaaaatcgtattaattgggctatcatgatgctctgtcgcacattacttaatgggctaaaaatcacggattatactgatagtgactatgcgcaatttgttaacgatatggccacaaattgggtcatgaataatggtcaggataaacgccaacgcgtcttagaaaaaatagcgacagaaaaacaattactggcgaagattgaaaccaccaaaccacgtattttggggttaaaattatttgtctatggtttttcacgtggtgcggctgaagcgcgggcatttatccattttttaagccaattgattgatacccgtcttgataaacagcgaccaaccttattcggtctaccgataagtatcgagtttttaggtatattagatacagtcccatctgttggtattgtccatttagtgtccgcctttagtggtcatatggattgggcgaacaacactcaacaactgccagatgaaaaacaatttcctaattttgtgaaatgttgtcgtcactttgttgccgctcatgagcaacggctatgttttcctatggattcagtacgcaggccgactgataaagaaagtaaaaccagtcattatcctaacaacacctttgaagtagtatatccgggtatgcattctgatattggtggcggatatccgataaatgaccaagggaaagctcgcaatagtgagggggaaattctttctcagattgttttgcatgatatgtatttagccgcttttatggcaggggctccgctaaaagttagcccagcgttagagaatactgtttatggcactaaattagttgaaaaaatggaaccagataatgaaaacgagtttttcattgaaccgttacttattgaacgctttaattcatggcgaaaaaccttcggtgtttcattatccacaccagcaacaaatgacgattacattccagaaaaacttactgataaacttgaagatgtgatgaaagatcagatggggtggatgaccgcgtggcgtattaatcgctatgctcaagggcgctatcgtcagcaaccattttatcctagtgccgaagagtgggatgaagaaacgattaaaaaaaatcagttagctcgcaaaaaggatgacattgacctcaaaaaagcgataaaacaatgggattatttaaaatcacagaatctacctattaatagccccccaccggaaggtaaaccgttatttgaaagcaagggggataaaacccaattagctgaagcagctgcggaatttaaagctgattaccataagcaaattcggacatttaatgataaagcattatatatgatgctagatattattcccaaatacacgatgtatttattaaattccgatgatgaagtggtggaatatacggagatgaaagcggctggagaaaaatatcgaaagcatttatttcaagaaaatggtgagccgtctacggataaagatcaccgcaatattgtattgttgtttgatgatcatgtacatgattcgcgagcatggtttatgcattttgaaaccggagcgcgtgagccttgggcgggatattttcgttatcggatgatttattttggtgagcaaactaataaagcgctgtcaccaattgctgttgcagggcaactcgttgggatagccactctggttggcggagtgatttataccgtcagacagcgcgacgcgttaggtgtggttggaggcattgcgggaacagttggtattttatcattagaatatcaagtggtagatatagcaacagggcttgcgatcccatttatgccggaagcggaaaagcttttgcaaccaaaaacggataattctgatgttgttgctgcaacccgtcaattagctcaacaaaatcaagagatggagactcagcgaaaattaatggaatttttaatgaatagcgggagtagggttttaacgataagctaa

SEQ ID NO: 311086 - DNA, 135 bp, Proteus mirabilis
atgtcaaggtatgtgttaatttctttaattgctttaatttctttaattgctttaattgttttaattggattagcatctgtatttggaaattgtgtcctatatcctgatgtattacctattgttggtgcgccataa

SEQ ID NO: 311087 - DNA, 2049 bp, Proteus mirabilis
atgcctgagttcaattctgatttaatcactttaaatacagtgattaatcagcgttatctctttaatattccgatttatcagcggctttatgtctggggaaaagagcaaattcataccctattggacgatattgtcaatgcctttcaggaacaaaaaaccacattttacctaggtggaaccttggtcatcgaacgaaaagccaagaccagcaatcagcaaaattatccggtatttgacttgattgatggtcaacaacgatttaccactttgtggctgattagcgtagtattacaaggagcattaaaagagtaccaacaactccaaaccgatgatggcatactaccacgtatcagttttgcaattcgcccaaaagtcagtgccttttttgacaaaatatgccaaggtaagcaagctagtttacctgaagccctacagttggaagatgctctgcaagatatacaatcctattttgataattactcaaacctaaataataaagctttagataaaacagcgttaattgagtttatcctcaataaagttcagttggttctgacaaaagtgccagctaataccgatttaaacaagctgtttgaggtaataaataatcgcggtgtgcaactacaacatcatgaaattctaaaagcccgtttactcgaaaaaattgagcaaaatgagcgcgaagcttacgcgcaaatttgggatgcctgtgccaatatgaacgaatatgttgagcgcaatttacgaaatacaacacgtctgaataccgtcgaactttatgaaaaattaattgaaactggctcgtcaaatagacaaagagaagctctcgctgacccacaatccgttatcgaggctttgcaagcattagagcgtaagagtcaatgtcaacctaccagtctattaacggctttagaaaattcaactgtctttacgaccgaatttaaccacaacaagcaaaatgaagagcaggatctgcctgatcgcgttagtagcatcatcactttttccatgttgttacagcacgtattgcgtatttatctagtcaaaaatactactgtcgctaataccgatatcagtaaaatatcagacaaagatttgctttcgatatttcaaatatattggttgaataatgttccagactcgaatcaggtaaaaggttttattcagctgctctggcaagtacgctatttattcgacaagaacgttattaagtgggttatggttgaagatgagcgagttcatgccattcgccgcttgtatattaacaaaagcagtacgcgtaatacagcttacttgcagcgtttatccagtgatgcagatcctgacttttccttgttacaaagtatgctttatcactcacaacagatgacaactcaatattggctaacgcctttattgaattttttaatcgataacgatacctctgacgcgtatctatatttacgccatttagataatcatttactgtgcagtgcctctgatgattccttaatcaaacgaacacatcgttatttaatcaacccttggcataaagaaactttaattcctgccagcaaaagtcttaaccagacatttaaaaatggtactcaatacccacactattggttctataagttggaatttatcctttatttaaaattaaaaaccgaaaacaaaggtgtaattgatgatttcaggataacgtctaaaaactcagttgaacatataacaccacaaaaccctgaaaaggcgagtgatcgtattacaggtgagctattacacaattttggcaatcttgctttggttacacgcagccttaattctgaaatgagtaataaaggctttagtattaaacaagccgagtttagagaacgctatttagggcgaggtatgtcattgaaactagaagatgtatatgcaaatacacaatggcaaaaaatacagatcgaacagcatcaaaataagatgattacggcctttcaaaagtatttagacgctgtggaagaatcatcaattaagtattgcttaaaaaatcgaatacatttcgaggtagtccccccattgatatga

SEQ ID NO: 311088 - DNA, 1590 bp, Proteus mirabilis
atgaggtgtattagggataataataaaaccaccgtatcgacgaccacatcagaggatgtctcggtacagatactcgattttgataaactaaccaccgagtgtgctccattaatattggatacctaccagcgcccctatgtctgggataaagataaagtcactcaattattgcaagatttcaccgattttatcgacaatgattcactagagagtcatcgtcaatactatttaggtacaatactgctacacgaaaagaatgccctcacgcaaaagcaatactgcgtaattgatggtcaacaacgtttgaccacattggcaatattgtactggctgcttcatgacagactgcctaaagggattcagtttacgtttagatctattcgttcattagctaatgtgcaacaagtcagaaacactatccgtaataagcttgatgaacatcctcaacttcaacagcattttatcaatctgttgaaacatctacgttttacggttatccgtgttaccagtgaagatcttgctttcacctttttcgatacgcagaataatcgtggtgtgccgttaggcagtaccgaccttctcaaagcttttcatttacgtgctattcagaatcatgatgaacaacaagtggagaatttacaaagcctatgcgctcgcaaatgggagctggtacaacaatgtggggaacgggttaagcaaaacaacaattacgattttgctccgaatctgtttcattactatttatggcgagctcgtaattggcgcggctccgatataaaagagctggaaagccgagatgatatgctcaatcattttggggagcacagcttacccgccgaggcggggcaagttgcccttttctccgcaagggctaatgtatggggaaaagcactgacactcactcaaaataatgatctattactgacgccagcaatacaatgtacaagcccaaatgcagtacacctaccgttctctctgcgtcaacctatcagccgtggagttggcttttttctcttcaccgaaaaatacgctcagatgatacaaaacctactattttcaaaaagtagtgatgtagaaataaatgccatgcaggacttttatcgggtggttgtgagcaccttatcggcctatttacagagtctgtttcaattggcactactggcttatgttgatcgcttgggcacccacggcctacttcgattctcgttctatttagatcatcgattgggggctcttcgtttatcacaagccgatattcgccgagaaacaccaatcaaatttttacgcgatgccaaacaaaacttattggatgtgattgctcaagcttatgtcggcgatgaggtgattaatttcctacaggctggcaatgtggaaaaaatatatagtcaaaatgaaaaatttcaaaaagatattagtaaattaggttcaaacgtacaagagagatatgtaaaggctttggccaaatattatgggttatcaaaactatctgctaaaacgttcaacgttatggagatgaaagtaaactcaatgcttcaatgtgcaccaaatgccaagaaaaatttgcaaatagggaggctattgcatgcctga

SEQ ID NO: 311089 - DNA, 417 bp, Proteus mirabilis; identical to SEQ ID NO: 303150

SEQ ID NO: 311090 - DNA, 654 bp, Proteus mirabilis
atggacacaaagcgcgtgggatatactgttgttgatctatcccaatggggacgaaaagaacactttgaagcatttcagtcttttgctcaatgcacctttagccagaccgttcaactggatattacttcattattaaaaaccgtaaagcaaaatgcgtacaaattctatccgacatttatatacatcattagccgattggtaaataaacatgcagaattccgcatggcaatgaaagacggggaattagtgatatgggatagtgttaaccctgggtacactatctttcatgaacagaccgaaacattttcatctttatggagttactaccacaaagatatcaatcattttttgaaaacttattcagaagatatagcacaatacggtgacgatctagcctattttccaaaagaatttatcgaaaatatgttttttgtgtcagcaaatccttgggtaagtttcaccagttttaacttgaatgtggcgaatataaacaatttctttgcccctgtatttacaataggtaaatattatacgcaaggagataaagttctgatgccactagcaattcaagtgcatcatgccgtatgtgatggcttccatgtaggcagattactcaatgaaatacagcaatactgcgatgagggatgtaaataa

SEQ ID NO: 311091 - DNA, 159 bp, Proteus mirabilis
atgacgaattcgatgggttctaaatatccagctagggctgatttagcaaaagccaacccttacactgagcgcgataaattgtcagaagaagagcgtgaagaaagaagtcggaagtttaatgattctctatttttcggtaatgggtatttcaaactttaa

SEQ ID NO: 311092 - DNA, 2535 bp, Proteus mirabilis; identical to SEQ ID NO: 305209

SEQ ID NO: 311093 - DNA, 645 bp, Proteus mirabilis
atgactaaaggtcttatttttgatctggatggcgtaattgttgataccgccaattaccactatattgcgtggaaaaaactatctaatgaaataggaattgattttgacaaagagtttaaccatttattaaaaggaataagccgaattgagtcattagagcttattttatctcatggtaataaaagtgatgtttattctgcggatgaaaaaaaatcattcacagaaacaaaaaataaatattatcttgagttattaaataatattactccaaaagatattttaccgggtgttttagatctaatagaacaagcaaacaataatcacattccttgcgctattgcatcagcttcagaaaatgccccaaccatattagaaaaattaggcattaagcattattttaaggcaattgttgatcctaaaacactcaaaaaaggcaagcccgatcctgaaatatttttgcgtgcggctgagtttattcacattccaccacatttatgtatcggatttgaagactcgattgctggaatacaatcgattaaacaagcgggcatgtatgcaattggcgttactgctgacggccccttaccagaagcagatttagctgttcactcattaactgaaatagatattcattcacttttttaa

SEQ ID NO: 311094 - DNA, 2400 bp, Proteus mirabilis
atggttacagttgccaataactttgcttggtcaattgaatattcaggcttagaaacaggaaaagatgaatattgccaagagtctctcttaactacggccaatggttatattgggttaagaggaactttgcccgaaatgactataagtgatgagcactaccctgctacctatattgctggcctatataatcaagcaagttcacaaatagaaaaccatcaggtgattaatgaagattttgttaatgcacctaatggacaatttatttctcttaaaattggtaagggagaatatcttcatccaaagcaactgataacacaccatttaacacgtcatttagatttgaaaacgggtgtattcactagccaatggcgtgtagaaacccctgaaggacagcaacttgatattcattgtacaaaatttgccaatatggctgatatgtcacattacgccattttatatacctttaaaccattaaatttctcaggtgagataacggttataactcgcctagaaggaaatacttataattacggtgtacaacgctaccgtagccttaatccccatcattatcatgtgctacaaactggagcgaataagcaacacgcatttatattagctcaaacagatcagtcaaaaatagggatcggattatcgtcaacaatcaggggggatttctttgcaaatgaagatattgtttgtcatgtttcagatacgcttgttgaacaaaccatcaccttcaacgctcaacaaaataccacctatcaacttgaaaaatgtgttgctgtaacaacctctacggcttacccagactcatggcaagatgtgattaattgggaacaacaacctttacacagccaattgataaatagccaaaaagcgtggaaaacgttatgggatagtgccgatatctcgatttctggcgatctgatgacccaaaaattactacgcttacataccttccatttactgtcatccgcatcaccatttagcaatcagcaacatcaattagatgtttcagtcaccgcccgagggttacacggggaagcctatcgaggccatattttctgggatgagatctttattctgccattttatattatgcacttccctgaaaccgcacgccaactattactatatcgttaccacaggctacctgctgcgcgtcttgcggcacgagcagaaggatttcaaggtgctatgttcccttggcaatcagggcatgatggtagtgagcaaacccagacattgcatttaaaccccttatcagggcaatgggatgccgaccatagttgtcgtcaacgtcatgtctcattagcgattgcctataatgtgtggctatattggctaaatactcatgatcaccaatttatggaacagtatggacttgaactactcaatgacattaccttgttctggttagaccaatgtcagtgggatgaaggcgatcaacgttttcatattaatggagttatggggccggatgaatttcatgagaaatacgcagactcacttgaaggtggcttaaaagataacgcatacactaatttaatggtggtttggttgtttaatcaaatagagatgttcataaacaatgatcgtttttctaaaaaattacaacagctaaacagccaatctagcgttttcaataaaatacaagaagttaaaaatcgtattgctatcaatattgatgctcatgaaattattgaacagttctcaggttattttcaattaaaagatctggattgggaaagctatcgaaaaaaatacggcaatatctatcgtatggatagaattttgcgtaaagaaaataaatctgccgatgattacaaagttgctaaacaagcagataccctgatgttatttaataacttagataagcaaaccgtacattccctaattacctctcttggttattcagtttctaagcactttgctgaaaaaaatctacattactatttagaaagaacctctcatggttccacactgtcacgcattgtccatgcttatctcgcagaacaaatacagttacatgatttgtcatggcaactttatcaagatgctctttattcagattataatgatattcaaggtggaacaactgccgaaggtattcatactggtgtcatggcggcaacattaaataccaccatcatggcttatgccggtgttgatattcgtcaggatatgttgaccatcaccccttcactccctcaacaatggcaaaaactaagctttaaattattgcatcgctctactttatatcaaattaatctcactcataaagaaattagtattttaagtgataagcccagtactattttaattaaccatcaaacgcataagctaaccgccaatacgttattagtattaaatttaaatggagacacgcaaaatgactaa

SEQ ID NO: 311095 - DNA, 522 bp, Proteus mirabilis
atgtccgcaataagaatgccctggttcgctaaaataacctgtacttttgcggtactccttgcggggtgttcggtcgcgcaaccatcagattataatgccggcaataccacagggattaaccacaccgaatatgaaatatctgattttaaaatcaatggagcgggtggttcaattggggggtatacctgttgtgttatgatccctaaaaaatggacgccggagctaaaagcttatgtttcatgggattctttatcccctaaagcagttgaaaatctaggtattatacctaattttaatgatgaagataattatgataaatggcgaattaaattaaaaaatagtttagagcatcatgaagcaattgtccccatcgcccaatatgataaatcctgtgggttacaagtgcattttctgccctgcaatgaagtgaaagtcgtctcatcctgctttacctacggtatgccagaatatcctatccaagcgccgaaaaacatgaaggagccagcggtatgtccgaagtaa

SEQ ID NO: 311096 - DNA, 513 bp, Proteus mirabilis
atgtccggaataataatgccctggttcgctaaaataacctgtacttttgcggtactccttgcggggtgttcggtcgcgcaaccatcggattataatgccggcaataccacagggattaaccacaccgaatatgaaatatctgattttaaaatcaatggagcgggtggttcagttggggggtatacctgttgtgttatgatccctaaaaaatggacgccagagttaaaagcttatatatcatgggatacagtcgatgcaaaaaaagtttcaaaatttcctgggtttgccgatcaagaaaaatataaacaatgggaaatagaagtagatgcaaatactcgttcacacgaagcagttgtccctatcgccgaatatgataaatcctgtgggttacaagtgcattttctgccctgtaataaagtgaaagttgtttcatcttgttttacctacggtatgccagaatatcctatccaagcgccgaaaaacatgaaggagccagcggtatgtccgcaataa

SEQ ID NO: 311097 - DNA, 180 bp, Proteus mirabilis
atgcaaggtggctataatatccatgcattaattgaagcgctagataacgaactgcgctttcgagctttttatgtccaagtaatagctgagttacacgaaggttctttgttttctagtagtaaattacaacctctaagtttactatctaaagctaatttccctagatatgagatattttaa

SEQ ID NO: 311098 - DNA, 243 bp, Proteus mirabilis
atgagtaaattattccgccatatagtactatatgcatcttgttttattgaaaccgtatgggcagggatgataagtgtggtagtgggtctgatgactggcggtgtccaaaatactaaatcacttcatacatattcctttattttggtctttcgtgctttttgtactaagcatgatcgtttttctcattttttaatacacaacgtaattagcaacgttttctactggcacattgcagtctattag

SEQ ID NO: 311099 - DNA, 579 bp, Proteus mirabilis
atgtttaagaaggcgttattgagtttaactgcaggtgcattattatttaatgctagttcagcattagcggctgattatcaaattgataaacaagggcagcatgcttttgtgcaatttcgtatccaacacttaggttatagctggttatacggcacatttaaagattttgatggaagcttcacttacgataaagaagatccttcaaaagataaagtcgatgttgtgattaaaacgggtagtttagatactaatcacgctgaacgtgacaaacacttacgtagtgctgatttctttaacgtcagtaaatatcctgaagctaagtttgtctcaaccaaagtgactcgtgatggtgaaaattatacggtgacgggtgatttaacacttaatggcgttacaaaaccaatttcactaaatgcaaaattaattggtgaaggtactgatccgtggaaagggtatcgcgctggttttgaagcaacaggtaaagttaatctgaaagagtttaactttaaatcagatttaggaccaaaatcgcaagaagcagaattaatcatctctgttgaaggtgtgaaaaaaaattaa

SEQ ID NO: 311100 - DNA, 420 bp, Proteus mirabilis
atgcgtaatgaagttaaaaatgagttaccgagtattgttatgaagcatatttctacatttagcggtgataagggcgcgttaactcagtgtgaattatcgtttggtatttttagtaataaaattattcctgttgaaaatttgcgagtgaaaattcaaatgactgcggagaataactcgaatgatgagccttttatactagagcatatagttgcctttcctccttttggatttaatagtttaaataaagaggaaaatggtggaagaggttatgagaattctaaattagtaccaatctatgatgaaaagggttgtaaaactcacaaggctaaaacaaaaattctgtctgcaacagcattaattaatggtgaatctgttgatttattagagaagaacttaatttcattcagcgataaaaaataa

SEQ ID NO: 311101 - DNA, 1125 bp, Proteus mirabilis
atgaattcagaaagcccaattaagcatgtccgctgggcaatcatgtgttcggtaatcggatttgcattaacaggctgtgccgacacgccttatcgtcctgcaccgataacctctgtcaatgatagttcgtcaaatcgtaccgtttctacatcacctgttacaactaacagtaatgcaggagtggcaacacctattgaaagaggttcaactccgttacaaacaacgcctcctccttctattagagtgaataacacaaccgcgcagcctcaaagccagcctcgtacgcaaaatgttacccctcaaaatgtcaatacggatggtagcggacgcattgtgtataaccgtaattatgacaatatccctaaagggaattacagcggtaacacttatacggttaaacgtggcgatacaatgttttatattgcgtggatcacggatagtgatgtaaaagatttggcctcaatgaacaatattccagagccatatagcttaaatgttggacaagtacttaagattggtaaccgtcaagttaataccggtaccaataccaatgtaaatacttcggtaattaataaaccaagtagtgaaggtgttcagacagcacaaactaagccgtcaaataataatagctcaatgggaccgttgatcacgaaaccaacaacaacgacaccgccaaagacaacgacttcgacaccaacaacttcggcaacaaccagtaataacacaacggcaacctctaaacctgcagccgcaacaggtaaatgggtatggccagcacaaggtaaaattattgagagctactcaaatgcgcctggtggtaataaaggtattgatattagtggtacacgaggttcacccattgtggcaacagccgcaggtaaagtggtttatgcagggagcgcattacgaggttatggtaatttagttatcattaaacataatgatgaatatctcagtgcttatgctcataacgatacaatcttggtacgtgaacagcaaaatgtaaatgcaggacagcaaattgcgaccatgggaagtactggtactagttctgttcgattacactttgagatccgttataaagaaaaatcacttaacccaatgagctatttacctaaaagataa

SEQ ID NO: 311102 - DNA, 1458 bp, Proteus mirabilis; identical to SEQ ID NO: 310144

SEQ ID NO: 311103 - DNA, 294 bp, Proteus mirabilis
atgcgtttaaaatcaattaatgcttttgtgttatccttgttagtaagtccattttatgtttgcgcagatttaaatatggacttcttacatggaggagttcaactgcaagctgctggtgtatttgatgaaaataccaattatcctgctgggcattatattgttgaggttattttcaatcgaaaattaattagtaaaaaagaattaattatctcaccagaagataatgaaaatttatgtttaaaaaaagattggattaatgagttatcgcttccaataaaattaaatttattttaa

SEQ ID NO: 311104 - DNA, 276 bp, Proteus mirabilis; identical to SEQ ID NO: 294433

SEQ ID NO: 311105 - DNA, 693 bp, Proteus mirabilis; identical to SEQ ID NO: 301424

SEQ ID NO: 311106 - DNA, 1128 bp, Proteus mirabilis; identical to SEQ ID NO: 304932

SEQ ID NO: 311107 - DNA, 2562 bp, Proteus mirabilis
atgaatagtagacgccgtcgggttgtaataaccggaatggggattttatcatctttagctaaagatgtgcctcaatttaaacaggttctttttaatagacaatgtaatattaagcccagccaacgttatttaaaatggtttaaaaatgccaatgcatctgagattgagatggcattagattattcagatataccgcagcatatcgctcgatcactagataatgcggcattatgggcatatcgagtctgcaatgaggcattacaacaagcaaacttaatagataatcagtctattttagataataccgcgatgatcgtgggcgtctcttcagcaggaacggaagcctttctgccattatttgaacaacatattgatgatttttcgataaaaaaagccattttatccggtggattttcatcatgttgttcgagtgtatcaagtctacttggcttacgtggtggccttgaattagtggcgacggcctgtaccgcaagccctaacgcgataggtatggggtatgattatatccaaaatggcaaaaatcctgttgtgctagcggtcggaacagaacccatttatcttcctacctttgcgggtttttatgcccttaatgtgatgaaaacaacaccaacttccccattttcaggtactcctggtatgtctattggtgaaggtgctggggcgttagtattagaagattatcaacatgcggttgaacgtggtgcgacaatatatggtgaaattgtctcttacgcgacatcttgtgatgcttaccatgaaactagccctgatcctcgaggaaatggtgcagtgcaagttatgtataaagcactggataatgcgggtattactcctaatgatattgattatataaatgtgcatggtacaggtactgaagcaaatgatcgcattgaaaccatgtcgatgaaaaaagtatttcctaatatttatcatatcccattaagttcaacaaaatcttatgttggtcataatattggtgctgcgggtattgttgaaatcatcgcgtgttttatttgtttagccgaagataaacttccccctacattaaatttcactcagccaaggcatagctgtgatttaaattatgtaccgaatttctttcaagataaaaaagtaaaattttttatgaagaataattatgcttttggaggaaataactgctctattatcgcaagcccttatattacagataaaacaccgacggaatataaagctaaaaaagtggttattaccggggtgggggcgattacgtctattggcaataatataatggagataataacagcgattttggcaggagataaaacaggtacattaaaacctattgtatttgcgagtgatgtgcagaaagatatcgacaacttgatgtctgttgtcataaaagataatgattttgagcaatcgttaggacatccttattttgatctcgacattgatcatcgcttaaaaaataacgcctgttatcatgctatcactgatgttaatccgaaaaaaacattacgttattatgatccaagaaaagctattcctagcgggacttatgctttattcgctttaaatgaagcacttgctaatgctggacgcaaaattaaacgtgatggtgataacttaggttttattgttggaatgtcaaaagggccacaaagtaccgttaatcgttatttacaaagtttaattcctgatccgcaaaaagtaagaacatcagaatttcctggtactttaatgaatgcagtaccgacattttgtgccatcacagagggaataaaaggttataccacgacattggcaacaggggttaatgctgcattaggagcgttaacttatggttatgaaattatcaggcaagatctacaacctcaggtaattgtcggaggggcagatgagcacttcagttctatttcactctattttcaagcgatgagtaagaaaattaatctgaccaagaatgcgacagattatcaggtttattctaatgcaagtgccggctatatccccggagaaggggcagggatgttatttcttgaagataaagagtatgccaagcaacgaggcgctaaaatttatgctgaaattattggctacggtaaagcgaatgataatacttttttagtagacgaaaatattactgatagagtggccgccttatgtaaggctatccaacaagcattatctgaggcgcaactcagttgccaagatattgatattatctgtggtaccagtgatggtaataaagagaatgatgaagttgaaatccgtgcgattcggcaactattttatcaagcggcaaatcatataccagtagttaattacaatgccttttttggtttagttgaatcatgcgctgggatattggcgatctctttagtgattcatatgatgcaaagcaacacgataatacctattccttatacaaaaagttttatagctgatgatattcattttgttacccaaccgattaataagcagatagaaactgctttagttcttggttcatcagaaggatgtaaccactatgcaattatcatcaggaaaccgttatga

SEQ ID NO: 311108 - DNA, 219 bp, Proteus mirabilis; identical to SEQ ID NO: 298329

SEQ ID NO: 311109 - DNA, 1101 bp, Proteus mirabilis; identical to SEQ ID NO: 306368

SEQ ID NO: 311110 - DNA, 636 bp, Proteus mirabilis
atgatgaaatcaaaaataaaacaaatgattgctcactactttaaaactaaaaaagagcctaaaaactatgatttttaccctaatcatatcgccgtacttgagaaaccgccgacaccttatagtcgtattattgcaataataatttcattaagtgtgattatatttttactctgggcatatataggtaaattagatgtgctttcttcagctataggaaaattagtggtttcaggttattcgcaacaaattcaaatttatgaacatagtcgcttaagcgccattcatgtaaaaaatggccaacaagttaccaaaggagaagcgttattaacacttgatattttaggtgttgatgaggagattaataatctaaaaaataagatagaaaatctattattactaaaaattcgttatcaagcattaggtcaaaacacccgacctgatgcaattgatgattttaatttactaaataaagaaaaaaaagaagcgattctactaagttatcaaaaagaaaaggatgaatttgatgctagtattaatcatattaattctgaaatagaaaccaacaataaaaacaagcttcttactcaccaagaaatcaattcattaaatgaattaaaagaaaatcatcagaactga

SEQ ID NO: 311111 - DNA, 204 bp, Proteus mirabilis; identical to SEQ ID NO: 300215

SEQ ID NO: 311112 - DNA, 348 bp, Proteus mirabilis
atggatctcactgctttgtgtccgggtatacgcggtgtccgcctgctgaaggcgcgcggcttcatcattcgtcagggcgcgtcgcagggcgctgcgggcggtctccgtcaccgtccggctgtccgccgcaccgttcggatcagcctgtctgccggaccagatggccatcatgtcgctgtttcccgccggcagcagctcctctttggaggtggcacagccggccagcaacaacaccagtgcgcacagcactctgcttttcatcacatatttcatcattctcatgatatgacgcctcccgcgcccttcaggatcgccccccggcaggtcagccgggcaaactcaccgtga

SEQ ID NO: 311113 - DNA, 486 bp, Proteus mirabilis; identical to SEQ ID NO: 103775

SEQ ID NO: 311114 - DNA, 1275 bp, Proteus mirabilis
atgaaaacggtacgtgaccgtcaggcggaattgatcgcccagaatgagaaattgctggaagagaatgcgcagctgcgtaaccggcagcagaatgtgtcggggcagatccagtctgcggtggcttccgtccgtcaggaagcggagagtcagcagcgtgccctgcaacaggagcagcagacactgatgcggcgtctggatagcctgggggaaacgctgacagcatcaggtggtcagccggctcagggcagcggacaaggcgatattccgctgggactggggctggataccgggggcagcggactgacggtgaaagacgggttgctgtgggctgagccgcaggatgcacaaccggctgaaccggggcggatggtgaacggacaaccggctaaaccggcgtttccgacctcttttctggaggataacgccattacccgtcagaaagcggaactggaccgggtggccaaaaatcagcgcacgctctccggtacagtggacggtgaggcccataccgaaccggcgtacacgataccggagaatgccaccctggtgggcagccaggcgatgacggcgttgctggggcgggtgcccattgacggtaaagtgaccgatccgtatccgttcaaggtggtggtgggaaaagacaacctcacggcgaacggcattgagttaccggatgtggaaggggcggtgatcagcggctcggccaccggtgactggacattgtcctgtgtgcgcggggatatcacctcgatcacctttgtttttacggacggcacgatccgcacggtgccgaagccggctgaccggacggacggcggcagtcaggccggcagcggacagaatgcccgcaataacggcggatcgctcggctggatctcggatgagagcgggattccgtgtatcagcggtgaacgtaaaaccaatgccggcacctatctgccgaccctgtttgccctgacggcagcggcctcggccggggatgcgatgtcgcagagtcagtataccgcgcagaacaacgggtacggtatcacctcctcgctctccggggatgcggggaaagcggcgctgggcagtgccatcggcggcgggtttaaggatgtggcggactgggtgaaatcccgctacgggcagacctttgatgcggtgtatgtgccgccggggcagaaagtcgcggtgcatatcagccgtcagatcccggtggattatgaatcgcagggacgccgggtgaattacggtttttcactgacagagggtgaggaaggaggtctggagtga

SEQ ID NO: 311115 - DNA, 342 bp, Proteus mirabilis; identical to SEQ ID NO: 27125

SEQ ID NO: 311116 - DNA, 873 bp, Proteus mirabilis; identical to SEQ ID NO: 277180

SEQ ID NO: 311117 - DNA, 555 bp, Proteus mirabilis; identical to SEQ ID NO: 277197

SEQ ID NO: 311118 - DNA, 198 bp, Proteus mirabilis; identical to SEQ ID NO: 27134

SEQ ID NO: 311119 - DNA, 639 bp, Proteus mirabilis
atgcgtaaaaattccctgctcatgcttgtcctgctgctgttttccgtgccgttaccggcgcgggaggtgccgccgggctaccgtgaggtggcccggcaggagaatgtaccggcagaagcgctgtattccctggcactgacggagtcatcctggacattaccggcacatcacccgcaggccggtgaaatccatccctggccgtggacgctgaatgtggccggtaaaggataccgttatccgacacggcaggccgcctggcaggccttacaggcatttttacagacgacatcccccaagcgcatcgatgtgggcattgcacaggtcaatttaggctggaacgggcatcacttccgttccgcctgggaggcctttgatccttataccaatttgcatgtggccgcccgcatcctgcgccgctgttatgaggcgtcaccgggtagttggatccgtgccgccggctgttatcaccatccggcgggcggtcagcccgcagtacgctataaaaatagtgtccggcgtcagctggcgacactgacgggcggtacacaacccgttcccgctcatttaccggcagtcagtacagatcgggctgtatcgtttgtgtggatagaaccggagaacaaaaccgatgcgaaataa

SEQ ID NO: 311120 - DNA, 639 bp, Proteus mirabilis
atgcgtaaaaattccctgctcatgcttgtcctgctgctgttttccgtgccgttaccggcgcgggaggtgccgccgggctaccgtgaggtggcccggcaggagaatgtaccggcagaagcgctgtattccctggcactgacggagtcatcctggacattaccggcacatcacccgcaggccggtgaaatccatccctggccgtggacgctgaatgtggccggtaaaggataccgttatccgacacggcaggccgcctggcaggccttacaggcatttttacagacgacatcccccaagcgcatcgatgtgggcattgcacaggtcaatttaggctggaacgggcatcacttccgttccacctgggaggcctttgatccttataccaatttgcatgtggccgcccgcatcctgcgccgctgttatgaggcgtcaccgggtagttggatccgtgccgccggctgttatcaccatccggcgggcggtcagcccgcagtacgctataaaaatagtgtccggcgtcagctggcgacactgacgggcggtacacaacccgttcccgctcatttaccggcagtcagtacagatcgggctgtatcgtttgtgtggatagaaccggagaacaaaaccgatgcgaaataa

SEQ ID NO: 311121 - DNA, 372 bp, Proteus mirabilis
gtgtttaaaaattcaccggtgtttccagtggaaacagtgttcaaaaatcatccagcgtttccactggaaacactgtttgaaaattcaccgacacgtccggaaaacaatgtgctcactgcactcaaccccagggaggatctgacggattttctttttccggtacacgcgattctttcccgtgacagtgacgatgacggcgggcaggacggttttttttccccaggagtctcatcacaacaaagaacacgcaccacatcagcacggccaaccagaatgccggggagtcaaccccatctgaaggccatatcggcggtaacattacttcacctgctgggtcaacccggtttccgtgatcagaactgggtaatgtga

SEQ ID NO: 311122 - DNA, 639 bp, Proteus mirabilis
atgcgtaaaaattccctgctcatgcttgtcctgctgctgttttccgtgccgttaccggcgcgggaggtgccgccgggctaccgtgaggtggcccggcaggagaatgtaccggcagaagcgctgtattccctggcactgacggagtcatcctggacattaccggcacatcacccgcaggccggtgaaatccatccctggccgtggacgctgaatgtggccggtaaaggataccgttatccgacacggcaggccgcctggcaggccttacaggcatttttacagacgacatcccccaagcgcatcgatgtgggcattgcacaggtcaatttaggctggaacgggcatcacttccgttccacctgggaggcctttgatccttataccaatctgcatgtggcagcccgtattctgaagcactgttatgacgcgtcaccgggcagctggctccgtgctgccggctgttatcaccatccggcgggcggtcagcccgccacccgttataaaggtatcgtccggcgtcagctggcaacactgacgggcggtacacaacccgttcccgctcatttaccggcagtcagtacagatcgggctgtatcgtttgtgtggatagaaccggagaacaaaaccgatgcgaaataa

SEQ ID NO: 311123 - DNA, 372 bp, Proteus mirabilis; identical to SEQ ID NO: 311121

SEQ ID NO: 311124 - DNA, 372 bp, Proteus mirabilis; identical to SEQ ID NO: 311121

SEQ ID NO: 311125 - DNA, 639 bp, Proteus mirabilis
atgcgtaaaaattccctgctcatgcttgtcctgctgctgttttccgtgccgttaccggcgcgggaggtgccgccgggctaccgtgaggtggcccggcaggagaatgtaccggcagaagcgctgtattccctggcactgacggagtcatcctggacattaccggcacatcacccgcaggccggtgaaatccatccctggccgtggacgctgaatgtggccggtaaaggataccgttatccgacacggcaggccgcctggcaggccttacaggcatttttacagacgacatcccccaagcgcatcgatgtgggcattgcacaggtcaatttaggctggaacgggcatcacttccgttccacctgggaggcctttgatccttataccaatctgcatgtggcagcccgtattctgaagcactgttatgacgcgtcaccgggcagctggctccgtgctgccggctgttatcaccatccggcgggcggtcagcccgcagtacgctataaaaatagtgtccggcgtcagctggcgacactgacgggcggtacacaacccgttcccgctcatttaccggcagtcagtacagatcgggctgtatcgtttgtgtggatagaaccggagaacaaaaccgatgcgaaataa

SEQ ID NO: 311126 - DNA, 240 bp, Proteus mirabilis; identical to SEQ ID NO: 103781

SEQ ID NO: 311127 - DNA, 369 bp, Proteus mirabilis
atggatatgaaatcattttggggacgtggtgtccgtcgtatgggggcgtcagtgatgacgttatggacgttattcagtctgatgccggcgtatgccgcgctgccgcaggtggagcccccctcttccggcggtggtggcgggctgatggatacgattaaagggtatctcaatgacggcattgtgattggcgggctggttgtggcggcggtggcttttatagtggtggccattgcggcagtttccaccttcaatgaagtccgggacgaaaaagccggctggggtaaattcggcgcgattgttgtggtcggtgtggtcctgattgtggcggtcgtctggctggccggaaaatctgccaccattattttttaa

SEQ ID NO: 311128 - DNA, 417 bp, Proteus mirabilis; identical to SEQ ID NO: 277206

SEQ ID NO: 311129 - DNA, 657 bp, Proteus mirabilis; identical to SEQ ID NO: 287490

SEQ ID NO: 311130 - DNA, 975 bp, Proteus mirabilis
atgacccgacaatcatatcgccggcgtctggcaggcgtactgttactggggtgttcactggtgccggtggcggaagccggactgaataccgccaccctggtcgcgtctgcggcctcgccgtcgtgtatcagctggcgtatcagcgggatttgttactggctgaaatgcggctggggcggctgccgtatccgcacgtcagtccgggtgtcgcattttattccggaggcggtggtctcggcctaccatgccccgggcgaaaacccgtggcaggaaatgtcactggtcagcggggcggccggcgggattgaaaatgccgtgaccggcgtgctgagcggcgtgtctgccggcggcggaaacagtgaacagaagtttgaggcaaaacgtaaaaccgatctgcactttttttatgcggatgccatcggtcatccggcaaccacccttatcggcggcagtatcccggggtattcctgtgacagcgcggccacaccgctgtttccttattacctgagcacgctcgacagtgtgccgtggcgactgggtgtgccggaaatggcgtatccggaagcgataattcccgggaaacgggaaatcggggggcagagccggggcaacatgtggggaaatctctatccgcgcagcggttttgtcaaccagcaggacggggataaagcggcggctgtggtggcgcagcgcgtggcagatattatgacccgcaccgggcaggcgcatacctatgtgcccctgaaaggcaaccgccgggatggctattggccgccggacgcggtgacggagaataccgggacaaaaaaccataaatggcagcgcctgtcgccggggctgaaaaacagctgtgcggtgtttccggatgagggcggagcacaggcacaggacggtaattatgcctgggcattgtggcagccgtacagctgctgcaagcgcatggggcaaaaatttttgtacagcacaacgttttaa

SEQ ID NO: 311131 - DNA, 975 bp, Proteus mirabilis
atgacccgacaatcatatcgccggcgtctggcaggcgtactgttactggggtgttcactggtgccggtggcggaagccggactgaataccgccaccctggtcgcgtctgcggcctcgccgtcgtgtatcagctggcgtatcagcgggatttgttactggctgaaatgcggctggggcggctgccgtatccgcacgtcagtccgggtgtcgcattttattccggaggcggtggtctcggcctaccatgccccgggtgaaaacccgtggcgggaaatgtcactggtcagcggggcggccggcgggattgaaaatgccgtgaccggcgtgctgagcggcgtgtctgccgggggcggaaacagtgaacagaagtttgaggcaaaacgtaaaaccgccctgcactttttttatgcggatgctatcggtcatccggcaaccacccttatcggcggcagtattccggggtattcctgtgacagcgcagccacaccgctgtttccttattacctgagcacgctcgacagtgtgccgtggcggctcggtgtgccggaaatggcgtatccggaagcgataattcccgggaaacgggaaatcggggggcagagccggggcaacatgtggggaaatctctatccgcgcagcggttttgtcaaccagcaggacggggataaagcggcggctgtggtggcgcagcgcgtggcagatattatgacccgcaccgggcaggcgcatacctatgtgcccctgaaaggcaaccgccgggatggctattggccgccggacgcggtgacggagaataccgggacaaaaaaccataaatggcagcgcctgtcgccggggctgaaaaacagctgtgcggtgtttccggatgagggcggagcacaggcacaggacggtaattatgcctgggcattgtggcagccgtacagctgctgcaagcgcatggggcaaaaatttttgtacagcacaacgttttaa

SEQ ID NO: 311132 - DNA, 204 bp, Proteus mirabilis
atgacaactgaacccgtaatcataccgccagccaatttcactgatgcagatgttgttgattggatgaaagagaaactatcgtctatcaaagtcctcggtgagttaaacgcaagacgtgaagagctggtggataaactagcaaaactggatgctgaaatagcagagtacgcaaataaaagtgctattcaaacacaaaataaatga

SEQ ID NO: 311133 - DNA, 1044 bp, Proteus mirabilis; identical to SEQ ID NO: 298331

SEQ ID NO: 311134 - DNA, 1182 bp, Proteus mirabilis
atgatttataagtttctattagcaataaaaaacaaaccagaacttatcgtactatcagtgatgatactggttataatgatgttaattatacctttgccaacttatttggtcgactttcttataggtttaaatattactattgcaattcttatctttatgagttcattttatattaaacgtataccaactcttttccggcttgctttatcaataagcactagccgtcttatattattagatgccgatgcaggagagatcattacctcatttggtgagtttgtcattggtgaaaatcttgttgtaggttttgttgtcttttccattgtgaccatagtgcaatttctcgtgattactaaaggatctgaacgagtagcggaggtcgcggctcgtttttctttggatggtatgcctggaaaacaaatgagtattgatgctgatttaaaatcagggatcattacgaatgaagaagttcagatcagaaggaaagagttaggacaagagagtcaattatatggttcattcgatggtgccatgaaatttataaaaggggatgcgatagccggcattgtcattatcttcgtgaacttaattggtggcatatcggtaggtatggctcaaatggggttatctattacagaggcattacatacatatacacttttaacgataggggatggattagttgcacaaattcctgctttacttatctctattagtgccggatttattgtaacacgtgtcggtggtgaaaataataatttgggctatagcattatgaatgagctattggcacaagattttgctttgcttgttacagctattttggcttttggtatcggttttttaccaggatttcccacacctgtttttcttattttatctgtaatgcttggcgtttacttttttaaaataaaatggaagagtagtaaaaaagaatataaaacagaagatgaaaaagataatcataatgctactaatgccgacagtaaaaaaggacttatgtcaaatttattttctggtaaacatggggaagaagtagataatagtttattaacagaaaatattaccttatcacaagctgaaactttgccattaatcatcactcttttaaaagctcaggggcactcttttctaatttatcaaggatatcttttgtttcttgaataccaagaaactctgtaa

SEQ ID NO: 311135 - DNA, 246 bp, Proteus mirabilis
ttgctctctttaggctttaacttaataagtattgaagatgataataaaacccattattggattgagcgtgatgatgaatctaaattagctccattaggttacaaagcggaacgttcagaaagttacttttatagaaaattctctgatctgatcacattaaatattacagagtttcttggtattcaagaaacaaaagatatccttgataaattagaaaagagtgcccctgagcttttaaaagagtga

SEQ ID NO: 311136 - DNA, 348 bp, Proteus mirabilis; identical to SEQ ID NO: 311112

SEQ ID NO: 311137 - DNA, 486 bp, Proteus mirabilis
gtgacgtattttgcgaagccgggggtgctggctgtgacgccggtgacgtttccgctggtgtttgtgttcagtgccggacaggccggttgtactggaagtcatttttgcctgacggtggccggtcatcaggtgtttgatgaggagcaacagcagctgattgccggcatgtcaccggcgacgatacagctggcgtggcagagtaccgccggtgagacgcccggggcggttctgtctgtgggccgtcaccgggtggggctgagtgacaacgacattaccgtttaccggtttgccccgcgggatgaggcgtggccgcaggacagtgactgggatcgcctgctgtacacggtgtttaaaggggaggcgccggataaagccggctggcaatgtgtgcctttttcactatctgaactgagctgtcacggtgagtttgcccggctgacctgccggggggcgatcctgaagggcgcgggaggcgtcatatcatga

SEQ ID NO: 311138 - DNA, 486 bp, Proteus mirabilis; identical to SEQ ID NO: 272472

SEQ ID NO: 311139 - DNA, 546 bp, Proteus mirabilis
gtgcggggggatatcacttcgatcacctttgtctttacggacggcacggtccgcacggtgccgaagccggctgaccggacggacggcggcagtcaggccggcagtggacagaatgcccgcaataacggcggatcgctcggctggatctcggatgagagcgggattccgtgtatcagcggtgagcgtaaaaccaatgccggcacctatctgccgaccctgtttgccctgacggcagccgcctcggccggggatgcgatgtcacagagtcagtataccgcgcagaacaccggttacggtatcacgtccacgctctccggggatgcggggaaagcggcactgggtagtgccatcggcggcgggtttaaggatgtggcggactgggtgaaatcccgctacgggcagacctttgatgcggtgtatgtgccaccggggcagaaagttgcggtgcatatcagccgtcagatcccgattgattatgaatcacagggacgccgggtgaactatggcttttcactgacagagggtgaggaaggaggtctggagtga

SEQ ID NO: 311140 - DNA, 153 bp, Proteus mirabilis
atggatctcactgctttgtgtccgggtgtacgccgtgttcgcctgctgacgtcgcgccgcttcctcgttcgtcagcccgcgacgcagcgtactgcgggcggcttccgtcaccgtccggctgtccgtactgtccgggtcagcctgtctgcctga

SEQ ID NO: 311141 - DNA, 486 bp, Proteus mirabilis
gtgacgtattttgcgaagccgggggtgctggctgtgacgccggtgacgtttccgctggtgtttgtgttcagtgccggacaggccggttgtactggaagtcatttttgcctgacggtggccggtcatcaggtgtttgatgatgagcaacagcagctgattgccggcatgtcaccggcgatgatacagctggcgtggcaggttgccgccggtggggcggccggggcggtgctgtctgtcggccgtcaccgggtggcgctgtgtgacaacgacattaccgtttaccggtttgccccggggaataaggcgtacccgcaggaccgtgactgggatcgtctgctgtacacggtgtttaaaggagagacgccggataaagccggctggcaatgcgtgcctttttcattatcggaactgaactgtcacggtgagtttgcccggctgaactgtcggggggcggttctgaagggagcgggagggatcatactatga

SEQ ID NO: 311142 - DNA, 546 bp, Proteus mirabilis
gtgcggggggatatcacttcgatcacctttgtctttacggacggcacgatccgcacggtgccgaagccggctgaccggacggacggcggcagtcaggccaacagcggacagaatgcccgtaataacggcgggtcgctcggctggatttcagatgagagcgggatcccgtgtatcagcggtgaacgtaaaaccaatgccggcacctatctgccgaccctgtttgccctgacggcagcggcctcggccggggatgcgatgtcacagagtcagtataccgcgcagaacaccggttacggtatcacgtccacgctctccggggatgcggggaaagcggcactgggcagtgccatcggcggcgggtttaaggatgtggcggactgggtgaaatcccgctacgggcagacctttgatgcggtgtatgtgccgccggggcagaaagtcgcggtgcatatcagccgtcagatcccggtggattatgaatcgcagggacgccgggtgaattacggtttttcactgacagagggtgaggaaggaggtctggagtga

SEQ ID NO: 311143 - DNA, 996 bp, Proteus mirabilis
atgacgctaggaactaaaaagcaggaatatcaagatacattagatcaactaattagagatatacgctcagatatggggctgaataagtgttttttatatcgagttggatgccctcagaatagaaaagaaacatcttggtatggtatacaaaccgctcaagattacctatgccagtcttacgactggatggtgatgtgttattcattgtgtggaacttttaccatcagcaatggattattgcgcgaaggagtgcattatactcaaaatggctataatgttatggggcatgaatcagctagtgctattgttgattctctatttaataaaaccccttcctcagaatttgaaactgaaatgtatggaactcctctgctaccacaagaccaaatatggagatatacatacgggcggctagttgttggttctgatggaaatttaacactactggacaaatcgaacaccggttattcatatagaacgataaatatttctagaatagaaatgctggacgataaaattaggctttacttacaaagcagagccagctggatacttggtcttgatgttgaattgaatgaaagcggtaaaatctttggggtagaatgttttactacgattgtatctgttgaaaataatgagtttgctgtagatttatcttttttaatggatgtttccttcggtatttctaaagatggggatttaatgagagcacctgaccttagctcttcaagtattcccccttttatatctgataatataacaatagataaatcaaatggcatcaagataatccacggggggataactggattaccagttctttttggagctagtggcggaacggtgtccatttctaatatttcaggaaaatcatttgttattagtagttcttctggtgctttaataaccctgaataggatgaaagtaaaaccaacatcactaccgcgctctatgcaggttgcaattaaagcaattatttgtgagaagaaagaataa

SEQ ID NO: 311144 - DNA, 363 bp, Proteus mirabilis; identical to SEQ ID NO: 306404

SEQ ID NO: 311145 - DNA, 546 bp, Proteus mirabilis; identical to SEQ ID NO: 311139

SEQ ID NO: 311146 - DNA, 534 bp, Proteus mirabilis
atgaaagggcggcgcggtattcagtctcccggactggatccgctgacgacactgggcattgaggcccggtcagatgaggagcgccgccggctggctgaaaagtgggtacagcaggaatttgcccgggcagaaaaagagctggcgtttcagcgggaagtagatgctgcctggaagcggctctatggtcaggtattaccggtcagtctgggaacattcggcaggatggtacagggaacagcacagcgccggcaggcgttgtttgtgcaggcggaaaattgtagtgcgtgtgatgtccgtctggccaccctgctggccggcaaacagccgtttgatatttatgtgctgggcacaaagggggatgataaccggctgcgagcctgggccagacaaaaaaatatcccggcagagcgcgtcagaaagcgggaaattacgttaaatcatgatggcggtctctcgcttcagtacggactgaccaccacaccggtggtgatgcaacagttaccggatgggcggtggcgtccgctcacaccttaa

SEQ ID NO: 311147 - DNA, 534 bp, Proteus mirabilis; identical to SEQ ID NO: 306774

SEQ ID NO: 311148 - DNA, 657 bp, Proteus mirabilis
atgacgcagcaaccactgatgcacctgcctcccgtcctgacggacacagtgcaccccggcactgcccagactgctgaccaggcggtcacacatctgattgagcatcgccaccggcggcatcggatcggcatacgcacttcccagacgacgataaaccaccatccgggtccggcgttgctgaccgcgccagggttgcccggtcacctccgtgtctttaaacaatccttccggccgggcaatcccccgcaaatgacgcgccatttcggtcagcctggcttcggtaaacgcggtgccccgggccgccggcaggatatagtcccgcaatgtggccagtgtgacgctcacgtcgtcctcatcctgacaaaaaaactgcaccacccacgggttatcatcatgctcatccaggctgtcctgaagcgcatcctccaccgcatcccggatttccagcagacggtcaccggagcgcccttccgtcggtgccggctcaacggcatacaccgccccgaccgacaccccgtcatcaagcagcaggcattgctcctcatccagaaattccacccagggcaggtaatcaataaaagacggattcgcgtggtaaatcttctgctcatccgcccgggtcattttcccaggacgggaaagcggctgacgggctaa

SEQ ID NO: 311149 - DNA, 657 bp, Proteus mirabilis
atgacgcagcagccactgatgcacctgcctcccgtcctggcggacacactgcacgccggcactgcccagactgctgaccaggcggtcacacatctgattgagcatcgccaccggcggcatcggatcggcatacgcacttcccagacgacgataaaccaccatccgggtccggcgttgctgaccgcgccagggttgcccggtcacctccgtgtctttaaacaatccttccggccgggcaatcccccgcaaatgacgcgccatttcggccagccaggcttcggtaaacgccgtgccccgtgccgccggcaggatatagtcccgcaaggtggccagcgtgacgctcacgtcgtcctcatcctgacaaaaaaactgtaccacccacgggttatcatcatgctcatccaggctgtcctgaagcgcatcctccaccgcatcccggatttccagcagacggtcaccggagcgcccttccgtcggtgccggctcaacggcatacaccgccccgaccgacaccccgtcatcaagcagcaggcattgctcctcatccagaaattccacccagggcaggtaatcaataaaagacggattcgcgtggtaaatcttctgctcatccgcccgggtcattttcccaggacgggaaagcggctgacgggctaa

SEQ ID NO: 311150 - DNA, 486 bp, Proteus mirabilis; identical to SEQ ID NO: 272472

SEQ ID NO: 311151 - DNA, 153 bp, Proteus mirabilis; identical to SEQ ID NO: 299306

SEQ ID NO: 311152 - DNA, 486 bp, Proteus mirabilis
gtgacgtattttgcgaagccgggggtgctggctgtgacgccggtgacgtttccgctggtgtttgtgttcagtgccggaaaggccgattgcaccggaagtcatttttgcctgacggtggccggtcatcaggtgtttgatgatgagcaacagcagctgattgccggcatgtcaccggcgatgatacagctggcgtggcaggttgccgccggtggggcggccggggcggtgctgtctgtcggccgtcaccgggtggcgctgtgtgacaacgacattaccgtttaccggtttgccccggggaataaggcgtacccgcaggaccgtgactgggatcgtctgctgtacacggtgtttaaaggagagacgccggataaagccggctggcaatgcgtgcctttttcattatcggaactgaactgtcacggtgagtttgcccggctgaactgtcggggggcggttctgaagggagcgggagggatcatactatga

SEQ ID NO: 311153 - DNA, 141 bp, Proteus mirabilis
atggggcattaccgtgatgcacaggcgatagccaccggggtgcagtataagccgacggccaataccaatgtgcgcctgaatgcgtcatggaataacggcggcgataccagtattggtgccgggtttgcggtgggctggtag

SEQ ID NO: 311154 - DNA, 441 bp, Proteus mirabilis
atgaaaaaacgatttttatcccttcccgggatactgatgctgtcgctgtcatgcctgccgtttaccgcgggggcggcagtggtgctgtataccacgcaggatgacgctctgccgcagacggacatcccgtttgaggtggtgtatctggatgcgcctgagcgcttgctggatgaggtcctgcttcagccggggacggaactgagtgaagcggatgctccgcacatcaccgccctgttacaaagtccggcctggcaggccagagaggcggcattacggcaggcttatcagggcgtggttcaggcctggcagctgggggtgtcatctctgccggcggtcgtcgttgatgcgcagtgggtggtttacggcaccaccgatattgcacaggcggtgacgcagatacagcagtaccgggaacaacaggaaggaggaggtcaaccatga

SEQ ID NO: 311155 - DNA, 348 bp, Proteus mirabilis; identical to SEQ ID NO: 311112

SEQ ID NO: 311156 - DNA, 153 bp, Proteus mirabilis
atgaaatggagtaatgatatggttaagcactctcctgaactcattctatattggcttattatagaatcaccaccattcataaagtatggtgtattttttaatcctaacttttctcttattgttttatttttaatacgcttaagatcagaatag

SEQ ID NO: 311157 - DNA, 240 bp, Proteus mirabilis; identical to SEQ ID NO: 272469

SEQ ID NO: 311158 - DNA, 408 bp, Proteus mirabilis
atgacgcgccatttcggtcagcctggcttcggtaaacgcggtgccccgggccgccggcaggatatagtcccgcaatgtggccagtgtgacgctcacgtcgtcctcatcctgacaaaaaaactgcaccacccacgggttatcatcatgctcatccagactgtcctgaagcgcatcctccaccgcatcccggatttcgagcagacggccggcagagcgcccttccgtcggcgccggctcaacggcatacaccgccccgaccgacaccccgtcatcaagcagcaggcattgctcctcatccagaaattccacccagggcaggtaatcaataaaggacggattcgcatggtaaatcttctgctcatccgcccgggtcatttttcccggccgggaaagcggctgacggcctaa

SEQ ID NO: 311159 - DNA, 408 bp, Proteus mirabilis
atgacgcgccatttcggtcagcctggcttcggtaaacgcggtgccccgggccgccggcaggatatagtcccgcaatgtggccagtgtgacgctcacgtcgtcctcatcctgacaaaaaaactgcaccacccacgggttatcatcatgctcatccagactgtcctgaagcgcatcctccaccgcatcccggatttcgagcagacggccggcagagcgcccttccgtcggcgccggctcaacggcatacaccgccccgaccgacaccccgtcatcaagcagcaggcattgctcctcatccagaaattccacccagggcaggtaatcaataaaggacggattcgcatggtaaatcttctgctcatccgcccgggtcatttttcccggccgggaaagcggctgacgggctaa

SEQ ID NO: 311160 - DNA, 372 bp, Proteus mirabilis; identical to SEQ ID NO: 311121

SEQ ID NO: 311161 - DNA, 153 bp, Proteus mirabilis; identical to SEQ ID NO: 299306

SEQ ID NO: 311162 - DNA, 291 bp, Proteus mirabilis
atgccagcagatgttttgtttcccggggaaacagtgcttaaccatgaggaggctctgacggattttctttttccggcacaggcgtttttttcccgtgacagtgacgatgacggtgggcagtgcgttttcttttccccaggatccccatcacaacaaagaacacacaccacatcagcaccgccagccagaataccggggaatcaattccgtctgagggccatatcggcggtaacattacttcacctgctgggtcagcccggtttccgtgatcagaaccgggtaatgggataa

SEQ ID NO: 311163 - DNA, 198 bp, Proteus mirabilis; identical to SEQ ID NO: 27134

SEQ ID NO: 311164 - DNA, 198 bp, Proteus mirabilis; identical to SEQ ID NO: 27134

SEQ ID NO: 311165 - DNA, 291 bp, Proteus mirabilis
atgtcacagagtcagtataccgcgcagaacaacgggtacggtatcacgtccacgctctccggggatgcggggaaagcggcgctgggcagtgccatcggcggcgggtttaaggatgtggcggactgggtgaaatcccgctacgggcagacctttgatgcggtgtatgtgccgccggggcagaaagtcgcggtgcatatcagccgtcagatcccgattgattatgaatcacagggacgccgggtgaactatggcttttcactgacagagggtgaggaaggaggtctggagtga

SEQ ID NO: 311166 - DNA, 207 bp, Proteus mirabilis; identical to SEQ ID NO: 307029

SEQ ID NO: 311167 - DNA, 246 bp, Proteus mirabilis
atgaatgatgagatattgcagatagcgaaatatttaaaaaataaaataaacgctggtgaaggtgttgatgaatatgactggcaagaaataattgatgtatgcgatgagctattgagaattaatagtttagagcctgctggttatatatcggaagatggattgaattcattatcagaaaatagcgatgtaataacctcttccaagcagcaatataataaagtaattcctctatataaattagattaa

SEQ ID NO: 311168 - DNA, 288 bp, Proteus mirabilis
atggataaatcaagacagcagtttgaagattttattaagtttcatcttggcgacaaagtggatgagaatacatttgaaacagcaaataacgggttaaattattcttacccgtacaccgaccttatgtggattacatggaaagcatcacgcgagagcttggagattgaattgccagagcctaacccagaagattctgggagtcctaacttttacgatgggtacaacactgcaataagcgatattcatgacgaattaatcagcaatggagtgaaaataaaaaatgaatga

SEQ ID NO: 311169 - DNA, 1353 bp, Proteus mirabilis
gtgatcgaaaattggcatcctgaagataaagctttttgggaaaaaactggtcaaaaaatcgcatcgcgtaatttatggatttctgttccttgtctactgctatccttctgcgtctggatgctatttagtgcagtcgctgtcaatttaaataaggttggctttaattttaccactgatcagctatttatgctgactgctctaccttctgtttcaggtgcactactacgtgtcccttactcttttgttattcctatttttggtggtcgtcgttggacggctattagtacggtatttctgattattccttgtctctggctagggtttgccgtgcaagatctcacgacatcttattccacttttatcgttatctctctgctgtgtggttttgctggtgcaaacttcgcatcgagtatggcaaatatcagcttcttttttcctaaagcacaccaaggcggtgcattaggattaaatggcggattgggtaacttaggtgtcagcgtgatgcaattaatcgcgcctttggttgtcagtgtgggcgtttttgctatgtttagtggccccggtgtcgttcaacctgatggctcacgtttatggctagagaatgcggcgtggatttgggtacctttcttgcttatctttacctttgcggcttggtttggcatgaatgatctggctgctaataaagcttctttaagtcaacagctacctgttttaaaacgtggtcatctttggttactcagtatcctctatctgtgctcttttggttcttttatcggcttttctgccgggtttgcaatgttatcgaaaacccagttccccgatattgtcattttacattatgccttctttggtcctttacttggagcattagctcgccctgtgggaggcgcgctatctgataaatttggtggcattaaagtgacgcttatcaactttatcattatggctattttctcagtgctcctgttcttaaccctaccagaaaatggtgctggtggatcgtttattgctttctatggcgtgtttatggtgctgtttttaacggcagggctaggcagtggttcaacattccaaatgattgccgtggtatttagaaaaatcaccattgatcgcatgaaggcacaaggggcttcagatgaagctgcgcaaaaagaagccgtaacagaaagtgcagctgcattgggttttatctctgcaataggtgcgattggtggcttctttattcctaaagcctttggtacatcccttgcgatgacgggttcacctgctggggcaatgaaaatcttcgttctgttctatatcgcctgcgttctgatcacttggttggtttatggacgtaaacacaataaataa

SEQ ID NO: 311170 - DNA, 903 bp, Proteus mirabilis
atgcagttctcaagtgaacatatcgcgatatttttagccgttatggataaaggctctttttctgcggctgcgcgttcattaaaacgtgttccttctgcggtcagtatggcgattgctaatatggaggctgaattaggttatgcgctgtttgagcgttcatcgagagagccacggccaacagaaaaagctaaagcacttgaacctcacgccagaatgattgctgagcaattaaagctattacaggttcatgcacaagagctttcaatggatctggaaagtatattaaatattggcgtcgcggcagatattaatcccgattatttattaccggcattatctgagttaacacagcgttaccccttactcaaagtgaatgtagtaaccgcggcacaagatgacattattgagatgctgcacgcacgtaaaatccaattatgtctcgtgtatggtgggttatatgtcaatggcgatgaacaatttcaatatttgggctcagagtcattagttgccacaatttcggcaagtcatattgcacttgctcaccctgcaggggtatttattgaagatttagtgaatgtaagacagataatgatagccagccatactcaagagataagagatgtacgctctttagtggcgactaattactggcaaacagataactttcaaatggcattaggtatggttgaagcggggatgggctgggggaatttaccttattcgctgatttatacgcagttacaaaagggaaaattaaaacaactgcaatttaaaaatactaaaaatgaattgcgcttaccggtacatgcaatgtggttaaaaggcgagtcactacaaaaaggggcaaaggaattggtggagttaatgaatattcaccaacccattgtgcccaattttgattaa

SEQ ID NO: 311171 - DNA, 798 bp, Proteus mirabilis
atgctgctggtcactcaactccttattggttctgctataggtttagttatcaccacaacgggagttgggggtggtgttatcttattacctgtgcttatctatttatttggaatgaatgcattagcagcagtggcgaccgctaatttattatcgatgttaatgaaaatttcctcttcttatattcattttcgtttaggaaatattccattaaaaccagcattattgattttagggatcatgtttccggccacatttttagccagctatggggtaacctggttgggatcacaacctcaatattatgagcaggttgaattaggcattaatatcctgatgattgtggcgattatcttttcaatgttcctttttttacaacgaatattcaaaaaatccacatcatcacatccgttatcatcattggcacctagctcatcaattcctctgaattctctttttgttcccggtatgagtgccggatttgtcttaggggcaacgggggttggtggaggattggttgtcttacctgtgcttatgcgttttgcacaaatgaatattaaggaagcgatcggtagttctatatttattactacaattttgtcaggtggctctgctattgcttatagtgctggtggctataccgatgtgcatacggccatcattctttgtttaggatcacttatttcgattcctttagcgcgctatttactggtgtatttatctgagcgcttttttcaatatttaactctgttatttattctgatcagcatcattatgatgagttggaaactaataaattaa

SEQ ID NO: 311172 - DNA, 786 bp, Proteus mirabilis
atgataaaagcggtagatttaaatagtgatttaggtgaaagctttggtcaatggcgtatgggcaatgatgctgcagtgcttgaaattgtcagcagtgccaatattgcttgtggttttcatgccggttcaccagaaggcattttaaaaacattaaaagcagcgaaacagcatcaagtcgcgataggtgctcatgttgcttatcctgacttagtgggttttgggcgacgcaatatggatattgccagtgatgaattaaccgctgatgtcatttatcaaattggcgctttgcaaggtttagcaaaagctgtcggtatgaaggtgacttatgttaaacctcatggtgcgctttataacaccattgctcatgataaacgccaagcattagcggttattgaagctattttagctattgatccacaacttatattagtggctttagcgggatcgccactgatcacacttgcgaaagagaaagggttacgtgttgttgccgaagcttttgctgatagagcttatcatgctgatggcacacttgtttcgcgcaaacaagagggggctgtattacacgatcctcaattggtggctcagcgtatgttaaaactagtacaaaaagggggcgttgaatcgatagagggtacttttactgctatacaggcggattctatttgtgttcatggtgatagccctgatgcggttaatctcgcaaaaagtgtcaaagagatcttaataacacacggtattgcgataaaacctttcacatctgcaataggaataaaggaggcgtaa

SEQ ID NO: 311173 - DNA, 660 bp, Proteus mirabilis; identical to SEQ ID NO: 296101

SEQ ID NO: 311174 - DNA, 309 bp, Proteus mirabilis
  misc_feature (232)..(241): n is a, c, g, or t
atgataaatattcatacattgggtcctgcaggaacaaactgtgagaaagccgcttattattggctaaataaaaataatcaacaaggaaatattattcttcaccctacattagaaaccgcagtaaaagaaatggaggtaagccaaaatagtattctattaggttgtattgtttatccttttttacacaatattgtttttaataatctctcttttatcaaattaacagattgtnnnnnnnnnnagattgttttgttatggatacccataacatgctatttgctagccgatttaataatattaaggagataa

SEQ ID NO: 311175 - DNA, 207 bp, Proteus mirabilis
atgccggatgagttaaaagaaaaaatccaagagagagcgcttaagaatggtcgctctatgaactcggaaataataatgatcctacaggaagctgtagatgaagaaagaaaaccgaagaacatagacgaactagccaacttagaatcagataagttcaaagagctattcatggaaaccatcaagaagatgtatgagggtaaatcatga

SEQ ID NO: 311176 - DNA, 177 bp, Proteus mirabilis
atgagcgaccaactttatacgcgtagagagaaggataactttatgctaaggcttcctaaaagaatgaaggatgaaattaagaagttagctgacatggatggtatatccataaattcagcaatagttcaaaggctatcaagaagcctaagagaagaaagagttaataatgttaagtaa

SEQ ID NO: 311177 - DNA, 1269 bp, Proteus mirabilis
atgcaacaagcgcagcctatcgataatttttatcagaggatagttaatttatcactgcttggtttggatttaaccctgccgaattcatatagagaaacattaataaaaatcgaaaatattgataaggcaaaaaaatctttacaggaagtgaataaatcaaatgacgaatctgatttgcttgatttaaaagataagttatgtagtttattgcttgataaggaaaattttatcatcgcaaaaaattatgatgagctaaaaaatgaagcagatatccttactgatgaaataaatgaactgcgaaattctattttctcaaatagtcgggctgctaggagaaaaaggaaggtgttagatgattcaattcggccatctaatattgaccttaacagaattgaaattatttttgaagaggctgagtttcatttttctgagatggtacagaagcgattagaagaggctgaaagctttcatttaagggtttacgacgcaaggaaaaaaagattagaagttgatgtaagttctctagaaaaagagaatattgacctgactgaaaaacttaaaaaaattgagcttcatagagactcacttcttaaagaactggactcaaagggtgctcttgaagaatacaattcaatagtagagcatataagaggattggagtcacaaatagctgagctctcaagtaatcagtctgctcttactaaattgactaaagatcaagcgcgtttggaaaaaaagaaagctgatattgactttaaggccatagagtatattgagaaagaaaaaggccgcatagaagaaatagaaaaaaaattcaggttaatagttaagacaatatataaaaatttaggcgggtcacttaagattacgaaaaacgaagggaaagcaaagtatctatatgatataaatgtacatatccctaaagatggttcgcagggaataaatgaagttaagatattctgttatgatatgttgctttttattttaaaccctaacttattaggattcatggctcatgatagttacttatttagcgggatagaccaaagacagacaagaaccatgtttaaaataatattggataagtgcaacaactctggcttacagtattttgtaaatataaataaaaatatctacgatgatcttgttgtgccttttcctgacgacattcttacaaacgaagagcgtcagcagataattgatggcacggtattgcagttatttgatgataataaagatagcaccctgtttggggaatattttgattga

SEQ ID NO: 311178 - DNA, 984 bp, Proteus mirabilis
atgaaaaagatggttttggcaacagtactggcatcgctcttttttagtagcgttgctatgtcagaagataaaacagccttctctttacctgcgattgaaaaaagtgcggaagaagggaatgccgcttctcagtatcaacttggtgttaaatatgaaggtggcgaaggtgtagaacaaaatacacaaaaagcattggagtggtacacaaaagcggctgaacaaggtcatgcagaagcgcaattaaatttagcgttaatgtatgatatgaatgatgatattgagcgtgatgctgaaaaagcggtttattggtataacaaagcggctgttcagggactctctttagcacaatacaatttggccgtctcttttgatgaaggggatggtgtagagcaagatcatgaaaaagcagtgtattggtatacaaaagccggtgagcaaggtgatagcgatgcgcagtataatttagcgatttcatatgatgaaggtattggtatcgaacaagatcatgaaaaagcggtgacttggtacactaaagccgcagagcaaggtcatgctgatgcacaatacaacttagctgtctcttacgatgaaggcgaaggggtcgagcgtgatggtagcaaagcggtattctggtataccaaagcggcaaatcaaggtaatcgagatgcgcaaaataaccttggtgtgatgtatgacgaaggtgatggtgtagcaaaagatcaacgtaaagcgaacgaatggtataaaaaagctgcgctacaaggtaatggcttggcacaaaataaccttgcaataaactattattatggcaaaggggttaaacgtaacttgaaagaagcctatgcatggtttgctgttgctgtagaaaatggtgaaggtgatgaggctatgctaaaacgaaccgcccgtgccctcaatgctgctcaattagcagaagctaaacttttagctgcttcttatattgctaaatatcttgatgactaa

SEQ ID NO: 311179 - DNA, 2673 bp, Proteus mirabilis
atgtcgttacgtctgaaaaaggagagtctttctacgctctctgtaggtactcatcaatatgagtattaccgtctttctgaagttgctcgtcaattaggggatatcactcgtctccctaaatcgttaaaggttctgctagaaaatttagtccgctatcttgatgatgatacggttgttgaagatgatattaaggcattggtagattggcaaaaaaatgcccacgcctcccgtgaaattgcctatcgcccagcaagagtattaatgcaagattttacgggtgtacctgccgttgttgatttagccgctatgcgtgaagccgtaaaatctttggggggaaatgtagaaaaagttaatccactttctcctgttgacttggttatcgaccattcagtgatggttgataaatatgccagtgatgatgcttttgagaaaaacgttgaaattgaaatgcagcgtaactatgagcgttatctctttttacgttgggggcaacagtcgtttgaacgttttcgtgtagtacctcctggaacgggcatttgccatcaggttaacttagaatatttaggtaaagcgatatggtctgaacaacaaaatggccgacatattgcttaccctgatactttggttggaaccgattcacatactactatgatcaatggtctgggcgtattgggttggggcgttggtggcattgaggcggaagctgcgatgttaggccaaccgatttcaatgctgatccctgatgtggtaggttttaaattaacgggtaaactacgtgaggggatcacagcgactgacctagtattaaccgtaacgcaaatgttacgtcaacatggtgtggtagggaaatttgttgagttttatggtgatggactagcttctttgcctcttgctgaccgagcgacgattgccaatatgtcacctgaatatggtgcaacctgtggcttctttcctattgacgaaattacactagattatttacgtcttaccgggcgtgaagagcaagaaattgcattagttgaagcctatagtaaagagcaaggcttatggcgtcatgctggtgatgaacccattttcacctcaaccttatcgttagatatgggcactgtggaagcaagtcttgctggccctaaacgtccacaagatagagttaacttgctgaatgtaccaaaagcatttaaagctgctgtagagcttgaaacaaataaaaaacctctcgctcaatatcctcaggtcactattgataatcagcctccttttaccttaacggatggtgcggtagtaattgcagcgatcacctcatgtaccaatacctctaaccctaatgtcttaatggctgcaggtctactggctaaaaatgcggtagaaaaaggcctacagcgtaagccatgggtcaaatcgtcactagcccccggctctaaagtggtgacagactacttagcactggcaggattaacaccttatttagataaacttggttttaatttggttggttatggttgtaccacatgtattggtaattcagggcctttattagccccgattgaagaggcgattaaagataatgatttaactatagccgctgtattatcgggtaatcgtaactttgaaggtcgtatccatcctttagtgaaaaccaactggcttgcttctcctcctttagtcgtggcttatgcgctatctggtaatatgaatattgatttgaccaaagagccattaggtgaagataaacagggcaatccagtctatttgaaagatatttggcctgacagtaaagccattgccgatgcggtggaaaaagtaaaaacgcagatgttccataaagagtattctgcggtatttgatggtgatgaaacttggcaatcactaaaaatacaagatactcctgtgtatgcttggcaacctgattctacctatattcgccatcctcctttttttgaaggtatgacaaaaacacctgaggcgattaaagatattcaccaagccagtattttagccatattaggtgactcggtgaccaccgatcatatttcacctgctgggaatattaaagccgatagccctgctgggcgttatcttcgagagcatggtgttgaaccaaaagactttaactcttacggttcaagacgtggtaatcacgaagtcatgatgcgaggaacttttgcaaatattcgtattcgtaatgaaatggtgccggggatcgaagggggctttacaaaacatattccaacgggagaaacgttagccatttatgatgcggcgatgcgttatcagcaagaaaatacgcctttagccattattgccggtaatgaatatggatcaggctctagccgtgactgggccgccaaaggtacacgattattaggtgtgcgagtggtgatagccggatcgtttgaacgtattcaccgttctaatttgattggtatgggagtattacctttagaatttcctaacggtgtatcacgccagactttagggctcaaaggtgatgaaaaaattgagataacggggcttaattcgctaacaccgggtcaagatgtcgctgtcaatattacttttgcagatggtcgccaagaaactattatggctcgttgtcgtattgatacgcaaactgagctggcttattttgaacatggcgggatcttgcattatgttattcgtaatatgttgtaa

SEQ ID NO: 311180 - DNA, 1167 bp, Proteus mirabilis; identical to SEQ ID NO: 310330

SEQ ID NO: 311181 - DNA, 264 bp, Proteus mirabilis
  misc_feature (225)..(234): n is a, c, g, or t
atgttgcctgccaccaaagctatcccaaaagagatgctacctgttgttgataaacctttaattcaatatgttgttaatgaatgtatagcagctggcatcaatgaaattgtgctagttacacactcttcaaaaaattctattgaaaaccattttgataccagttttgaattagaagctattttagaaaaacgagttaaacgtcagttgttggaagaagtacaaggnnnnnnnnnnttactattatgcaaactcgccaaggaatag

SEQ ID NO: 311182 - DNA, 396 bp, Proteus mirabilis
  misc_feature (381)..(390): n is a, c, g, or t
atgctattaaaaaaaatatttttagtgtcttttttattccctactctctcttacgctaataccttaccaacatcaaatatagataattcactaactcccaaccatgataatcttgcccgtttttcactcggtgacaatagtcaagcatccggtagcggtgccacagctataggtatcaatagccaagccaccaatactcgtgcggttgctattggttatggtgcattagccaatgaggaaaatacggtttcatttggcaatagtgaagagaaacaaacagcacgactcaccaatgtcagtgaaggtaaaaataatactgatgcagtcaatctggcacaaacaaaagcactacttagtaaaaataaaaggttaattgatagnnnnnnnnnnaattga

SEQ ID NO: 311183 - DNA, 543 bp, Proteus mirabilis; identical to SEQ ID NO: 305753

SEQ ID NO: 311184 - DNA, 1386 bp, Proteus mirabilis
atgaaccaagttccgaataatttaatggcggaacaaaatgttattggaggactactgcttgacccgcaaagtgataatgcgcaatcaattttttcactgctaaaacctgaagatttttatgcccgacaccatcaaattatttatctcaccctgcgagaaatgtatacccaacgtatgtcaatagacatcatgacggtgacggattatctggagtcaaaagggcgaattaatcaatcaggtggttttgcctatcttgctgagatggcaagagaaacaccgagtattgctaacattatggcttatgcgaaaaaaatccgagagtgttccgcacagcgttttgttatcgaaaagacggttgaaattcaaaaactcatgatggtgccaagtgagttaagttttacggataaaattgaacaagcacaacgcttgcttgatgaagccacttcgtttggaaaaatgggaaaaaaaacagggttgcgccgaattgatgatgtgttggatgatgtttttaccgacatttgtgaccgacaagataacccagagaaacatcgaggattaaaaacgggatttaaagattttgaccgtctattaagcccgaaacagattgtcataggctcactgttcgtgattggtgctcgtccaaagatgggaaaaacaaccgttctcactgaaatggcaaaaaatgtctcacaacaaggtaagcctgtattgctgttcagcatggagatgacagataaacagcttgttgaacggacactagcccaacaaacccagattaattcagataaattttaccaaaagttagaagagcatgaatgggataggctttgcaatgccatcggtcgccttaaagatgagcccaatatttgggtggatgatacaccaggtatgtccttacagcatattcgctctgaaagtcggaaaattaaacgcaaagtcggtgatattgggttcattggtgtcgattacctcacgctgatgcaagcgggaaaagctgaccgtaatgacattgcctatggtgaaatcactaaggggctaaaaatattagcaaaagagctcaatacggtggttgtgttgcttgtacaactgaatcgaggattggaaaacagagctgataaacgccccgtaccaagtgattcaagagacacaggacaaatcgagcaagattgtgattattggttaggcatttatcgtgatgcggtgtaccacgataatgcagatgaaacgctgaccgagatgattttaaggctcaatcggcacggtaaaacaggcacggtgtatgttgaccaacaaggattgagtattacaccagttgatcaatatatggctgcttatcgcgctcaaccgaaacgagagcctaaaaggtattgtgaaaaatcgttttaa

SEQ ID NO: 311185 - DNA, 918 bp, Proteus mirabilis
atgacacataatcacattgatgatattgagttgaatatggctgagaaaacacaatctgacaaattcaaagcggccaagaaaagcacattggtcagtgtttttgttaatatctttttatccatatttcaaatcacaattggtttcttctcacattcccaaggcttaattgctgatggtattcattcactgtctgatttaattgctgacttcgtggtgttaattgcgaataaaggcagtcaaaagcaacccgatgccgatcatccttatggacattttcgctatgagaatgccgcttcattagtgttagggacgattttattgattgttggtttgggaatgatattttctgctatccataaaatgttagatccttcaatcattcctgatgttcatagcatcgcgctttatgtggctttattggcattagcggctaaagaagggttatttcgttatatgttagctgtagccaaaaaagtcgattctagtatgttagtggcaaatgcttggcatgcgcgctcagatgccgcctcttctttagtggttgcaatagggatcattggtagccttgctggatttaaattctttgacccactagcagcacttattgtcgggctatttgttggccgtatgggatggcgttttacctatcaagctttgcaagatctcatggatagaggcgctgatgaagaaacacttgaacagatcaccaatacattaatcaccacaccaggagtacaaggggtacatgatttaaaaacccgtcgtgcaggtgattatttattagttgatgtccatttagaaattaaaggcgaattaacggtcaatcaaagtcatgatattgtggtcaatgcccatgatagagtacttaaacagcatgcacagattttaagtgtgatgatacacgtcgatcctgcttaa

SEQ ID NO: 311186 - DNA, 237 bp, Proteus mirabilis
atgattcttcctacaaaattaattagcccaatagattcattatattgcatatctgcatatgtagttgaaatactaataaataaaaaaaatatggcatttgacgatttgctcgatagtctgaatgcagcttaccccattccgataagtattgagaaattacagttttgtctagactttttatttattatcgggaaactggattttgaaaatgaaactcttaaaattatactcgagtaa

SEQ ID NO: 311187 - DNA, 2163 bp, Proteus mirabilis
gtgtctaaaaaatttattgctaccaacctattacttgctctccccttcagtctgttatcgttacaaattcatgccgcaatgacacaaaattcacctgataaaatcattgttaccgcatccccctcacaagatccgcaaggaccaatttcaggtttagtggcaacaaaaacactatcaacaaataaaatacttagtgatatagataagacaccacaatcaatcagtgtcattacacgtgaccagatggatgcgcaagatgtcagttctgtctctcaagcattgcggtatacacctggcgttttcactgaatatcgcggcagttcaaaccgaaatgatgaaatatttattcgtggatatagctatgccccccgttttcttgatggacttagttatggtatgggagcctcatcttctacaggagccattgacccttggctattagagagagttgagctgatccgtggcccgtcttctgttctatatggccaattaaatccaggtggtcttgtggcaatgaccagcaaaagacccacttcaacaaccattaatcatattcaagcacgtgtaggaaatgataaattagcagagacagcttttgattttgcaggctcattaagtgatgataatcgtattctctatcgccttaatggattagcaaaaacacaacatactcaaattaaagactataaagaagaacgatttgcccttgcccctgccatcacttttttgccaaatgagcagacacgtttaacgttattaagttttattcaacaagagcccgaagcgggataccgtaattttttgccagcttatggtacggtcaaaaaaacacccgaaggcaccattccatttgatttcaatgtaaataatgctgattatcaccaatcatggcgtcaacaatatggcgttggttatgaatttgaacatgaatttaatgatagattaaaattgatccaaaatgcccgttatagccatatcaaacaaaaatataaatatcttgtttttggttcattaagaaaagataacccttatattctggaacgccgagctcaacaggaaaaacgagaaacagatacatttggtattgatactcgactacaagctgattttgatactgaaaaattagcgcatacagtaattataggtattgattatcaatggagtaaaaataaagacaatttattgcaagcgatgggcccagaatatgatctggattggcgaaatcctaattatcattatcctattgatatcagtttacaaaaagcggtgacaaatcaattacaaaaacacgaccagttagggatctatttgcaagatcagatccaatggaaaaactggatcttattagggggattacgccaagattgggcgcaagttcgtacctatgatcacatcaaaaacagcaaagaccaacaagacgaccagaagctaaccggtcgagtgggtctactctatgcctttgataatggtatttcaccttatattagttatagcacctcttttgaacctaatttacagacacgaagagctccgggtagtgcaccatttgagccaagtgaaggacgtcaattagaagcaggaataaaatacctcaccccaaatgaacagacattagcaacactctccatttaccaattacaacaacgtaatgtgactaactataacgccgaaaaagcctattttgagccagtaggtgaaattagaagccgtggtattgaagcgcaaattaatagccaattaactgaaaatatatcatttattagtagctatgcttataccgatactgaagtgagaaaaaccatcaccgcaggtacacaaggaaaagaattaccacgggttcctaaacatatggcatcattttgggggcagtatgatgaaacatcagggctatttaatggtgctaaagcgggctttggtgtgagatatatcggtgtatctcaaggtgacactaaaaatacgattagtgtacctgcagtcactttgtatgatgccatggtaggttattctttaggcgagttatcctcttctttaaaaggggctgaagttcaactaaatatgaataatattgccaacaaacactatgttgcctcttgtgcgggtgaaactgcctgtttttatggcattggcagaaccatgacagcaacgataaattaccgctggtga

SEQ ID NO: 311188 - DNA, 135 bp, Proteus mirabilis
atgatgttatctatatgcgaacaggatttggttttagaaatgatgggaataatgtctattgggatgacatatacagtatcagatccgaatacggtgggccatggggggctgatggcggtaatgcgtttaaaatag

SEQ ID NO: 311189 - DNA, 357 bp, Proteus mirabilis; identical to SEQ ID NO: 27107

SEQ ID NO: 311190 - DNA, 822 bp, Proteus mirabilis
atgatcacttggttacttcttgctttatctttattattattagggttccatcgcaaacttgcacttactactttagctataaccaccattagcgcatttataacaggtgttatcacttggtatgtacttccggttatattgagcttaattttactctcttatgcatatcgccattacaaaacaaatcgtcttattgccactattgttattcttgcatttatcgccattattattgggttaacttttcattttattcctggttttaataacttacgctacattaaacatgttccattagggcaatatagcccccctttctctttttatttcaatgccgataaagcagtaatcccttttattttaatgatttttattcctacattatttaaaacagaaccagtaaaaaaagccaataaatatcaatgggttttactggctatggcgatccccgcactgttattattcgcaatggcattgggtggactcgctattgaattacatttaccacaatggctacccgcctttatgttagcaaatattttctttgtctctcttgctgaagaagcactatttagaggggccatacagcaaagtctatctcgctatttatctccctatcttgcgctatttattaccgctattttatttggtttagtccattttgccggaggaatattactcattatcttcgcctcattggcaggtattatttatggcttagcgtggatgtggagcggtaggctttgggttgctacactctttcattttgcactgaatctcactcacctgctctttttcacttacccttttaaaatcgcgtaa

SEQ ID NO: 311191 - DNA, 1755 bp, Proteus mirabilis
atgtcaaaaattaaaaataatgtttctatcactgaaatgagccggcgtggcttcattcagtctgcagctgttctttctggcgctgctgctgtagctggaacggtatcattacctttctctgctaatgctcaaacaccccagggtattcgtcctgatgagacgtctgaaaccatcaaatacagtgcatgcttagtgaactgtggtagtcgttgcccattaaaagttcatgttaaagatggcgtgatccgccgtatttccaatgaaaccatgtttgatgactcaacctttggtcttcatcagatccgtccttgcttacgtggacgttccgttcgttggaaaacttataatccagaccgtttaaaataccccatgaaacgtgtcggtaaacgtggtgaaggtaaattcgagcgtatctcttgggatgaagcgacttcgattatcgctgataagctaaaatatactatcgatacctatggtaatgaggctatttattaccaatatggtactggatctaccggagcgaatttacatggtagaacagcctgtaaacgtctattaagtacagtcggtggcttcttaagtgactacggtacttactcttattcacaattaaccggcatcgtcccttatgtgtatggtgatatgctggaatctctgttaacagaaatcgaaaactcagatttggttgtgatgtttggtcataatcttgctgaaactcgtatgtctggcggtggtcagttctatgaaacactgaatgcgttagataagagtaaaagtaaagtaattattatcgacccgcgtcgtactgatagtgtcacaacattaggtgcagagtggatccctatctatccgggtactgatgctgcattagtggctgcgttaggttatgtgatgatccaagagggtatcactgatgaggcatttttacgtgaatattgcatcggttgggataaacaaactctgccagcctcagcacctgaaaatggctcttacaaagactatattctcggtaatggtcctgatgggattgctaaaacccctgagtgggcaagtcaattaaccggaatttccgttgcgcgtattattcaattggcacgtgaaattggtaatgccagagccgcgtggatctcccaaggctggggtattcagcgtaccagtaatggtgaacaagcttgccgtgcaattatgatgttgccattaatgtctggtcatattggtcgtcctggtactaataccggatgttggggcggtagcattgaataccctgtcgcaagttttgccataccaaatccagtaaaaacccagatcccaacgtttatgtggtctgaagcggttgctcgtggtgaagagttaaccagtaaaaatgccggtgtcagaaataaagataagctggatacgggcattaaatttatgtggtgttactccagtaatgtgattggtaaccagcatgctgatctcaataaaacacatgaattactgcaagatgaatcaaaatgtgaatttattttagtgtgggataaccacatgacaccatcagcaaaatatgccgatattttactgcctgatgtcactactgtggaaactaacgatcttatcaataactcttatgctagtggtgcgtatcattatatggtgcgtttacaaaatgccattgagccgttatgggaaaatcgtcctaactatgatgtattggcagatatcgctgaaaaattaggtgttaaagagaaatttactgaaggtggcagatatcgctga

SEQ ID NO: 311192 - DNA, 471 bp, Proteus mirabilis
  misc_feature (445)..(454): n is a, c, g, or t
atgaataaaactattagtgaacatgtagatgtcgcgctcattggtgctggcattatgagtgcgacacttggcacacttctgaaagaactagagcctaatttaaaagtcgcgatgtttgaaagacttaatgattgtggtcaagaaagctctaactcatggaataacgcgggaacaggacatgctgctaactgtgagctaaattatacgccaccaaatcctgacggcaccgttaatatcagtaaagcgttagaagtgaacaccgagttcgatttatcgcgccaattatggtcttatttagtaacaaaaggaaaaattgccgatccgcgtgattttattcatgcttgccctcatatgagttttgtttggggtgcagataacgttaaattccttcatcaacgctatcgccaaatgtctgccaatcactgttatgaaaatatgcaatacnnnnnnnnnngacaaacagcaaattga

SEQ ID NO: 311193 - DNA, 342 bp, Proteus mirabilis; identical to SEQ ID NO: 27125

SEQ ID NO: 311194 - DNA, 873 bp, Proteus mirabilis; identical to SEQ ID NO: 277180

SEQ ID NO: 311195 - DNA, 1056 bp, Proteus mirabilis
ttgcgagtcggtgttttcccccaccgagtttttccccagccgggtaaattcctgctccagcgtatcctgaggctgtgtgacgatggtcatcgacagcatcgtcccttccggaaacaggtccatcagcgcattgatatttttgtcaccgcgcttctgctccccggtcaggtgccccggccccggggctttacgcagtttttcgatattcaccacaccgtgcgccaggttatcaaaccaccacacgccgttttccacatccgaccggggcggggtaaaccacagcgtttccgcaaaatccttcagcaccggcagggtgcccggggcttcctccgccgccggccagtacgccccttcccggtacagcgtctcccggtccacccagtcaggggccggattgaaatgacgcagcagccactgatgcacctgcctcccgtcctggcggacacagtgcaccccggcactgcccagactgctgaccaggcggtcacacatctgattgagcatcgccaccggcggcatcggatcggcatacgcacttcccagacgacgataaaccaccatccgggtccggcgttgctgaccgcgccagggttgcccggtcacctccgtgtctttaaacaatccttccggccgggcaatcccccgcaaatgacgcgccatttcggccagccaggcttcggtaaacgccgtgccccgtgccgccggcaggatatagtcccgcaaggtggccagcgtgacgctcacgtcgtcctcatcctgacaaaaaaactgtaccacccacgggttatcatcatgctcatccaggctgtcctgaagcgcatcctccaccgcatcccggatttccagcagacggtcaccggagcgcccttccgtcggtgccggctcaacggcatacaccgccccgaccgacaccccgtcatcaagcagcaggcattgctcctcatccagaaattccacccagggcaggtaatcaataaaagacggattcgcgtggtaaatcttctgctcatccgcccgggtcatttttcccggccgggaaagcggctgacggcctaa

SEQ ID NO: 311196 - DNA, 321 bp, Proteus mirabilis
atgaaaatcccatcacaagccctccacacgctcacccggcagggcatactgcacctggtgataaaacggaaacaccgtactgtatcccggcaccggcagattgccggccgagagatgcgggaacacatacatcaccatgtccgggttcggcagacgcggaaactgctgatggatctcactgctttgtgtccgggtatacgccgtgttcgcctgctgacgtcgcgccgcttcctcgttcgtcagcccgcgacgcagcgtactgcgggcggcttccgtcaccgtccggctgtccgtactgtccgggtcagcctgtctgcctga

SEQ ID NO: 311197 - DNA, 702 bp, Proteus mirabilis
atgtcactggtcagcggggcggccggcgggattgaaaatgccgtgaccggcgtgctgagcggcgtgtctgccggcggcggaaacagtgagcagaagtttgaggcaaaacgtaaaaccgatctgcactttttttatgcggatgccatcggtcatccggcaaccacccttatcggcggcagtatcccggggtattcctgtgacagcgcggccacaccgctgtttccttattacctgagcacgctcgacagtgtgccgtggcgactgggtgtgccggaaatggcgtatccggaagccctgatccccgggaaacgggaaatcgggtcacagcaccggggcaatatgtggggaaatctttatccgcgcagcggttttgtcacccagcaggacggagagaaagcagcagccgtggtggcgcagcgcgtggcagacattatcacccgcactggtcaggtgcatacctatgtgcccctgaaaggaaaccgccgggatggctactggccgccggaggcagtgacggagaataccggcacgaaaaaccaccaatggcagcgtctgtcaccggggctgaaaaaccgctgtgcggtgtttccggatgagagcggcccgcaggcgcaggacggcaattatgcctgggcactgtggcagccgtacagctgctgtaagcgcatggggcaaaaatttctgtacagcacaacgttttaa

SEQ ID NO: 311198 - DNA, 1443 bp, Proteus mirabilis
atgatgaaagcaaaacgacacactttttttccgccggcgctgacactgatggtgttatgcagcgtaccggcattttctgcccgggctgcgatggatttttccgtcggcgcgaatgatatcggctacggtgcgaatgtctccggcgcggtctctgacaaactgtactacaacctggggggtggcacggtgttatcccagccaccggggcgcagtaatctgcaacgtctggggatgagcatgggctggaacagtgatctgatgtgcggcaattttgatatcaaaaccaccgtgggcaatcagctgaacggggtgacggccggctttaagaatctgatgagtgaggtgatccagaatgccaccggggcggtggccagtctgccggcgatggctatccagcgggcgaatcccggtctgtatgaaatgttgaccaacggggtgttgcaggccaatgtggcgtttgataaggcgcagctgagctgccagaacatggccaaacggatgatggatttttccgaaaataatcagtggacgcaggcggcgatcctcgaagaagcaaagaatatcatcaataacagtgacggggatgcggtaaaaactgaccagcaaattcagcaaagcagtggcgataaaggggttgtatggataggcgggaaacagcgcggtggggttggtcagcctgcgattcagccggcgcaggattttgcgcaggccggctttaatatcatgaacggtctgccggcaaccagcacggcttcggtgccggccggccagtgtaccggggcggcgtgccggcggtttaccaacagtgagcaggcggctcaggtggtgacacaggtgctgggcagcaaatcggtccgcacctgcaccaatccggcggattgtcagagcggcggtgaggcaaaccagccgggcagttcccagccggggaccgggctggcgccggtgctggagaccattacccgggaaaatctggaacagttgcataaactggtgaacagccggggtgcggtcagtgcggcggatttggcgaaactgaaaaccggcagtctgacggtctcccggggcgtgattgaagccctgcgccgggatccggataaaacggcattaacgcagcgtctggccggcgagctggcgatggcggatacgatggagctggcgctgacgatgcgccggatgctgatcaccggtcagggggaaccgaatgccggtaattttccgaaagcccaggagatcggcaaccagtcggttgaccagctggatcgcgaaatcggaatgctgcaaacggaaatggaagtgcgtaaatccattgccaataatgcgatgctgacggtgattgagcgtgatcagcaacggacacaggcgaatccggccacgcagacaccggataatacggatgtgcgtgtacaggggctggagcaaaacagtgacaccggaggacgttaa

SEQ ID NO: 311199 - DNA, 423 bp, Proteus mirabilis; identical to SEQ ID NO: 27142

SEQ ID NO: 311200 - DNA, 1119 bp, Proteus mirabilis
atggagcaggagcagcagacgctgatgcaacgtctggataccctgggggcgtcgctgaccgctccgtcaggtggtcaggcagcacagggccacggacacggcgatattccattggggctggggctggatgcccagggcagtgggctgacagtgaaagacgggctgttgtgggctgagccgcaggatgcacagccggctgaaccggggcggatggttaacggacaaccggctaaaccggcgtttccgacgtcctttctggaggataacgccattacccgtcagaaagcggaactggatcgggtggccaaaaatcagcgcacgctgtccggtacggcggacggtgaggcacatactgaaccggcttataccctgccggagaatgccaccctggtggggagtcaggcgatgacggcgttgctgggccgggtacctatcgacggtaaagtgaccgatccgtatccgtttaaggtggtggtgggaaaagacaacctcacggcgaacggcattgagttaccggatgtggaaggggcggtgatcagtggcactgccaccggtgactggacgttgtcttgtgtgcggggggatatcacttcgatcacctttgtctttacggacggcacggtccgcacggtgccgaagccggctgaccggacggacggcggcagtcaggccggcagtggacagaatgcccgcaataacggcggatcgctcggctggatctcggatgagagcgggattccgtgtatcagcggtgagcgtaaaaccaatgccggcacctatctgccgaccctgtttgccctgacggcagccgcctcggccggggatgcgatgtcacagagtcagtataccgcgcagaacaccggttacggtatcacgtccacgctctccggggatgcggggaaagcggcactgggtagtgccatcggcggcgggtttaaggatgtggcggactgggtgaaatcccgctacgggcagacctttgatgcggtgtatgtgccaccggggcagaaagttgcggtgcatatcagccgtcagatcccgattgattatgaatcacagggacgccgggtgaactatggcttttcactgacagagggtgaggaaggaggtctggagtga

SEQ ID NO: 311201 - DNA, 321 bp, Proteus mirabilis; identical to SEQ ID NO: 311196

SEQ ID NO: 311202 - DNA, 657 bp, Proteus mirabilis; identical to SEQ ID NO: 287490

SEQ ID NO: 311203 - DNA, 1404 bp, Proteus mirabilis
gtgaccgggcgcaccaccggtaccgggcatcccggctggagtttctttaaccggggcggcggggtgctgacctttgatccgcagaataaacaggatcgtacccagaatgcccatctgttgttatttggtcccaccggggccggcaaatccgccaccttatgtgcccagttatcgcaactgatggcggttcgccgtccgcgtctgtttattgcggaggccggtaactcctttggtttactggcggactattacgccagtctggggctgagtgtcaataaggtcagtgtcaagcccggcagcggggtgcgtctgccgctgtttgcggatgcgcatcagctgctgatgatggatgaacagcgtctggcactgaatgcggatgaactgccagagacggacagtgaatctgaggatgatgacgggcagcgtgacattctgggggaaatggaaatctccgcccgcatgatgatcaccggcggggatgtgcgggaagaagcggagctgaagcgggctgaccgggcgatgatccgccgggcgctgatggcgggggcccgggcgtcttatgccgccgaccggcagatgctgccggcggatttgcaggaggcgctgtatgccctctcccggggggaaggtgaagaggaagggcgggcattaaatccgcagcgccgggcgaaagcggccgaaatggcggaatccctggggatgcttaccgaaccgggcagttttgagcatgagctgtttaatctgccgggggagctgtggccggaggcggatgtgaccctgattgatttggggcatctggcgcgggaagggcatgaggaccagatggcgctgacgatggtgagtcttatcaactccatcaacaatattgccgagcgggatcagtaccgggcccgggacattaattttgtggtggatgaggcgcatatcgtgacggtcaacccgctgttatccccctatgtgaccaaagtggtgaaaatgtggcggaaactgggggcctggctgtggctggcgacccagaacctcgatgactatccggactgtgccgagaaaatgctcaatatggcggagtggtgggtgtgtctgacgatgccgcagaaagaggtggaggcaatcgcccgctttaagacgctcagtgaggagcagaaacaggtgctgttatcggccagtaaactctccggctgttacacggagggcgtggtactggcccggaaagtggaggccctgttccgggtggtgcagccgagtctgtacctggcactggggatgacggaaaaagaggagaagcagcaacggcgtgtgctgatggaacgctatggatgcagtgagctggaagccgcgttccgggtggcggatgagcttgaccggaaacggggattaccgtcccgcagaagggaatgttgctaa

SEQ ID NO: 311204 - DNA, 441 bp, Proteus mirabilis
atgaaaaaacgatttttatcccttcccgggatactgatgctgtcgctgtcatgcctgccgtttaccgcgggggcggcagtggtgctgtataccacgcataatgacgccctgccgcagacggacatcccgtttgaggtggtgtatctggatgcgcctgagcgcttgctggatgaggtcctgcttcagccggggacggaactgagtgaagcggatgctccgcacatcaccgccctgttacaaagtccggcctggcaggccagagaggcggcattacggcaggcttatcagggcgtggttcaggcctggcagctgggggtgtcatctctgccggcggtcgtcgttgatgcgcagtgggtggtttacggcaccaccgatattgcacaggctgtgacacagatacagcagtaccgggaacaacaggaaggaggaggtcaaccatga

SEQ ID NO: 311205 - DNA, 762 bp, Proteus mirabilis
ttgaatacagagaaaactgttcgcgaacaggcggatattaacaccctcaaaaatgcaaaccaatataccgacttaaaaatccaggaaaataacgagttactttcagcggatattgagcaagccagaagtgactttgatgacaatcttaaaacaacaaaagcagcgttagaaaacaacatttctgatgttaatcggtcattaacaaacagtgttaatcgggcgaaaaaatatttatccgataatctggataaaacccgtcatgacctgagtgccagtattattgccagtcagaatgacagtcatcttcgcactgacagattgatcagcagagagcagaaagcacgtattgacgcattaaatgcagaaaaaactgcccgtgaacagggggatgttaccacgctcaataatgcaaacaaatacaccgatcatcgtattcgctcattaggtttaaatgtttctgatgcgttaaatgattttcaacaaaaaacagatcagaaatttgctcatctcgataacaaaattggccgtgtggaaaaacgggccaatgccgggattgccggggtgaccgcgatttccaccattccgtatgtgaacagtgagcgtttttcgttcgggatggcgatggggcattaccgcgatgcacaggcgattgccaccgggatgcagtataagccaacggccagtacgaatgtccgcctgaatgcgtcatggaataccggtggcgataccagtattggtgccgggtttgcggtgggctggtag

SEQ ID NO: 311206 - DNA, 1527 bp, Proteus mirabilis
atgtcagactatctatcatttttactgggaattgttcctttagccgttctgatttttatgattttaaaaatgaaatcggccgttcatcacgctgtcctcgtttcgctaattatcactgtggctctcgctatttttcattggaataacaccctacaatttgcctctgtatctgtactttatggtgcggtaaagggattatggccgattatcatcgttattctggcggctatttacagctataacctaatgctaaaaacaggaggaatggaggtattaaaagacgtattagcggggatcagcgatgataaacgcgtacaagttttacttatctcttggtgttttggcggttttttagaagcagttgcaggttatggtacagcagttgctattcctatcggtattttaatcgcactaggttttgatccctttaaagcagctgtcgcttcactagtcgcaaatacggtacctaccgcatttggtgccgttggtattccagtgtctattttggcacaaaataccggccttgatgtattggtgttaagtaaaaccattattatccaacttggtttattcaatattctattaccttttgtcattgttgctattgctggtggtggtattaaagccattaaaggtgtcggctttattactttaatgtgtgggatcagcaccttaatccctcaatatattgtcgcagctaatttaggtgcagaattaccagcctttgcaggaagtctagtcagtctgattgtggttattttcttggctaaacgcatgaaaacaggccatgataaaagtaaacagccaacaaaacactcagctaaagagctattagtcgctagctctatctatctgtttacttttatttttatcttagcctgctctccgctattccctacaatccaaaccgcagtaggaactattgcaactaaaattccttttgtattaagtgatactcaaactgaatatcaaactattgcttggttaagtacgcctggggtattgattattttagcgagttttgttggtggcactattcaaggtgcaagcctttcaacactcttttctgtattagtaaaaaccacaattcaattaaagaactctattattgccattatggctattgttgcgatggcaacggtaatggatttcagtggcatgattggtagcattgcggaaacattagttaactttactggcgctggatttatctttattgcccctgtcattggtgcactaggaacgtttgtaaccggaagcgatacaaactctaacgtactatttggcaagcttcaaaccagtgcagcggcaaaactccatgttgatccctttattctcgcagcggctaatacctctggggcgactggcggtaagatgatttcaccacaaagtatcgcgatcgccgtttcggcgaccaaaatggatgggcaaagcagtgccattatgcgagaaacattaaaatattgtattgcctatatcatcattctaggtgccaaaatcggcattatttatcacctaatgaattaa

SEQ ID NO: 311207 - DNA, 600 bp, Proteus mirabilis
gtggaaggggcggtgatcagcggctcggccaccggtgactggacattgtcctgtgtgcgcggggatatcacttcgatcacctttgtctttacggacggcacggtccgcacggtgccgaagccggctgaccggacggacggcggcagtcaggccggcagtggacagaatgcccgcaataacggcggatcgctcggctggatctcggatgagagcgggattccgtgtatcagcggtgagcgtaaaaccaatgccggcacctatctgccgaccctgtttgccctgacggcagccgcctcggccggggatgcgatgtcacagagtcagtataccgcgcagaacaccggttacggtatcacgtccacgctctccggggatgcggggaaagcggcactgggtagtgccatcggcggcgggtttaaggatgtggcggactgggtgaaatcccgctacgggcagacctttgatgcggtgtatgtgccaccggggcagaaagttgcggtgcatatcagccgtcagatcccgattgattatgaatcacagggacgccgggtgaactatggcttttcactgacagagggtgaggaaggaggtctggagtga

SEQ ID NO: 311208 - DNA, 423 bp, Proteus mirabilis; identical to SEQ ID NO: 27142

SEQ ID NO: 311209 - DNA, 924 bp, Proteus mirabilis
gtgcgggaagaagcggaactgaagcgggctgaccgggctctgatccgacgggcactgatgatgggcaccaaagcggcttatgccgccggccggcagatgctgccggcggatttgcaggaggcattgtatgccttgtcacggggggaaggcgaagaggaagggcgggcattaaatccgcagcgccgggcgaaagcggctgaaatggcggaatctctgggcatgtttaccgaaccgggcagttttgagcatgagctgtttaatcagcccggggaactgtggccggaggcggatgtgaccctgattgatttggggcatctggcgcgggaagggtatgaggcccagatggcgctgacgatggtgagtcttatcaactccatcaacaacattgccgagcgggatcagtacctggcgcgggacattaattttgtggtggatgaggcacatatcgtgacggtcaatccgctgttgtccccctatgtgaccaaagtggtgaaaatgtggcgaaaactgggggcctggctgtggctggcgacccagaacctggatgactacccggactgtgccgagaaaatgctcaatatggcggagtggtgggtgtgtctgacgatgccacagaaggaagtggaggcgattgcccgttttaagacgctcagtgaggagcagaaacaggtgctgttatcggccagtaaactctccggctgttacacggagggcgtggtactggcccggaaagtggaggccctgttccgggtggtgcagccgagtctgtacctggcactggggatgacggaaaaagaggagaagcagcaacggcgtgtgctgatggaacgctatggatgcagtgagctggaagccgcgttccgggtggcggatgagcttgaccggaaacggggattaccgtcccgcagaagggaatgttgctaa

SEQ ID NO: 311210 - DNA, 555 bp, Proteus mirabilis; identical to SEQ ID NO: 277197

SEQ ID NO: 311211 - DNA, 480 bp, Proteus mirabilis
atggttaaagaatgtgtaaacaatatcgattttaattcagtaattaaacgaagtgacaaaaatggtagaggtaacttagaagaattggtattgaaatttttcgcatattatgaagaaagagagttattcaaacactctgttaaagaatttctaaatgactatatggagaagaaaacaaaatcatttacaaatgagagtacgctacgggatatatttcaacaaacatttgtaacccttaacaatgctcttcctaatgggatcgtacgtgcaaatcgattaaattcaacgccattagttctattcgaagctatttccattggtgtagctgatattctttcaatgcatcaacaagttgattctcaagtactagtcgagttacttgaaaacaccacacttaaggagctaacaacaggggcaacaaatagcctgccaaaacttactggaagaataaattttgtatctcagcgagcggtaatatga

SEQ ID NO: 311212 - DNA, 702 bp, Proteus mirabilis
atgtcactggtcagcggggcggccggcgggattgaaaatgccgtgaccggcgtgctgagcggcgtgtctgccggcggcggaaacagtgagcagaagtttgaggcaaaacgtaaaaccgatctgcactttttttatgcggatgccatcggtcatccggcaaccacccttatcggcggcagtattccggggtattcctgtgacagcgcagccacaccgctgtttccttattacctgagcacgctcgacagtgtgccgtggcggctcggtgtgccggaaatggcgtatccggaagcgataattcccgggaaacgggaaatcggggggcagagccggggcaacatgtggggaaatctctatccgcgcagcggttttgtcaaccagcaggacggggataaagcggcggctgtggtggcgcagcgcgtggcagatattatgacccgcaccgggcaggcgcatacctatgtgcccctgaaaggcaaccgccgggatggctattggccgccggacgcggtgacggagaataccgggacgaaaaaccaccaatggcagcgtctgtcaccggggctgaaaaaccgctgtgcggtgtttccggatgagagcggcccgcaggcgcaggacggcaattatgcctgggcactgtggcagccgtacagctgctgcaagcgcatggggcaaaaatttttgtacagcacaacgttttaa

SEQ ID NO: 311213 - DNA, 423 bp, Proteus mirabilis; identical to SEQ ID NO: 27142

SEQ ID NO: 311214 - DNA, 423 bp, Proteus mirabilis
atgagactgatgaaaggcagtgtgctgtgcgcactggtgtttttactggccggctgtgccacctccaaagaggagctgctgccggcgggaaacagcgacatgatggccatctggtccggcagacaggctgatccgaacggtgcggacagccggacggtgacggagaccgcccgcagcgccctgcgacgcgccctgacgaatgatgaagccgcgcgccttcagcaggcggacaccgcgtatacccggacacaaagcagtgagatccatcagcagtttccgcgtctgccgaacccggacatggtgatgtatgtgttcccgcatctctcggccggcaatctgccggtgccgggatacagtacggtgtttccgttttaccatcaagtgcagtatgccctgccgggtgagcgtgtggagggcttgtga

SEQ ID NO: 311215 - DNA, 486 bp, Proteus mirabilis
gtgacgtattttgcgaagccgggggtgctggctgtgacgccggtgacgtttccgctggtgtttgtgttcagtgccggacaggccggttgtactggaagtcatttttgcctgacggtggccggtcatcaggtgtttgatgaggagcaacagcagctgattgccggcatgtcaccggcgacgatacagctggcgtggcagagtaccgccggtgagacgcccggggcggttctgtctgtgggccgtcaccgggtggggctgagtgacaacgacattaccgtttaccggtttgccccgcgggatgaggcgtggccgcaggacagtgactgggatcgcctgctgtacaccgtttttaaaggggaggcgccggataaagccggctggcaatgtgtgcctttttcactatctgaactgagctgtcacggtgagtttgcccggctgacctgccggggggcgatcctgaagggagcgggagggatcatactatga

SEQ ID NO: 311216 - DNA, 702 bp, Proteus mirabilis; identical to SEQ ID NO: 311197

SEQ ID NO: 311217 - DNA, 702 bp, Proteus mirabilis
atgtcactggtcagcggggcggccggcgggattgaaaatgccgtgaccggcgtgctgagcggggtatctgccgggggcggaaacagtgaacagaagtttgaggcaaaacgtaaaaccgccctgcactttttttatgcggatgctatcggtcatccggcaaccacccttatcggcggcagtattccggggtattcctgtgacagcgcagccacaccgctgtttccttattacctgagcacgctcgacagtgtgccgtggcgactgggtgtgccggaaatggcgtatccggaagccctgatccccgggaaacgggaaatcgggtcacagcaccggggcaatatgtggggaaatctttatccgcgcagcggttttgtcacccagcaggacggagagaaagcagcagccgtggtggcgcagcgcgtggcagacattatcacccgcactggtcaggtgcatacctatgtgcccctgaaaggaaaccgccgggatggctactggccgccggaggcagtgacggagaataccggcacgaaaaaccaccaatggcagcgtctgtcaccggggctgaaaaaccgctgtgcggtgtttccggatgagagcggcccgcaggcgcaggacggcaattatgcctgggcactgtggcagccgtacagctgctgtaagcgcatggggcaaaaatttctgtacagcacaacgttttaa

SEQ ID NO: 311218 - DNA, 198 bp, Proteus mirabilis; identical to SEQ ID NO: 27134

SEQ ID NO: 311219 - DNA, 537 bp, Proteus mirabilis
atggttttttgtcccggtattctccgtcaccgcgtccggcggccaatagccatcccggcggttgcctttcaggggcacataggtatgcgcctgcccggtgcgggtcataatatctgccacgcgctgcgccaccacagccgccgctttatccccgtcctgctggttgacaaaaccgctgcgcggatagagatttccccacatgttgccccggctctgccccccgatttcccgtttcccgggaattatcgcttccggatacgccatttccggcacaccgagccgccacggcacactgtcgagcgtgctcaggtaataaggaaacagcggtgtggctgcgctgtcacaggaataccccggaatactgccgccgataagggtggttgccggatgaccgatagcatccgcataaaaaaagtgcagggcggttttacgttttgcctcaaacttctgttcactgtttccgcccccggcagataccccgctcagcacgccggtcacggcattttcaatcccgccggccgccccgctgaccagtga

SEQ ID NO: 311220 - DNA, 198 bp, Proteus mirabilis; identical to SEQ ID NO: 27134

SEQ ID NO: 311221 - DNA, 363 bp, Proteus mirabilis
gtggtgctgtataccacgcaggatgacgctctgccgcagacggacatcccgtttgaggtggtgtatctggatgcgcctgaacgcctgctggatgaggccctgcttcagccggggacggaactgagtgaagcggatgccccgcacatcaccgccctgttacaaagtccggcctggcaggccagagaaacggcattacggcaggcttatcagggcgtggttcaggcctggcagctgggggggtcatctctgccggcggtcgtcgttgatgcgcagtgggtggtttacggcaccaccgatattgcacaggcggtgacgcagatacagcagtaccgggaacaacaggaaggaggaggtcaaccatga

SEQ ID NO: 311222 - DNA, 198 bp, Proteus mirabilis; identical to SEQ ID NO: 27134

SEQ ID NO: 311223 - DNA, 453 bp, Proteus mirabilis
atgcgcctgcccggtgcgggtcataatatctgccacgcgctgcgccaccacagccgccgctttatccccgtcctgctggttgacaaaaccgctgcgcggatagagatttccccacatgttgccccggctctgccccccgatttcccgtttcccgggaattatcgcttccggatacgccatttccggcacacccagtcgccacggcacactgtcgagcgtgctcaggtaataaggaaacagcggtgtggccgcgctgtcacaggaataccccgggatactgccgccgataagggtggttgccggatgaccgatggcatccgcataaaaaaagtgcagatcggttttacgttttgcctcaaacttctgctcactgtttccgccgccggcagacacgccgctcagcacgccggtcacggcattttcaatcccgccggccgccccgctgaccagtga

SEQ ID NO: 311224 - DNA, 702 bp, Proteus mirabilis
atgtcactggtcagcggggcggccggcgggattgaaaatgccgtgaccggcgtgctgagcggcgtgtctgccggcggcggaaacagtgagcagaagtttgaggcaaaacgtaaaaccgccctgcactttttttatgcggatgctatcggtcatccggcaaccacccttatcggcggcagtattccggggtattcctgtgacagcgcggccacaccgctgtttccttattacctgagcacgctcgacagtgtgccgtggcgactgggtgtgccggaaatggcgtatccggaagccctgatccccgggaaacgggaaatcgggtcacagcaccggggcaatatgtggggaaatctttatccgcgcagcggttttgtcacccagcaggacggagagaaagcagcagccgtggtggcgcagcgcgtggcagacattatcacccgcactggtcaggtgcatacctatgtgcccctgaaaggaaaccgccgggatggctactggccgccggaggcagtgacggagaataccgggacaaaaaaccataaatggcagcgcctgtcgccggggctgaaaaacagctgtgcggtgtttccggatgagggcggagcacaggcacaggacggtaattatgcctgggcattgtggcagccgtacagctgctgcaagcgcatggggcaaaaatttttgtacagcacaacgttttaa

SEQ ID NO: 311225 - DNA, 333 bp, Proteus mirabilis
gtgggcattgcacaggtcaatttaggctggaacgggcatcacttccgttccgcctgggaggcctttgatccttataccaatttgcatgtggccgcccgcatcctgcgccgctgttatgaggcgtcaccgggtagttggatccgtgccgccggctgttatcaccatccggcgggcggtcagcccgcagtacgctataaaaatagtgtccggcgtcagctggcgacactgacgggcggtacacaacccgttcccgctcatttaccggcagtcagtacagatcgggctgtatcgtttgtgtggatagaaccggagaacaaaaccgatgcgaaataa

SEQ ID NO: 311226 - DNA, 453 bp, Proteus mirabilis
atgcacctgaccagtgcgggtgataatgtctgccacgcgctgcgccaccacggctgctgctttctctccgtcctgctgggtgacaaaaccgctgcgcggataaagatttccccacatgttgccccggctctgccccccgatttcccgtttcccgggaattatcgcttccggatacgccatttccggcacaccgagccgccacggcacactgtcgagcgtgctcaggtaataaggaaacagcggtgtggctgcgctgtcacaggaataccccggaatactgccgccgataagggtggttgccggatgaccgatagcatccgcataaaaaaagtgcagggcggttttacgttttgcctcaaacttctgttcactgtttccgcccccggcagataccccgctcagcacgccggtcacggcattttcaatcccgccggccgccccgctgaccagtga

SEQ ID NO: 311227 - DNA, 255 bp, Proteus mirabilis
gtgctgctgtccgcagccaaactctccggctgttacacggaaggggtggtgctggcgcggaaagtggaggcgctgttccgggtggtacagccgagtctgtacctggcactggggatgacggaaaaagaggagaagcagcaacggcgtgtgctgatggaacgctatggatgcagtgagctggaagccgcgttccgggtggcggatgagcttgaccggaaacggggattaccgtcccgcagaagggaatgttgctaa

SEQ ID NO: 311228 - DNA, 255 bp, Proteus mirabilis
gtgctgctgtccgcagccaaactctccggctgttacacggagggcgtggtactggcccggaaagtggaggccctgttccgggtggtgcagccgagtctgtacctggcactggggatgacggaaaaagaggagaagcagcaacggcgtgtgctgatggaacgctatggatgcagtgagctggaagccgcgttccgggtggcggatgagcttgaccggaaacggggattaccgtcccgcagaagggaatgttgctaa

SEQ ID NO: 311229 - DNA, 426 bp, Proteus mirabilis; identical to SEQ ID NO: 299322

SEQ ID NO: 311230 - DNA, 426 bp, Proteus mirabilis; identical to SEQ ID NO: 299322

SEQ ID NO: 311231 - DNA, 291 bp, Proteus mirabilis
atgtcacagagtcagtataccgcgcagaacaccggttacggtatcacctcctcgctctccggggatgcggggaaagcggcgctgggcagtgccatcggcggcgggtttaaggatgtggcggactgggtgaaatcccgctacgggcagacctttgatgcggtgtatgtgccgccggggcagaaagtcgcggtgcatatcagccgtcagatcccggtggattatgaatcgcagggacgccgggtgaattacggtttttcactgacagagggtgaggaaggaggtctggagtga

SEQ ID NO: 311232 - DNA, 198 bp, Proteus mirabilis
atgttaccgccgatatggccttcagatggggttgactccccggcattctggttggccgtgctgatgtggtgcgtgttctttgttgtgatggggatcctggggaaaagaaaacgcactgcccaccgtcatcgtcactgtcacgggaaaaaaacgcctgtgccggaaaaagaaaatccgtcagagcctcctcatggttaa

SEQ ID NO: 311233 - DNA, 198 bp, Proteus mirabilis; identical to SEQ ID NO: 27134

SEQ ID NO: 311234 - DNA, 456 bp, Proteus mirabilis
atgttgcgtgtccgtgaactgatgaccgcgaaattactgacggaacagttaccggaagtggatatttacaccaaaaccctggtatccgggatcaccgatatttccaatccgaggcaggggagtgattttacctccaatacccaggacagggtcagtatggtggcgaaacccttactgttaccggcggatattattcagttaccgaaaggacaggcgtttgctctgctggaaggcggaaagttgtggaagatccggatgcccctgccggcggcggaggacgatgcgctgatgccaccggatttgcaaaaaatcgcacagtatatggagaaaaattaccgtaccggcgaaacctggtggacagccgcgtcattttcagatgcgcggcctgatacagacggaatgaaggtgacagaaatgacgccggatacggaaggaggcaacgatggcaacagctga

SEQ ID NO: 311235 - DNA, 327 bp, Proteus mirabilis; identical to SEQ ID NO: 14564

SEQ ID NO: 311236 - DNA, 324 bp, Proteus mirabilis
atgatggctatctggtcaggcagacaggctgacccggacagtacggacagccggacggtgacggaagccgcccgcagtacgctgcgtcgcgggctgacgaacgaggaagcggcgcgacgtcagcaggcgaacacggcgtatacccggacacaaagcagtgagatccatcagcagtttccgcgtctgccgaacccggacatggtgatgtatgtgttcccgcatctctcggccggcaatctgccggtgccgggatacagtacggtgtttccgttttatcaccaggtgcagtatgccctgccgggtgagcgtgtggagggcttgtga

SEQ ID NO: 311237 - DNA, 441 bp, Proteus mirabilis
atgaaaaaacgatttttatctctttccggattgctgatgctgtcgctgtcatgcctgccgttgaccgccggggcggcagtggtgctgtataccacgcaggatgacgctctgccgcagacggacatcccgtttgaggtggtgtatctggatgcgcctgaacgcctgctggatgaggccctgcttcagccggggacggaactgagtgaagcggatgccccgcacatcaccgccctgttacaaagtccggcctggcaggccagagaaacggcattacggcaggcttatcagggcgtggttcaggcctggcagctgggggtgtcatctctgccggcggtcgtcgttgatgcgcagtgggtggtttacggcaccactgatattgagcaggctgtgacacagatacagcagtaccgggaacaacaggaaggaggaggtcaaccatga

SEQ ID NO: 311238 - DNA, 423 bp, Proteus mirabilis; identical to SEQ ID NO: 27142

SEQ ID NO: 311239 - DNA, 300 bp, Proteus mirabilis; identical to SEQ ID NO: 299210

SEQ ID NO: 311240 - DNA, 300 bp, Proteus mirabilis; identical to SEQ ID NO: 299249

SEQ ID NO: 311241 - DNA, 279 bp, Proteus mirabilis
atgcgccggatgctgatcaccggtcagggggaaccgaatgccggtaattttccgaaagcccaggagatcggcaaccagtcggttgaccagctggatcgcgaaatcggaatgctgcaaacggaaatggaagtgcgtaaatccattgccaataatgcgatgctgacggtgattgagcgtgatcagcaacggacacaggcgaatccggccacgcagacaccggataatacggatgtgcgtgtacaggggctggagcaaaacagtgacaccggaggacgttaa

SEQ ID NO: 311242 - DNA, 363 bp, Proteus mirabilis
gtggtgctgtataccacgcaggatgacgctctgccgcagacggacatcccgtttgaggtggtgtatctggatgcgcctgaacgcctgctggatgaggccctgcttcagccggggacggaactgagtgaagcggatgccccgcacatcaccgccctgttacaaagtccggcctggcaggccagagaaacggcattacggcaggcttatcagggcgtggttcaggcctggcagctgggggtgtcatctctgccggcggtcgtcgttgatgcgcagtgggtggtttacggcaccaccgatattgcacaggcggtgacgcagatacagcagtaccgggaacaacaggaaggaggaggtcaaccatga

SEQ ID NO: 311243 - DNA, 321 bp, Proteus mirabilis; identical to SEQ ID NO: 311196

SEQ ID NO: 311244 - DNA, 1416 bp, Proteus mirabilis
atgactcgatatgaacagcttgcggcacagatacgccaacaaattgaagataatatttggcaatcaggcgatcgtttaccctcattacgggatacggttaaacaatcaggtttaagtttaatgaccgttttacaatcttatcaactgttagaaagtcaagggtggatcaccgctcgtccgcaatcaggttattatgttgcacatcgcaatacaggttttgctcaagtaactgccagcaaagggctacatatgagtgaaaatgttgagataagcgcctctatattcaatgttcttcaagcctgtaaagatcccaatatcattccgttcggttccgcctttccagatcccagtttattcattcaacctaaattaagccgagcattagcctctgccgctagacatttagcccctcaaagttcagtgattaatttacctcctggtaatgaaaaactacgtcgtaatatagcccaacgctatgcactgcaaggtattcatgtatcgcctgacgatattgtgatcaccgcaggtgcgatggaatcattaagttttagtttacaagctgttactgagccaggagattgggttgtcatagaatctcctgctttttatggcgcattacaggcgatagagcgtttacgattaaaagcgattgccatcaaaaccgatccggtgacaggcatttgtttagatgagttagagaaggtggtagaacaatacgacattaaagcgtgttggttgatgagtcattgccaaaatccattaggtggcactatgcctgatgaaaataaaatcagactagtagaaattttagcggcaaaacagataaccttaattgaagatgatgtctatggtgaactgtataatagtccaaaagcgccaatgcctgtgaaaggctttgataaatccaatagcgtattgcactgcgcttctttttctaaatgtttagcgccaggatttcgagtcgggtgggtcgcagccggaaaacatgcgactaaaatacagcagttacaaatgatgagtactgtatcagcgagtatgccaacacaacaagctatcgctgactatttatcacaaggggggtatgacgggcacctacgtcgcttaagattattattagagcagagacgttatcgtatgttacaggccatacaaacgcatttacctaaagatgttaaagtgaatattcctgtcggaggctatttcctatggttagaattcgagccaagctttgatgctaattcattgtaccattttgctctcgaaagaggggtgagtattgcaccaggtgctatgttttcgaccagttcacagtttaatcatgcttttcgtttaaactcttcttttcaatggaatggtcagactgaaaaaggaatgcaaattattggtgaagggtgtcgaaaattacgtcgtaaatag

SEQ ID NO: 311245 - DNA, 174 bp, Proteus mirabilis
atgaaagagatagaacaattttatcgtgaattagaatcagctattaattttattttagaagataaagagtattatgattttatagataatgctttagtcgattatatagaaaatgctactaataagtttatttatgaatggaatgatgatttctttgaaaaaaatgtaaaataa

SEQ ID NO: 311246 - DNA, 519 bp, Proteus mirabilis
atgccaactccttgctatatttccattgaaggaaaaactcagggcaacatcactgcaggcgcgtttactgcagattctgtcggcaacatttatgtacaaggtcatgaagaccaaatgttggtacaagcattttctcacgtggtgacggttccgaccgatccgcaatcaggacaaccttccggccaacgtgcgcataaaccatttcgttttaccgtggcattaaataaagcggttcccctgctgtataacgcattggcttccggcgaaatgttgccaaaagtcgagctaaaatggtatcgcacctcggtagaaggtaaacaagagcacttctttaccacgacgctaactgacgcgactatcgtgaacatcgattgccaaatgcctcattgccaagatccggctaaagccgacttcacgcaacttatcgaagtctccctctcttaccgcaaagttgactgggagcatactgttgccgggacttcaggtgcagatgactggcgtgcaccactcgaagcataa

SEQ ID NO: 311247 - DNA, 870 bp, Proteus mirabilis
atgtctataacaaattcaaaaaaatatcaaaggctgggtgataaggatggcaacccactgaatgggggtaagacattaacccatggcgggggcagaacatacgcgcaagatctcgctttacaagagcaacatagacaactcatagagaagatcttaagtggcgacatgcaaagtggcttagtgtttacttgtcagattggtggattacccgaagagactttccaagtcacgcaattcgatttacaagaagggatctcacaacttttcaccctctccatccaagccgtcagtccactctcggaaattgattttaatgatgtgttaggcatggcttccagtttgacagtaaagcgagatggtcacattctgcgtacagtacaaggtatcttagcggcggcagagcaagggaataccgatggggtaaaaacctggtatcaatttgtgatacgtcctgaaatgtgggtaatgaccctcaaacaagatagtcgtatttttcaagataccaccgttcctcatattcttgagacattactcaatgagtctcacattaaatatgataaacagctttatcacccagaagagcatttgcagcgcgcctataccactcaaaaacgagaaacaatgtatgacttttggtgccgtttagccgcagaagaagggattaatttttggtttgaagaaggcccacagttattttatagcgaccgacatttgggcatgagagcggggatatccttaacctataacccacaatcggatacagagatatcaccgatagcaccgccacaacgtggcgctatgttgaacaactctgtagcgatattcgcgttgataaagattacaatcaacttagaccttcctaccccttaa

SEQ ID NO: 311248 - DNA, 462 bp, Proteus mirabilis
atgaaatacgggaaactctatgccgttattacgatggtaggcatcattgtgggaggctattgggtggttaattggcaagctaataggattaattcactgacagataccaacaaaaaactgacagtagctctcgaagaacagaagtctattaatactgattatcaagcacgcataatgcggttaaaccaactggatattcaatatacgcaggagttagcgaatgccaagaatgaaattagtcgcttgcgtgatattagcgagcgtcatcctgagcgggtgtatatcaaagccgagtgcccaaaaagcaaaaccacttccgccacccgcttggcttatgcaaccaccgcccgacctactgacaccgctctccgaaattattggttactcagagaacgaattgcagagtcagagcaaatgattaaagggttgcagaattacattagagtggagtgtgtgaactaa

SEQ ID NO: 311249 - DNA, 336 bp, Proteus mirabilis; identical to SEQ ID NO: 307627

SEQ ID NO: 311250 - DNA, 882 bp, Proteus mirabilis
  misc_feature (799)..(808): n is a, c, g, or t
atggatggattagtttttacctgtcaatttaaaggaattcctgaagaaacattcactgtgacagaatttcaactgactgagcatttatctgagttatttacactttctttaactgcggtaagttcattaccgtctatctgttttgatgatatgttggggtttgcttgttccttaacggttacgcgcaatggtaaacctattcgtactgtacgtgggctattagctagtgcggagcaacaaaatacagatggtaatcaaacgtggtatcactttattattcgacctgaaatttgggtcatgtctttagggcaaaacagtcgaatttttcgacaaataacggtgcctgacttacttcagcaattattatttgagtctcatattaaagcagattgcaaactctatgctgaggatgcttatcctaagcgtgattatataacacaaaagcgtgaatcagattatcagtttttttgccgtttagctgcagaagagggaataagcttttggtttgaagatgcaggaattgagccacggatgttttacagcgattctcacttaggtatgacggcagatattgacttaatctacaacccacaatatgaaacagatactagagatcatactgcatatcattggcgttatagagagtcactgctttcagataaaattctttacaaagattataattctaaacgtccttcttatccccttgaaagtaaaatagaaggggaaatacataatcagcatccattttatgaaagttatgggcgttttcaattagacgatgaaggtcgacctctgnnnnnnnnnnagatgatgcagatcgttataccaaaattcgaatggaagagatacaacaacaacgttgcgtcggcaatgcattaa

SEQ ID NO: 311251 - DNA, 258 bp, Proteus mirabilis
atgttaaacaacaataaagccgttgaacttatttcgggttatcgttcactcgcgactaataatcatctacgtcaacacaccagcggtgttgcgaaaaaaagctatcatacccgtggtcaagcaatggatttccgtttagtaggtactgatttatctaaagtacgccaagtagcactaagaatgaaagcgggaggagtgggttattatccacgaagtaattttgttcatatcgatacaggacccgtgcgctcatggtaa

SEQ ID NO: 311252 - DNA, 276 bp, Proteus mirabilis
atgatgtatcacattatacctgtgacaaattatatgcaaaattgcacccttatctggtgtgatgataccaaagaagcggccattgttgatcccggtggtgatgtcgaaacattaattgcagaaattgaacaacgtcaattaaagttgactaaagtgctattaactcatggtcactttgatcacgtagcaggaacggctcaaattgttgagcattttcatgtgcctgtttatgggccacataaagatgacaacttccttattgaagatttagtctag

SEQ ID NO: 311253 - DNA, 366 bp, Proteus mirabilis
atgtttaacttccccagtggaaaatcttttacgcctgatcaatggctaaatgaaggggatactgtcactattggtaaaaccattactttgtcggttttacattgtccgggccatacacctggccatattatttttgttaatcaccaaaataaacttatctcgatgggagatgtattatttcgtgaaagtattggtcgtactgatttccctcgtggtaatcatgccgatctgattgcctctatcaaaaataaagtattaccactaggtgatgattatctatttatccccggccatggccctatgtctaatttaggtcatgagcgtcaatataatccttttttacaagatgaaatgcccatttggtaa

SEQ ID NO: 311254 - DNA, 339 bp, Proteus mirabilis; identical to SEQ ID NO: 297223

SEQ ID NO: 311255 - DNA, 669 bp, Proteus mirabilis; identical to SEQ ID NO: 295338

SEQ ID NO: 311256 - DNA, 189 bp, Proteus mirabilis; identical to SEQ ID NO: 302547

SEQ ID NO: 311257 - DNA, 237 bp, Proteus mirabilis
atgaataaaaatgaacttcaagtattaatcgattataccaaaggcatgattgcagataataaggagccagaaaggaaagttattgttgcattgtgtgatgagctggagagagttattagtaaatatccagtcggttttgcttctgaaaaagaacttagaaatttaaatattaaatttactacgctacatccattaaaaactagctaccataatataccactctaccgcttagattaa

SEQ ID NO: 311258 - DNA, 321 bp, Proteus mirabilis
atgaacagttttatataccgtagtcaaattatgaaattcacactgccagaaccagaccctaaagatgtttgcaatctttgcggtggtaatgtcggaaaagataatttaatccaaggtcaggcagcaaatatttgttttgactgctctgatttagcgaaggaaatggcagatgaaaagcgtaaggaaatagctgaaaaggaaattcagcaaatggcgaaggatttatcaaccagtgatgcagggttggttgatatgggaatggctacttccagagcgcatgccgagcgtttatataaagctggatatagaaaggtgaagtaa

SEQ ID NO: 311259 - DNA, 204 bp, Proteus mirabilis
atgacagataaagcattaaaacgcgtattaaaccgcattgactacccatcaaatggggttgctgttcatcaggaaatagaggttatagataaccaatatttagatacatccatttctatttatggtgatttctcaatatcaggcagtgaaagggatagttttttaaaagagcttggtgaggtaattaataaatacagaatttaa

SEQ ID NO: 311260 - DNA, 582 bp, Proteus mirabilis
atgtcattaacactttttcctgtcgcggcattaatcacatcctctgtggcaattggtctttttatagtaaaagaatgtagagaaagttgtaaaaagaaaaaggctgataatttgaagttgattagcctatgtttgctttttctagaaaaaattagaattaataaactcactgcaaaacaattggatttattttcagatgcaattttaaatggagaatataattattgggaggttaaatatgaatttggaatgattactattggctctggtttagatagagctaacaaacatgatttattgtcttttgcagaaaaagacttctttgaaaaaggtatttatgaattagcatttttagatgtggatttgtttaatgatgtgacaaaattgattatcgagattgatgaatttaatttacaattaaaaagattactctttgttttatatgtaaataactataaacatacaaatatagaaaatatcaaaaaatcactgaaaagatttaatgattatatagagaaaaaatttacacctattctaaattccgttgagagtaaatgtaaaaaaataggtagtgtcgaataa

SEQ ID NO: 311261 - DNA, 1416 bp, Proteus mirabilis
atggggagtaatagctggcgggaagtaaaactatctgatttaggtgaggttgcacgaggtcgttcaagacatcgacctagatatgctgaacacctatatgggggagaatatccttttatccagacaggagatataaaagcttctgaaggtcgtatttcttctcatgagcagacatactctgaggctggtttggctcaaagccgtctttggccagcaggtacaatgtgtataacaatcgcagcgaacatagcagagacgggagttctacagtatcccgcatgttttcctgatagtgttattggttttattgctgataaaaataaagcagatgtctactatattgagtatgtatttagaaagttaaggaaagatattcagcggcaagcaactggctctgttcaagataatattaatctccagacttttgaacgattgaagtttaaagtacctcatgttgaagaacagcatagaattgccaactttcttaaccattttgataaaaaaattaccctcaaccgccaaatcaaccaaactctagaacaaatggcgcaaacgctatttaaatcatggtttgtagattttgatcctgtggttgataacgcgctagatgccggtttttttgagcaagatttaggcttttctgaagaattactgcatcgagttgaagtgcgtaaaacggtgcgtaaaagtgataattttaaaccgttatcagaggatattcggcggttatttcctgatgcttttgaagaatgtactgagcctgcattagggcttggggggtgggtgccgaagggttggaaagtaaaaatgctgggtgagataactgatgaattacgaagaggaatttctccaaaatatattgaggagggtggtgttcaggttattaatcaaaaatgtatccgaaatcatgaaattacatacgaattaactcgccgacataatcaagagataagatcaattttaggaagagagcttaatattggagatgttttagtcaattcaactggtgttggaactttaggtcgtatagcacaagtaactagtttgcctgaaactacagtagtagattcgcatgttactgttgtaagagctagtgatgagatgtgtcccattttcactttcggtcaattaatgatctccatggagaaaaatattgagcgattgggggaaggaagcaccggacaaactgaattaagccgtaaaattctctcagagcaattggtaattctaccccctcgaaatatagcagttaaggcagaagtttcatttaaatcattttcagagatgcaaaccgcaaatcgtaatcagaatacggaattaaccaaactccgagacacactcctcccaaaacttatctccggcgagttgtctttgagtgatataaaaatagatattccagaagaaacacttatttaa

SEQ ID NO: 311262 - DNA, 918 bp, Proteus mirabilis
atgatgaatattaaagctaaacgagatattgcacataaaacaaaaatcttaaatcatgcccgcgagagcaaaaatattgctaaaacttgtcgtcattttgggatcagtagagaaactttttatacttggaaaagagcttatgaacgagatggcgaaaaaggattaataaacaataaaccctgtcctgaaaatccaaccagaagagttgcaaaacatatcgaagagctggttatttatctgcgtaatctgcgtacgacttaccattttggcccccagcgcatcgcttggtatcttctgcggtttcataacatcaaaatatcacgctctggctgctactatgtattactaagaaacaaattaaaccaacttccccaaaatcagcgaagtcgctctaaaccactatttaaacgttatcagaaacaagtgcccgggcaccatgttcaagttgatgtgaagttcctattttttaatacgccagatggtcaacgaattaaacgttttcaatatacggcgattgatgatgcgacacggatcagagcacttaaaatttatgaaaagcacaatcaggctaatgccattgattttattaattatgttgtaaataaatttccctttagaatcaaaatgattagaacggataatggtcacgaattccaatcaaaatttaattggcatattcatgatctcgggatggagcatgtttatatcaagcctgcaacccccagattgaatggaaaggtagagcgttctcatttaacagataaacaagagttttatcaattaatcgattataaggatgatgtcgatttacatgaaaaattagctgaatgggaggctttttataattgtcatcgccctcactcagcgcatgctggtaaaacaccatatgaagtgttaaaaaataagcttggtctttaa

SEQ ID NO: 311263 - DNA, 408 bp, Proteus mirabilis
atgaagataattaatacaatatattttaataaattaggagatgaaagaggttccctcacatcactagagcaaaataaaaatattccttttgaaataaaaaggatttattacatttttggtacaaaaaaaggcgtttctcgtggttttcatgcacataaagaattacaacaattagccatctgtgtccgtggtagttgccgttttatcatggatgatggaaaaaatagagaagaaattatattaaatgaccccaatttaggacttttaattaatcctatgcaatggcatgaaatgcatgatttttctgaagattgtatagtaatagttttagctaatgattattatgatgaaaatgattatatacgtaattatgattcatttataaattcacaggatttgactatatga

SEQ ID NO: 311264 - DNA, 165 bp, Proteus mirabilis
atggcgtcatatagtggagatcggcaaccaatgcaaaaggtagcagagtacagaatagatataccgtacgttgctattgcacataaaacaaaaatcttaaataatgccggcgagagcaaaaatattgctaaaacttgtcgccattttgtcgccactgacctataa

SEQ ID NO: 311265 - DNA, 2418 bp, Proteus mirabilis
atggataaaaatatagatttgaggaagttgccgctgtctcatttggtttatttgaatagcgaggttgatgcagataaagccaacaaatttgtggtttatcactatccacttctcaataacaactatcagtggaaagagaagaaagcctgggaagaacgtatcgatgctgaactagacagtcggcagtttgcctatttaatgaaaaaaaatggtaatcagtttggtctctatgtggctttacaaagctcaagtgatattcctccgtctattgtagacgctgagttgcaacctattacaccagttcgagttgaatattcaccggtgttaaatcctgtgtggattcgactaatgatgcgttcattgcgggcttttggcggtcattgtaaaggcgcttacagcttaggttgtccgttattgaaagtagatagctgggctggcggtgtcaatgcgatcagcctagattgtagaactcagcagttaaaagatggaaataccactgagattgctctgttttataccaatgttccattaagaccgttatctaatgacgatgatatagatcgcattaagaagcctctatgggtctatgacaaaaataaggtactcgtcaggtggtatcctggccatgaaagaaaaccgagaggtacgctgtttaaagaaattggaaagagtaaaaattcacgtaaacagcgtccgtttctggatctttctacgccaaagaggtttgagcaaagttggcctatggtgttaaaaccagtgcaagatacgtttatccgttttgcgcgtgactatggttttgaactttcagctaaaatattaaatctccaaccactgacgttgaaaacaaagcataaggccaataaggctaagtcatctttcccaagcatcgagatatccggtgaaatcaaggttttagacctaagagttaataccgttgttgcttgtgaagaaatcttagacctatttaaatcgctcattgcacagaaaggcgtcgatgtttcgtggaatttactagatggaactgcggaaaatgactttgaacggataaaacttgaacgttcggaccgcgttttgattttgctagatcaggaaaaaggtattgaagatgatcgttatccactaacgaagtcgttagttggacggtgtgcagttcaacatatcaacgttaatcctcatgatgtaacgggagatccagtcgaaaaagggtttttaattgaatcaaaaagagacgatgacccgataaagctatacgttgcgtctgaaggtggatattacacctacaactacgaattattagataccaaggcatacaaagaagcgattattagaaagcttgaagtggttcttaaagaattagagatcaaacgtttactgattgattctgatagggctatttctcaagtcttgccattgcaacgcgcctgtttaaatgaatcaactattgtcattactgatggttatttgtttacggtttcaaacgacagaccggtgttgatccccttcgatcccactgattctggtatgactttgaaaacaaatgagtacctggccaatttcgaaacatccgtagatgatttgctcactttgatgaatgagaattggccttatagttatcgtcagaatgtcgtaatggattactacggtactgaagttgataaacaacgacgatttgcggcaagaattacgcttgttttgagtaagaataaggacgaacaagtatcaatcatgatgcaagatccatcttacgaccaaacgaatgtattgccacttggtatggaagatgcgctttcggatttaaccaagaaacagaagccttatccgttgacggattgggttctgccagatagtgaagtattgctcaatattgtcaaagagttgagtgatgatggcgtgttatccagcaaaaaggcaacaatgcgatttgaaagtgagttacccgaattagttgaattatggcaagaacaattagtttcgcttcatcagcaaaatgagacgaaggtgacttactatcaggtaaaaaaagaggttattcagcgttggttagataagcgaggaaagaaaaaagatacatcaatcagcggtagtttagataccttgttatctcgattcttcgataagcctttaaacgacatcaaacgctggatgagtaacataccgggtattcaacgcatatggtacgacaaagaaaaggggtattttgttgtcggtggattaacctctccaaaagctcagttaatgagacagccaagcatccggcaatggcacaccttgaaaggtgaattggacatcgaattacttgctgatttgctagatgttgattgggttcgtatgaatcagcttgcgggcaacccatgtgcggcaaccttagtcaagcgatggaaagagataaaccccaatatactcgctattctagactaa

SEQ ID NO: 311266 - DNA, 3882 bp, Proteus mirabilis
atgagtcagctaataccgacttcgtataatcaaatcattgcgcatacgatagagcaagcacttgctctatcggttaatgcaaagaacgaaaatgctattgctggcttttgccagttgcaaggcccaacaggcggtggcaaaagtagttctctttatcgtagcccggacgggaagatacctgcgagccttgaatttataaaatccaaagggttgcaggccatcttagttacccatcgctggaatatcctgcatgacatttatgaaagtgccacgagtgaaaaagacagctcgggtaaccccttgctggttagtattctttatgcacaggatgaaactgtcgttagtgcggtttcgcaacgagcactgccacatgaacaaggtgttcaaaagtctgacttgcccgatccttataaggccattgaggatattcatggtttaggtgcgtttcgttctaatgctgataaagaggctctcgtcagtgcttgccacaatgtttcagccatagcccgtaatgttgagtataaaaagaaaaaccctgattcgatgggcgtcttactcgaacgagaagagcaggaactaagaaaactgtgtggctttgtcgaacggacgctacttgggtgcatgtcgtccttagagaaggctgtgaagtatgccagtaagcaccatggcaagacgcatgagctcacggagcaaccaaaagaaaagcttcgtttattcagagaaaataaatgggtgcgtcgaattttcccggcgattgcctggcacgatgataagcaacatttgctggtgttaacaacgcagaagctgttcgcttccttttacgacggtaaacagaaagttagaatgtcgagcggccaactggccggaaaggttgtatttgttgatgagtttgattaccaagcggacattctacagacattacttgcccagtcccaaatggtgcaagagccgcctgagtgtattggtcaattacttgaaggcggtaagcgcctattagcgcgaatgcagtttgttactgctgaacctatacctgagctttacagtgagcttaaacagcttattgcggagctagaggaggatttgaccagcaaaggagtcgatctgaatcagtctagggcactggtaatgcctttaaaacagtatgaatccggtgttccgttcgaaaagaaatatctgtttcgctcagaccacttagtaaccagtgagcctttgcaattacagcaaaaacctcatggctttgaagtgaaaagttatgagcaaagcgatgatgtatcggttgatgttggtgattttttgcgtgtgatggagaaatatatcagacgcttcagtttgctgttgtcacagttcgcgaccgatgagtccgaagcttatgaatatcttgttcggctaaaccggttactgttcgaccccgcgaacgattatcgaccatcctactacagcacagcgttacccagtttatcgctgttctcattacctcgcacaagcttacctgagttagaagcgctcagtagatcaaacctattacctaatactcagacgaatatgtttggcctaacaacctggctgttaaccacggatgaagccgaggcggatattgacccgttgaggatcaaaattaaacgcgcactattgccgacaacgcctgaagggttaatggtttcgttatcgagtcggaacctggtttttgcactatcagcaacctcttatatcgaaagggggattggtcatttcgatatacgctggattgaaagcgctttgcgttacgtggctcaggcccgcaatccacaatgtaccgagagttttctgggcgatagctttgagcagcgccccgaagattggtttaagaagccgattccatatttacaaactgacgaggataagcagttacaaatggcggtgatccgctcgttggttaaagataaatctgaaaagcgtcgctcgacactaaaaaccacgatccacgactttgatgatgctatcaatgccccagtttttcaggaggcaaaactgcatttgaacgctgcattttttgaggctgagcactcagattacaagtatgaataccggcagtctgtgttgtttaaattactgcacgttctgcatttggcagcgaatgagccacaacataaagggcacctggcctttgttaactcagtcaaataccttcggaagtggttgataagtgataccgcagagaacagcagaatgagcgctgattggcttgaaatggagcgtttaaccactgacgtattgtcttcatttgacgatgtgtttattcctttggctgtcaacggcaagcccatgatgatttgcttgctcaatgctgaagcacaaaagcgagaaggatttgagcacgcatatcaagcggcgttcgactctggccgtaccgtggtggtaatgacacaaactgcatccgctaccaatggcattaatttggattactccttgcctaactctcaagggcagatggatctgacgtcgctgtttattattgaaagtaagcacttttacttttcaccatgggatagcaatgacgatgatgacgaaatgtctcatgctggctttcagctcagaaacttagaaaaattagtcaggcgttcagagttttcacgtaagcagcagcggcaatttattatgccgttaatgaataactcagtcgctaaaatccaggaactaaacaaactctacaaagcgacaaatgactacgttaagaatcttgccgctgacgtgcagcagcaagtgggtcgtattgaacgtgcttggacgtatgtgccccatgtcgctattcatttaagcgatgatttagcaggccatcttcgcaactacggccaattaaccgtttgtactaacaaccgaaattgggtttcaaaccttaataatcagctgattgatgatcttactcattccgaagatgcatcggtttccaactttcttgccctgttgaaaacgcgctcccaagatggctctggtgcggtagatattattgataataagttagtttccgctatccgagatgcacgacaaggtaagggttgtatcgaagatatttcaggactttggcatgaattaggccgcgctgtattacagcatgatctccaatggatgccgcataacaatacgtttggcattactgagcctttgtgtcgttgggcgtgctttgaacggcccgaggaatcaaatgttactggtgaaatatggtacgacccaaaaagttggcagttctttgcaaagcgtgctgcgggattgattaagtataacccccagacgctttatgaggttgttaaccggcaacctgctatttcggattggtttaatcgtaaaggttttcgaacgtcgtttcagccgtttgccaacgatattgaagagcaattctcatttcatcccgtcgtgattcagcgaattttacaagggcgtattggtgaagaaggtattcgcgcactgctgagtgacaagcagctagccactaaacaagacgtctacaaccatgagctatttgaactatatgattttgagatagccaacgcggatgtttttgttgatgcgaaattttggtctattgctgctctggaacagtcggatgagggctttgagcaatggcttgcttcaggcaaacaccctgaatttgcgcctttgggattaattaagaagctggagaagattcgtcaaatccgtggtgaaaatgccattttggttatcgcgaacctattaactggtgaagattgttccttatcgggcttttctgaaatgttagagccagtaaaagttgagaatgcttcaattctgtttctaccaggttgtttggtgaacgatgagtatcaaatgacgtctggctttaagtggttttcgaaaatagtttggcagcgtatgagggagcaaggttaa

SEQ ID NO: 311267 - DNA, 2652 bp, Proteus mirabilis
atggagttaaaagactaccaaaacggtgtgctggataagctggattattacttaaaaaagctggccgacaccaaggaagaagcggaagactttgtcgcttttcagaaaatgaaaggcaaagaggcccgcttaaccgattacgctaaagatacgtgggaagctctggtacaggagcgccgtattgacctacttaaagacaaaagtggcaatttggtgcctgcaccttatgtcacaagatttgacggcttagagcgaccaatcccaaacgtgtgcctgaaagtaccgacaggtggtggtaaaaccttacttggcgttgctgcggtcgagcgcctgcaaacggatttgtttacgcaacaaaccggcatggtgctctgggtagtgccgtcggatgccatttacaagcaaacctggaaacagttggctaatcgtgaacatccgtatcgacaaatgctagaacgtgcttcgggtgggcgggtaaaaatgctcgaaaagaacgatgcctttaccaagcgagataccgacgaaaacctgtgcgttatgttgttgatgctgcaatccagtgcgcgtcaatccaaagaaacgctacgaatgttccgcgatagcggccgatttaccactttcttcccaattgaagatgacaccagcgctaatgaggcactattgagcaatattcgtaatttagattgtaacgatctatccgattacggttggcaagaaggcatcgccccaggctcagtgtcagttaaacaaagcttaggcaatgtgttacgtatggttcgccctgtgattattgtggatgaggggcataaagcttatagcgaaaccgcaagagaaaccctgtgtggctttaaccctaagtttattcttgagctctcggccacgcctaacgctaacggtaagcatcactcaaatgtactggtaaatgtgtctgggcaagcgttgaaagatgagcaaatgattaagttacccatcaacttaatcaacgaagataaaagcgagtggaagcataccttgtcgcttgcgcacgctaaattggcggagcttgaacaggatgccggacagctacaaagcgaaaccggtcgctatattcgtcccatcatgctgatccgtgttgagcgcacaggtaaagaccagcgagattcagcctttgtgcatgcggaagacgcccgcgagtatttgatggaaaaactcggcgtgcatgaaaatgaaattcgcttgaaaacgtccgataaagacgagttgggtgatgatgatttgctcagcgaaatgtgccccgttaaatacatcatcacaaaggatgcgctgcgtgaaggttgggattgcccctttgcttatgtgttaaccgtgttgtctaaaatgaccgcaaaaacggcaatcacccaaatgattggccgggtactacgtcaaccacatgcgcgattgacgcaaaaaccaagtttagatgagtgttatgtctacacctttgatcaggatgtgatggaagccgtcgccggtgttaagcaaggtttagaagaagaagggatgggagatgtggcgaaccaggttaaagcctcggaagccaataaaaccgctgcagtagtgagcaaagaaaccttattgcgtagagagcgttttcgtaacctacctaaaatatttttgcctcgggttttacatcgtgatgctgggtacaaagacggctaccgtttgtttgactatgaacgggatgtgctgggtgacctagattgggaatcgctgtcttatttgaatgcagagaacttccagctagtggacgacaagttacagcgcacgattgcccgtatcgactacaaaatgtctaaggataaccaaggcgaattggacttggccgatccgatccacgaaaacatcgattttgaccccagtgcaggcctagatatctcgtttatggtaaggcagctcaccgatgttattccaaacccctggcaagccatgcgggtgttaacgcacacgttagacatcttgcgtggtaatggcgtttctgaggaggccttgtttactaacagccttgaactactcaaagagatgaagcgcgacattaaacaacaggtcgcgcaattatcggagcaaatcttcagatctaagttggacaacggtgatatttccctgcgcctactagcttcagataacaagaagctaaattgggaactggcgcaaaccctagaggttaatgtcagtgagcatgagcaggtgcttcgccgcaaggatggatctgaactcgaaaaaagcttgttcgaaaaggtctatcaaaatgggctgaacaatttagagcgcgacacagcttggtatttggataagcaagagtctgtgtattggtggcatcgtattgcagtaaatcaacgtgaatacagcctgcaaggctggcaaaaacaaaaggtttaccctgacttgttggtgtgcgtcgaacagcctaattctggcagttatcgtttttctatattggaaaccaagggcgagcatttaaaagggaacgacgacactgagtacaagcgccgattgtttgagctgttaactgagcacgtcaagacggcggtagatgctggcgagcttacgttggaagctgcgtcgggtggtatgtcgttcagaatgctgatggaagacagttggtcacaggaaatcgtgcctgaattgaattaa

SEQ ID NO: 311268 - DNA, 1890 bp, Proteus mirabilis
atgccaacgttggattttaaaggtaagcagtttgtatattcacatcacctgagtgtgccgtttcgtgaactaaaagtggttgcggataaatctttaccgctggaaggcaagtcagcatcactggatgataacctcatcatccatggcgacaaccttgaagccctcaaggcgttactgccgactcacgcaggtaaagtagactgcatttttatcgatccgccgtataacacaggcaatgaaggctggtgttataacgacaatgtgcgctcaccattgatgcaagaatggctcaaaaagtcagctaatcctgttgataaagaagatatggaacgtcatgacaaatggctttgtatgatgtggccgagagtaagcttattaagggagttactatctgaatacggcgcaatatttataaccattgatgataatgaatttaaccatctaaaaatcctctgcgatgaagtttttggcgagtcaaattttatctcaaccattgctacaaaagcgaatccaagaggacggcagtctgatacttacttcgctacagttcatgaatattgtcttgtttatgcaaaaaataaagaatatctagagcttaatggagtggcgttatctgatgataaagcatcagattacaaaaactctgatgatgatggagaactttggcgggagttaggtttacgacagcgtggagctgcttcacttagagaggaaagacctgatatgtattttccaatatatgttaatccagaatctggactagtaagcttaaccgaagggaacgggtactctgagtgtgtggttccccagaaagcagatggtcgagatggtcgttggatgtggtcacctaaaaaggttaaagaagaaatattaagggtatatggtcgtttagtaaaaggaaaagatggtaaggctcgttttgatgtttttataaaggattataaaaatcgaggtgatgtagaaagaacagaaaagccaacaactttgtggaatgaaaaggctgtcaatacagaactgggtgggaagctattgaagtccattctgggtaaggaagtttttaaatatccaaaaccagttggtttattagaaaagattttacaattagcaacacataagaactctattattttggactcctttgcgggctcaggtacgacggcacacgctgtactagaggctaataatagtgatgaaggtaatcgcaaattcattctgatcgaatgtgaggactatgcggacaaggtgaccgctgagcgtgttcgccgggttattaacggttaccccttcaaaggcaaccagaagcaagaactgctttctgaaaaaatcacttggtcggtctttgagaagaagcatgctgagctgcttgaaaaaattgccaaagttgaagcaaaacacagcaaagatttcgacaaaatcaaaaaagagctcaaagacggcgtgctcacagtcacgggggagcgcaaagtggatgattttgctccgggcattggtggcagtttcacttattgcaccttgggcgaaccgattcaaattgaaagcttacttaccgacgaagcgatgccgtcgttcgatgcgctcgcacgttatgtgttttataccgccactggtcagtcgttagaaacggtcgcgaaagcctctgccgatggttttatcggtgaaacagacttattccgtattcatttgttctatcgccctgatagtgaatggctgcgctcaaatgaagcggcattaaacgcggataaagtagaggcgattgctaaaaacaatgccacgaagaagcgcaccattgtatttgctgtcgcgaaatttatgagtcagaaggacttaactgaaaaacgcattgagttttgccagttgccttacgctatccatcgcattatgggggcgtaa

SEQ ID NO: 311269 - DNA, 1629 bp, Proteus mirabilis
atgggagcgaggttttacaagtgtgatgatgatgtgcgtgtagttcatactggtaagatattggtgcgggaaagtgataagtcttaccggcttttaattgaggtttggtgctatcccccacagcagaaaaataattttcatgcgactgcattttctaacgttcctgctttgtatcgaggaaaaataattaatcaaagagggttatcagaaagttacgctaaacgagggcgtcataaatttagaagtaatgagctccttcgacacagtaacttgagtgagttccccgactcagagtcagcagagtctttgagaaagaaagagtcagcgcaacatgcatttgtattagaccgaggcgctgcccctaaactgattattcctcagctagagttggcaagggtcctattttatgccagcttttacttatcgcgagcgtcattaatgtcttctcgtttgcttacagacttcaaggtcgaagttaacaccaaggaggactatgccaatatcgaagtgttgcaaacatcaaactttcctccttcggcattcaatgattcagcaacaagagcaatgttgagctggttacttgttgatagtaatgtaaagcgttcatttgagtcgatttttagatatttcaatgtcgaaaaggaccgagatgtatctgcggggtataagcgttggctatttcacttcgatcctccccaaatggctggatggtctttcgaatacgaaggcaggcttgatgcaagtggccgctactttctggttgaaaagatcacggatattgaaattaatgctcaaatgccgtctagggtctatttccataacccgtcttttacgcatccagatgaaggccaagagccaaccattggtggcaaaggccctgaaccatacgagcgtccagaagatcatattatcgatgatgatcgtgaggcttccgatgctaaccatgcattcttactaggtgaaaatacctgctcagtaaggtttaaaaatcgtttttcaacgtcgaaagcaacaacacccaaaaggagtcatcggccagatagaagcaaagatacagctaagaaagctggagataaggtcagtaccaatgaacctggtagtaatggtgagataccttcggcagacatgggcggaggtatgcaagattgtactgatagatcaatagagtatgcctctcgttttacggcctttaacatgatggtgcaaatgctagaggaaaaatacgcctgcacaatcattgattcttacactaacgagctggatcaggttgggcgtagtaaatgccacctgattgactctggcgcaaagagaactattcgttgcattgtcgttgaacggaacgggcatgttaattatttgcttgaaatagatgtaacaggcctgaataaatggatctcaaccaaatgtgtgcggcagaacgatactcgtaactggaaagaacagttttctcgaatcaaaaaaggcgtagtgacaaagtctcttggatggccaacacaagaaatggattccatgtttggcttcaaaaagcatattggtatttctcacccgaaatccgttgaaggacaccctacgggagttcctacagaatcaatcttagattgggcaggaagagtcgcagataaactctag

SEQ ID NO: 311270 - DNA, 1083 bp, Proteus mirabilis
ttgccatctttaccatactgccctgagcatggacttctgcgccaatcgacaacctcataccataatagtaggcacacgtaccatgcatgtggtcgaatacaatgccagccctttttatgtaacgaccagaatatagcagcacagcagtttgctgatttagcgagcaaagctaaagaggtactgtgtttaccagcccaagactccccgactcagcatcaatggagccttttctacaatcatctagcgcacgactttggatgtggaaaaggctctaaacaggttgctcacgataagattgcagacttagttgtaaataagatcgttacccctgagttaaccatcaattctgatagagatactaattggcttcgcaccttatttcgccgacatcgtaaagcttttagctatctacagcacttaacggtttggtctgcttttattcctgaaatgtcggctagtgaaatcataaaagaagtaaaatcaaaagataaagtgacggtattgttctcgaaggataatgctcaccttgtgccaaatccaagtgaagaaaaacgtaagctgtggcgtaacttaataggcaagaccccgattaagaaagcacacaaacttccaggtggtggtgctctgtacgcttggttataccgcaatgaccgagactggttattggcgttcaatcgagtaaatcactcgcaacttgtagtgagaaagacgaaagttgactggagagctcgagatcgtgtcttaaccaagcagctcctgagaattattgaacgatgcgattctgtcattgaaggtccccgaaggtccaaaagttttttgctgaagcagctagaagattacggaacattgagtaaaaaattcaatttattgcctttgttatcttgtactttgaatcgatatcaagaaagtatttttgagttccaagctcgtcggcttgccattactgtaatcaaaacaaaacagacaagtaaaggagtgagccgctggcaactgatgagatctgcgagtctctcaaaagaacgaatattgccgattgtcgacgacttacttggctgggtagccacgggatcaaatctaaaataa

SEQ ID NO: 311271 - DNA, 810 bp, Proteus mirabilis
atgagatctgcaaggcgaggctctggtcttggagctattttttgggatccaatggaagaaggaagagaatggaaagcgctcacggataagttatggtccctgcaatggcttcaaaaacgggatgaagtgttatcagatgatattcgatctctatggtatgaactgagccaaggcgttcttgatattgttgtgaagttatttgtgttgtgtcagttgcgggccattacgacaaaagtggaaagaatcactccaaagttaatgcaacaggtatatgaagatgaattaaggccagtccatccaatgcttgcagcgcttcgctcaggtgatgttgaagaaatgattaagttttcagatcttaaactaagcaatattgataaaagattacttgagttacaaaaacaggtagcaacaactgttaagcagacaccagaggagtttgtatatcaacagctcagaaccgatgaagagcgacgtgtatatatggccctaaaagacgagtttgactcaacacttttagctcctgtaatacgacagctgtttgacctgaatccagatttgacatgggtcagcttactgccactggtacatgagcaactcattagccctgaacagttacaatctaaaaaagaggctaagccaagtaagggcaagagggcatcctcaattaaacagatgcaatggcatacccttgatagtgaggatttgaggtttgttcactctcaatctgattctgatagcgaagtgtacaccgcaatgtcaaagtcgggtttgattttagacattcagtcattgctagaaaaggtggtttaa

SEQ ID NO: 311272 - DNA, 756 bp, Proteus mirabilis
atgaagagaaatcaagatcatcgtgtagttgcagtctatcaaggtgcaacactctcagcttatcgaggtaacccgctgatagaggcactaccaccaataaatagtttcttggacgactcgagtgctctaaagggctcgttgaggtgtaccgcagaagatatccatcgaaatggtattgaaagagcgcatagtatctgtcgtgttattgatgatttttttcgacccctcagtcagcacatacagttgcacgaacgactgtcactgatgatacggcgtggttatgttggaataaaccccgaaacaggtgattgggcaagacatatacaaaatggttacgaacgtgtattaactggtgatttaaaggcgataaagttcacggaagttagttctacagcccaaagtatgacattgattggatgtagcggtaatggcaaaacaacagcgatcaagcagcttttgtcgttataccctcaagttatttaccaccctgacagaaaccttgagcaagtcgtctatctaaaaattgactgctcccatgatggatcacttaaagagctgtgcctgaacttttttcgtgcgatggatagagcgttaggaacatcaaattacgaaagacaatactcgatgagcaaaagaccgagtattgaaacacttttagcagcaatggctctggttgcaaatgctcaatttctttgtgacgttagtaaataccattggtcttcctgtgattttggtcgggacaccacgagctcgtga

SEQ ID NO: 311273 - DNA, 147 bp, Proteus mirabilis
atgcgcgagagcaaggaactagcaatacagcccgcgagggcaaaacaagaagaagttgcaccggttatacctatacatggagaggaggtaagttatcaactgcctgacttcataccggagctctttgatgatgagggtgatagctga

SEQ ID NO: 311274 - DNA, 1695 bp, Proteus mirabilis
atgtggccagttaacgaaactctagcgtttgacggtaaggcttaccgcgtgctttttaccgagacaaattacttctattggattgctattgatgaggataaaggtttaccggaaagagtctattttgatgaatgccgtaactgggttgatgaagggcgtatagaaaaaattccggacccttattcataccttcaaggagggttttggaccaaagagtcaaatgcatatcagaaaaggcaaaacgactttgatttgattaagcctatcgtagatggtgaaggagcatttgacaaaagggttcgagcaaaaagggttagtcatgcggttgtcaattcaaataaaaccaaatcgaccatctatcgtttagttcggagatattggcagcgtggacaaataaaaaatgccctaataccagactacaaaaactcaggtgctgccggaaagagaagaaacttcacaacaaataaagctggtaagtctagggtttacggtgtcggtgatggcaaacaagtcactgaagaaatcagaaaacagttccgaattatttgtgataaatatttgatgaatgataaagggaactccgttgcttatgcacatagaaagttttcaaaagcatataagttaaagaacccaggtgttgaagagcatgaaattccaacactccgccaatttagatacttctacaaaaccgagtatagcaatgtcacaaagcttaccgttcaaacacctcaaggcaattacaataaagatgttaggccactacatggaactgcaaccgagcaagctttaggcccagggagtcgatatgagattgatgccaccattgcagatatttacttggtcgatgatgacgatgcagacaaggttatcggtcggccgacgatttatatggtcattgatgtttttagccgtatggttgcagggttttatattggtttcgataacccatctttccccgttgcaatgaaagcactgatatgcagctttagcagcaaaatagaaacttacgcaaaatatggtatcgatatttcagaagaacagtggccatgcataggcattcccgatgtgttactggctgatcgtggcgaattgatgagccatcaagcaaattatttggttgatgctattggtgttcgccttgaaagtgctccacctcgaagaggcgatgctaaaggcattgtcgagagatcatttggtacattgcaggctaagttcaagccctatatgccaggtgtcgtaactggtaacaaggttaagaagcatggtgaaagagactatagagttgaagctgctgtggcaagatcagactttattgaaatactgctctattcaatacttgctcacaacttaaacaagccattggataagtacgatcgtgctcctgatatgccagaaagccttccatcgatccctattgagctttggaggtggggcctacagaatcgtactgggcgtttacgagctattgatacggatattgcaaaaatactgctgttacctcgtcaaaaagtcactgtatctgaattgggcataaagttatggggattaacctacacaggaaaagaaattattcagacaggttggatgcaccgttcttcggaagtgtctagacctaaaaaactatttgcagcctatgagcttggttctgctaatcacatatatctgtttcctgaagaaggaaaaaatacattttag

SEQ ID NO: 311275 - DNA, 501 bp, Proteus mirabilis
atgtcctctgactttttggttagcaccgcttctaaaactcagcccaagttcgctattcaagcaaaatattccaaagacttaaaagatccgagaactattgagaagctagaaatagaacgccgttattggcagctaaaaagaatcccctggttcctcgtaacagataaagagatagacaaaacagtcgtatcgaatattgagtggttatgcggggttaaggggtactttgatgaagtaataacggatgagctatcgcttacttttgggcatatcagtgcttattttgttcaacacccagaaagaaaagtcgttgatctgtgtaaagagtatgacatggcataccagcaagatcttggtcagtcgctttatgatattcgtttaatgtgtgcagcaaggcttataacgttcgatattcgtttaccatttcatcgtttgaaagcgaaagaaattgcgtttagaagcgtttctttgttcggggggcatcgtaatgtggccagttaa

SEQ ID NO: 311276 - DNA, 486 bp, Proteus mirabilis
ttggatcttaaattcttcacagtggatgagaagtatatccaatacctaaaacagtttgatgcgaaagtacctgataactactcagaagaaaaaccgtttataggaattcttttcagcattaacgggttagattacatcgccccactaagctctgcaaaatctaagcattcttctataaaaaatagtaaccctacgacttttaaagtttttgatggtacgcccgagggtgaactgctagctattattcaacttaataacatgataccagtgaatgctgctaatataacaaagataaacattgcttcattggatattaaatatcagtacttacttctaaaagaaattaattttataagaacgcatcgagataaacttttgaaaaaggcatccaaactttatgatatggtcgtaaacaaaaagattgaatgctttgtaaatctttcttgcaatttcaaggcactagaatcagtcgctaatagctattag

SEQ ID NO: 311277 - DNA, 270 bp, Proteus mirabilis
atgttaagtgtagttaacgtgttgttttgtgtatttcttgattattttatctttaatcttaataatcgtggtgaagaggaattaattattccgtttgattatcatgcgtatcgagtgtttattggttatttattttttgctataattaattttattgttatttatcaatttattgcaattttatcgttatgctatgtattgatatatcatggaatttcgtctgcagtgatattaaggaataaattatttcacaaaactaaaaaaatttaa

SEQ ID NO: 311278 - DNA, 609 bp, Proteus mirabilis
atgaattattatttagaatcactgcctattggtaatgatccacgtatctttaatcaatttttatccatcaaagaagaacttgataaacgctttcatccagctcgccctgatatcaattggcaacatatccatgaattatgtatctctttatttaatcaaaatggtatagacttacaaactgcatcttggtttacactatgtaatcaacaaatatcaggattagaagggttaagtgaagggttgtcacttattcataaagttatcactcaaaactggcaaaatatttggcctgtgcagactcatactcgtattaatattctttcttcattaagtcagcaacttgtttcaggtataagaggaactacgtttttatataaagatctggctctgttatatcgcattgaagaacagttaaaaaatataaataatcaacttcaatcattagaaataaagcatttagtaagatttgattatttacaaaatttaattgtaactcaaatacaacaattagaaaaacctgatactcttgataataacttttgttctcctgatttatctcccgtattaacccaaagtatagagccatcaaataagataaaaaaaaaataa

SEQ ID NO: 311279 - DNA, 519 bp, Proteus mirabilis
atgtccgcaaaattaacccgcaaaaaacttgcatttatcggggtaattattgcccttattgccgtctattttctctttatccaaaaaaccaacgtggaatatcttcccggtagtatgagcggtattaatcacgttaaaggaacttcggttaattggtttaaagttaatggtaattatgctcaaagtgccaatgatacctgttgcattatggtgccaagaaaatggacaccgaatcaaaccgtattagtggaatgggaagtcgaccctgatgcctattcaagtaataagccctcattaggaagtaaggaatataaagagtatataaaacaacacgaagccaattatcgccattacagtaaagttgttgaaattccccagtatgacgaaccttgtagtatgaaagttcattttttgccctgtcaggaagtaaaaatcagcttgtcttgttattctccttggcttccagagtatcctatacaagagcctttggggatggaggagcctgccatatgtccataa

SEQ ID NO: 311280 - DNA, 990 bp, Proteus mirabilis
atgagccaaagtacgctaagagtagacgagttatatactgatgatattgatgagaacatggaagagttcgatgaagcagccgcaacaaaagaggctgaaaatgaatctgacgctcaagatgaaattgaactcattgaaggagtcaatcagcgtgcgttagatgcaactcagctctatttaggagaaattggctattctccattgttgagtgctgaagaagaagtattctttgctcgtagagcgttacgaggtgatatcccgtcaagacaacggatgatagagagtaatctacgtttagttgttaaaatatctcgccgttatacgaaccgagggttagctcttcttgacttaattgaagaaggtaatttaggccttattcgtgctgttgaaaagtttgatcctgaaaaagggtttcgtttttcaacctatgccacatggtggatacgtcaaactattgaacgtgccattatgaaccaaacccgcactattcgcctccccattcatatcgttaaagaactcaatgtctatttaagaaccgcaagagaattagcacataagctcgatcatgagccaagtgttgaagaaattgcgcaaacgctggataaacccgtcgatgatgtcagcaaaatgctacgtttaaatgaacgtatttcttctgttgatacaccgattggtggggattcagataaagccttactagatattatttcagacgaaaatgaagaagggccagaagcaaccattcaaaataataacctaaaggaaaatatcgtaaaatggttatttgaattaaatccaaaacagcgtgaagtattagcgcgtcgctttggattactgggttacgaggctgaaacattagaagatgttggtcgagaaattggtttgacaagagagcgggttcgtcagatccaagttgagggattgcgtcgtttaaaagatattctgcaagggcaaggattatgcatagaggcactttttaagatgaactag

SEQ ID NO: 311281 - DNA, 498 bp, Proteus mirabilis
atgccctggttcgctaaaataacctgtacttttgcggtactccttgcggggtgttcggtcgcgcaaccatcggattataatgccggcaataccacaggaattaaccacaccgaatattcaatatctgattttaaaatcaatggagcgggtggttcaattggggggtatacctgttgtgttatgatccctaaaaaatggacgccggagctaaaagcttatatttcatggaaaaccatcgatactaaagggcttcctccccctcctaattttaataaagtagacgattttaataaatgggaacaaaatgttaaagatagaacacaatatcacgaagcaattgtccctatcgcccaatatgataaatcctgtggattacaagtgcattttctgccctgtaataaagtgaaggtcgtttcatcctgctttacctacggtatgccagaatatcctatccaagcaccgaaaaatatgaaggagccagcggtatgtccgaaataa

SEQ ID NO: 311282 - DNA, 621 bp, Proteus mirabilis
atgttaaaagtctggggtagaaaaaactcatcgaacgttaaaaaagtcctgtggtgtttaaaagagcttcaagctccttacgaacaaattgatgtcggaggcccttttggtggacttcatgaggccaactatttagcactcaatcccaatgcatctattcctaccttacaagatgatgattttgccttatgggagtcaaataccataattcgttatttatgtaccaaatatgaaaattatcatctctacccaaccgatgtaaagcaacgcgcaaacgttgaaaaatggatggattggtcgaatggtagccttttttctccaatccaacaaatgatgataaatcttgttcgcacaccaaaagagcagcaagatccacagtttgtacagagcctaaaagcgaaattaaaccaactgatcaaaattgccgatgatcaactggctaaaacagcttattttgccggtgactatttttcattagctgatatcgctattgctcctttggtatacccatggctagaggtttgccaagaaggtgcaaattatccacatctacaacgctggtttgcacaattaagtgaaaatcagatcttccgtgatgtcgttttactgccggtaaattaa

SEQ ID NO: 311283 - DNA, 822 bp, Proteus mirabilis
atgaaacggatcacgatagtcggattaggttggttaggattaccacttgccaatgccttgcgtgaagcggggtatcaagtaaaaggaacaaaaaccacagaagatggtgtagaagcagcacgaatgagtggtgttgattgttgtctaatgaatttaacaccggctattgagtgtgatagagatgattttgattacttaatggaaactgatgtactaattattacattacctcctagtgcggcggggggaggatatgattatgttgaagggatacaaacattagtggatagcgccatgtctcggcatgtgacaagagtgatttatattagctctacttcagtatatggcaatcaaagtggtgttattacagaagaagttgatattaggccagaaacgcaatccgctaagatgatagcggaagttgaaaattggttacatcgtttaccacttacgaccgtcgatattttacgtttggcggggttagttgggcctggtcgtcatgcaggacgctttttatccggtaaaaaacaggtcaaaggtgcacatcagagtgtcaatttagtgcatttagacgatgttatttttgcgatagagcaactgcttgctcaaaatgaaggaggccgtttatataatttatgtgcgcctattcatcctaaaaagaaagatttttacagccgtgttgctgcacagttagatcttactccccctgaatttgctctagaagataaaccgccagcacgagagatcgacggtcaggagatttgccgagatctcggatttcattatcactatcctgatcccgacaaaatgccaatgagttaa

SEQ ID NO: 311284 - DNA, 900 bp, Proteus mirabilis
atgttagataaagcaagattacgaattgccatgcaaaaatcaggtcgtttaagtgatgattcacgagcacttttagcgcgttgtggcattaaaataaacttaaaccaacaacgccttatcgcttatgcggaaaatatgcctatcgatattttacgtgtcagagatgatgatatccccggtttagtgatggacggagtggttgatttaggcattattggtgaaaacgtattagaagaagaattactaaaacgccgtgcacaaggagaaaatccaagttatatcacactacgtcgtcttgattttggtgcttgccgtttatctcttgctgcaccggttgattttgattatcaaggggttgaatgcctcaataatacccgtattgccacctcttaccctaatctattaaaacgttatttagaccaaaaagggatcacctttaaatcttgcttattaaatggctccgtggaagtcgcacctcgagccggtctggccgattctatttgtgatttagtttctactggcgccacattagaagccaatggattaaaagaagtagaagttatttatcgttctaaagcttgtttaattcaacgtgacggtgaaatggacgcaacaaaacaagcccttatcgatcgcttaatgacgcgtattcaaggagttattcaagcgcgcgaatcaaaatacattatgttacacgcgccaagtgattgccttgaagatgttatcgccctattaccgggtgctgagcgcccgaccatccttcctttagcgggtgatcaaaatcgagtagcaatgcacatggtcagcagtgaaaccctcttttgggaaacgatggaaaaactaaaagcattaggggcaagttcaattcttgttttaccaatagaaaaaatgatggaataa

SEQ ID NO: 311285 - DNA, 1317 bp, Proteus mirabilis
atgatgaaaacggcgtttaatacattaaatttctgggataaatgcacccaacagcaacaacaacagctactcactcgcccagcgatatccgcatcagcgcctattacagagcaagttgctacgattatttctcaggtacgcaacgatggggataaagcccttaaggcactgagtcaaaaatatgataaagcggctcccgatagcgtattggtgacaaaaacacagattgacgcggcttgtgcaaggctcaataacgaaatcaaacaagcaatagcgcaagccatgagcaatatacgccgttttcatgaagcgcaaattcctaaaaccattgaggtagaaacgcaacctggtgtattttgccaacaagtcagtcgccctattgatgccgtaggactttatattcccggtggatcagcgcctttactctcaacagtgatgatgttggggctaccggcccgtattgccggttgtcgcaaaataattttatgctctccgccaccgattgctgatgaaattttgtatattgcgcaacaaattggtattgatgaaatattccaagtcggtggtgctcaagccattgctgcgatggcttttggtacagagtctatcccaaaggtagataaaattttcggcccgggaaatgcctatgtaacagaagcaaaacgccaagtcagccaatcgctacaaggtgcggctattgatatgccagctggaccttcggaagtattagtgattgctgatgccgatgctgatcctgcctttattgccgctgatttactatcacaagcagagcacggtcctgactcacaagtagtgctattaaccccagatgaagcccttgccaaagcggtcattagcgagacgcaagcccaattaacacaattaactcgcgcagaaatagcacaacaagccttagccgaaagtcgtgtcattatcacccgtgatctcaaccaatgtattgaaatcagtaatcgctatgggcctgaacacttaattattcagactaatgatgcagactcacttgttgatagcattactagcgccggctcagtgttcttaggggcttggtctcctgaatcagcgggagattacgcttctggcaccaatcacgtactacctacatacggttataccgccacctattcgagtttaggcttagccgattttatgaaacgtatgaccgtacaaaaactgactgctcaaggtttggctgatttagccaataccattgaaatattagcgcaagcagagcaattaactgcacataaaaatgccgtcacacttcgcgttaacgccttggctcaaggagataactag

SEQ ID NO: 311286 - DNA, 1083 bp, Proteus mirabilis
atgaacacgccctttgatattaccctattagccagaaaaaatgttcgccagttaaccccttatcaatcagcgagacgtttaggtggaaatggctcggtttggttaaatgccaatgaataccctaccgctcctgactttacgtttaatgaaaaaaatttaaaccgctaccctgagtgtcagccagttaacgtaattaatcgctatgcagcatatgcaggcgtccaacctgagcaagtgttagttagccgaggtgccgatgaagcgatagaactactgatccgtgctttttgtgagcccggtaaaaatgctgttctctattgtccacccacttatggtatgtacagcgtcagtgcggaaacctttggtgtagaacagcgtgttgtccctgctcttgctgattgggagcctgatgtcaaagccattgcatcacaacttgataatgtaaaacttatctacctatgtagtcccaataacccaacaggcaatatcgttgatccttcactgatccgcgaagtattagcattagcaaaagataaagccattgtggctattgacgaagcttatattgagttttgtcctcaagcatcactagtcgcttggttaaaagagtatccgaatttagtcattttgcgaactctctctaaagcttttgcattagcgggactgcgttgtggctttgcacttgccaattcacctgttattgaattattacttaaggtgatcgccccttacccactttctaccccggttgctgatattgcggcacaagcattaactgacccaggtatagaagcgatgaaacaacgggtaacggaaattgtacgcaatagaacatatttagcggatgcattaaaaaatttacccaatgttgaacaggtttattgtagtgaaaccaactatattttagtgaaattcactgatgctgattgtgttttccgcagtttatgggatcaagggattattttacgcgatcaacagcgtcaatatgggctggcaggttgtttacgcatctctatcggtacacgtcaagagtgtgatagcgtgataaccgctataaaaaatagacaaacggcaaacgtataa

SEQ ID NO: 311287 - DNA, 1068 bp, Proteus mirabilis
atgagccagaaaattctttttatcgatcgtgatggtactttgatcacagagccaccaaccgatcaccaagttgatagtctcaataagcttgcctttgaaaatggcgttattcccgcattactcaacttacaacaggcgggctataagcttattatgatcaccaatcaagatgggcttggtacagacagttttccacaagcggactttgacccccctcataatctcatgatgcaggttttttcttcacaaggtattgtttttgatgaagtattaatctgccctcataaacctgaagacaactgtccttgtcgtaaacctgaaacagggttagtcacccaatatctggttgaaagtgctcttgataaaaccaatagctatatgattggtgatagacaaaccgatctacaattagctgaaaatatggggatcaacggattacgctataacgccaatgaattaagctggtcagctatcagtgaattgctgacgaaaaaagatcgctactcccacgttgaacgtaaaaccaaagagacacaaattgccattgatatctggcttgatcgtgaaggtgaaagccaaattagcactggagttggtttttttgatcatatgctagatcaaattgccacccacggtggctttcgtatgaatatcaatgtacaaggggatttagtcattgacgatcaccacaccgttgaagataccggtcttgcactcggcgaagcactgcgagaagcattaggtaataaacgcggcattgcacgttttggttttactttgcctatggatgagtgcctagcaagttgtgcgctggatatttctggacgccctcaccttgaatataaagcagaatttaaatatcagcgcgttggtgatttaagcacagagatgattgagcactttttccgctctctctcttacactatgggctgcactctacacttaaaatcaaaaggcaaaaacgatcaccacaaagcagaaagtctgtttaaagtatttggtcgtaccttacgccaagctattcgtgttgaaggaaataccttaccaagttcaaaaggtgtgctgtga

SEQ ID NO: 311288 - DNA, 591 bp, Proteus mirabilis; identical to SEQ ID NO: 294266

SEQ ID NO: 311289 - DNA, 738 bp, Proteus mirabilis
atgattattccggcattagatttaattgatggcaaagtcgttcgtcttcatcaaggtgattataataaacaacgtgattatgatgatgatccgatccgtcgctatcaacagtatcaacaagacggagcaaaattattgcatctcgtcgacctaactggtgcgaaagatccacttgcacggcagatcccactattaaaacagctagttgcctgtgttaacgttcctgtgcaagttggtggtggtattcgtagcgaagaagatgtgaagtcgctattagccgcaggagcaagtcgagtggtgattggctctacagcggtgagccagcccgaattagtcaaaacatggtttgagcgttatggtgccgatgcgattgtactcgcccttgatgttcgtatcgacgaacaaggtaaaaaatgggtggcggtaagtggctggcaagaaaactccccctatacactagaagagatcatcgcactttatcaacctgtaggattaaagcatgtattgtgtactgatatttctcgtgatggcaccttagccggttctaacgtcgaactgtataaagaaattagccagcgtttccctgatattttattccaagcttcaggcggtattggcgatttacaggatattgcagcacttcctggatcgggtgttgcgggcattattgttggcagagcactattagaaggcaaattcacattacaagaggcgatatcatgttggcaaaacgcataa

SEQ ID NO: 311290 - DNA, 774 bp, Proteus mirabilis
atgttggcaaaacgcataattccttgtcttgatgttcgtgatggacaggttgttaaaggtgtgcaatttcgtaaccatgaaattattggtgatattgttcccttagcagaacgctacgcgaaagaaggtgccgacgagctggtcttttatgatataaccgcctcttctgatggccgagtggtcgataaaagttgggtatcgcgggtagccgaagtgattgatattccattttgtgttgcgggtggcattcgctcagtagaagatgccgggaaaattctctcttttggggcagataaaatctcaattaattcccctgcactttctgatccaacactgatttctcgccttgccgatcgctacggtgtgcagtgtgtagttgtgggaattgatacatggtttgatgaaaaaactggggaatatctcgtttatcaatttacgggtgatgaaaaacgcacacaacaaactccatggaaaacgctcgattgggtacaagaagtacagcaacggggggcgggagaaatagtgttaaacatgatgaaccaagatggtgtaagacaaggctatgatttaaaacaactcgcactggtacgccaagtcactcaggttcccatgatagcttctggcggtgcaggtgaaatgtcacactttctggatgcatttaaattagccaatgttgacggtgcccttgccgcttccgtattccataagcagatcattaatatcaacgaattgaaacagtatctcgcagaaaatggcgttaaggtaagaatataa

SEQ ID NO: 311291 - DNA, 618 bp, Proteus mirabilis
atgaataatacaaaactcgcccaattagattggcaaaaagtcgataacctaatgcctgtcattatccaaaatgctatttctggtgatgtcttaatgcttggttatatggataaagctgcattagaaatgacactaaacagtggcaaggtcactttctattcacgaactaaacaacgtttatggacaaaaggtgaaacatcaggcaatttccttaaattggtggatatttatcctgattgtgataacgatactttacttattttagctcacccaatcgggcctacttgtcataatgggactgaaagttgttttgctccagctcaaagccaatggggatttctttatgagcttgagaacttactgtgcgagcgtaaaagcgcctcaccagatagctcttatacagcacaactttatgccagtggaaccaaacgtatcgcacaaaaagtcggagaggaaggtgttgaaactgctttagctgcaactgttaatgatcgtgaagagttaaaaaatgaagcttctgatttgctctatcatttaatggtgctattacaagaccaatcgctatctctatctgatgtgattgattgcttacaaaagcgtcataaaaaagcgcaataa

SEQ ID NO: 311292 - DNA, 1152 bp, Proteus mirabilis
atggccagttcaacattttatatcccttcagtaaacaaattaggcgcaggttgtcttgcagacgcgataaactcaatgaaagactttggctttcataaagcactgattgttactgatagtgttttaaatcaattaggtgttgtaaataaagtgagtgaattactggcgaaatcaggtattgctagcgttacttatgatggtacagcgccaaaccctaccgttgaaaatgttgaagcggggttagccttattaaaagagcatcaatgtgactgtgttatctctttaggtggtggctctcctcatgactgtgctaaaggtatcgcactagtcgctgccaatggtggtaaaattgccgattatgaaggggttgatcgctctgagcatccgcaattaccactgattgcaattaatacaaccgctggtactgcttctgaaatgacacgtttttgtatcatcacggatactgcgcgtcatattaaaatggctattgttgataaaaatgtaacaccaatcttatctgtaaatgattcagagttaatgattggcatgccaaaaggtttaaccgcagcgacgggtatggatgcgttaacccatgctgttgaagcttatgtctctactgccgctaatcctattactgatgcatgtgcgttaaaagcagtgacgatgatcagtgagtctttacgtaaagtcgttgaaaatggtggtgatacagcagcacgtgaaaatatggcttatgcacaatttttagcgggtatggcatttaataatgcttctttaggttatgtgcatgctatggcccaccaattaggtggtttttataacttacctcatggtgtatgtaatgcagtattactgcctcatgttcaagcttataatatccaagctgcagcaggtcgtttaaaagatatagcgcaagctatgggtgttgatgtttcggcaatgaatgatgagcagggtgcgcaagcttgtattgatgagatccgcaaaatcgccaaagatgtcggtattccagcaggcctgaaagagttaggcgtgaaagaagaagatttcaaaacattagctgaaaatgcattaaaagatgcatgtgccatcactaaccctgttcaaggtagtgaaagtgatgttatcgagatattccgccaagcaatgtaa

SEQ ID NO: 311293 - DNA, 507 bp, Proteus mirabilis
atgtctttgactattttcgagcaattaaccacattactcaataaccaccacgcccgttatcgcgtcatggaacacccgaccgcgggtcgttctgaggaagttgctaaaataagaggtacacaattagggcaaggggcaaaaggtctagtttgtcatgtaaaaggcaatggtattaaacaacatgtactggccattttacctgctgataaacaagctgatctatcaaaactcgctatcgctattggtgggacaagagcctctcttgcaagccctaaagaagttgatgaactaacgcaatgtgtatttggcgcgatcccaccttttagttttcatccagcactaaaactggttgctgatccgctattatttgaacgttttgatgaattagcctttaatgctggaacattagaacgttcgattattttaaatacacaagattatcagcgtattgctcagcccgagttaattcattttattcgccaagatgctcaagagcataatgattaa

SEQ ID NO: 311294 - DNA, 2319 bp, Proteus mirabilis
atgtccgaaataaaggtagatcccgtttttgcaccaccaagctttcctaatggtggacgattgaacttaacgctcgctcaactcaaggaaaattatcgcttacgcaataaagaaactcgtgcttatcaacagtctgacctcgataatagagggagttgcgtcaaatccttacatattagtttcttttttgatgggactaataataataaaaataacgataaatcatccactccccgccatcccacaaatatcgccaagctctatgatacaacgcatcgagatgagcgagaatactttgcgtattatatgcccggtgttggtaccccatttccagaaattagagagtttcaatacagttcggaaggcttaaaatatgcgactggtggtgaaaatcgtattaattgggcaataatgatgctaacagatgcacttattcgtgcattaaaactcgaggtctataccgatagtgactatgcgcaatttgttaacgaaatggccacaaattgggtcatgaataatggtcaggataaacgccaacgcatcttagaaaaaatagcgacagaaaaacaattactggcgaagattgaaatcaccaaaccacgtattttggggttaaaattatttgtctatggtttttcacgtggtgcggctgaagcgcgggcgtttatccattttttaagccaattgattgatacccgtcttgataaacagcgaccaaccttattcggtctaccgataagtattgagtttttaggtatattagatacagttccatctgtgggtattgtccatttagtgcccgcctttagtggtcatatggattgggcgaacaacactcaacaactgccagatgaaaaacaatttcctaattttgtgaaatgttgccgtcactttgttgccgctcatgagcaacggctatgttttcctatggactcagtacgcaggccgactgataaagaaagtaaaaccagccattatcctaacaacacctttgaagtagtatatccaggtatgcattctgatattggtggcggatatccgataaatgaccaagggaaagctcgcaatagtgagggggaaattctttctcagattgttctgcatgatatgtatttagccgcttttatggcaggagctccgctaaaagttagtcctgcgttagagaatactgtttatggcactaaattagttgaaaaaatggagccagataatttccttgaatttaaaatttcaccacaacttattgaacgctttagttcatggcgaaaaacgttaggtgtttcattatccacaccagcaacaaatgacgattacattccagaaaaacttactgataaacttgaagatgtgatgaaagatcagatggggtggatgaccgcgtggcgtattaatcgctatgctcaagggcgctatcgtcagcaaccattttatcctagtgccgaagagtgggatgaagaaacgattaaaaaaaatcagttagctcgcaaaaaggatgacattgacctcaaaaaagcgataaaacaatgggattatttaaaatcacagaatctacctattaatagccctccaccggaaggtaaaccgttatttgaaagcaagcgggataaaacccaattagctgaagcagctgcggaatttaaagctgattaccataagcaaattcggacatttaatgataaagcattatatatgatgctagatattattcccaaatacacgatgtatttattaaattccgatgatgaagtggtggaatataaggagatgaaagcggctggagaaaaatatcgaaagcatttatttcaagaaaatggtgagccgtctacggataaagatcaccgcaatattgtattgttgtttgatgatcatgtacatgattcgcgagcatggtttatgcattttgaaaccggagcgcgtgagccttgggcgggatattttcgttatcggatgatttattttggtgagcaaactaataaagcgctgtcaccaattgctgttgcagggcaactcgttgggatagccactctggttggcggagtgatttataccgtcagacagcgcgacgcgttaggtgtggttggaggcattgcgggaacagttggtattttatcattagaatatcaagtggtagatatagcaacagggcttgcgatcccatttatgccggaagcggaaaagcttttgcaaccaaaaacggataattctgatgttattgctgcaacgcgtcaattagctcaacaaaatcaagagatggagactcagcgaaaattaatggaatttttaatgaatagcgggagtagggttttaacgataagttaa

SEQ ID NO: 311295 - DNA, 498 bp, Proteus mirabilis; identical to SEQ ID NO: 311281

SEQ ID NO: 311296 - DNA, 513 bp, Proteus mirabilis
atgcccgcaataataatgccctggttcgctaaaataacctgtacttttgcggtactccttgcggggtgttcggtcgcgcaaccatcggattataatgccggcaataccacaggaattaaccacaccgaatattcaatatctgattttaaaatcaatggagcgggtggttcaattggggggtatacctgttgtgttatgatccctaaaaaatggacaccagagctaaaagcttatatttcatgggagacaatcaacacgaaaggactagcaatctcaccgggtttcaaggatgttgaaaaatataagcaatatcgtgaggaagtaaataaacgaagggaataccatgaagcagttgttcctattgcccaatatgataaatcctgcgggttacaagtgcattttctgccctgtaataaagtgaaggtcgtttcatcctgctttacctacggtatgccagaatatcctatccaagcaccgaaaaatatgaaggagccagcggtatgtccgaagtaa

SEQ ID NO: 311297 - DNA, 513 bp, Proteus mirabilis
atgtccgcaataagaatgccttggatcgctaaaataatctgtacttttgcggtactccttgtggggtgttcggttgcacaaccatcggattataatgccggcagtatagacgggtttaaccacaccgaatattcaatatccgattttaaaatcaatggagcaatggggtcaacgagcggaacagtgtgttgtgttatgatccctaaaaaatggacaccagagctaaaagctaatatttcatgggagacaatcaatacgaaaggactagcaatttcaccgggtttcaaggatgttgaaaaatacaagcaatatcgtgaagaagtaaataaacgaagagaataccacgaagcagttgtccctatcgcccaatatgataaatcctgtgggttacaagtgcattttctgccctgcaatgaagtgaaagtcgtctcatcatgctattggtatggtatgccagaatatcctatccaagcgccgaaaaatatgaaggagccagcggtatgcccgcaataa

SEQ ID NO: 311298 - DNA, 390 bp, Proteus mirabilis
atgaaaaataacacatattcaactatcccttcatcattacttattccaactggatgctctggtatactctatcctgtaggctcactttccattgatgcatcatataaatattctgatatttttatgcaattagctcctgatgctgatgatttttggtataaatttgtttgtttgaaaaatggatttcttgctaaacgagtacatcctgaaaataaacattttccacctataatatcctcattgaaagatgggttatttcataagaatgtaagaaacaatcaaaatgacaaaaaacttttatcaactataaatcactttggattatatcaaaagagtatcaaatctaatgaaaatcaccatatctggaaccggctatgtcggtctatctaa

SEQ ID NO: 311299 - DNA, 408 bp, Proteus mirabilis
gtgactttatggaaatcacatttaacagtttcttggtttacacagttattttcaactagtgtttacgttatttttgaaatagcattgctgttatatccttggccacctggctttatttatatctgggttcctttgttacttttacttatattaggttggtattttagccaaaaaaatatcaataaaaggaaaggggatttagtgctgcttaatggcaatcgtattcaatggaaatatcatgaatggcagattgcaaaacaaccgtggatcagccgatttggtgcaaaaataacgttagattctatcttaaataataagcaaattacgctatgggttgcttttgatagtatgccggaaaatgagtggcgaaatttttcacaactgctgatgcaatacccagatatttaa

SEQ ID NO: 311300 - DNA, 303 bp, Proteus mirabilis
atgagaaggctgaggctttcaccccacaataagctcactcgctctctatttctggttatctcattacttttttttagcttgatagccagttatgttgttgtacagcatcttattgtcgggccaagcctccagcaatttaataaagtattagcgtatgaaattcgtacgctagtaccggaagaactgatcttagtcgatggcaccccacttaaaatttctcccgctctacgtaataaaatttacaacgagttaggtatctcattctttgataaagacgctgctttaaaagccggtttagagtag

SEQ ID NO: 311301 - DNA, 1170 bp, Proteus mirabilis
atgaaaagacgtactttaatgaagttatcactgctagcaacattactgctgccaacttggaatgcgttagctgctacccataaaggatacatgatattaagactttccggagaaattgatatgaatatcaatccctctcaagttcaatatatcaatgctacattaaccggagcgacgagttttaatcatcagcctgtttatgctaacaatataagtcattcttcatgggcagctcgttacgcgctgattgcattatctagtaatactggctggtgcaatgctcaggctttctctcctatcccaggtcaagctaaccaatatggtttaaaattaacccatgctacgaataccaatactactgcttatatcattcctgagctgaattattttgtacttctaaagaatttttattctgattacaaaacactttatttaggaaaattttttaaaaaaaacaccgatgttattgatacctatacgaacataaatatatgttatgtgcctcttcttaatggtggaaaacctaaagtaccgactggtggcgaaaaagtgattactattacgtcgccgagtttattacccatttatattgataataatttaacaccaggaaaattagcttataatggcaagcctctttatataggaagttttggatattcagcttccgctgatgcttactcaacagtgaatattatcgctgatattaccgtcaaacgctcttgttcaattaccggtatatctaatcaacaactcaatgaaaatatgacctccacgaatgaagtggtacgtgattctttatttaacttatcctgtggaggattaggcaatccagttaatgtcaccgccgtggtaaaagaaggcaatattgatccgagtaatgccaaaaagttagtattagcaccgataaaaggaaccacgtctaatcaaaaaccttgggtgataggtttgccttatcaacagacaacgatgcctcatttaacatgtgcggatgagaaaaataatcggctgataaaatttaataatacgccaacagaattaactgacaccagtctaggtaataatcagcctgaaccctttggtattaaatgggcactgtgtaaacctgaggggactaaagccggtgaatatcgcggtaaagtagatgttaatttctttgtgcgcggttaa

SEQ ID NO: 311302 - DNA, 2589 bp, Proteus mirabilis
atgaataaatctatatccatttttaaatacagtttttttacctcccttattttattttcatgttattccttcgcggatgattattttgatcccgctctacttgatggagaattaggcactactgagggtgaaattgatttaagccaatttgcgcgtaaagatgcattacctgaaggcaagatcacattatcagtttatgtcaataacaataatcaaggtgagttgcccattaatttaattaaaggccccgataataaggtgatccccgaaatcacaccgtcattattacgtcaatttggggtaaaaacgcaggtgatccccaaattaaagacactcaacgatgatcaacttattgatgatattagcgactatattcctgaggcatcaataaaggtggatttatctgcactaaaattaatgatgagttttccgcaaatagtaatgacaaaggatgttgccggctatatcgatccgtccactcttgatagtggcgtgaccgctctatttattaattacatgataagtggtggacatgcatcgaatggtaataatgccaatagcaccgataatagcaaacagaaaaatgataatttttttgctcaattaagggccgggtttaatgtgggggagtggcgtttacgttcaaccatgacacaaacctacaataaaaatacctatcatcaacaaacgaacagtgataatagcaaccatatatctaacacaacgctctcacgtaatctttattcattacgctctgagttagtgatgggagaaaccagcacagggaataccgtctttgatagcatccccatgaaagggttgcgtttagtatcgaatgaccaaatgctaccggccagccaacagggctttgcaccggatgtaagtggtattgcgcaatccaatgcacaaattaccatccggcaaaatggttacgtgatttatcaaacttatgtcgcccccggtccttttaagatcaccgatctgtatgccagtggttcaggtggcaacttagatgtcaccatacgggaagaaaatggctcagaacgaacctttaccgtcgccttttcctcattacccgtcatgttaagaccagggggatggaaatatgaaatcagcgcgggacgttttgatggtggtatgaccgttgattcgaaaaaagccgacttcttattagctagtggtgtgtatggtttaccttacgatttgactttgtatggtggggtattgggcgcaaaagattattattctctctcttctggactcggtatttcattaggcaatttgggtgccatttctgcggatattacccatgcatatgccaatgtggatacacttggcgttcaacaagggcaatcttaccgtttccgttattcgaaaaacatgaccacaacaggtacttctattgacctcaccgcactgcgtttttcgacaaaagattattacaattttactcagtttaatacggctaattatcaactcaaaacagggacatcaccgtggttaggtgaaagagaaaaaagccgttttaccacgtcaatttcacaatcattaggggactatggtggcatttatctctcagggagtcactataattactgggagaaagataaaaatgttacccaattaactgctggatatagcagtcaatttcacggtattaacgtcgggattaactacagtattgatagaattaaagcgaaggaaagttggcctgaaaacagacagctcagtgtcaattttaatgtgccatttagtctatttagccatgacccaatgctaagcaacatgaatagtacctatatgatcacccatgacaataagggtagaacggatcagcaaatcggactctccggtagtgcatgggataatgcactgtcttatgggatttctcaaggattggccaatcagggccaaccgaatagtggctctgcttatgtcaactattccggtcactatggtacatcgtcattaaattataactactcaaaagattattacagtgtcaatggtagcctaaacggcggattgctgttacatgctggcggtattttattgggaagaagtatgggcagcagtatggcaattgttgaagcacctggagcacaaggcgcagaattaagttccggccaaggggtgattaaccatcaaggttatgcactagccccttacctttctgaatatcgtcaaaacacgattggattaaatgtcaatacgttgccagataacaccacgttacaaaacacctctcaacaagtggtgcccaccaaaggggccattgtcaaactcacttttaaaaccaaaattggcttccaagccattttaaatctgtcgcaaaaagagggcgtggtgccttttggagccatagcgacgttagtggataccaataatcctgatgagatgaacagcagtatcgtcggagaaaagggacaattatatatgagtggattacctgatagaggcaagctgttggtgaaatggggcaacaaaaagcaacaaagttgtacgttttcttatcacggtttagccgatatcgaagttaacagccaacacccgataagaaccctttcgcttgcttgtgaagaaaaataa

SEQ ID NO: 311303 - DNA, 231 bp, Proteus mirabilis
atgcaaaaaattccaagtattgacccgaatatgattaatagaaaaaatagtcatagtatgttaacaaaagaacaactcaatactattcaacaacgtttagatacactagtacaattatcgcctacatgggcacaaactcatggaattgaagttataaattacctaaataaacaatataatagaaacaacttaatgaatgggcaaatggtatggcacaattggacgcattaa

SEQ ID NO: 311304 - DNA, 336 bp, Proteus mirabilis
atggcactcaataaagaatggatgagtcaatacccaaatgttttgaaatatatagatgcaatatcattaatcaatattaaaaaatttaaaatagaagagctgaataaagatgaaatattgatatatgttatggaaaactcatcaataaataactcggttgatgaaaagatagcaacagatattaaattgttagttaatgtgtggtttactatcggaataataggaatagaaaaaacaaaaacactcacggtatactctagctttgataagcccatcttggatattacagattataataaaacttttgtaatacatcctttattctatcgagtgtaa

SEQ ID NO: 311305 - DNA, 612 bp, Proteus mirabilis
atggaacactttactaaaaaatcattatttacctgcgataaaactaatgaaaatctccctaataaaccgggtgtaataatacactgccaagatctagcatctgacttagggttaagcgaagcttttgcgcaatacacaatatcttatacttcttgtgacagtgttcatggcgaaattatccgtgaagatactggtgccgtttttattccgaaaagtcaggcgcctaaaaatggttggcctgttattgtatggaatcatggtacggtagggatagcgccaacttgtgctccctcattaacgcctaaaaatagtcgcgtatcgcaatatttaaatacttggctatcccttgggtttgcgattgttgcacctgattatccaggtttaggctcatcagggttgcatcattatatggatgaaagagcaacagcatggagcgctttggatagtgcaaaagctgttttgaaaggtgggttttcgctaagtaatcgctttatctttatggggcaatctcaaggggctcatgctgcatttgcctctgtcggctatcagcctgaatatgcaccagaatttaaatatcttaggtgcgatagtgacagggacgccttattttag

SEQ ID NO: 311306 - DNA, 537 bp, Proteus mirabilis
gtgacagggacgccttattttagtgataatctacttgaaaactttattagtgatggtgttcaagatgaaggtgatagaaagctaccttacgcgatgtacttatatctttctgctgctgataaaaatccaaacttaaaagtggaagattatttccaagaattagcaataccttatgttgaaaaagcgaaaacgctttgtatcagtccattaagtcaattagtaatggataataaattaaacgcatcaaatagcttaaaacctaagttttacgagctattagagcaagaagcgtcaagcttaaattatagaaaacttcttgttgataagcccgtatttatagggattggtttagaagatattcatgtgttaactcgttggcaacaagagtttgcaagagatgtattggaagcaggcacaaatgcatatgtatatgaatatccgaatatttgtcatttagatgtatacaatgtttctttgcgaaattcagtgccttttgtatttgaactgatgaaaaatgagcatagcaaaatagactaa

SEQ ID NO: 311307 - DNA, 444 bp, Proteus mirabilis
gtgaaatacttttactgccttcaatataagtcatcctctgtagcgaaaattgattggggtatttttagtagcgatgaagtcaataacaaaaaggttggcgataaattaggggaagacaaaaagttcaatttagaactgtctcaatgtacggcggcattagccgcagatggcacgattaatctttatgcccgtggcaataaagcaaacttcaatgcagatatgtttgctaatgccacgtccaactcattagcggtacagttgtccgccacagaaaagaacacgctaattaagcccaatgttgaaacaggcctaaaactaggaaaagagattactaaagatggcaatgccagtattccaatgaccgctagcctctatttaactaatggcaccgttagcagtgatgaattaaaagtcccggttacttttacggtggcttataactaa

SEQ ID NO: 311308 - DNA, 690 bp, Proteus mirabilis
atggttgagagaatgaaaatattttttattatattgttcatgctagtcgctccgcaggcttattcaaagggggttggtttaaatgcaacacgaattatttatcctgaaggagaaagtagtgtcagtattgtggtgcgtaataatgaacctaatatcaattatttggtacaagcctttattagctcagaggcgcacccggtgaccttccaagtcacgccaccgctttttagagtcaatagtttatccaaacatgaagtaaaaatttacgcactcgcgaatacattgccaaaagagcgagaaagcctattttattttcatgccaagatgatccctgggcaaaatagcaataccgatagcacaggattaagtatcggatttgataatgtcattaagcttttttatcgccctaaaaatttaccgatgtcctccgaagaggctcaaaaaaaattacagtttaaggtggaaaataagcaattaaacgttatcaaccattcaccatattacgtcaacttggcggggatttcaatcaatgataaaaaattagcgattagcttagcgaagaataatgccatggttgctccttacagtacaatcaagtatcccttaccttcagggcaaacaaaaggcactatttattggcgcacaatcaatgatttaggtggatttaatgaatataaagcgacattttaa

SEQ ID NO: 311309 - DNA, 507 bp, Proteus mirabilis
atgttaagcccactttatggttatagcgccgttgataatcaggctgtgatcaccgtcaaaggcaaagtgacaaaaggtacctgtacactcagtgtatcagaacaaactgtaaaatttactcaacctatattaatgcaaaatgtggctaatatcggtgaaagagaagaaaacaaaatcccgttttctgttaactataattgccaagattatgaggataaaacaccggatatagaaatgagaataaaagccggtgcaggaacagaaataatcaataacaaaatagtgccaataaataatccaacaaatacaagttttgttatttatgattgtaaaaagaccgcatgcactttagtaaattttaagactggtgaaagcgctgtttatattgccaccggaaatggcaataaaaatagcgcgtttcaagttgaattagttaaaaaagacagcgctcccatccatcctggaacgctaaaagctgtattagcactaacattgatccaaccttga

SEQ ID NO: 311310 - DNA, 1743 bp, Proteus mirabilis
atgagcacattattatctacacaaaatctctcttttcataataatcacggtatattgctgagtaatatttctttggcactcactaaaggtgagaaaattggtttaattggctacaacggttgtggaaaaagtacactattaaaacttttatcacaccaattaataccaacagatggctctattactatcgccaatcaagtcattatggcttatgtcgaacaacatttaccaagtgagctacagtcaatgcgtctcattgatgcggttcttcataaattacctgaagagctacgcatatctgaaagttggcgcagtgaattattattaagtgagatgggatttaaaaccaatgaaatcaatctattagtctcacaattaagtggtggccaacatactcgtttattacttgcgagagcattgattttgcaaccagacttactgctattagatgagccaagtaaccacttagatctaccgactatcttgtggttagaaacatttttaacacagtggcgaggaagttttattcttgtttcacatgacaataggttgttagataaagtgaccaattgtacgtggatcattcgtgataaaaccctatctgtttttcgcttgccctgctctcaggcaagacaagagcaagaagcacaagatatcagtgcgcaacatcgttgtgatgcacaacaaaaagagatagatcgtattgcacaaagtgcgaagcaattggccatctggggaaaagtgtatgataacgaaagtttgtcacgtaaagccaaacaaatggaaaaacaaattgttcgtttaaaagacgaacaagtcgatgtaacagaaggcaatcaatggacgttacagttatcaggaacaatattacgggcagatagattgcttgagctgcatcagctttcagtgatccctgcgccagatgcaccgattttatataccatcgataatcaacggatcaaaagtggtgatcgagtcgctattgttggtgctaatgggacaggtaagtcatcattattaaaaatgatttggtcatcatttcatggttcaaccacatcaacagaaaatgtgatcaggctgcatcccagagttgagttaggttattacgatcaaagtctcgcacaacttaatgataatgatacccttgccgatgcactaaagccctttgcaccgctattagatgagcaaaggaaaatggcattaataaatgcaggttttgtttattctcgccataatcagcaagtaaagtcattaagtggtggtgaacgagctcgtttactttttattggtctcagtttggcaaaatattcattattaatgctagatgaaccaacaaaccatcttgatatggaaggtaaacaggccttagctgagcaaattcaacaattttcagggggaattttactcgtcagccatgatagagaattgatagagaaaagctgtaatcgtttttggtatattcacaatggtattcttagcgaacatcatgatattgaaacaatttatcagcttatttctcaacaagatatgtcatcggtctctaatgagcaaaatggccatcatgctccatctgttgaaatagtaaaacatcataatgaagatgaattgctaatgaaattgatagcacttgaagataaattgaatgctgatttagcaagaaaatctgctcatcaaaagcctatgttacaggctcaatggcaagcagaaatagagatcttaaagcagcaacttgatttagcttaa

SEQ ID NO: 311311 - DNA, 681 bp, Proteus mirabilis
atgtcagctattttgcttaaattaactcggtattctatatcagaaatatctaatgattactcttttacttctcagcagaatttttcaagagcttttaaacgatattttaaggtaacgcctgaattttatagaaaaagtaaattttgggattttagatattatcgacctcaacataaagtatttgattttaaaaaaataaattgtcagttaatttatttatcaaaagatagattgcttgataataattctgatgattttaagttttttgatatttctattccttttgactttaagtcaaatattgcaatagaggggctaggctataaaaataaaaaacagattgaaataataaaaagtcttgtttattcatcaaatgataatttgtgtgtatcttataattatttccttagtagtaaagttaaaaataaaattactgtaaaatataatataaaatatattcatgattataatttttcctttaataaggaaggtctaaagtattatctattttcatttttaggctcttgggaagattatatgattttatccaatattatctatatgagagaattaccgctattgcaagccaagagaagagatggctatgatatagaaatatttaattcaggtaaattagataaaaacatttgttctttaaattatcttatccctataatttag

SEQ ID NO: 311312 - DNA, 1011 bp, Proteus mirabilis
atgagtatagtttatgtgccatgcataaaaaacgggatgaatgatataaaggctttattaaatttaaaggaagagtcatcaggttatgtcatgcctctagtgttaacagcaggaacgccttatggagggaatggtgtagatttaaaaaaagactacttactagatgagtttatacataattgggataagccattcattgtagatgcctctagggctgattcagatagtgagtcactttataattcctaccacaacctgacatcacagcacgacaatttttcgggtaaaatcacttactattcaagtatatattcaataaataaaaaattaattccagctataagttggcagctaaatgatgatatgagaaatattgttcaactctctctgtatttagagcagcaatatgaaaaaatagcaataatcattgatcctaataatagtgagaatttaaatagattagatacgttgttaccagtgattagtaaattaacctcgcgtggagtggggagtatagtattactaagttcttcattccctccagtaaaacctgcaataaaagatacatggatacagtcagagaacactgatctactgtggcaactaacaatgatgaataagtcacccagagatagcgttatcttatatggtgattattcagccacatcacctaattcagcaacagaatatatacaagggatgcaaataattccaagtgtgacttattttagaggcggtatttggtatcaaataaaatcaggtgtagacaaagaattttcaaaatataaagacatagcaaacgaactaatcagattggatttctttcatggctcaacattttgttggggtgctgaaaatatttatgatattgcaaccaatagagacaggaaaggaggcaccccaggaacatggaatgggtataaaattaatgttcatgtagaggaaacgatcagaattttaaaagactattacagtactccacttgaaaattacgatgaagatagtgaatag

SEQ ID NO: 311313 - DNA, 225 bp, Proteus mirabilis
gtgacaaaaagttttggggtacgtttgtcagaaaaaaatagtgtagctcaatctaatctggatagtgatttttttaaatcaggagataaagtttgggataatatcagcaaagatcagttagaaaaaacactctatacctatattaagtgtaaagataccacctcttgcgagcctgaagtaggcaatttttctgcgacattaactttttcgtatattgttgattaa

SEQ ID NO: 311314 - DNA, 711 bp, Proteus mirabilis
atgaatacattgataataaagatagttaccgcattattattgagtattactgtgtttaatgcatatactcaaggggtcagtcttagtaaaacacgcattatttttacaggaaacagcaacagtgaaataatcaatataactaatgatgataaccagccttacttaatacaagcaggggtcacagaaaaaatagatggtcagttatctccacactttttggtaacaccacctatttttcggttagaaaataaaagttcttcttctttacgtattttattaaaagaggctgagacattaccagatgataaagaatctattttttatttaaatactaaaattattccttctacctcaaaatatgaaaatggatcacctacgtctaaattagtattagtgacaaattttgtgattaaaataatttatcgacctcatcttctagccgatcccacagatgatgattacaaaaaagtattacttaagatgcaaaataaaaaatgggttttcgataatccaaccccttattatttaacagtaacctcccttaaatttgataatgataaatattctcaagcaattttattagcaccttttagtcagacggttatcgacagagagggttcaccggtaaaacaagccctttggcatattattaatgattatggagagctctcaacagaatttaaatatcaagaaccagtaagttataaataa

SEQ ID NO: 311315 - DNA, 471 bp, Proteus mirabilis
atgtctctcaaacagaaaatagcggtgataacaacagcaggagcaacagccatcgcgttagtagtaatagcccattttgaaggtgtacgttatgaaccttatcgtgatgtggcgggtgttctaactgtttgttatggacatacaggcaaagacattattcaaggcaagagatacacacaacaagaatgtgatgcgttattacaaatcgattttattaagacacaacagcaagtcgatgcattaatcaaagtatcactcgatgactacaccaaagctgctttatattcctttgcttttaatgtgggtacaaccgcatttgctcgctcaacattactcaagaagctaaacgctggtgatagagcgggtgcctgtgaagaaatgaaacgttggatatatgcaggcggaaaggtctggcgagggcttgtcagtcgtcgagaggcggagtcagcactatgtcatggaaaactttaa

SEQ ID NO: 311316 - DNA, 270 bp, Proteus mirabilis
atgccagtagaaacggataatattgggttatctcaggatatgcctgtttatcgtggtgttattcaaattaacgtggttggcaaagtagggggtggagactcgcgactctcaacgattgttgatgacgttaaagccagattggagaacggattaacattaggggagggagtctacattaacggagagcctagccagttccctccaatttcagatgaaacaaattataccattcctattcgtgcatcctatcgatgtaacgcaatccgataa

SEQ ID NO: 311317 - DNA, 180 bp, Proteus mirabilis
atggggattaatcaaattgctatggccgtaagtgagatggataccgtgactcaacaaaatgcggcacttgtggaagagtctgccactattactgccaatatggatgatgaagctcatcagcttgccaacttagtctctcaatttaaagtagatgagaaagaaaatactaggcatgcataa

SEQ ID NO: 311318 - DNA, 132 bp, Proteus mirabilis
atgcttaatgatgcggaggccgtaaaatttccaggagataaatcagcggtacctgttttaaaaggaactgcggtaatagtaaattggctcctttcttgccctgaattagagaaacctttagtgacggcataa

SEQ ID NO: 311319 - DNA, 801 bp, Proteus mirabilis; identical to SEQ ID NO: 307826

SEQ ID NO: 311320 - DNA, 207 bp, Proteus mirabilis; identical to SEQ ID NO: 307029

SEQ ID NO: 311321 - DNA, 1431 bp, Proteus mirabilis
ttgttaattccattatatgaacaaaaagaaaagctgatctttgctcaaactaactatcatcgcaaagatcttcgtagccaatttaattatggtattggttatcgctattttactgaaaaatttatggtcggcattaatggcttttatgatcatgatttaacgcatcatcataatcgtttgggaattggcgccgaaatttggcgagactatttcaaattaagttctaaccattatcaccgtctatcaagttggcgaacctctaataatatcttagattatagtgaacgccctgcgaatggttgggacattcgaacagaaggctattttccagcttatccacaattaggcactaaattaatctttgaacaatactacggtaaagaagttggtctatttggcaaagataaacgggacaaaaatccacatacctacacattagggattaattatactccgataccattagtcacattaaatgccgagcgtcgtattggcttacatgatcgtgctgataataacttgaatatcaacttgtcctaccgcataggagaatcactcgcttcacaacttaatcctgataatgtcaaagcaatacgtacattagcaggaagtcgttatgactttgttaatcgtaataacgatatgattttagaatataaaaaggaaactttagttttcctttctatggttgattcaataaatggttatgctaaagaggagcgcgatttacaagttcaagtaaaaacaaaatatccgttagctaatattgaatggtccgcaagtaagttaaatgcccaaggcgggcaaataaaacatcatggtggaactcactacaccgtgattttgcctcaatatcaaattggtgcaattgagaaaaatagctatatcattagtgctgttgccattgatacccatggcaatcgttcagcgcctgttcaaacaacggttattgtagataaatcgttaatcaatatgcgtaatagcctattttcacctaaacagagccaactattcgctaacggtgaagcaacccaaaagttaatattatccatcgttgataatgataatttacccgttgatattgatagtaaagaaattactttacagcaacagtctgatacagaaaaaggcaatagccgtatttctactttctctcgtttagctgctgggaaatatcaattaacggttacagcaggaagcataccggaaaaattaaccctaacccccgtattccgtgataataccttcaactcagcaaccgtgacacttattgccgataatcaaactgcccatattgcaaaaggcaacctaacggttacaaaagataacgcgccagccgacggtaaaagtcaaaataaaatcaaagtacgagtcactgatagcaaccacaatccattggctcattatccatgtcaactttactgccagtaa

SEQ ID NO: 311322 - DNA, 264 bp, Proteus mirabilis
atgatcaacgtatcacgcctttatatacatcctgtaaaatcaatgaaagggactcgtctttctcaagcctttgcccgtgagagcggcttcacgtttgatcgtgattttatgataacgacccctgaggggacatttatcaccgcacgtaaataccctttgttgctgtgttttattcccactgtaatgacaaatggtatttatattcaagcacccgatggtgaaggaattgccattacttatcaggattttcaatcttcattataa

SEQ ID NO: 311323 - DNA, 651 bp, Proteus mirabilis
atgaacaataatcgcgcactactatgtctggaaaaaattggctttcaactcgatagcaaaattattctagataatgtgactttctcactacaaccttctgaatttaaattgattacaggcccttctggttgtggaaaaagtacgttattaaaaatcattgcctctttattatcaccgacaagtggcacacttttctttgacggaaaagactacttaaccctttctcctgaacaataccgacaacaagtttcttattgtactcaaaccccgatgttatttggtgaaacggtttatgacaatcttaaatttccttatttactacgcaaaatcgccgttgatgagaagaaattagcgaaagatttagattactttaatttgcccaatgagattttaaataaaggtattaatgaactttctggtggtgaaaaacagcgtatctcacttatccgtaacctacagtttttacctaaagtgttattgcttgatgaaattactagtgctcttgatgaagacaataaaataaaagtcaatgagcttatccatcattatgtcaaagagcaaaaaatcgctgcattatgggtaactcacgatcaaaatgaaatcaaacatgccgatgatgtgatccacttaccgagtcatatgaacaattaa

SEQ ID NO: 311324 - DNA, 2001 bp, Proteus mirabilis
atgacttcttattcactacatgcacaagaagataaagtagaacgattagttgtatcagcctcagggtttgcacagcaacaaacagatgcacccgctagcattacggtaatcaacaaagaacaattagagaaaaaaccgatacacgatcttgctgatgccgtaaaaggggttgaaggcgtcagtgtgaatggtaatgcaaataaacaagaaattactattcgtggcttacccggagaatacacactgattttggttgatggcagacgtcaaaatagtcgtgaatcacgccctaatgggagtggtggatatgaaggtggatttattcctcctgcggatgccattgaacggatcgaggtaatacgtgggccaatgtcatcactctatggctcagatgcgatgggcggtgtgattaatattattactaagcctgttactaaagagtggcatggtgcagtttccatggggggaacattgcaacataaccgtgacgcgggagattctatcaatggtgatttttatctttccggcccattaattgaagataaattaggtttacaactttatggtagtagctacttacgtgcagaagataaaattacgtatgggcaagggcgtaacgataataaaaatattacggccaaattagcttttactcctacagataaccaaaccattttattagaagctggacgcaattcgctacaacgcacgacaacaccgggtaaatcgatgagcgaatttaccaatcgtggtggacgtcttgataaaaacaaaatgctagaaacgaataatgaccgtaaccattgggcattaacttataaaaatcagtttgatattttgcactctgagttaagtgtttatcaagagcaaaccaagcgtgttcaaaagacggaaggtgtagataaagcgacaggaaatagctacaaatattatgaagatcgccgccctgaaatcactaatactgttttcgatgctaaatttaccgcattccttcctgataatgtgatgacttttggtggtcaataccaatatgcacgtttaaaagacgaatcttcagtcggtggtaaagaggtcaaacaatctacgatcaccgctgatcaaaaagcgttatttttagaagatgaatttagtgtcacagataatttagccctaactgggggaatacgtcttgatgatcatgaatactatggtaagcactggaacccaagagcatacgcggtttaccatttaaccgacgaatttaccataaaaggagggattgctaaggcctttaaagccccgagtttacgagaaattagccctcaatatggtacatcaacggaaaaagggcgagcgattatgtatggtaatcgtgacttaaaacctgaaacttcggttagccaagaaattggtgttggttatgataatggtgatggttttaccgccaatgtgaccttctttaatacagaatttaaagataagcttaccaactacgataccggtgaaatcgatcctattaccggattaaaactgtaccaatatgataatgtgggtaaagctaatattaaagggattgaaaccgcggttgcattccctgtcgctgataactggcgagtaagtgctaattacacttatatcaactctaagcgtaaaagtgatgacgaaaaattaggctctggtgaatcattaaaaggttatccattggatatgacaccaaaacatagcgccaatgcgcgtgttgattggcaatacgatgaagctaccagtttctatgccaatactgcctatactggtaagcaaatttgggcggctcaacgaaatggttatactggcgctcgttatcgtagtggttatacaacctttgatttaggaatgacctataactttaataaaaataccatgctaaatttagccgtattgaatattaccgatgaaacgggtcctgcggtcaacgataaagggggaaactgggtcgttgatgaaggccgtcgttattgggcaaatatcaaatatagtttttaa

SEQ ID NO: 311325 - DNA, 1590 bp, Proteus mirabilis
atgtctaatcctatttttcagcaagaagttgctcgtcgtagaacttttgccattatttcccaccccgatgcgggtaaaacaaccatcactgaaaaagtgttgttattcggacaagctatccaacgtgcaggaacagtaaaaggacgtggctcaaatcagcatgctaaatcagactggatggaaatggaaaaacaacgtggtatctccattaccacttctgttatgcagtttccttacgctgattgtctagttaacttacttgataccccagggcacgaagacttctctgaagatacgtatcgtactttaactgccgttgactgttgtttaatggtcattgactcttcaaaaggggtcgaagatcgtacccgtaaattaatggaagtgactcgattacgtgatacgccaattttgacctttatgaataaattggatcgtgatattcgtgatccgatggaattaatggacgaagttgaaactgagctaaaaattgcctgtagtcctgttacttggccgattggctgtggaaaactgtttaaaggggtttaccatatcttaagagatgaaacctatctttatcaaacaggccaaggtcatactatccaaaactcacgagtaatcaaagggttggataatcctgagttagatgaagcgattggtgatgatttagccgttcaattacgtgatgagctagagttggtgttaggtgcatcacatgagtttgatcatgaagctttcttagcgggtgaattgactccggttttctttggtaccgcattaggcaactttggtgttaatcacatgcttgatggtttggtgaagtgggcgccagcgccaatgcctcgtcaaactgatatgcgtgaagtgacagcggctgaagagacattcacgggttttgtttttaaaattcaagctaatatggatcccaaacaccgcgaccgtgttgcttttttacgggtggtgtcaggcatgtatgataaagggatgaaactgcaccaagtacgtacgaaaaaagatgtggtgatttcagatgcattgacctttatggcaggggatcgttctcatgttgagcatgcttatcctggtgatattattggcctgcataatcacggtaccattcaaattggtgatacttttactcaaggtgaaatgttaaaattcaccggtattcctaacttcgctccggaattattccgccgtattcgtctacgtgatccgctaaaacaaaaacaattgttaaaaggtctggtgcaattatctgaagaaggtgcggtacaggtgtttagacccctagctaataatgatttaattgttggcgcagttggggtgctacagtttgatgttgtggttgcacgcttaaaaggtgagtataacgttgaagccatttatgaatctgtgaatgtatcgacggctcgttgggttgaatgtagtaacgaaaagaaactcgaagaatttaagcgtaaaaatgagcaacatctggcattagatggtggtgataacttaacttatattgcaccaacgatggttaacttaaatttaacccgtgaacgctatcctgatattgagttccatcaaacgcgtgaacactaa

SEQ ID NO: 311326 - DNA, 1038 bp, Proteus mirabilis
atgataagaaaaacattgctagccagcttattaaccgtaattagtggtactgtttttgctttacctaatgtgacaatcctcgcaactgggggaaccatcgcagggggtggagactctgccacttcttcaagctacacagcaggaaaattaggcattgatacattgattaatgccgtacctgaggcaaaaaaagtggctaacttaacaggcgagcaagtggttaatattggttcgcaagatatgaacgaccaagtgtggttaaaactggcgaataaaattaatacggattgtgataaaacagacggctttgtgataacccatggtacagatacgatggaagagaccgcctattttcttgacttaaccacagcatgtaaaaaaccagtggtgatggtaggggctatgcgcccagcaacagcattaggtgctgatggtccattaaacctctataatgccgtggtggtggcgagtgataaagcatctgaaaatcgtggtgtattagttaccatgaataattcggtgatcagtggtaaagatgttgtcaaaatgaatacgacagaagtgcaagcattccagccgattaatgcgggtgcacaaggttatgttcatgatggtaaagtacactattacactgctgcaacaccacgcgctgagaaagttgcctttgatgtcagcaaattaaccgaattaccaaaagtaggtattgtttataactatgctaatgcatctgatttaccggcgaaggcgtttatagataaccactttaaaggtattgttagtgcaggtgtcggcaatggtaacttgtattctgacatcttaaatactttagctgatggtgtaaaaaaaggtgttgttgtggttcgttcaagtcgtgttccggttggatttaccacacaaaatggtgaagtagatgatgcaaaatatggctttattgcttcagaacgtttaaatccacagaaagcaagagtgttattacagttatctttgacagaaacacaagatcccgccacgatccaagaaaactttgaaaaatattga

SEQ ID NO: 311327 - DNA, 207 bp, Proteus mirabilis
gtgtctgcgggtaaatgggcccttgaaggtattgaaacgcgagctcaattattagattcagatgcaattttacaaaactcatctgatccatatttaatgatgcgtgaagcctatttccaaaaaaatgatttcgatgctaatggcgggaaaacaggtgaaaatccaaacgcaaaagcgattgaagatgatttagactctatcgattaa

SEQ ID NO: 311328 - DNA, 1014 bp, Proteus mirabilis; identical to SEQ ID NO: 307582

SEQ ID NO: 311329 - DNA, 591 bp, Proteus mirabilis
atgcctaaattttggttacccttgtgcttaagcacaagtgtcttgctattaagtggctgttcatccatggggggaatgtctttttctgcacttaatccaatgaattggttctcaaatgagacgttaacggtttctgcaaatggattaggtaatatcactgcttcaacggcagtgacagagcaagcgatcgaaaaagagttgggtagccgtttccattaccgacaaggaatggaaatgcaacaaggcaatattatagttattgtgcaagcacttgaagatgaaaaagtacaagtggctttttatggccaagaaaagggcacagtagataaaatcacggtatctgatcctaatgcgaaaacagcgtggggaacgacaataggtacaccatttaaagatatttataaaaaagcatttggtatgtgcagtaacgggccgaaagttgataagcaaaaaaccattcaatgccaatcagaacaagcaaaatcagtgagctatgtttttgctgggcaatgggatggccctgatggtctaatgccacccgatgaaacattagcaaattggcaggtaacacaaattgtttggcaaaaatag

SEQ ID NO: 311330 - DNA, 846 bp, Proteus mirabilis
ttggaaatactcataacagctcatgcattaggcttcggtttatatagcgaatcccccgttcaaacccttgagaatgaagaacactggaaggacgttggttacagacttgaggaaggatatgacttaactgtaggatcagagactatcattacgagagatagacaaaatagccctttatctatttataaatatcaatctcctcagcagttgattgagttattccaggcaaaaaatattgacgatgaatgttcttggattgtaagtaacattgaaagctctttacaacagggccttaaacctcatgacataatggttatttcaatggatgatcgaaatgctaaagcatatttttctcgcctatctaaaatgctttcattcaaaggaatacggtcaaacaacttattaatctctacttcagcagctccaccatttaaattagaggatatggttactcttaccactgtacacagagcaaaaggtaatgaatctgttgaagtttttgctataggtcttgatgcattgtttcctttacgttctagcagaagtggcagaaataaaatatttacagcatttactagaacaaaggcttggttaaaagtcagtggagtaggtagtagggttgatggcttctttgatgagatccaaaagagcatccaaaatagccctagcctcaaatttgtagttcctgatacagaaaaaattaagagagatcatgatagaaagcctcaacaaatcttaaaaattcaagaagcttatggtgaactgttggagcaaggatacacaaaagaacaaatccaattggagtttgggttagattttaaggatgcaggtttatacgatgaataa

SEQ ID NO: 311331 - DNA, 216 bp, Proteus mirabilis
atgtttagtcctgatgataacggacgcgacaaactcaatgaaatttatcactcaatcatctccctgcctgagcgcgttaagtcagccaaatcattaagcgaaacatttaaaaatttagttggccttgagcgtcaagcatacggccttgatgatgttcagccgaataagacagctagtcagctatcagaactaatggacgacttatctaaggaataa

SEQ ID NO: 311332 - DNA, 174 bp, Proteus mirabilis; identical to SEQ ID NO: 298065

SEQ ID NO: 311333 - DNA, 606 bp, Proteus mirabilis
atggatattttgatggcagagcctgaaagaattatcaatatgaaacaaaatggtctaagtccagtttatcaacgaggctatcgtgttttacttgataaaacaggtttatgtgaccaacttccagaaattagcactgtgactcccccagccctttccatagagcaagctgatgccttggctcaagagttttggtttgaagccacacaaatcgctatagctatcttacgtaatgaattttggttcgctgaatatcgtatgagtgatataagggaatggttgatccgtttactagagcaagttgctctgcaaacatcaacacaagatgtctggtatcaaggcaaaaacttacgggagtggttacctaagttttactcattacgttcattagaaagcacactggctatgagtaccccttatgaagcagcggctgcattaagtattatcatggctttttttattgatgcatcaaagcgttttggtttgtcgatagaaaaggcaacacaagctcaaacacttattagcgattggtttattgataatgaactattaactgaaaatgaatattaccaaataaccacttccattatttgtcattatccaacttaa

SEQ ID NO: 311334 - DNA, 390 bp, Proteus mirabilis
ttgcaaccttcacaagcggtgatggtgatagtgcccgatactcagcataatgttgctgaggtgaatattctcaataaagatattggttttatctatccgggtcaaaaagcggtgattaaaattgatgcttttccttatacccgttatggcaccattgaaggcaccattgtcaatatagcaaaagattccatacaacatgaacaattaggcttagtttatcccgtcctgattgaacttgataagcaagtaatgggtgaagatgaagcacaatataaactggctacaggtatgtctttagttgccgatataaaaattgaaaaacgtcgagtgattgattatttactcagtccaatagaagtttatcaacatgaagcattaagagaaaaataa

SEQ ID NO: 311335 - DNA, 363 bp, Proteus mirabilis
gtggcgggtgttctaactgtttgttatggacatacaggcaaagacattattcaaggcaagagatacacacaacaagaatgtgatgcgttattacaaatcgattttattaagacacaacagcaagtcgatgcattaatcaaagtatcactcgatgactacaccaaagctgctttatattcctttgcttttaatgtgggtacaaccgcatttgctcgctcaacattactcaagaagctaaacgctggtgatagagcgggtgcctgtgaagaaatgaaacgttggatatatgcaggcggaaaggtctggcgagggcttgtcagtcgtcgagaggcggagtcagcactatgtcatggaaaactttaa

SEQ ID NO: 311336 - DNA, 363 bp, Proteus mirabilis
gtggcaggtgttctaactgtttgttatggacatacaggcaaagacattattcaaggcaagagatacacacaacaagaatgtgatgcgttattacaaatcgattttattaagacacaacagcaagtcgatgcattaatcaaagtatcactcgatgactacaccaaagctgctttatattcctttgcttttaatgtgggtacaaccgcatttgctcgctcaacattactcaagaagctaaacgctggtgatagagcgggtgcctgtgaagaaatgaaacgttggatatatgcaggcggaaaggtctggcgagggcttgtcagtcgtcgagaggcggagtcagcactatgtcatggaaaactttaa

SEQ ID NO: 311337 - DNA, 156 bp, Proteus mirabilis
atggaaatattaaataatgagacgaaaattaattgtggtaattatattcgtcaaaatatcgaaatgtgtttaatagccacaagaggaaatggattacctcgtcaatctgcaagtgttcgacaagttatttatttgtgcttagatgaacacagctaa

SEQ ID NO: 311338 - DNA, 999 bp, Proteus mirabilis
atgaagattttaaagggcgtccctttttactgctatcatctcgattatgacaatctgagttttattgaaaggcttgtaataaagcctaaatatgagcaaccaggtttcaaccaaaggatgtttaatgaggattttcctagagtttttcactcagcaagacgacaagttaacaatatgtttaatattgaatctaatgatgaggggcttatacaaaaactgcttggaaatgtacacactaggaataggcaacattcagtcgatgaaacaatacgtgaattgatagaagaaatagctcaatcgttagtatggtttggaaagacacactacttcgttcacaacatttgcgaacaagataaagtctttatcagatctttaaaccctaatggtttatttcgatttttttctaccttttttcagtttgtgccgaaaagactcacatttgatattaatactgacagagaaagtgagatgcttccaagagagttaagagtcttggataaaactaaagtgatgtattttgaaatgcccagatctttgaggataatgttatctaaacaaaataggactttagcagttatagataagcatcaattcgatagtactaaatttattgttcgagctactcatgaaaacccttatcctaaatatcattttgattttcatatttgggaaaatatacaagaacaagcgctgtaccgtgcaactcggaaaactggatggaatcctagaaattataattcaaataaactttcggactttttcctgtgttatcaacttatcaagtttagacggaatcagttcgttttacgtgactatatattgcttcaattgagtaaagaactcacgaaagtaggtcgcgaacagaatctagatttttacatcacgatttcaccggggagtgatttacctcagattcacaaactagatgaacttgaatctaaactttctagagaagaaatcagttttactgaggtgttagattactgtcacgaacgctag

SEQ ID NO: 311339 - DNA, 2481 bp, Proteus mirabilis
ttgactaatataataaaagtttggctaacttctcaattattgttttggaaagtgagaactaatttaataaaagttatttttttaattgaacgcagttcatataaaaataaaacagtgctttccaagtttaatagtggtgcccacatattaatgtcaataacattaattggtattaaaagtttattttttgttgtttttttgttattagttcttgggctgttagaaagttatgttcggagtagcacgagttttctccatcctttgagtcccgatgataaaaaattcaatattgatcaattgaggctttatgcacagctacttactgctattttttcgatatacttcgctacaattggtatcattgctagtgctggatatacaagacttcggcgagacataatacagatgcttactaccgaacaagttggtagcgtatattcgcgtgttatggttacttctgccgtattctgcctcagcgcaacagccttacagttgttcggatttgagcctggacttttcatttatgcagcaggaacgctattaacgcttataagctcgttagctctttttccattaggtcaaagattatttaatttttttgatttcaatcagttagctcgtagcgagatactccccagaattgctcgccacatagagggggcgtcaaattccaaaaattctatatctttagccaatcatcactccaaagccgcacattcagcatttgagcaactaaactacattgacgatcgcatgaggttagaaaaagtaggactttgtgacaatctaccagctataaacgaggattactctgcattacttttgcattatcttaatcagaaacacaaaatcaaccatcaaagttactggtatcctaggcgacaaaaacataagcaatggttttttgccggagacagtgcaacgactatggcgttgcaaacccgcagccaattaacggccgatgaagaggttaattatgattggctggagaatgagatcataaatagattgataggccatattgaattagcgttagatgttggcgatttcaagcttggactggatctcatcagacgattctcctctcgagtgtatacttatgcgcgacagtttcatttcgacataggtatgagtgaacttcggagaatgaaggtacttatcgaagaatattttgcttcatcggatatccttgatagcaatgaagcaatagttatgaaagttgaaattgcggatacatgggccgcgctaggtggcaatctctgccttgaagcgttgcgccgcataattacttttgatcaagaactcagagagttctttcaaaaagatatttggacagagaggtctctactttctcttcctgcttttttgcaaattgatctggcttttatcattgagcgaattgaattcgaaaaagagatcgaagggcagcgcttatccaagccaagatatgttcaacagttagtagtccagaaactactacagcaatacgcaaaaatactaccagaaatatgtgattttcacgcaagtttggttccagattttgttagttcaatgataaaaatgaagataccagaagctgcaacacaagttattcttggaagcctgcataatcattggaaactgcctcattggtttgaagatatctctttgcttttggatagatatagagagttcgagcactaccctgagaaacagtatgctctaccagagattaacattgctgatatactggaaaggctaacctctacgcagaatgaagcagtagcctttctaggccggagtgatattgttaggcatatcctagagcaagaacaaaatgaagaattgccagatcattttggacagatatattttgaattagctgaagcatgcattcaagcactggaacagaatgatgaaaacaagcttagcaaggtttttcctatgtttatgttcttatctctgcaagcatcagataccaaatttgtggatccaaaacttgatgtgaatgatgagtttcggttacaccttctttcatccgttattaatgacctgatgtctgttttaggtttcgctattctatacagtgcttattttgataacgaaaaattgtctgaagcggcacttaatagtttcagagcattaatcgaacgtattcccgataagcaacaatatctcaaaaggatgatgattctttcaaatccgtacaattttagtttatgtgcctccccgagagatatgatccgcaacaagtggaaaatggcatttgaacgtcgtgcaagacatgatggtttcagtggccaaatgggaaggagtagaggggtacaccacaaaaacaaggttgtaagagagtttcttaattcccattctgatgcttatcacctattttgcgctctcgagattcttccacaactgaatccgattgatttcaacattgactatcatgttacttctcttgcccgccgtctagaagatgtgaaatacgaagagggattagaatga

SEQ ID NO: 311340 - DNA, 2115 bp, Proteus mirabilis
atgcgctctctgtttgccagcacaggccgaggtctggaagaattattaaaaactgaacttgaacaccttggtgcccagtcttgccagattacgcaaggtggtgtctatttccgtgctgatgataaaaccatgtatcagtctttgctctggagccgtttagcttctcgcatcatgcttccgctaaatgaatttaatgtctacagtgatctagatttataccttggtgtgcaagcaattgattggagcgaagtatttacagttaatcatacttttgctattcactttaatggcactaatgatgtgatccgtaatagccaatatggtgcattaaaagcgaaagatgctatcgtcgattcattccaacgtaaaataggacaacgaccggatgttgctaagcaatcaccggatattcgtttaactatacatctacataaagaaaaagcgtcattatctttagatctcagtggcgatggattacatcaacgtggttatcgtgacttaacagggcaagcaccgctaaaagagaatctagccgcagcgattattatgcgttcaggttggaaaaccgatacaccattaattgatcctatgtgtggctcaggtactttacttattgaagcagcaatgatggcgacggattgtgcccccgctttaaatcgagtccattggggttttcgtcattggttaggacataatgaagcgctatggaaagaagtcactcatgaagcatttgcccgcttccgtgaaggtaaaaagaatactcaagcgcgtttttatggtttcgatgtggataaacgcgtattagatatggcaagagctaacgcacgccgtgcggatgtggccgatttaattacttttacccaaggtgatgcagcaaaactgactaatccagtatccacgggtgttaaagggacgattattagtaacccgccttatggtgaacgtttagaaagtgaacccgcactcattgccttgcatagtcagttaggacgagcggtaaaagcccatttcccaggatggcgattatcactttttagtgcttctcctgaattgttaagctgtattcagttacgtgctgagcgtgaatttaaagctaaaaatggtccgttagattgtgtacaaaaaaactatttattatcagaaacaccttcgacgattaatacacgactggcggaagattttgctaaccgtttacgtaaaaatgagaaaaaactcgcaaaatgggcaaaacaacagcaaattgagtgttatcgcttatatgatgctgatttaccagaatataatgttgcggtagatcgctatggcgaaaaagtggtgatccaagagtatgcacctccaaaaaccattaatgaacataaagcacgtcagcgtttatttgatgtgattagtgccaccatggaggttttagcattacgctctgatcaactaattttaaaaactcgtcaacgccaaaaaggtaaacaacaatatgaaaaaatggcagagaagggggatttctttttagttgatgagtttggtgccaaattctgggtgaatttaaccgactatctcgatactggactgtttttagatcaccgcattgcccgcaaaatgttaggtgaaatgagcaaaggaaaagactttttaaatctctttgcttataccggtagcgcgtcagtccatgctgggttggggggagctaaaagtaccacaacagtagatatgtcacggacttatcttgaatgggctgagaaaaactttcaagcaaatggattatcaggtagacaacatcgtttaatgcaggcggattgcttacagtggctaagccaaagtaatgaacagtttgatgtgatttttatcgatcctccgacgttctctaattcaaaacgcatggaaaatacctttgatgtacaacgtgatcatattgaattaatgaaacatctaaagcgtttattaagaaaaggcggaacaattatgttctcaaataataaacgtggtttcaaaatggatcatgaagcattagcgaatattgggttaacagcaaaagagataacacaaaaaacgttatcgcaagattttgcacgtaaccgccaaatccacaattgctggctattaaatcatgctggtgaggaataa

SEQ ID NO: 311341 - DNA, 519 bp, Proteus mirabilis; identical to SEQ ID NO: 298155

SEQ ID NO: 311342 - DNA, 753 bp, Proteus mirabilis; identical to SEQ ID NO: 293760

SEQ ID NO: 311343 - DNA, 342 bp, Proteus mirabilis
atgtctaacaaaccattacatagaattgatttgaatttgttagtcatatttcaaattcttttacaggagcgcagtgtcaccttggccgctaagtggttatccatttctccttctgctgtgagtaaagcattagccaaattaaggatatggtttgatgatcctctttttatccgtagtccacaagggttgatcccaacaccattatcgttaagtattgaagattctttatctgattttattaatattagccaccatatagctaataaacgtaccttctttaccacaacaaatattatctcattacccaaaatccacacttcagataaaaaattgggaatataa

SEQ ID NO: 311344 - DNA, 756 bp, Proteus mirabilis
atgacatgcgtagctaaagaactatcaaatttagatggtaaaatttttttaaggcaatctttttcgatgcaacaaaaaattcttcagcatcaattagaaatgtcagcagcaactattactcataatggaacgatgggagaggtgaatgaaaagtactttattgaaatgattagaaagtacttacctgcccgttatgcagttgatgctggtattattattgattcagaaggaaaaacaagtgatcagatagatgttgttatttttgataatcagtatacaccaacgttattggatcaaatggctcatcgttatattccggctgaatcagtgtatgctgtatttgaagttaaacctacaattaataaaaactatcttgattatgcgggtaaaaaggctgaatcagttagagtattaactcgaactagtgttccaattcaacatgctggtggagtttaccctgctaagccatcatttgatatcatagcaggaattattgcaactaaaattgattgggctgatggttttgctacttcatttcaacaaaatcttttatctttaactggaattaaaaaaattgattgtgggttatctgttataggtggatgttttgatacattttctatgaacaatacgttgaaaatagggccaacagataactcattagcatattttctttttcggttacttcaaaaactacaatcactgggcacagttcctgctattgattggaataaatatgctgaattgctaatctaa

SEQ ID NO: 311345 - DNA, 360 bp, Proteus mirabilis
  misc_feature (289)..(298): n is a, c, g, or t
atgcttcataaaaaattacatagcgaaatgtcatgggaacaacttggtgagtactatgatgaaattagtgatatgtccggtgttcgacaagatccgatccaccatgctgaaggtgatgtagctattcatacacagcaggtgatccacgctataaaatcactccctgaataccaagagctgtcagaaagagagcaacaaattctatggattgcagcacttttacatgatgtagaaaaacgttcaactacccgtgaagagaatgggcgaattatttcgccaggccatgctnnnnnnnnnnacgttttttatatgaaaaagtgccggttagctttattgatagagaacagattgcggcattag

SEQ ID NO: 311346 - DNA, 420 bp, Proteus mirabilis; identical to SEQ ID NO: 303332

SEQ ID NO: 311347 - DNA, 684 bp, Proteus mirabilis
atgactaacaattgtagaacaatttatgtcccttataatgtacctacgctaagctctacttgtggttcccgtacttatactgaaaacgaagaaagcgtcgtttctgtaagaaagtatcaaaccagaataaaaattgacaaagctattatttctggtacctatgtaaaaaatatttttgtaggcgaatttggtttttgccaaccacagaattgtgcgactaaacaaactatcattacaaagctatttttaaatctttcaatgacagttccacaatcttgcgttattaattcagggcaagtgttgaatattgattttgacaatattcctgcatcaagttttaaagtagcagggaaaaaagccgaaggagttaatacggtttctagaaacttaagtattcaatgtgacaatatagatgccagtgctgatttaacaatgcgattacaagcagattcagttcaaggtaatgctattgtttctaataataaaagtgttggctttgtggttgctaattcaagtggatctgaattaacacctaatgatttatcaagttttattcctttcagactcaaccaaaatgctgatgctaatgtcacgattaatgtttatcccgtaagtattgatggaaaaacaccaactgaaggcgctgtcacatcaagtggctttctaagagttgatttcccttaa

SEQ ID NO: 311348 - DNA, 918 bp, Proteus mirabilis
atggtcatacgtcctaatcaacactggttttttcggttatttgattggcacggttcagtgctatcaaaaataatctttcgcttatgtcttaatattgcaatgtctattatcgctattttggtttatcaatggtatgagttattaggtattcatttaactgttgccccatttagtttattaggtattgctatcgcaatatttcttggttttagaaataatgcaagttatagccgacttgtggaggcaaggacattatggggaaatatgttaattacccatcgcaacatattaagaaatataaaagccttattaccggaagataaacaatttaatcgtgacttttctaatctacttattgcttttagttggagtctaaaacatgagctaagaaaaacaaacccaatggtcgatctctatcgcctcttaccccgacctttatttgatgagataatgaatagcccttaccccactaatcggattttattgcatattggcctaaaaattggcgaattgcgagataacaaagtaataagtgatgttatctttcaatcaattaataaagatattaataacttatctgatgtattgggtggctgtgaacgtatttcaaatactcctgtaccttttgcctatacgctcatattgcaacgtacggtatatctattctgtgctctgctaccttttgcattggttgccgatctccactatatgacgccatttgtttccgtatttatctcttatacttttttatcttgggactcattagctgaagagttagaagatccattcggtgtttctgccaatgacttaccattaaatgcaatatgtaacaccatagaaaggaatttattagagatgcaagatatcaccccactccccatcaaagttaaacccgaccaatattataatttattgtaa

SEQ ID NO: 311349 - DNA, 684 bp, Proteus mirabilis
ttggcaagaaaaaatacaataactgaaaagaattttaaaaccttcaaagagtataacaatattgaagattatgaaaaagaagcaaagcaagctgtttatgctgcaacaataagcaaaactctttttgaagaatgccaatgtctcataaccttaagaacaatgcttgaatccctacacactgattatgaaaaatatgaaaaagtaaatccgttattaatggagctattacgcaaaaaatttacttttacatactccgctttcattactatctatccagaacccatcgaagaaagcgggctagaacgatttagtttaattaatacaaaaaaatactgtccagaacatgtatggaaacatattctcaaatccgctatttataccaatgaagaattggatgactattttgggtcgcaggaattactcccactggagcggatgtgtacagatatggatttatataacgagtttaaaggcacggttttatttgatgaagtgatcgggtgctatgttaatgaagaaaacgaaggatctcaaatttttgataatgaggtttattctgttaccgaagaacagttacgccagtggctagatgaagagcttgcatttctgagttatgtcactgaaggtcttttgaatatttgtattgaatacataagaaaagagaatggaattataagggtttga

SEQ ID NO: 311350 - DNA, 156 bp, Proteus mirabilis
atgtatacggaaatcgtgacatatatcctgatgtattacctattgttggtgcgcgatcacgcattaatggtggttgcggtagatgaggcattaatggtggttgtggcagatgagtggttgatgttgggggaatatctacacttgattctaccatag

SEQ ID NO: 311351 - DNA, 552 bp, Proteus mirabilis
atgaagaaatcgcttgtcgctgttggtgttattgttgcactaggtgttgtttggaccggtgcatcatggtacatgggcagtaaaattgaaagccgcttacaggaagaaaccaaacgcactaacgttcaattagcgcaacttgctaaagaaagccaattaggtgcggatattaaacttgaaattcgtgactataagaaaggcgtctttacttctactgctgatcttgcggttgtgatttcagagcatgccaaatcagatgaagataaaaaagtagaagaagtgctctttaagacggatattgaccatgggccattccctctttctgatattgctcaatttaatctagctcctaagttagcagcaatgaataatactttagtgaataatgagaccactaaagatctatttaagttgaccaaagagccatcatttattgatatgcactcttctttatcgtttgatggcagtgtatcgggtaaagttaacataaatcctattaattacagcaaagaaggtagccagttaacaacatcggcgtatggtttatgttga

SEQ ID NO: 311352 - DNA, 507 bp, Proteus mirabilis
atgataacaggcgttcgtactattgagcttagagctgctgaatggtcagaaattgattttgataaagctatttgggaaattccaaaagaacgtatgaaaatgcgtcgccctcacatggtgccattatctacacaggccttagaattattcaaagaaatacaaaccataacaggaaagtttaagtatatctttcatggtaggaatgatgcttctaaaccaatgagtgaagcggccataaatcaggttatcaagcgtattggttatgatggtagagccacaggtcacggattcagacatacaatgagcaccatcctgcacgaacaaggctataacactgcatggattgagactcaacttgcacacgttgataaaaactctattcgtggaacgtataaccatgctcagtatattgatggccgtagagaaatgcttcaatggtacgctgattatatggatactttagagagcggggataatgttgtccacggtaactttaaacgtgcttaa

SEQ ID NO: 311353 - DNA, 1776 bp, Proteus mirabilis
atgtcatcaaaatcctactttaccaatgaatcagaatacttaaatgagctgactgagcaagttgccaaagaaaaaccgcaacttgttaatttgctttcgcacaatgttaaagatcctgatacttcgcggattatggatgggctatcttatttatcgggtaatttacgccagcaaatagatagacaatttcctgagttaactaacagtttagccaatatgctttggccaaactacgcgcgccctgtgccaagcatgacgattgttgaatatcatcctaattatgctcagtgccaacacgcaacaaaaatttcagcaggacaaccttttagtgccactccactttatgtgcaaagtgaggaaacaaaccacgagacgttatttcaatgtcgatttagtcaaagtcgcgacctctggttaatgccgacaaaaatcagtaacattttgcagcaaacaaccgccattgaaataacatttgagttagcaacaaaacagccacttgccaatattggcttagataaattgtgtttttacttaaatggtgcgccatttactacaaatcagctctattttttattaagccagcatgtgcagagtgcctctttagtcacagatgtacatacgctacctcttactcacttttcagttacgcctgttggttttcaaaagcaggatgccttacttccatacccgaaaaatagctatgatggctatcgtatactgcaagagtttttctgttttcctgaagcctttctctttctagatattcatggtttggatgacattcctttggctatcgaagcagagcaattcaaactggtgatcaattttgatctagaaattcctgatggcgttattctttacgacgacagtattaaacttaattgcacccctattgtgaatttatttcctattgatagtgaagcaataaatttgacggggaaaagtgaggagtatgttttaagtcctaattaccaacttactgaatgttttgatattttttcgattaatgaggttagagggttacgttatcctaatgatgctaaaccttatccgatcacctatacagcatttgaaagtttttatcatcaaaaccatcagactcaaaatcatggctattaccgtttaaagataagtcaaaatgaacagttatacggctattcccatcgactttcttttgttcgtcagcaagagcctcagttacaacagtgtgaagaaaccgtttctgttgcactcaactgtactaaccgctatatcgcttcccagttatcgacgcgttctatcgatttagatagtgcatcaattccttatggggctttatctgctaagaatttattcgcaccaacactgcctttatatccattattagataaaacattatattggtctgaattaactaatttatctttaaattatcagtctttgctcaatcttgattcattaaaaaaaatattacaactctatgatttaccgtctgtttataacacacaggttgcaaggcaatcacaaaaacgcctagatgcattagttgatttacattcagagcatattgagcatatctacaaaggccttcctgttcgcggtctgaagacaacgttagttgttcatcaaaatgcgtttctttccgaaggaagtttattcctattttgtaccgttatcgctcaatttttcaccttatataccagcattaatatgtttcatgagttggaagttattaaccttgataataaggaagtttatcgatggccagcacaaatcaaccagcacatactgaagtaa

SEQ ID NO: 311354 - DNA, 651 bp, Proteus mirabilis; identical to SEQ ID NO: 307889

SEQ ID NO: 311355 - DNA, 267 bp, Proteus mirabilis
atgtcacttaagagcgatttctatgagcttgctaatagcaattctgcagttttccttaatgctctatatgagtttaactacccagatattccagaagaaaaaattcatgtgttttgcagatggcttattgattttacatgcatgtacagttgtatgctgccaaatgttcaagctagtgtactcgaaaatttggttaaagaatcactgaaagtcgaagatctaccgtttatatcgggatctcatggtcgagaactgatttttatttaa

SEQ ID NO: 311356 - DNA, 174 bp, Proteus mirabilis
atgaagaagaaagttaatcattggtttaatcgtcacgaagtgcataaaaacatcatggaaaataggttattacaagaaataaccccactgggttgtcagcgtttaaaggaagcattgaaagacgcaaaattaaggaaagcacatcgggataagttattaggagagcgaaaatga

SEQ ID NO: 311357 - DNA, 1023 bp, Proteus mirabilis
  misc_feature (972)..(981): n is a, c, g, or t
atgtctcagagcaatgttgaaattggtgatgaagttcaaggctggctcagtgatcatcactataaagaagggttctataccgatatctcaaccgatacgttagataaagggttgaatgaagcggttgtgcgagctatttcagctaaaagaaatgagccagagtggatgctagagtttcgtcttgatgcttatcgtcattggctagagatggaagagcctcattggctaaaagcagattatccatcgctgaattatcaagattatagttattattcagcgccatcttgcggtgcttgttgtgccaatggcagttgtgctagtggtaacaatgaagctgtctcaacacaagaaacccaagattatttaactaaagaagttgaagacgcatttaatcagttaggcgtgccagtaagagaagggcagtcagtggctgtagatgctatttttgactcagtatcggtttctaccacttatcgtgaagagctagctaaacatggtgttattttctgctccttcggtgaagcgattcaagaatatcccgaattagtacgccaatatttaggtacagttgtttctagccacgataactattttgcggcacttaatgcggcggtcgcttctgatggtacctttgtttatattcctaaaggtgttcgctgccctatggaattatccacctattttcgtattaatgcggcacaaacaggccaatttgaacgtacgattttaattgcggatgaaggaagttacgtcagttacatcgaagggtgttcagcacctgtacgtgatagctatcagctgcatgctgccgttgttgaagttatcattcataaagatgccgaagtgaaatattccacggtacaaaactggttctctggcggtgatagcgaaggcggaattcttaacttcgtcactaagcgtgccctttgtgaaggtgagaacgctaaaatgtcgtggactcaatctgaaacnnnnnnnnnncaggttcagcgatcacttggaaatacccaagtgttatcttaa

SEQ ID NO: 311358 - DNA, 1632 bp, Proteus mirabilis
atggttaactttttattctatatggaaaaaggtgataatgataaaagcatgtctcaagtaataaacttttctcttttatttattttatctatagtacctgcactattagcgggttcaaccctgcatattgaacaaaagttctctatggtgattatcggttggctcctgatgttgctctgcgcaggtatctatcggtttactataggaaaagtgattacttttattgttgcagctttatggtctttaaacctctccatctcactgtttttttatcgtgaacatgatattcccttttcatcatcaatagcagaaactttcattaatactaatggaagtgaaactgttggtatgctctcttataataaatattatgtactcttttatattgttatatttaccagttttttctatttaatacatattagcgcccgttatttaaataacaaaactaataaaagatgtttaattgctatttttatattaataattcttatttctctatacaaaaacttagcaataagatcagagagtaaaacccaattacttgctgagtattatctacttaatacccctttttacaatgcagcagctttagtgcggactttccacgaaaatagacaaatcaaaaagatcacatcagaaaaagttaattttaactatgataaagtggatcaaaaaacagaaatttatattcttttgattggtgaatcagtacgacgtgatcatttaggaatttatgggtatccgtacgatactacccctaatttagagaaagaaaaaaataatattttattatttaagcaagcttattctcctgcgcctgtgaccatattatcagtacccatatccctttctaatatcaacctaacagagttatatgataagaaacactacgctgataatatcatttctcttgccaatcatgctggcttcaaaacatattggttaagtaaccaaggtaaaggaaatccaaaaacgagtgtgatttctgttattgccaatatggcccaacataaaaaatggaatgaatttattggctatgatgaagaattattgccatttttagataatgcgcttaatgataactcatcaaataaaaagctcattgtcctacatacttatggtagtcatgagccagcatgtaatcgttttcctagcacttaccttaaaaccttttcccaacaagaagatgataactgctacgatagctctatcgcttatactgacaaacttatcagccaaattattgaaaaaatacaagataaacccgcatctatactctatttttcagatcacgcattacaacgattagataaaaatagagaagtacgttatcaccatggcgtgaacagtcctcgccaagaagcttataatataccgctctttatttggtatagcgcatctgcaacgcgaccaaatatcaatgaagaaaatttgaataaacctttttctaccgcagataattattggctattaagccaatggctaggtattgaacataactcagcgaaaaaatgttactcacctttaagcgaatgctatcaaacaaaaacgtcaatgatggtcatcgatggtaataagaagttattaaactacgcactattagaatcagaagagcaagcgcctcattga

SEQ ID NO: 311359 - DNA, 315 bp, Proteus mirabilis
gtgggactggctctttcgattggattagccgcttgttttaatgcaggaatgctattttggcaaatccgtaaacaagatatttatcaaccattagcgggttggcctatctttttattaaaacttgctattgcgttagctgtgatgagtgctgtattagtcggcatgctatgggtgatgcctgattggcaacaagggaatatgctaatgcgtattttacgtttattacttgttgttgttgctggtgccgcaagttattttgtcactttatatgctattggatttagaccgaagcatttttctctacgcgcattataa

SEQ ID NO: 311360 - DNA, 561 bp, Proteus mirabilis
atgaatatagaacttcgccatttacgttattttattgctgttgctgaagaattacattttggtaaggcagctgagagattaaatatttcccaacctcctttaagtcagcaaatacaagccttagaaagtgagataggggctcgtttactcgaaagaaccaatcgttctgtttcgttaaccccggcaggacaaatgtttttaaaaggatcctatcaaattatggcacaagttaaggcggtagcgacacgagcatcaagaatggaaaaaggagaattaggtgaaatttcaattggttttacctcaacaacaccttttatgcatttggttacgttaagtttgcgtcaatttagggaaaattatcctgaagtcggtattcatatgcatcaaatgaataccaaacagcaaatatcaccattattaactgtggccacattgatttgggaattatgcgtaatacggtgttacctgataatttgcaccaccagctcctatttcgtgaaccttttattttggcagtttatgaagggcatcctctacttgaatacaaagaaacaggcgtaa

SEQ ID NO: 311361 - DNA, 546 bp, Proteus mirabilis
atgaaaagaaaagttatagcactagctactattctttctgctgcatttgctggctcatctatggcgtatgacggaacaattacatttacaggtaaagttgttgatcaaacatgttctgttgatacccaatcaaaaaatttagctgttattttgccgactgtttcagtcgcaacattaaataatgtagcaacaacagcaggcttaactccatttacaattaagttaactggttgttccacagataaagatggtgctaaaaacgttaaagtatattttgaaccatccgctgatactgatttaactacacataatttaaaaaatacagcaacaggaactaaagcgaataatgttcaagttcaattacttaactcagatgcagcaacaacaattcagttaggtactgatgttaactcacaaaatgttcaggaagtacaaatcgacaatgctgatgtaaaccttccatattttgctcaatattatgcaaccggatcatctaccgctggggatgtaaaagcaaccgttcattacaccattgcctatgagtaa

SEQ ID NO: 311362 - DNA, 1872 bp, Proteus mirabilis
gtgactgaaataccttttcattttttatatcagtttaaacgttctttgcttgaccataagcaacctctctttaataaagagctattaaatcgtttagcaaatactcgcgaaaaatatcaacgtctgtatcagaaatttactgaacaaaccgcgttattaactgaaagtttaactaacctgcaaaccgcagaagaaaaagttcaacaattaacagcggaattggcaaaaacgcaagataaacttgctgtagcgaataatttacttaatgatgatagcctaaaacagtctgtggctaagttacaaaatgaattagcacagtctaaaaaagagcaggatacgttgcttgtacaattagctgaaaaagatcagttgctgtttgatgcgacagaaaaaaataaagtattaactaaacagcaagaagattttgatattcaggcacaaaaattaaatcaattgactacccatgttgctcaacttgagcaacaaaaacagcagctacaatcacaatatgggcaggctcaacggttattaacaaataacagtgctaaaaaagagattgaggtactacaaaattctttaactaatttatcagcagtgcgccaatctttagaaaatcaattagctaaaaacaaagcctcttttgaagctactctagctaagaataatcagttaattgatacccaacgccaacagatagctcaacttaacgatcacataaaaaaaataaaccaagagcaacaacagttaaatcattcgttagtgactcttcaacaacaaaaagcacaagcagatgatcaattaacacagatcccagcgttgaagcttgagttacaaaataaggttaatgaattagctgagctgaaaaaaagtttatctacgggtgagaaagcttttgatgctttgatttcagaaaaaaatggtgtaatcgctaaattagagaaagctcaggcagatcttgccaataagtatcaagcattggatacccaatttaaagagaacaataccaccattgggcaacttaaagagagcaaaatagcgaacgataacgcttatgctcaattagagaaacaactagcagaaaaacaatcgcttactgataaattaacgacacaattaacacaagctaaagatcagttagcaaaacaaaattctgaaagtaaccaactaattgcttcattaaaacagcagcaagtagaatcgacggctcaatttaagcaacaagaaagtgttttagcgaattctcaaaaagagtttaatgaagtctctaagcagcttgaagctcagcgtgcgctaacgaaaacacttgaagaaaaagaattaaaattaagtgagcagctaaaagaaaaagagagtgaaattaaaaaaataaatagcgaaagtgcgagtgttcaaaaagagaataaaacattaaaacagcaattggataaagctatgggagaagggcagattattgcaagtcagcttgcatatgcctattcaattatcggtaaagataatgcccaacgaaataaatcaattctgtcggaaatacaaaaacagaactatgtgcaatacgatgataacacttactttaaaatcctaaaacaagggaaacctgtggattcaattgcaggtaaaacagttgttttcgctatgcatgaacaattaaccgatggtacagtaacacttaattatgacaaagctaagccgttaattttaccataccgtcaacttccactgcctcttaatacttttgttgctaaagcaggcttaaatggcaaagctaaaatttatattaaacctgatggcgggtatgggaaagatggtatcccagggcaagtacctccagaatcgatgtctatagtgacaattgaaattttagctatcaaatag

SEQ ID NO: 311363 - DNA, 333 bp, Proteus mirabilis
  misc_feature (270)..(279): n is a, c, g, or t
atgaccatgaatgaggcagatgcccgcccaacgaactttattcgtcaaattattgacgaagatctggctaccgggaaacataatagtgtccatacccgtttccctcctgaacctaatggctatcttcatattggccatgcaaaatcaatttgcttaaattttggtattgcacaagattatcaaggtaaatgtaatttacgttttgatgatacgaatccagtaaaagaagatgttgaatatatcaactcgattcaaaaagacgttcagtgnnnnnnnnnntatcaactcggttcaaaaagacgttcagtggttaggtttccaatgggatggtaa

SEQ ID NO: 311364 - DNA, 123 bp, Proteus mirabilis
atgttaatgttggcacatactcccaaaactcaaatcaaaatatgtttagacgaagtgttagttatccaaaacacctcacaatacattgaatttaaacaattatttttagatgtgtgtgtgtaa

SEQ ID NO: 311365 - DNA, 234 bp, Proteus mirabilis
gtggtgtgtgatggtgctaaaatgccctctatcattattatgaaagatggtgttatccgaacttctgaacttgagcagatagaacgagatgaaaattggttaaacgaagagatgaaaaaacaacatatagataacccagaagatgtttttttagccgaattttgggatggtaaagtcaatttcattttgcaagacggtaagatcaaacacgatttcattccgactgctgagtag

SEQ ID NO: 311366 - DNA, 846 bp, Proteus mirabilis
ttgcatcatttccttgctgcaatagatacattctttcaacgttatcaatcaagagtagagcgccttactgcaattagtattaccatgaatgcaattgttgatccgattagtggcgttatttatagctctccttactatgctatccaagatattccgctggctgataaaattcaggaaaaaacaggtgttgctgttttcttacaacacagtgtaacggcttggacgatggctgaatcactctatggtgcagccaaaaataacaccgatattctgcaaattgttattgatgatattgtcggtgcaggggttgtgactaatggaaagacattacattcaaacagccatagtgccgtcgaaatagggcatacaaaagttattgattcacagacgcaatgttattgtggtgcaaaagggtgtttagaaacggaaatatcgatccctcagttaattaaaaaagcacagcacttggcgcaagaaaatcccacctcaatacttaatcaatatccgattacggtagaaacgttatgtgatgctgtattaattggtgataaacaagcattagacatcattaatttagtggcgcaacgacttggttttattttagccgtgatggtcaatatttttaatcctcaaaaaatattaataggttcacctctgtgtagagcaaaatctgcacttttccccctgatccttagtagtatccaacaccatgtattacctagatatgcccataacttggttattgaagaaacagaactgcgcaataaaggcacattgccagcagcatcactagtaaaagaagccttatataatggctcattattacttgagttaatgcaaggctaa

SEQ ID NO: 311367 - DNA, 480 bp, Proteus mirabilis
gtgtttttaataatccctttttcaagcgagagaaaaagccttcttttttcggtctctcttgctctacgggtttatcgactaatacctcttcgcgtaacgcgacaatatcttccgcttcggcttgtgcttgtgcaatacgcgctttttcttcagcttcagcttcttggcgtgcttgttcagcttcaagttgcgcttgacgttgagcttcttcttcggctaaacgcgcctgctccgcacgttcagcagctaatttttcagcttctgctctttgcgcttcttggcgtgcttgttcagcttcaagttgcgcttgacgttgagcttcttcttcggctaaacgtgcttgctctgcacgttcagctgctaatttttcagcttctgctctttgcgcttcttggcgtgcttgttcagcttcaagttgcgcttgacgcctctgctctttgcgcttcttggcgtgcttgttcagcttcttgctgcgcttga

SEQ ID NO: 311368 - DNA, 549 bp, Proteus mirabilis; identical to SEQ ID NO: 299166

SEQ ID NO: 311369 - DNA, 339 bp, Proteus mirabilis
atgcctaatgatacattagataatgtcattgggtatgataaccccgtcacatatttcatttccatcaataccagagatagcatgagccagaaaaacactttaaaaggcgttttatgtgccctaggcgcctatttgatctggggtattgcccctgtctattttaaaagcattcaagaagtgcccgcagaagagatcttaacacaccgtattttatggtcattcttctttatgttgcttttaatgtcgatcactcgccattggccctatttaccgccaacttgttcgtcagcccaaaaaagtactaatgttagcacttactgcggtgattattgccagtaa

SEQ ID NO: 311370 - DNA, 972 bp, Proteus mirabilis; identical to SEQ ID NO: 297117

SEQ ID NO: 311371 - DNA, 417 bp, Proteus mirabilis
atgaaaaatgaaactaatattcgccgtggcagacattgtgtattcctgatgcacgtccatttggtctttgtcacaaaataccggcgaaaaatatttgatcaggatgcaattgaaaaattgcgaggctactttgccagtgtttgtgctgattttgatgttgaactggttgaaatggatggggaacgggatcacgttcatttattgattaattacccgccaaaactggcgatatctaatctggttaacagccttaaaggggtatcgagtcgattacttcgacgtaatcgtcctgatattgcccaacgtgattactacaaaggggttctttggtcgccgagttatttcgcggggagttgtggtggcgcaccaatatccattatccaccagtacattgagcaacaggaaacacctcgttag

SEQ ID NO: 311372 - DNA, 822 bp, Proteus mirabilis
atgaaacggatcacgatagtcggattaggttggttaggattaccacttgccaatgccttgcgtgaagcggggtatcaagtaaaaggaacaaaaaccacagaagatggtgtagaagcagcacgaatgagtggtgttgattgttgtctaatgaatttaacaccggctattgagtgtgatagagatgattttgattacttaatggaaactgacgtactgattattacattacctcccagtgcggcgggaggaggatatgattatgttgaagggatacaaacattagtggatagtgccatgtctcggcatgtgacaagagtgatttatattagctctacttcagtatatggcaatcaaagtggtgttattacagaagaagttgatattaggccagaaacgcaatccgctaagatgatagcggaagttgaaaattggttacatcgcttaccacttacgaccgtcgatattttacgtttggcggggttagttgggccaggtcgtcatgcaggacgctttttatccggtaaaaaacaggtcaaaggtgcacatcagagtgtcaatttagtgcatttagacgatgttatttttgcgatagagcaactgcttgctcaaaatgaaggaggccgtttatataatttatgtgcccctattcatcctaaaaagaaagatttttacagccgtgttgctgcacagttagatcttactccccctgaatttgctctagaagataaaccgccagcacgagagatcgacggtcaggagatttgccgagatctcggattccattatcactatcctgatcccgacaaaatgccaatgagttaa

SEQ ID NO: 311373 - DNA, 621 bp, Proteus mirabilis
atgttaaaagtctggggtagaaaaaactcatcgaacgttaaaaaagtcctgtggtgtttaaaagagcttcaagctccttacgaacaaattgatgtcggaggcccttttggtggacttcatgaggccaactatttagcactcaatcccaatgcatctattcctaccttacaagatgatgattttgccttatgggagtcaaataccataattcgttatttatgtaccaaatatgaaaattatcatctctacccaaccgatgtaaagcaacgcgcaaacgttgaaaaatggatggattggtcaaatggtagccttttttctccaatccaacaaatgatgataaatcttgttcgcacaccaaaagagcagcaagatccacagcttgtacagagcctaaaagcgaaattaaaccaactgatcaaaattgccgatgatcaactggctaaaacagcttattttgccggtgactatttttcattagctgatatcgctattgctcctttggtatacccatggctagaggtttgccaagaaggtgcaaattatccacatctacaacgctggtttgcacaattaagtgaaaatcagatcttccgtgatgtcgttttactgccggtaaattaa

SEQ ID NO: 311374 - DNA, 1203 bp, Proteus mirabilis
atgaaaacaaatcttccatccgtattggctaaggttaccgcgggaatgggtttactgctaattatttctagtcctacttttgcggtgaataatcctgtgccgcctcaaattgaggctaaatcttacgtattaatggattataacagtggaaaaatacttgcttcagagaagcctgaagagcgcctagatcctgccagtctaaccaaaataatgagtagttatgtggtagggcaagcgataaaagagggacgtatgtcgcccgatgatattgttattgttgggcgcaatgcttgggcgacgggtaatcctgttttaaagggctcatccttgatgtttttaaaaccaggcgatcgagttaaagtgatcgacttaaatcgaggtatggtgatccaatctggtaatgatgccagtattgcgttggcagaacatgttgccggtagccaagaaacctttgttgatcttatgaatacctatgccgcgaatttaggtttaaaaaacactcactttaaaacagtacatggtctagattctgaagggcagtacaccacagcacaagatatggcgttattaacagctgccatgatccgcgatgtaccttcagaatatgatattcataaagaaaaagaatttaccttcaacaatattcgccagccaaatcgtaaccgtctattgtggaataaaaatatgaatgtcgacggtgtaaaaaccgggcataccaatggagctggctataaccttgtctcttcggcaaccgaaggaaatatgcgtctgattgcagtggttttaggggcgccatcagataaagtgcgttttgctgaaagtgaaagattactcggctggggtttccgcttttttgaaactgtgacacctgtaaaagagaacgtgcccctgactacgcaaaaagtatggtatggcgataaaggtgaagtggctttaggtgttgctaaagatgcatcaatcaccattcctaaaggagagctaaagaacttaaaagcctcttttacattgactaaccccgaattagaagcaccattaacacaaaatcaagtagtaggaacagtgaatttcttactaaacgatgaagtgattgagcagcgtccattagtggtaaaagaagcggttgaagaagggggtttctttagtcgtatctgggactttgtggttaaaacagtctctggttggtttaatgcgctttttggttaa

SEQ ID NO: 311375 - DNA, 1671 bp, Proteus mirabilis
atgaaatcagatattgaaatttcccatcaagcaccgcttttacccatccaagatattgctaaaaaaataaatgtagaccaagacgatattgaattttatggcaaatacaaagccaagtttagccagagtatttggtcaaaaatcacctcaaaaaaacagggtaaattggtgcttgtcacttccattaatcccacaccagcaggtgaaggtaaaaccaccgttacggtaggattaggacaagcccttaatcaattaggcaaaagtgccattattgcattacgcgaaccctccttaggcccttgttttggtctaaaaggaggagcggctggcggtggatattcacaagttgtaccgatggaagatctcaatcttcattttaccggtgattttcatgctatcacctctgcaaataatttattagcagcgatgttagataactcgctttatcaaggtaatccccttaacattaatcctaaaaagattatttttaagcgctgtatggatatgaatgatcgcgcactacgtcatttagtgattggattaggtggcgacaaagatggggtggttagagaagatagctttgttatcaccgttgctagcgaaattatgtctatcctttgtttagcaaaagatattaatgatttaaaacagcgcttagcacgtatcatcgttgcatataactatgaaggcgagcctgttagtgctgaagatctcaacgctgtcggcgctatggcaaccttacttaaagatgcccttaatcctaatttagtacaaacgttagaaaatacccccgcgattattcatggtggcccttttgccaacattgcccatggctgtaatagtctaagagcgactaaacttgctcttcaactggctgatatcactgtaacagaagcgggatttggtgctgatctaggtgcggaaaaattctttgatatcaaatgtcgcataggcgacttacaaccagactgtgcagttttagtcgttaccactaaggcattaaaatataatggtggcttaggcaaaacacagtgggatcacgaaaatctcaccgctttagcaacggggatcgaaaatctaggtaagcatattgaaaatctgaaaaaatatggtgttccggttattgttacagtaaatgcttatgtgacagactctgctaaagagcatgaatttatcgcccaatattgccagcaaagaggatgtcgttttgccattagtcaagtatgggagaaaggtggcgcgggtggtattgaattagccaatcaggttattgatacactagaaaatgatgcaccacagtttcaattactctaccctgataatatgcctttaaagcaaaagatagagaccattgctcaagaaatttatggtgcaaaaggggtgacttacaatgctaacgcccaagagatgctaacaaaaatcgaggatatgggctttggccatttccctatttgtatggcaaaaacgcaatattctctatcagatgatcccgcattacttggtcgcccgactgattttaccattaatatccgggaagtgtatgtcagtgctggtgcaggctttgttgttgcattaacgggcacaataaatacgatgccaggattacctaaaaaaccggcagcaatggcgatggacgttgatgatcatggggcaataaaaggactgttctaa

SEQ ID NO: 311376 - DNA, 201 bp, Proteus mirabilis
atgaaaaatgaaactaatattcgccgtggcagacattgtttattcctgatgcacgtccatttggtctttgtcacaaaataccggcgaaaaatatttgatcaggatgccattgaaaaattgcgaggctactttgccagtgtttgtgctgattttgatgttgaactggttgaaatggatggggaacgggatcacgttcattga

SEQ ID NO: 311377 - DNA, 2241 bp, Proteus mirabilis
atggttgcagttagaagtgctcacttaacacctgcaggggagtttgccgttgataaatgggttaatagcttgaatttaactcatgcgaatgcggggagtgaaatcatgcaaacctgggaatactgtcatcgtactgttctgggccgtgaagatgcgcaactgttgctatggcgcggtgttgagatggttgaacttctttcgacactcagtatggataaagatagcatgagggcagcacttctcttcccacttgctgaagaagatcttattaaccaggaagttatcactgaacattttggtgaggcgatatggaatttagtgcgtggcgtaatggagatggatgctattcgccagcttaaagcgacacataccaacgaaactagctcagtacaagtcgataatgtacgccgtatgttattgtctatggtggaagattttcgttgtgtagttatcaaactcgcagagcgaattgcccatttacgtgaagtgaaagatgccactgaggatgaacgagtcttagcggcaaaagagtgttttaatatctatgcaccattagccaatcgattggggattggacaattaaaatgggagcttgaagatttctgtttccgttatcttcatcctgatgaatataagcaaattgcaaatttactgcatgaacgccgtattgatcgcgaacagtatattgataatttcgtcagtacggtgcgtggttatatgcagcaagagaatattgaagtcgatatctacggacgtcccaagcacatctatagtatttggcgaaaaatgaagaaaaaaaatctcgcctttgatgagctatttgatgttcgtgcggtacgtattgttgtcgaacgcctacaagattgttatgccgctttaggtattgtacatactcattttcgtcatttacccgatgaatttgatgattatgttgccaatccaaaaccaaatggttaccaatctattcatacggtggtacttggccctgaaggtaaaaccgttgagatccaaatacgtactcgtcagatgcatgaagatgctgaattaggtgttgcagcgcattggaaatataaagaaggtgctactggtgcaacaaccaaaggcgggacgggaagttatgaaaatcgtattgcgtggttacgtaaattaattgcatggcaagaagagatggctgattctggtgaaatgctagatgaagtacgtagtcaagtatttgatgatcgcgtctatgtctttacgccaaaaggggatgtgattgatttacctgcaggctcgacaccattagattttgcttatcatattcatagtgatgttggtcatcgctgtattggtgctaaaatcggcgggcgcatcgttccatttagctatcagctacaaatgggcgatcaaattgaaattattactcaaaaacaccctaatccaagtcgagattggctaaatcctaatcttggttatgtgacaaccagtcgtggtagagcgaagatccacaattggttccgtaaacaagatcgcgataaaaatattattgcaggccgccaaatcttagataatgaattagcgccgcttgatatcaatatgaaagaagcagaaaagctgctgattgctcgttataacgtccatagtcttgatgaagtgctggcaggtataggcgttggtgatatccgtatcaatcaattagtcaatttcttacaaagtaagctgaataaagccacagcggaagatgaagacaaagaggcgttacgctcattagaaaataaaacggctacaccaaaaacaaccacgtcaggtggtggcagtattgtggtcgagggtgtcgggaacttaatgcatcatatcgcacgttgttgccaacctattccaggcgataatatcgttggatttattaccaaaggacgtggtatttcaattcaccgtgcagattgtgatcaattagctgagttactttctcacgcaccagagcgtattgtcgatgcggtgtggggtgagaattactcaagtggttattcattagtggtacgggttgtggctaatgatcgtagtggtttattacgcgatatcaccactattttagctaatgaaaaagtgaatgtgctgggagttagtagccgcagtgatgtgaagcaacaaatagcgactattgatatgaatattgagatttataatctccaagtattagggcgtattttagcgaaactcaatcaattacctgatgtcatagaagccaaacgcttttctcattaa

SEQ ID NO: 311378 - DNA, 342 bp, Proteus mirabilis
  misc_feature (311)..(320): n is a, c, g, or t
atggggcgattaaagcagtttagtgtgtttgcactttgcctctcttttcaatccatacccgcaaatgcaattaactcagctcaaattattgcaagtgcattatcaccacactgtttggaatacaaaatagtggggatctgttactggctattttgcacaccattgggttgtgttgtgagaacgtcgataaaagtcagtcattatattccaaatgccgttgtttctagttatgaccaaactgggagtaattcatggggcgaaatatcacctttaggagcaggaatatcgggctttgctgaaggtggtggtgnnnnnnnnnnaacaaaaacgagtaagaaataa

SEQ ID NO: 311379 - DNA, 1302 bp, Proteus mirabilis; identical to SEQ ID NO: 297347

SEQ ID NO: 311380 - DNA, 513 bp, Proteus mirabilis; identical to SEQ ID NO: 297085

SEQ ID NO: 311381 - DNA, 1287 bp, Proteus mirabilis; identical to SEQ ID NO: 297424

SEQ ID NO: 311382 - DNA, 1473 bp, Proteus mirabilis
atgaaactcagacttaaaaaaccattggtcgcgcttcttgtttctactttgctatcaacatcagtgttgcctgctcacgctgcgattgatattgaagataccctgcccgatatgggaacgacagcaggctcaacattgagtatcaatcaagaaatcgctatgggtgattactatactcgccaattaagaaatagtgcaccattagtttttgaccctctactttctaattacatcaataatttaggtcaaagattagtctctaatgccagttcggtaaaaaccccctttcacttttatttagtgaataaccccaatattaatgcctttgcttattttggtggcaatatcgtattgcactcagcactatttagatacagtcgcaatgaaagtgaattagcttctgttatcgcccacgaaatttctcacgttacccagcgtcatcttgcaagaatgttagaagatcaatctaaaaccacgccactcgccatggctggaatattaggctctattttaatatttatggctaaccctaatgccggtttagccacctttacgggaagtatggcggggatgcaacaaaacatgatcaccttcacgcaaatgaacgaacaagaagctgatcggataggaatacaaactctttatcgtgcagggtttgatccacaaggtatgcctaattttatgcagatcttagcagaccaagtgcgctatagttctaagccgcctgaaatgctattaacgcaccccttacctgacagccgtttatctgatgcacgtagccgagcagcgcaatatgctccgcgcaaagtgccacaatcggctaattttctctatgctaaaatgcgggtattgaccatgcttgagaaaaaccccgcatcaagtaacgccttgcaaaccacactggatcagtttaggcaaggaacggaattagaaaaatcagccgccaattatgcacaagccttactctattctcgtgatcgtaaatttaatgacgcgagaaaaatactcgcccccatgctggcaaaagagccaaataatatctggcttattgatgccattaccgatattgacgtagagcaaaaccgtgctgcagaagcgataacacgtttacaacaagcgcttaagcaatcacctaataacaaagtactgacggttaatttagctaatgcttatatgcaaaataagcaatataacgaagctaatcgattattatatcgctatacctttgacaaccctgacgatcctattggttggcagttggtggcggaaaatgcggcaaaacaaggtaatcgagcccaagagcttgcagcttacgctgaagatttggcattacgaggagattttgaaactgccattcgttatcttggtgatgcgagtcgtcaagtaaaattaggcagtaatgagcaagctcgttttgatgcacgtattgatcaattgcgtaaacttcaacataaagacagtcaatttaaataa

SEQ ID NO: 311383 - DNA, 225 bp, Proteus mirabilis
gtggttttatcttcagtcactaacatacgacgtaatgcagacgcgcgacgaggaacacgtaatggtcccggtaataagccttcggtattaacaccgcgctcgatacctgatttcattacctcccaaacggcagcaaaatgggctgagatctcttctttactgcgtaatgcaagctcattttgcatcaccagtgcagaaagagagagaccggtttccttacagtga

SEQ ID NO: 311384 - DNA, 177 bp, Proteus mirabilis
atggaaatacgtgtattccgtcaagatgattttgaggcaatcattacactttgggaacgttgcgacttgatctcaccagaaaatgatcctgaaattgatattgaacgaaagattaaccactcccccgatctctttttaatcgcagaggttgctggcgaaatagttgggaggctatga

SEQ ID NO: 311385 - DNA, 1458 bp, Proteus mirabilis; identical to SEQ ID NO: 297081

SEQ ID NO: 311386 - DNA, 300 bp, Proteus mirabilis; identical to SEQ ID NO: 309887

SEQ ID NO: 311387 - DNA, 501 bp, Proteus mirabilis
atggtgtgtattttattgtctataataaaggatttgccatgtagccgtttaaaagaaaaaattgcagagcagatttcaccgccacagaggtcagcattcacagctgacttatatcctgcgctggcgcgagaacaaggctttgatgggattgatttaccccagcccacaattgcaggtgttgcgatggatagcattgatagctatgtgccctcatttaaaggggaacaagtttacggtgtgccagagtcacaggcctcatggtatgcctcacaaatgtttatcggcaacaatatgtgtgcggttatcgctaaacactggctggtggataaagcctgtaatatgcccgcgcgtgatgcgatacgtcagggttacgatattgattgtgataacgacgatgatcgtgctatcagtaaaaagcatcgcaaacgagataaaaataccgcattacacatcagcttaaagagcaggttcactttgggcatgtatacggtgatcgtttag

SEQ ID NO: 311388 - DNA, 192 bp, Proteus mirabilis; identical to SEQ ID NO: 297043

SEQ ID NO: 311389 - DNA, 1728 bp, Proteus mirabilis
atgaattctaccgaaggacaaagaacattagataaattatattcaattaatgatgaagaaaataatagcctgtgggtgggagtgacaaagaaagtaattagtcttgttgctaattcaaaaattatggacgcacttttaaatgcacaagaatatgcagagaatatcgaaaattttgttaataagcttgcgtttatttgctcagatagcattggttttgcatttacaaaaacaagtaagatgctttctcattacgatattaaaaatagactaattaatactaagggtattgactatttagctcaaaagatacttccgatgatactggcattttgcaacacaaaaatttcattaaccgagtttgttaaattatcgggtaatgagcttaaccagtgggtggaacaactccgtaaattaacggaacaaatagtaccaaatctgcaacatcctaaattaaataagcttttttcttggaaacaaaaaataataaatctaggcgaagagactgccgttcttattccgaagattgagatcacagatattactaaaaataagatttatatttatggtaaagatgcattacaggtttccactaagctatttttaaacggtttcagcatgataaccggatcaatccaagcttatacattacaaggcatgagcttatatgaacgtaatgacccattaaaactatccccctataatctgtatacagcacagattattgcgaatttatttgtagcaagctacagtattttaaaagtctctcaagaggcgacaaaattatctcaaacagtatcgagcaccacactgaaattctttttagataaaataaaattacctatgctaacaacagaagtgggaaccaaaagaatggcagcattaggtaagattgcaggtgccgttggtgttgctcttgccactcgagatgcattagaagcttttcatattggaaataataaacaaggtttatcaaatgtagccattgccattggttctatcatgctaatttttgttacagggggatgggctctatttgcaggactgctaatattaggaggctttatctcaagtcaactcaccagttggagtcatttggaaactttgctaaaacacagtttttggggaaatgaagaaagatcaaatttttggaataataaaagacctataacaatcgataaacaactagaagaatatgttaaaaatttcgaacaatatgaaaaacagagtattattgaattacaagaattttataatctattttatacagctaaaatgactcaagaaaaaataccaaatggaaaactccgcttatcttttgaatttactaattttatcccagggatttcagaggtatattttcactttgttacagaggttggttatcacagcggtttggcagaagaaataaaaacacctagttcagcttatgttctaaataaacgaaaagatctcttagaaattagcaaacaattaaaaatggcaagtgaaaaaggtgattggaaccctgaaacaggtatatttaaatttagtttggaagtacagtctcaattagtaaatacatattctgcttttggtgcacatcccaatagccgtataggtattgaagatttatattggtattatcaagtcaatcccgaggtaacaacaccgatgcgttatatcaattgggggggagatacccaagaaaacaatcggcttttaggctttattaacagtgagaatatctaa

SEQ ID NO: 311390 - DNA, 1383 bp, Proteus mirabilis
atggatgcgtccaatttagccccatcggcgaaatcaagcccgataaacaaacgagggttaattattttagcaatcgacgttgtactactgctgttattgctagaatttttaccctacgatccaaaagctaatgcaggtttagcgttaatggtgtttgtgggtgtgttatggctgacagaagctattcacgtaactattacagcgttgtttattccaatccttgcggtagtgctcgggttaatgaacaccaatgaatcgctaaaatcttttgctaatccgattattttcttattcttcggaggatttgcattagcaacagcgcttcatattcaaggattagatcgcttaatcgctaaccgcttattgatgattgctaaaggcaagctctccattgctgtcttgttactttttggggtaacggcattactctcaatgtggatcagtaacacggcaactgcggcaatgatgttaccgttagtgttaggcattttatctaacttagatattcgttcagaacgtaatactttcgtcttcgtactattaggtgttgcttatagtgccagtatcggtggtttaggtacgttggtgggtagcccgccaaatgcaattgctgctgctcaactaaatttagattttattacttggatgaagtacggtgttccaatcatgttagtgctattgcctatcatgtttattgtgatgtatctgatgctacgtcctaacctaaaacataagtttgatctgaaattagaagtgttagagtggaataacaaacgtgttattaccatgattatcttcttagtaacggtattttgctggatctttagctcctttatcagtagcgctttcggtggtgtgaaagatttagataccgtcattgcagtcagtgccgctattgttattggggtgacgggtgtcgcaagttggagccaaattcaggaaaatacagagtggggcgtattaatgctgtttggtggtggtttaacactgagcgcaattttacaatcttctggtgcaagtttggttatggctgattttatgaaagatacttttggtaacagccattggtttgtcattattcttgccgtaacaacctttattattgttttaactgaattcaccagtaataccgccagtgctgcgttacttgttcctatctttgcaacggtggcacaagctttaggcatgcctgttatggcgttaacgatgattattggtatcggtgcatcatgtgcctttatgttaccagtggcaacgccacccaatgctattgtatttggctccggatatattaaacagacagagatggtacgtgtaggtggggtacttaaccttgtgtgtatcttagttatctctctctttgcttggttcttctggttataa

SEQ ID NO: 311391 - DNA, 180 bp, Proteus mirabilis; identical to SEQ ID NO: 309673

SEQ ID NO: 311392 - DNA, 954 bp, Proteus mirabilis; identical to SEQ ID NO: 295503

SEQ ID NO: 311393 - DNA, 630 bp, Proteus mirabilis
atgttgccctgtactgataaatcagcggtatcggtcaggttagagaatcaagccttaacgaatggcgttcattatatctctttcttcactgtggatatttttaacaatatttgtttttcacgccgtgaacgtattattgtggataattccttaactggggaatgcggtaaacaaattaaaaatattgcaccgaagccttgtattagcgtcactattccgcaaatttgcgatcgttattttaattctgtcaatattcggcttgtgccttctttatgcttacaaattaaaaaccgtgttgcaaaattggatatccaaaaaatggttataatctttaatggatatactaaagtcaatagcagtgagcggacattggtttatcgttctacattagaaatttatgccgatgatcctcgtttaggtgatttcctgcaagatactacaccaagcaatgagccgataagtatgattgaaatatcagagcctgcattagaaagtattttggcggatgcattgccaaatatcgaagtgggacaattaggtattcaggtgatggtatttgagaaaaatggcaactgttacttatgtggtgaaaatatgtataccgtttctctacgtttaccttgtgcttaa

SEQ ID NO: 311394 - DNA, 1932 bp, Proteus mirabilis
atgaaaaggtttttgacaacactcgccattttgcttgtagtgattttggcaggcttaacgacattagttttgctcattaaccctaatgattttcgtggttatcttgttgaacgcgttgaaaaacaaagtggctataaattaaccttacaagatgatatgcgttggcatgtctggccaaaactcagcattattagtggtaaaatgtcattaacagctcccggtgctgagcaaccattgatcactgctgataatatgcgtcttgatgtggaattatggccattactttcccaccagttggaagtaaaagaagtgatgctaaaaggcgcagtggttagacaaacgcctgagagtaaagcaatacctaaaataaccccgccttctgttgccaatgaagacagtactcgtccgattattgagccaaaaacaaatcgttggcaattaaatattgctaaggtgaggatctccgatagtttgattatttggcaaaccaaagggggagagcaacttaatttacgcgatatcaatttattattaaaaacggacgacaaaaaacaaattaaccttgagatgagcaccaaaattaatcgtgatcgtcgcgagttaatgttaaatgttgttgctaatgctgatatgagtggctacccatatcaaatcagtggcaatatcgctcaattagattatgcattatcgggaataggacttccggctcaagggatctccggaaatttaacctcagatttcaatattaaaaatgatagtgtaaatgttattgccttaaataatttaaatatgacggcaaatgagagtcagctacaaggtagcatcacggctgaattggctaaaaagaaccgctatcaagtggaattaactggggacactttaaatttaaataccctattacctgagttagcacagcctaattcatctgaaacagcatcgttaaccttggcaaatacctcgtcgagatcattctcattctttagccatgctcaggctgcaccatcacccaatgcaactattatggctcgtccggttattacctccgcgacaattgaaaacaaagcgtatgatttaacccactggggtgatattgaatttagcttaaacttagcgctcaataagttattgtataaagaattagaaataaacaatgttaaattaaccgcattaaataaccccaaatcattaaatattgataggttagaagggcagatcctaaacggaaatttctcactgcctacggtgatttctactagcattgtgccagcgcatattagtatgaatgtcacaatgaataatatccctttgcaacctttattacgcgtctttgatcagccagaaaatttcagcggtttaatttctgcgaaagggcatctagaaggtgccggatataatcgcaacgcgtttcttaatagttggcagggtacactggatacgtcattaagcgaatttaaaatgctaggattaaatattccacaagtgatccagcaatctattgcacaaacaaccgatcaagtggtttatcctgaagatattgagaactataccaaagccgatagtgtgattgcccagtttaaactagcgcctaaaggccgagtgacgttaaatcagttagatgctcaagcaagtgcttatcagatcagcgggcaaggtcaattagatctacaacgtcataatctagatgtgatgctgatggttaatatcaaaaaaggttggggcaaagagaatgaatttattcgccaactggccaaaatagatattccattaagattgtatggtaattggaatgctatccaatatgagtttaacgttgaaaaattactacgtgatcaattacagcaaaaagcaaaacaggccatagataattggttaaataagcaagatgatagccccgaagttaaagcgcttaatcaattattgaaaaaaatataa

SEQ ID NO: 311395 - DNA, 582 bp, Proteus mirabilis
atgcgattatgcgaccgtgatattattcagtggcttgatgaaggtaaattagtcattgaaccccgcccgcctgtcgagcgaattaacggcgcaacagcggatgttcgcttgggtaaccagtttcgtgttttccaaggacatactgcggcttacattgacctcagtggccccaaaaatgaagttaatgaggcccttgagcgggtgatgagtgatgaaattgtattaccagaaggcgaagcgttttatcttcatcccggagagcttgccttggcggttacattagagtctgtcacattaccggataatgtagtagggtggttagatggacgctcatctttagcgcgattgggattaatggtacacgtcacggctcaccgaattgatccgggctggcatggacacatcgtattagaattttttaattcaggtaaactgccattagcattaagaccgggtatggtgattggcgcattaagttttgaacctatgtcaggctctgcggataggccttacaatcgtcgccaagatgcgaaatataaaaatcaacaaggtgcggtaggaagtcggattagcgaagattaa

SEQ ID NO: 311396 - DNA, 642 bp, Proteus mirabilis
atggctgacacagcacatcagtgcacaattgtaggtatcgctggagcctctgcttcaggtaaaagtcttattgccagtacactttaccgtgaattaagagcgcaagtaggtgatcataatatcggtgtgataccagaagattgctattatcgtgaccaaagtgatttaacaatggaagagcgatataaagttaactacgaccaccccaattcgatggatcacgcacttttataccaacacttgtgtgaactaaaagccggaaacgccatcgaactccctcaatatgattatgtcgctcacacccgtaaatcagaaaccattcattttaaaccaaaaaaagttattattattgaaggtattctgttattaacagataagcgcttacgtgaagagatggatttttctatctttgtcgatacgccattagatatctgtttaatgcgtagaattaaacgtgatgtgaatgaacgtgggcgtagtctagattctgttattgaacaatataataaaactgttcgtccgatgttcttccagtttattgagccttctaaacaatatgccgatattattgtgcctagagggggaaaaaaccgtgttgcgatcgatattttgaaagcaaaaatcggacagttttgtgaataa

SEQ ID NO: 311397 - DNA, 1113 bp, Proteus mirabilis
atgagtgataaatcccccgagcagaccacccctgagattctgaaagaaaaagtttcaggtgtcttgtctacttttgaacacccgacattgaaacgtaatctgctttccctaaaagcattacatcagtgtgcgatgattgatgatgtccttcatatcgaattagtgatgccgtttgtgtggaaaaaacctttccaacaactgattgaagaaaaaacggcagagctgcgtaatatgacgggagccaaagctgttgagtggaagctaaaacacaatattgccacactacgtcgtgcaaacgatctaccaggtattaatggcgtacgtaatattctggcggtgagttcaggtaaaggcggggtgggtaaatccagtaccgcggtaaaccttgctttagcgctagcacaagaaggggctaaagttggtattctggatgcggatatttatggcccatccattcctaatatgttaggtacaaccatggaacgcccaacttcaccagatgggcaacatatggcacctattatggcgtatggtctagcatctaactctatcggttatttagtcacagacgataatgccatggtatggcgtggtccaatggcaagcaaagcgttgatgcaaatgctgcaagatacgttatggcctgatttagactaccttgtgatcgatatgccaccaggaacgggtgatattcaattgaccttatcacaaaatattccggtgactggcgccgttgttgttacaacaccacaagatattgcgctggtggatgcgatgaaaggcattgtcatgttcaaaaaagtcaatgtacccgtattaggtattattgagaatatgagtgcgcatatttgtagcaattgtggtcatcttgagcctatttttggtactggtggtgctgagaaattagccgaaaaatatcattgccaattattgggtcaaattccactgcatatctctttacgtgaagatttagatcgcggacaaccgacggtgatgcgtgatcctgaaggtgaatttgctgatatctatcgtgaaattgcttcaacagtttctgcgcaaatgtattgggatggggatgctattccaacggaaatttctttccgcgcggtataa

SEQ ID NO: 311398 - DNA, 2028 bp, Proteus mirabilis
atgtctcacgtcgcgaataaattattggtaacctgcgcgttaccttatgctaacggttcaattcatctcggtcatatccttgaacacattcaggctgatatctgggtccgttaccaacgaatgcgcggcaaagaagttcatttcatctgcgctgatgatgctcacggcacgcctattatgctgaaagctcaacaattgggtattaccccagaagccatgattgaagagatgagcaaagagcatcaacaggattttgccggttttaatatcagctacgataactatcactccacacacagtgaagaaaatcgtcaattatcgacgaaaatttatctagccctgaaaaaaaatggtcatattaaaagtaaaacgatttctcaactttatgatgaagaaaaaggcatgttcttgcctgatcgttttgttaaagggacttgccctaagtgtaaagcgcccgatcaatatggtgataactgtgaagtatgtgggtcaacttatagcccaacagaattaattaatcctcgctctgtggtatcgggctcaacgccggtaatgcgtgaaaccgaacactatttctttgatctcccagcctttagcaatatgttgcaagagtggatccgctccggtgcattgcaagagcaagtagccaataagatgcaagagtggtttgacagcggtctgcaacagtgggatatcacccgtgacgccccttatttcggttttgaaatccctgatgcgccgggtaaatatttctatgtttggttagacgcccctattggttatatgggctcattcttaaacctatgtgaaaaacgtggtgatttaagctttgatgagttctggaacaaagagagcaaaactgacttataccattttatcggtaaagatatcgtttatttccacagcttattctggccggcagtgttagaaggtagtgaataccgtaaaccaaccaacctatttgtgcatggctatgtcaccgtcaatggtgcgaagatgtcaaaatctcgcggtacctttattacggcacgtgcctatcttgatcactttgatgctgattgcctacgctattactatgcagcaaaactttcatcacgtattgatgatattgacctaaacttagaagactttgtacagcgtgtaaacagcgatatcgtcaacaaggtggttaacctcgcgtcccgtactgcgggttttatcagtaaacgctttgatggcaaattagcggcaagccttgatgatgcgaagttatatcaacatttcgtcgatatgcaagaaagcatcgcacaatgttttgaaaaccgtgaatttggtaaagccattcgtgaaattatggcattagcagacgaagctaaccgctatattgatgaaaaagcgccttgggtggttgctaaacaagaaggtaaagaggctgagttgcaagctatttgtactatgggaattaacttattccgtgtactgatgacttatttaaaaccaattctaccttctttaacagaacgttcagaagccttcttacaaactgaattaacttggaatgctctgtcgcaaccgctgttaaaccatgaaattactaaatttaaagcattgtttaatcgtattgaaatggataaagccaatgcaatggtagaagcttcaaaaagtaccattgcgccagtcaaagaaatcacgggtccattagcagacgcgcctattcaagaaaccattaaatttgatgattttgccaaaattgatatgcgcattgctgaaattaaacaggctgatttcgttgacggctcagataagttgctaaaattaatactggacttagggggagaaacacgccaagtattctccggcattcgttctgcataccctgatccgaaagtattagaaggtcgcttaactgttatggttgcaaacctagcacctcgcaaaatgcgttttggaatttcagaaggtatggtgatggccgcaggccctggtggtgaagatattttcttacttagcccagatagtggggctaaaccgggtcaccaagtgaaataa

SEQ ID NO: 311399 - DNA, 468 bp, Proteus mirabilis
atgaaatctaagcgggtgcagatcacaatctggcactatatacgatcattttttatactttatctttgtctttttgccggtaatcttatttcagccttattacctttcgcggtgccaggcagtattgttggactacttattctatttggtttacttgccttccagcttattccattacgttgggtaaaacccggtggtaatattttactgaaaaatatgtcattactctttattcctatcggggtgggtgtaatgaactattataatttattaagccaacaactctttcctattgttctggcctgtgttgtcagtacctttgcggtgatggcgctagtcgcttactgctcacattacgtgcatcgtgaacgtcctattatcggtgctaaacccgataaagtagaggatgtagaattagcagaacaacaagacgacgacagagcgttaagtgagaagaaaaaatgttaa

SEQ ID NO: 311400 - DNA, 702 bp, Proteus mirabilis
atgttaatattaatgaatatttggtggtcattaccgctaacacttattattttctacttagcacgtaaactggcggctcgatttaaatggcctattttaaatccgttattgattgctattgttgttattattcctattttattagtgacacacaccgcctatgaggattattttgccggaagtcgtatccttaacgacttgttacaaccagctgttgttgctttagctatccctttatatcaacaattacaccaaatacgcgcacaatggaaatcgttaattagtatctgctttattggtagtatcgccgccatggctagtggtacagcgattgcattatgggctggcgctactcctgaaattgccgcctccattttgcctaaatcggtaacaacccctatcgcaatggctgttgcggattccataggtggtattcctgcaatcagtgctgcatgtgttattgcagtaggtattttaggtgccatttttggtcatacgctatttaaaatattacgtattccaactcacgcttctcgtggtttagcgatgggaacagtctctcacgcagtgggtaccgcaagagcagctgaaatcgattatattgaaggggcatatagttcattagcattaatgacttgcggtattattacttcacttatcgcaccctttatttttccttttattttgcacctttttagctaa

SEQ ID NO: 311401 - DNA, 885 bp, Proteus mirabilis
atgcatactcgttttcaggcaatttggtcagatttatcccctcaattacaacaagcacttacgccttatcttgagcaggatgaatttccggcaatgttcactgcagaacaagttaatgcgttaaaaacacagttacaatgtaatgatgatgagttagccctcgcattactgcctgttgcagccgcttgtgctgtgacacctatctctcattttaatgtgggtgccattgctcgtggtgaaagcggtcacttctattttggggcaaatatggagtttgctggcgccccattacaacaaacggtacacgcagagcaaagtgcggttacacatgcttggttacgcggtgagtctcgtttagttgccatcacagttaactataccccttgtggtcattgtcgtcagtttatgaacgaactaaatagcggcactcatattgcaatccatctcccaggccgaaaagtggcaaccttaggtgactacttacctgatagctttggccctaaagatctcaatatcactaccctactgatggataaagttaatcacggttatcaaatagataacactagccaactggcacaacaggcactacaagcaataaatcgtagtcatgccccttacagccattctcacagtggtattgctgtacagatgaaaagcggtaagatctttcaaggcagttatgctgaaaatgccgcattcaatcctagtatgccaccattacaagcggcacttattgcattaaatatggcgggtgaaaatgttatggatattgagtctgcaatattaattgaaaaagcagacagcctattaactcagtgggatgccacacaagcaacattaacagctttaggttgccgccaaatacagcgtgtcactttgtaa

SEQ ID NO: 311402 - DNA, 1698 bp, Proteus mirabilis
atggaactggaacacgaaagtaaacgtcctctctatatcccgtatgcaggcccaatcctgcttgaatttcccctgttaaataaaggtagtgcttttagcgaagaagagcgcagcacctttaaccttcatggtttactgcctgaggcagtagaaaccattgaagagcaggtggaacgcgcttaccgtcaatatcttgattttaaaaatgataacgataaacacatctatttaagaaatatccaagataccaatgaaacgctattttatcgtctgttggaatctcaccttactgaaatgatgcccatcatttatacccccacagtaggtgaagcttgtgagcacttctctgatatttaccgccgtgcgcgtggactttttatctcttaccctaaccgcgccaatattgatgatatgctacaaaacgccaccaaacaaaacgtaaaagtgattgtggtcacagatggtgagcgtatccttggtttaggtgaccaaggtatcggtggtatgggtattcctattggtaaactctctttatataccgcttgtggtggaataagccccgcttataccttacccgttgtactggatgttggcaccaataatccacaacgtttaaatgacccactttatatgggctggcgccacccacgtattaccggagatgaatataacgaatttgtcgatgaatttattcaagccgttaaacgtcgttggccaaatgtactgctgcaatttgaagattttgcacaaaaaaatgccatgccgttattaaatcgttatcgtgatgaattatgttgctttaatgatgatattcaaggtactgccgctgtgacattaggtagtctaattgcggcaagccgtgctgcggggcgtcaattaaaagatcaaactgtcgctttcttaggtgcaggctcagccggctgtggtattgcagagcaaattattgcacaaatgaagtctgaaggactaagcgacgaacaagctcgtgcacgtatctttatggttgaccgttttggtttgttaacggataaactgccaaacttactcgatttccaaagtaagcttattcaaaaaagcgaaacgctggccgattggcaaacagaaacggatgcaatttcactgttagaagtggttaaaaatgctaagccaaccattctgattggcgtttctggtcaagcaggacttttcactgaagagattattcgtgaaatgcataagcattgtgaacgtcctaccgtgatgcctctttcgaacccaacgtctcgtgttgaagcgcgtcctgaagatattatcaattggactgatggacaagctcttgttgctacaggaagtccatttgccccagtcacctataaagagaaagtgtatcctattgcacaatgcaataactcatacatcttcccaggtattggccttggcgttattgcaagtggtgcaaagcgtgttactgatgccatgttaatggttgcaagccgtgcgttagccgattgctcgcctatggcaaaagaaggcgatggcccactattacctttattagccgatattcaacaagtttcacgttatattgctaaacaagttgccaaagaagcacaggtgcaaggtgttgcaacggtcacgtctgattctgctttagaagaagcgattgaacgtaactattgggagcctgaataccgtatttacaagagaacgtcattctaa

SEQ ID NO: 311403 - DNA, 726 bp, Proteus mirabilis
atgctaaagcgcctcatttatctctttttgaccctttttatcttagttgcggtggcattaattgcttgtgatcgctggataggtgtaaaaactagcccctatatatttgaagatatagataaactacccgccaaaaaagtaggcatggtattaggtactgctaaatattacaccacaggctatcttaaccaattttatcaatatcgtattcaaggtgctgttaatgcctataacagcggtaaagtgcaatatctgttactcagtggagataatgcacagcatagctataatgaacccaatacgatgcgtaaagatttaattaaagcaggcataccggcatcgcgtatcgttatggattttgctggatttagaactttagattcggtagtacgcacaaaagaagtgtttggaacagatggctttactattatcactcagcgtttccattgcgaacgagccgtatttattgcccttgaaaaaggcattgatgcccagtgttttgctgttgcttcgccgaagagtatgtttaaggtgcgtgtacgtgaagttttagccagagcaggtgcagttgtcgatctctatatattaaaacgcgaaccgcgttttctaggtccaccagaagcgatacctgctgtacaaaatattcctgatgatattaagggctatccggcggtttcaccacaagaggtagaagcgttgccattaaacaatggcaaaaacagttaa

SEQ ID NO: 311404 - DNA, 1152 bp, Proteus mirabilis
atggaacaaagttcacgtcaacgcatcgacgctttagatgcgttgagaggaatagcgatccttggcatcttattactcaatatctcaggttttgccttattaagagttgcctcatttaatcctatgcattcaggagaggcgacttttgcggacaaacttacttggatggggctaaatttatttacccaaggaaagtttctgtttatttttgcgctgttatttggcggaacactttatttattatcacaacgctctgttgcttggaacgtctctcgcctaattattctggcattaatcggtattattcataccctattactatgggaaggggatatcttatttccttatagtatttgcggattatttgttctcttttttattaaagcattacctattaagcggcaatttatccttgggctggtgctctatttatttggcgcgattattttagcttttttattttattactatcgtgattttgttgaaatagtttggtatagctctgactattccgccatgatagagactaattggaaaaccggaagctatataaatagtatctactggcgattagatgaactgagtgattttatttttaatttagttcgtcaatatagttggtttttaattggcgccatgttaatgggggcggcgttaatggcatccggttggttacaacgacgctattcacagtctcattatggtttgatagcggtttgttttttagtcataagtttacttttccaagggacgcttgttattaccgattattatttagattggcattatatgtggtctgcggtagtggctcagcctatcaccatggtgatccaaattattcaaagcttaggttatattgctttactctattgggcatggccttatattcaacacagttttatcgcctatgctttacgttgtgtggggaaaatggcgcttaccacctatttactacagagtattattggcacgacgcttttccagcggatggggttatttaaccaatttaccttattgcagcttatgctatttgtgatggctatttgggtgataaatattatctttgccgtaacgtggttacgctatttttctcaaggaccaatcgagtggctgtggcgccactcgtcaacagggttagcaaaacgcttttaa

SEQ ID NO: 311405 - DNA, 663 bp, Proteus mirabilis
atgtcatcaacattaagtaaagaggcgcaatgggtacatgccgcgttagtggagcgtggtttggaaacgcctcttcgtgagccaaaactttcacccagtgagagtaaacaacaaattaaacatcacatgacggaagtgatgaaattgttaaacctagatttgagtgatgacagtttagcggaaacgccacatcgcattgcgaaaatgtatgttgatgaaattttttcaggcttggattatcacaactttcctaaaatcaccctgattgaaaataaaatgcaggttgatgaaatggtcactgttcgtgacatcacattaaccagtacttgtgagcaccattttgtcactattgatggtaaagcaacggttgcttatattcctaaagataaagtgattggtttatcaaaaattaaccgtattgtgcagttcttcgcacaacgccctcaagtgcaagagcgtttaacgcaacaaatattgattgccttacaaacgctattggggacgaaaaacgttgctgtctctattgatgccgttcactattgtgtaaaagcaagaggcattcgtgatgcaaccagtgcaaccaccacaacctcattaggtggactatttaaatctagccaaaatactcgccaagagtttttgcgtgctgtacgccatctttga

SEQ ID NO: 311406 - DNA, 1170 bp, Proteus mirabilis
atgaatacctcaacccacccaagccattcagcacaagcctttcatatcgcttttagtggtttccttgctttagttgttgctatggggataggacgttttacttttacgcctcaagtaccgctaatgattgcggacacacaactgacattaaccagtgccagtattgttgctgcatttaattatctaggatatttagctggttcatatgatgcgatgaaagcaactaaaggtgtgggctatcggctttgggggggattatggggagcggtgatcattacactgcttagtgcggtacttaatgatgctttaactcatagtattgcccgtttttttattggttgggcaagcggttggacattagtgcttgttgcttcgtgggcaaatgaagtattagcccgtttaaatcgcccggcattaagtgtggcagtctatgcaggaacaggggcggggatctttattagtggccttcttgcggtattcattctcaagtggcagatgagtgcgacaacaggttggttgatttacggtgtgttggcatttatttgtgcaatttatgtgagctatcatttacccaagccttggtcaattaatcgtgagcaagtcaaagtagagccacttatcttaacgccggcgatgaaaaaattgatttggggttatacctttgcgggctttggttatattttacctgcgacctttttatctcaaatggcgacagaacgttttcccggtagcttagtagctcaatttgtctggcctatttttggtgcttccgcagctttatgtattgggatcgcgatactgacacgtaatgtccttaatacacaattacgattggcgataacactatggttgcaagcactggggatcatcattgccgaatggctacccacaattacaggtcttgctattggcgcatttttagtggggggagggttaatgtgtgcggtgcaattggcatttttacgtggtaaagagttggcacctgatcatgctcgttatatggcaggattattaacaacattttatgctattggacagctagttgggcctctggtttccttcctttcaacggcgttaacgggaagactagagccggcattatatgtcgcctttgtgatattgatcatcggcggtattttggtttgtatgaaagaaaacaataaagggtaa

SEQ ID NO: 311407 - DNA, 360 bp, Proteus mirabilis
atgaaaaagaatatttccctaatattatttttactattttccctcataacggctagccaagctgctggaataagtgtgggaggaacacgttttgtctatgacgataatctacgtgaaatcagtattccaattatgaatacagataaggaaaaaccctatttaattcaaagttgggtttcagcttatcaaggtgatgaaaaaacaccttttattgcaacacctccactatttcgtattgagccagatagttcaggcacggcgcgaatttcatataccggagcacctttggcgtcaaaccaagaagtggtttattggctcaatatcaaatccattccaccgatggaaaaattctcaatttaa

SEQ ID NO: 311408 - DNA, 273 bp, Proteus mirabilis
gtggcaaagttaggatatgaaaaatttgctcttttttcaaatatgaatgatgctaatacttatctaagtgataccattaatgtattcttgaaaaagatagaaaaaaatgagattaaaagagtttgttatgaactgaaacaaacaaaagggcttaaaaaaatggtgggaacacatcttaatgggctagcaccaatctctgcgagtatggagaaaaataaagactataagtctattatgaaaaaaatagaggaagaactaaataggcttttatga

SEQ ID NO: 311409 - DNA, 243 bp, Proteus mirabilis
  misc_feature (213)..(222): n is a, c, g, or t
atggcgtcactgaaagatgttgctcgacttgcatctgtttctttgatgacagtctcaagagcgattaataaccctgagttattaaaaccagatacgttgaaacaagtccaacgtgcaatcgaagaactgaattatgtgcccgatttttcagcgcgaaaaattcgaggtcaagggactaaggtctcatcgatcggtgtgcttggtattgatacnnnnnnnnnncccctttttccgtggaaatga

SEQ ID NO: 311410 - DNA, 348 bp, Proteus mirabilis
atggctgcccgaccacgaacccataaaattattatccctaatctatatcgaaagctagataagcgtaatggcaaaatttattggcaatataaacatcccatcaccggtaaatttcatagcttaggcaccgacgaacaagaagcgagagaaaccgccattcaggccaatacaattattgctgaacaacatactcgacagttattaagtattaatgaacggttatcaaaaattaagacaaacaagtctgaaatatctgtcgatatatggatggataaatatttagatattcaaaaagaaagattagatatattaatttattccgtcagtattgtggtacgaaaatattaa

SEQ ID NO: 311411 - DNA, 288 bp, Proteus mirabilis
  misc_feature (253)..(262): n is a, c, g, or t
atggacgatcctacgccattggataaacgtaaattaatcgaagctattgttactaaagatattaatttaaaagcatcagacagtaaaaatagtgatgaagaatttagtggcgaaattaacttaagctttactgcgccaacctctgaagaagcttacgatttactgtcaggttatattcgctttatttctactaaagtacgggtagaagtgaaagacgaaattgatgatcaaattgagcgtaaattaaaccatnnnnnnnnnncaaatggatttagaacgcattgctaa

SEQ ID NO: 311412 - DNA, 642 bp, Proteus mirabilis
  misc_feature (627)..(636): n is a, c, g, or t
atgaaaaagaaactgacatcaatactaagtctgacggttattgccatggcgagtattcatttttgctatgcgacaacaggaatgctagagctagatggtgaagtattaccagagccaacatcttatactcatccgccactacaacccacagtaagtacgcaactatttgatgatgttgcactctccgaggcgcgtaatattgaagagcagttaacattagctcagatggggagtccatcaccaatagtattatccggtcgacgtttattatccggcgtgacatttcgtatggcaaatgatctgtttatcgatagtgcgacactcaccatgaaagtgaaagcttcatcgggattagtgcaagccgatcaaacgttacatttgatgctaaatggtcaacctatgggatttttgcctttagaagaaggtgagcaagaacatgagtatatgttagaaatccctgaaatgatgttgaccaatgtaaacaacttgagttttcgccttgccagtcgcgatgctttagatgaaaagcagtgtatgcctcctttagctgatgagctaagtttggtgatttcgcccgattcatcattaaattatcgaggtcgttggattaatggcgggtatagcttnnnnnnnnnngtatag

SEQ ID NO: 311413 - DNA, 126 bp, Proteus mirabilis; identical to SEQ ID NO: 302860

SEQ ID NO: 311414 - DNA, 1275 bp, Proteus mirabilis; identical to SEQ ID NO: 310852

SEQ ID NO: 311415 - DNA, 249 bp, Proteus mirabilis
atgctacgcttgttacctgacaaccttttaaaatatacctgtgaaggtgtgttaatacgagctcactatatacgacagctcgataatattcataaaacaacattagcgaccaagcaggcagcaaaaaaaatgctgcatcactttaatcataaactagataaacttcgtaataaggtagctaacgaagcttatgctaaaggattacaggttttattagctgatataatactgtctcttatacacatctga

SEQ ID NO: 311416 - DNA, 726 bp, Proteus mirabilis
atgactgcatcatcaaccttagcaaggctaaagcgaataatgcctgagcatattaaacctaaatttactacttctgctgaattaatggcatggcaacgagagcagggtgaaattgattcaatgaggatcgcaaatgaaaaccgagtagctcgtttaaataaaatcatgggtagatcaggtattagcccattacaccaaaattgttcattcgataattatgacgttacatgtgaagaccaacaaagagcattgtacaaagctaagagatacgctgagcaatttggtaaatcatttggtgggttcattttcagtggtaatcctggtactggaaaaaatcatttagcgtcagccataggcaatcacattatccaaaaagggaaaagtattctgatcgctacactgccggacataatgatgaaggttcgtgaaacctatcaaaaggatgctaaaacaacagagtcaaaactgatagatgatctgtgtgatgttgatttgctagtgcttgatgatgtgggtgtgcaacgtggaaacctcaatgaggaattaattatatttcaagtagtggatcgaagactagcaaacaaaaagcctgttggagtgcttacaaacctaaattatacccaactatccaaagtgttggatgaacgagtaatagatcgactccgaatgggaaatccaacaacgataaatttcacatggcaaagctatcggcgtttagttaagtaa

SEQ ID NO: 311417 - DNA, 405 bp, Proteus mirabilis
  misc_feature (324)..(333): n is a, c, g, or t
atgaatgacctgcttacaaataaaattaataaaataaaagaagaatataaaaataataaatatgtttttattccacaaaaaatagttattgatttaataaaacaattaggtgcaacagagaaagatatagatacactcatagaatatggtgattatctcgcgcaagatcccacattgtcgtttcgtcactctcgcaccggacgctaccttttcgataatgaggctaaaaccatttcacgactagagtatcaaccttttgtcctcactgaagaagatggctttattcgtgaagatagcggtgcacaaagacactttcgagcaatnnnnnnnnnngcggtgcacaaagacagtttcgagcaattgacgatcgctggcaaagcaataccgcttaccaagcattattaa

SEQ ID NO: 311418 - DNA, 3261 bp, Proteus mirabilis
gtgtctgaaaaaatagacttttattcaggtaaaaacatttacatttcaaatgtaataattaatgaatcaaatgaaaaaagtttatcagcattagagaatattaaaataaaacgcgatgagtctttatttttcaacctaatgccaaattttagagatgaacaatatatttcagcgtttttatttaatatggggctttggaaaagtaagaataatataagcttgatggctggtaaagatattgttagtcagggaataaaatattatagtaacaaagaaataacttttaatgcaggacaagatatttttcttgcctccaaattaataaaagaagccgctccttttttcagtgatattcattacccccaactacaatctaaattattttcagataataaccttattttaaatgccgcgcgtgatattgatttaagttcaacagtattaaattcaaaagataaaatcattgtattagcgggtagaaatataaaactgggtgcaaatgcttattccgccatcgaagatccccacgaagatgcgcaagacattcaatataccaccacatccattatgggaaataaaggtatttctattgcatcatcaggctcactcacaacagaaggaagttcacttaaatcagagggggatattgctatttccagtggtggcaatatccaattgggatcagtaagaacacattttcgtaaagagtcggactcagagttagaagaacttcgtaaacaagtcagtactgaaattaatagcggtaatcatctaacactattatctgagggccgtattttatttcaggcctctcaattggctgctaataaaaagatggatattgctgctaaaggtggatttctttatgcacaggcaatggaagaatccagttactatgaagaagaaaagaaaaaatgtaattggtggacactgtgtgcgactaaaaagaaatataccaaaacatttaataacacaacgaataaagttaccgagtttattgctaatgacgatattaatttaattgctaaagatgatatcactttagaagcaagcaaattagagacagcaaagaatgccaaattaaccagtaaaacaggaggcattaattttaaagcggtgaaagatactgcttttaaacaagttattactcgttcaaaagatatatatatcactcaacgtaatcagggatacaccaagggaacatggctattacctgaactctatattggcggaaagctgactattgatgcgccaaaaggcatatctgcagatattaaagccaaaaaagagcaatctttagagcaggcattaactgccttaagtaacacaccagaatatgcttggcttaatgcgctccaacgtcaagaaaatattaattggaatttagtgaaagacacttattccagttgggatgataaaacccagcagttaaatccagttgttggtgcggttattgccatcgcggtaggggttgcaacttatggtacggcaacagctgcctcaataggaggaatggcaagtaatgcaactattgctgcaggagcctctgcgggggttgcgtcaacggcatcagttgcggcacaagccggttttgcttctttagtttcgcaagctgcggtctctttagccgaaaatcaaggcaatatttctaaaacatttggcgccttaagtcgcagtgatacggtgaaatccattgtcaccagtatggccgttgcaggcaccttgcaaggtcttgaccaatttatgggttgggatcaagcaatacaggggggaacattaccgacaacaggtaagttgcttgcgacagataatgccacatggactcaagttgctcaacgcgttgcctcacagtcagtagtgagttctacactggggacagccattcaaggtggcagttttattgataattttaaaactgcgctattaagccatatcggcagtcaatttcacgctgaaggtgccaatctcattggtgataacggtgcggtattagggcatgcaggaaaggttttaagccattctgttgttgcaggagtgagtgctgaaattgcaggaggcagtgtaacaggtgcagtagccggcgccttggcagcagaaatagcggcaatatcgctacaaagtaaattatttgagcctagttatttaaatgaaactgacagacaagttgcattaattcaagaggcactacatggcaatgaaggaaaaacacagctcactaaattaattggtgcactgacaggcgctattgtgactcgtaagcctgagggcgtattttctgcggctaattctgcggagttagtttatcgacataattacagcgaacatatgctttcaaagctagcactagaaaataataaggacataattgcagcgtcaaaaggtgatgttgcagcagcagaaagagttgtaaatcgacaaaatgcagggatgattgcgattgctcttggtttaggaggaagtgcgagcattattggtggtcacactgttattgcagcaacaccagaacttattgctattacgcaagctgcatttagtacatgtaaagctaattgggtttattgtgctaatcagctaggtattaatattgctgggatatcagctccagaagctgcaatcgctggtgtcaccgttggtactggttataaagtattagctagttcagaagaaagtgctaaagctttctctagcatgttagctaatagttcaaagtctttaatgacttcaggaaaattaaatataactgctataaaaccgatagtagaacaagaaaaattattaataactaccaacaaaaaagctattgaaataatcaataacggggagtttataatatattcaggagtaactacgaatggatataaagtatctaatggagccaaaaccgtagtttttaaaaatgaattagaacatcctattgttcaatctaggattaatattaaagtgggagatgttgaatcaggttggttgcatgtacaaaaacgtcatttttcaggagcgcaaaatgctagccaatttacgcttagtgaacaggaaattaaagatatattattaagtcctgctgtcattaagattcctattaataaaacgagagaatcatataataaaaacaccaatagtattgatattttgtatgaaagagtgattcagcttgataaaaatataggaattgataaatttagtaaacagccaactaacataattactatgctcacagataaaaatggaaatttaataactactacccctggggaaataaagtga

SEQ ID NO: 311419 - DNA, 696 bp, Proteus mirabilis
ttgaaaaaaacacttgaagatattaatcaagagattttagatatctataatcaagaaatatctggcgtattaacggtgtattctcgcccttctattgcgcaatgttggcttgtacctcgtatttctgattttactcaacgctatccttctattgaattaaacttacttactggcaatgacgatattaattttcgtggttatggtatcgatctcgctatctatttcgatgataaacacctgaaaaatctctattgtgaagatttaatctcagaatcaattattcctgtttgtagccctgaatatgctgctcgccatgaattagtaggtaatatccatcaccttgctaattgtactttgttacatgatagacaagcttggagtaataactctgattttgatgaatggcgcgcttggagtgaatatatgggattaggattagttccaaataaaagtaatatttgttttgatcgctctgatttagctgttattgctgccgttaatcattccggtgtcgcaatggggcgtaaacgcttaattcaaaaacaactcgcaaataatgaattaatagtcccttttgataattgtgagtttttttgtgcacaacgctattatctggttacccgcgatgaaaagagtaacgctaaagtacaactttttattcaatggctgaaaaaacagatcttacaagggatgtga

SEQ ID NO: 311420 - DNA, 1353 bp, Proteus mirabilis
atgtttggattagatgcttttcacctagcaagaatacaattcgcgtttaccgtttcatttcatattatattccctgctatcaccataggattagctagctttctagccctattagaaggcctatggttaaaaacaaaagaaccaagttacctttctttatatcagttttggataaaaatttttgccgtaaactttggtatgggtgtggtatcagggttagtgatggcatatcaattcgggactaactggagtggtttttcacaatttgccggtagtatcacagggccgatgctaacttatgaagtcttgaccgcctttttcttagaagcgggatttcttggcattatgttgtttggttggaataaagtggggcgaaaacttcacttctttgcaacttgtatggtagcgcttggcacattgatttctactttttggatcttgtcatccaatagttggatgcaaacaccacaaggctatgttattgaaaatggtgttgtcgtgcctgttgattggctacaggtcgtgtttaatccttccttcccttaccgtttattgcatatgtctattggggcttttttagccagtgctttatttatcgcctcttgtgccgcatggttattattaaaaggacaaaatacagcacctgtacgaaaaatgttttctatggccttatggttagtactaattattgcccccatacaagcgtttgtaggagatgctcatggattaaatacactagaacatcaaccggctaaaatcgcagctatagaagggcattgggataatgcaacgaaagaagcgactccgctgattttatttggcatcccagatatggcggaagaaaaaacaaaatatgcgattgaaattccttatttaggtagcctgatccttacccatagtttagataagcaaattccggcattaaaaagttttgcaccggaagatagacctaattctagcattatattttggtcatttagagtcatggcaggtttaggtatgctgatgatttgcttaggtttgttgagcgttattttacgtaagaagaaaagactctatcactcaccccttttcttacgctttgcattattaatggggcctacaggactgattgcgatccttgcggggtggtttaccacagaaattggccgtcagccttgggttgtttatggtctacaacgtaccaaagatgccgtttctgctcatggtgatattcaaatgagtttgagcttattggcctttattttggtttatttttcagtatttggcattgggtatttttatatggtgcatctgatgaagaaaggccctgtagtgcttaaatccgaccaattaacacagggtgaaaaataa

SEQ ID NO: 311421 - DNA, 1590 bp, Proteus mirabilis; identical to SEQ ID NO: 302819

SEQ ID NO: 311422 - DNA, 1449 bp, Proteus mirabilis
atggataataaacaacactatttagatatcgccgcagggcaaggaaaaaaagagccctctcgtatagtggcattccctgcacagccactaaactatgcattgatagaacaacgcctagaggaacagaccgaatacacagatggtgagataagctatcttagtgatgatcttgatgaaggttttttctatcattgccaacatggcgatgatgagctccatttttttatctgcctgctaccacgatcagaagattatcaaatacgtcctatgtatgcgacagatgagatgactcctgagctattagcccatgccaatgccaccactcaagacatcttattagaaacgatgttctctgacaccctacatcctttagcgagttatcgccatcagctcaatctactgaacataattgcgccagaaatgatcctcgcactggatgaatctgccgcaggtaaaggattaactcccgaatggatacgttttcaattggagacacccgatctctatcctgaagtagaaagtttgtatgttattcatgcagtttacgatacagaaaatgatccaccaaccatgttctggtttcatacccatggcttgcaacgttgtggcttaactgaagttgatttagtgatcccaagcatgttggaatcttactacggtattcctgatcttttccgttgcttcgtcaataacagtattaacaaccgccaaattgaatttggcgagccgatgctttgtggacaaacttcgtcaggattagaatatttagtcgcgctaccctttgaagaaggtatacgtcacgttaatcagtccacacctttagatagtcttagaccattagaagagatgcgttataacactcaaggggcaccacatggcgtatttctgggcgatatggctgatagagacgaatatcatcagcacccatcatcgatgttatttagaactaatgaagaaaaccctattttagaaactttctttaaaggttatgaagaacaacaagccatgatgctactacgcagtaacgaagaaacctacgaaatggcagaaaaggccaaaaggcgttggcaatattttctctccatgtttgataactaccatcagccccccgtagagaaaaaaaccggtttcttggcaaaattattaggtagtaaagagagcaatgaagaaactgagagcccatggcaatttatgattaagtttggtattccttatggtgataaggaagaaaaagagcttgagcacatgtggtttatccctcagtctcgagaaggtgaccgaatttatgctaagttacttaacgtaccattctatgtacaagaaatggaagaaggtggcatttatcccattgatattgcgttcatcactgattgggttatctcttatgaaggttatagttatacccctaatacgatttatcaactttttagccaccagcagactcactaa

SEQ ID NO: 311423 - DNA, 180 bp, Proteus mirabilis
atggatgatattgttaaaaccacttgttttattaaagatataaaagattttcctatttttaataatatttattcttctttttttacatcaggaaaatacccagctcgttcatgtgtggaagtttctcgtctacctaaagatgttttaattgaaatagaagctatcgcttataaaaaatag

SEQ ID NO: 311424 - DNA, 231 bp, Proteus mirabilis; identical to SEQ ID NO: 302689

SEQ ID NO: 311425 - DNA, 369 bp, Proteus mirabilis; identical to SEQ ID NO: 297807

SEQ ID NO: 311426 - DNA, 492 bp, Proteus mirabilis; identical to SEQ ID NO: 305263

SEQ ID NO: 311427 - DNA, 978 bp, Proteus mirabilis
gtgcgaaatgactttaacattacgaatgcggcagagaaactctatacctcacaaccaacgattagtaagcaacttaagatattagaagacgaactcagtgtttctttattcgtccgtaaaaataataatttattagcacttagtcctatggggaaagaggtccataaaatagctagcgatattcttgggcaggttgataaaattaaaagtattgtggcagaagaagatcgtaataaaaaagtagatttgcacattgccacaacacatacgcaaatacgttactccttacccaacgtcattgatcattttcgccgctattaccctaatatttcactccattttcaccaaggtgctcctgctcagttagcagaaatggtaaaaaatggcgatgtcgattttgcgattgccacagaatcgatgcatttatatgaagatttaattactttgccttgctatcgctggactcgcagtttattagtaccttatgatcaccctcttgcatcattacctgatgatcaacaggttaccattgaacaacttggccaatatccccttattacctatgtgtttggtttcactcgaggctctaaactcgataaagtgttttataaaaaccatcttaaacctcaagtggcattgacggcgacagataccgaaattattaaatattatgtcaagcgccaccttggtattggtgtgattgccacggttgcttatgatgaaatagaagatagccaagcattaaagtgcatcaatatcgatcacttagtacagcccagttatacacatatatgtctaagtaaacatacgcatatgaaagattatatgcatgagtttatttcactctatgctccgcatattgatagaaatattattcagatgccagagcagtgggaaacccagtggcatagcaaagaagtgtatcaggggttacctgatctgatttcggtaaatagcaaagagaaaataatagaataa

SEQ ID NO: 311428 - DNA, 930 bp, Proteus mirabilis
atgagtaaatataatgcaatacagcgatttaatctctgttttcaacaacttgaaacagaaatcaatgctcttaccgattttcttcgtcagttaaagcaacttccttctgcggtttttgaattacctgaggtaagtaaagaagatgaacatgatgagataacaaatgttacagtgtcacctagttatgatcttgatgctttagaactctctttaaaattaatgaccaatctctttatctatgataatgccccacatgtcagtagcaagcgtgcgatacgtttaccgggggtactctgttttagtgtcagcaatcctgtatttaagaatgtaaaaacacaagtagagagcattaattcattaaaaaaacagctttcagatattgtgacgaaagagtctggtatttcgaaagaagaacgttttgattttgtccataatcagctaaaaggcttaattacacttaatgcttatcgtaccctcaccctactttctgatcctgatacagtacgttttggctgggccaataaaaacattataaaaaacttaactcgtaatgatgtgttagctcagctagaaaaaagtcgagaggccaatcgcgccgtacctccttatactagtgaacaatgggctgaacgtattgataaagagataatgaccctttcacaactcccggaaaatgccaaattaaaaattaagcgtccagtgaaagtccaacctattgccagagtttggtattcagaacaacaaaaacaggtacaatatgcttgtcccctaccattattagctttttatattgataaagcgtcggactttaagcccataataggtgaattagctgattatgatgtgaataatattcaaattcgccatcgccctaaagccaaaaagttacaattaattattccacgcttacatttatatcttgaaaaataa

SEQ ID NO: 311429 - DNA, 537 bp, Proteus mirabilis; identical to SEQ ID NO: 297637

SEQ ID NO: 311430 - DNA, 753 bp, Proteus mirabilis
atggaagtagagctatttaagattaactatgaaagaataagtgatatgccccccgaacaatcaagtaatgggttaattacgtttgctaaccaaccggcgggttatatcgcctttcaaagctctaacttttcttatttattaaaagatggttcagatcacgccacaaattatcatggcttttatgattcttggccggctgctgtaaatatgtctcgccgtatttacattcgtaatgcgtccacttgttttgtgcgaaatgttacgccttatgtttcattcccgctagtcactattaatgagttagaaagaggcaaaaaagtgactttacctattacgattgatttttattgtcaaatagcaccaccagcaaacgatggcatgagttatatttccagcggaactgggcctgggcaaactgcaatgggatttttacctagacctacaaatgttaataaggcaattgaattaggattaacagtacctaatggtgctgcaattacccatttagtgacagacggttatggtactgatacaaatatggcaaaaggggttggtgtaagaatatatcgcccatcaggtatgccattaaacttattatcaacattagcgaatgaaggacaaggtgaaggttatggttggtaccctattgatgatgatgcaagcgcagtctcatatgacaatggtattgtcgattcaacaaaaacattgtatgcctcatttcaaggcggtaagcataaggcacattgtttgtga

SEQ ID NO: 311431 - DNA, 225 bp, Proteus mirabilis
ttgattgaagggaaaaaagaagaaaaattagaagaagacaatgataaatggatccaccgaggtatatctcaagggcagtttacattgcagtttgacctcggtaaaaatgtcaaaatagaaaaagccgatttatcaagtggacttctgaccattgctattgagtatgagttacctgaagaagaaaaacggcaaacaatagcgatagaaaataaagataaaagctaa

SEQ ID NO: 311432 - DNA, 528 bp, Proteus mirabilis
gtggatgcggatgtcattgcacgattagtggtagagcctgattcgccaggattaaaagccttacagcaacacttcggtgacactattttattgcctgatggcaagttaaatagagcgcaattacgtcatattatttttcaaaatcaacaagaaaaagcgtgggtaaaccagttactccatccacttatacaacaagagacgcaaaaacaaattcaacaaattcgcgccccttattttatttgggttgttcctttattagttgaaaataaactaacacatttagccgatcgtattcttgtggttgatgtgactgaagaagaacaaattaccagaactatgcaacgtgatggtgtaagccgagatcatgtactcaaaattttacaagcccaagctaaaagagaacaacgattagccgttgctgatgatattattgaaaatcacgataatagcttaaatcaagatgaacaaataaaacaacttcatcagcattacttagaattagctcaaaaaagcaatacaggacaatag

SEQ ID NO: 311433 - DNA, 324 bp, Proteus mirabilis
ttgtggttaaatcttcctcaaacggtgcgtactgaaaagttaacttgttggcaggaagggttatatcctctacaaaatgcattaaatgccctattaacacttattcgtcaatcagatacatttaaaccggtattaagccataatggtttttatcaagacagtacggaagaaggtgaattattacggatcaaactacttgccagccagcaaatttaccctcaagtctcaggacacaaaaaccgttatgctattcgctttttgcctcttgacagtgagcatggcacaatcccttctgaactaccttttgagatttcatgttgttaa

SEQ ID NO: 311434 - DNA, 498 bp, Proteus mirabilis
atggaagaaaaattattaataggtgaacttgatgtggctttttctcgtttacccgttatgccccctttacaagggatagcgttgacacaagagcaactgatgttagctattgcaacacaacatattacggtgttggaggcagattataacccattacattattttgattcattagggcttattctacttgccccagaaaaagggaaaaaactgtatcagcagatacatgcttttttacaacagcataaactagcaccgcgtttattacagcaatctcaagatattcagacccaattagcgctagtcgcagctggattagggatagcattagtgcctaaaagcgcgcaattaatttgtgataaacaaagagtcacattgttacctctatctgggttatacacacaatggaaaattggtgtaatttggaatagtaatattaaaaataaagaacgtgatctttttattaaaataattactgaaaaaattgatattaaataa

SEQ ID NO: 311435 - DNA, 123 bp, Proteus mirabilis
atgcaaattaaagcaaacaaaaaagcctcattgagaggcttcactctatttaacttactggaaataaaactcaaaagaacgaacgctatttcattacctatcaaaaacccttccgttggttga

SEQ ID NO: 311436 - DNA, 672 bp, Proteus mirabilis
atggctagcaccaataataacccccctttaattcatcaagccattgctctatatggtggtacttttgatccgatccattatgggcatttacgtcctgtagaagccctttctggcttgatagggctaaaagaagtgatttggttgcctaataatattccccctcatcgcccccaaccagaagcctcttcacaacagcgattagccatggtgcggctcgcattacaaccttttagtgctttcaaagtcgacactcgagagttagagaaaccgactccctcttataccattgagacattaaaagcgtttagacaagaaattggtgagaaacagccattagcctttattattggacaagattcattactttcaattgatacttggcataaatgggaagagttgttagatgtgtgtcacttattggtttgcgctcgcccaggttaccaaaccacatttacatcaccacaaatgcaaacctggcttgaacaacatcaaaccaaacagcaagcagatattcactgtttacccgccgggaaaatttttcttgctgatactcctttatacaatatttcagctaccgatattagggctagacataaagcaggattagattgtcatgatcttctgcctgagtctgttgaaaactatatcaaacagcatcagttgtatcgataa

SEQ ID NO: 311437 - DNA, 606 bp, Proteus mirabilis
atgcgttcatcaggaatgtttagggttctatcttttgtaaaaccagcgcgtttaactaatccatcagggatcagttcactgggtacaatgccagatggtgcaccgataattttattaacgatatcatctgctgccgcatctaactcttcacgctctaaaggtgtcatgcgatttaatgcggattgtctaattctgtcatggcgagttaatgaattcgcagttcgtgttaaacgacgatgttcatttctaaacttgcgagggttatcaagaatatctacgctacgttgtaacgcaggcaatttattctcagcatcattaatacgctgtaattttctttgtaatgttgcttgtcttcttgtttgtgttttatttaatttagcaagattagaaagtgaatttaactcaacttctaccgcattcttttcattaatgattttttggtatttattaatatcatccatcaacaaagattttttacctgaccaattctcagcttctttaatttcaagccctaaacgttcggcttgtggtgaagcgttacgtgctttatcaataccgatttcagcacgatcaaggctacctttggctttatttattgatgtttga

SEQ ID NO: 311438 - DNA, 216 bp, Proteus mirabilis
atgggattgaaaattgatttaacttggttcgataaaaagactgaaagttttattggtgaagaatattcggtcgatctgggagatgacgacacggttgcaggtagcttcgatgttatttccgcatgggttccttacctacagaaatatatcaaacataaaattgaactaaataaatacgattaccaggtagcatttgattatcgtgataagtggtaa

SEQ ID NO: 311439 - DNA, 480 bp, Proteus mirabilis
atgaaaaaattacttcctttaacacttgcaactactgcgtttttcgccacttctgttatggcaacagagttaacattagatatctacaatcccggtgatgccagtgtattccctgtttcatctgaaatcatttatggtgataaagatgctgtcttaatcgatgctcaattccaaaaaaatgatgctcaagccttagtcgataaaattaaagcatcagggaaaaacttaacttatatctatatcagccattctgatcccgatttttattttgggttagatgtcattactgaagcatttccaaatgctaaagtgattgcctcagctcccaccgtcaaaatcattaatgaaacccaagcaggaaaacttgcctactggggcctgtcctcaaagacaatgcccctaaaaaagttatcattcctgaagtcgttactggtgatagtttttctcttgaaggtgaaaaactctatatcaaaggattag

SEQ ID NO: 311440 - DNA, 813 bp, Proteus mirabilis
atgagaaaatacttatcgcaactttggattatgttgctattgatgctagtcagtatcaacagcttcgcaacagatccactttggcaagtattgccggatagcattgaaaaaagtgaaagtgatccacgtgattatcaggctattaaattagctaatgatatgaccgtattactggtttcagataaaaaagcggtcaaatcattaacagccgttgctctgcctgtcggtgcattagaagatccagatagccaacaaggtcttgcccactatttagaacatatggtgttaatgggctcgaccaaatacccaaaatcaggggatctgacagagtttttaaataaaaatggtggctctcataacgccagcacaaccacttaccgcaccgcattttatttagaagttgaaaatagtgccattaatgaagcagttgatcgcttggcagatgcattagcggagccattacttgatcctaaatatgctgatcgtgaacgtaatgcggttaatgcggaattaaccatggctcgctcccgcgatggaatgcgtttttggcaagtgagagctgaaaccttgaatccggctcatccaagctctcgttttatgggaggaaacttagaaacattaagtgataagccagagagtaaattacaagatgaattagtgaaattctatcaaacatactattctggtaacttaatgaatggggtgatttccagtaacgacggtgcctgcgatgacagaaaaagaaaaagggataatgatccacttagtcccagctcagccacaaaaaaccttacaaatcgaatttggtattga

SEQ ID NO: 311441 - DNA, 687 bp, Proteus mirabilis
atgcctattcgttatctaggtattgatatcggtcaggtggaaacgctaaccctttctgcggataaaaaagcggtgagtgtatcagcggtactctaccctgaatatgtgaaaacttttgcacgctcaggaagccgatttgcggtagtcacccctgagttaaccgcttcagggctcgataatttagattctcttattcagccttatatcaaggcagagccaggcaatggtggcgtataccgcatatttgaattacaaacggcaaatattaccgactctcggtatctagacggccttaaccttgtattgaatgcgactgaagcaggatctgtgcaaattggcacacctatctattatcgtggtttagaagtaggtgcggtaaccggactagaattaggtaatatgtctgacagggtattgatccacattagaattagtcagaaatatcaatatctggtacgtaataacacagagttttggctttcatcaggttataacttctcatttggtttaactggtggagtattccgcagcggtacatttaagcagtttatacgtggtggcattacatttgctacaccgccatcaactccactccaggctaaagcaaaacaagagcagaatttcattctcaatgctaaagagccaaaagagtggaatgaatggggtactgcgatacctaagccataa

SEQ ID NO: 311442 - DNA, 2850 bp, Proteus mirabilis
atgaaattaccggttttctccatttcaaacattacgagttcggtaaaaaaactcttttttgctgataaatctaaaattgcctcctttttgctatttttattggcattacttcccgctttgctcattatttggatctggtggtgggggccaacatttcgttatcaagattccataccgtttagcgaggtcaccacacgttggttagcaaccgtcgttattgtattgcttgttgtgagttggattggtctagcaacatggcgtcgagttaaaaaattggaagcattaaaacttgatgtcgaattggctgtagttgatccggtaagacaagatcttgattttcaaaaacgttatttaaactattggaaatcacaatttattcgccacttaaatggtcatactaaagcggtttatttacgcccttggtattttgttttaggtgctaaccaaagtggaaagcatagcttattaaaaaatacggtaaacccattagatattgcgcctagcgacaatattgttaacgaacaaaatattgcattaaatattcaatgtctattaaccgacaatgctgtactttttgtccctaatggtgatctattaacccagccggcaaatcaggctgataaacctcaactttatcaccgtttgtggggcgatttactcaattggatcaaaactaatcgcccaagacaaccaatgaatggcatcgtcttaactgtcgataccctatcgttattaaccaatagtaaggagcaaaatagtcagctacttgctgatttacaaatgcgtattgaagaaatacgcatgacatttaatagtcgcttgcctttatatatcgtcttaaccaagctagatctattacgtggttttgactcaatgtatcaatcattagatgttcaacaacgtaatgaagtactaggtgtttctttcaaccagaaagcaaaaagtaattggaaaaaggaattaaatcatttttggtcacaatgggtaggccaaatgaacagcgcattaccagaaatgatgctacaaagagcagaaggtaaccagcgtagtgatctatttagtttcgtgcgccaaattgaagggttacaacattctgtatgcacattaattgatgcattgctcatcaataatgagcaacataatatctgtttaagaggggtttatttaacttctgcattgcaaatcggtcaaatcgatgatgtgtttagccaaacagcgtccgaacaatatcatttaccgacagcacctcttactacatggccaattaatgatagccacccttattttactacccaattatttagtcaagtgctatttagtgagcctaatattgcagcagaaaaccattattgggttaaaaaacatcggactcgcctattagtcaccactgctgttagctttgtcggcttaatcgcaatttggaatggttggagccactattacgacaaaaactatcgtgctggagaaaacgttcttaatgaggtaaaagcattccgtgctattgagaacaatgttcagaaagatactgatggtagcctacaattaccggtgctcaatccattacgtgaagcaaccttagcttatggtaatcatcgtgataaaaatgtgctcttttctgatatgggtctttaccaaggtcaaaaagttggcccacaagttgaacaagtctatttacaactactcaccgatcgttttttacctgcggttatgtctgggttgttaaatgaacttaacagtgccgacaaaggaagtgaagataagttagagatattgcgtattatgcgcatgttagaagataaaagtggccgtaataatggcatggtagaagattttatggccgattattggagccaactgttcactggtcaacgtgaaaaacaactgcaactaaaagcccatttgcgctatgcccttgagcacacagattggaaacaagagcgtgaaaaaggatttgtttcagccactaaagcctttatgccttttgctggacctataaaaaatgcacaagcagagttaagtgtattgtcactttatcagcgtgtatatcaagccttacgcttaaaggctaatcaagagctttcagcgcctttaaatttacaacatcaaattggcccaagttttaatacggtctttacggctattgatgatgataaattagaaattccacaattcttaacgcgctcagggttattaaactattttatccgccaaaatgataaattggtcgagctaacattacttgatgcttgggttcttaatctaaccaccaacacacaatatagtgaaagtgatcgtaaagaaattcagcgtcaaatcagtgaacaatatcttagtgactatacggctcaatggcgtaatgccatgagcaatttagaaattcgtcaatttgattcaatacaagatgaaattaccgctcttgagcaaattattagtggtgaacaaccattacgccgagcattacaagttctacgtgataacacggttattccaactattgatgaaaatttaccacttgatgaacaaaaaacactgatggctgagccatcttaccgtttattaacccgcttagatcgcgaatttactcctcaaactgagatattagtcagtaaccaaggggaaaatttacagaatctgaatcaaaaactaaatgacttacatcgttacctattggggatccaaaactctccagtgccggggaaagcggcgcttaaagcagtttcgatgcgcttaaacgataataatcgcgacgctatttttgagctatcacaaatggcgaaaacattaccagagccgcttaacgctgaaagaatctgcactgaaactgaactacctgacagcagaagaatttga

SEQ ID NO: 311443 - DNA, 1053 bp, Proteus mirabilis
  misc_feature (1034)..(1043): n is a, c, g, or t
atgtctttagctattcgatatcttgcgttattaccacttttcgttattactgcttgccaacagcctgtaaattataatccaccagcaactcaagtggctcaagttcagcctgctattgtcaataattcatggattgaaatttcacgaagcgcactcgactttaatgtaaaaaaagtccaatcattattaggtaagcaatcctctctttgtgcagtgttaaaaggagatgcttatgggcatgatttatcgttagttgccccaattatgatagaaaataatgtgcaatgtattggtgtaacaaataaccaagaattaaaagaagtacgtgatttaggatttaaaggccgtttaatgcgagtacgtaatgcgacagaacaagaaatggcacaggcaaccaactataacgtagaagagttaattggtgatcttgatatggcaaaaagattagatgctattgccaagcaacaaaataaagtcattcctattcatttagcattaaattcaggtggcatgtctcgtaatggtttagaggtcgataataaatctgggcttgaaaaagcaaaacaaatttctcaattagctaacctaaaagtggttggtattatgtctcattatcccgaagaagatgctaataaagtaagggaagatctggctcgttttaagcaacaatctcagaaagtgttggaggtgatgggattagagcgtaacaatgtcacattacatatggcaaatacctttgcgacaattaccgtgcctgagtcatggctggatatggtacgtgtgggaggtattttttatggtgataccattgcgagtacagactataaacgtgtgatgacctttaaatccaacattgcttcaattaattattatcctaaaggtaatacggttggctatgatcgtacttacacattaaaacgtgactcagtactagctaatattcctgtaggttatgcagatggttatcgtcgcgtttttagtaatgcggggcatgcgttaattgctgggcaacgcgtacctgttttaggaaaaannnnnnnnnnacatcaatga

SEQ ID NO: 311444 - DNA, 2379 bp, Proteus mirabilis
atggctagccgtctgattgatttttctcagcctcctgtttcctatcctgctgatatgcaatggacatattggtggaatgggaaacagcatgagccagttgtttatgaaagaccgcttacccgtgagcaattggctcaggggcaagcgattttattcgatattgaaaaactgcctcgctttcttaaatctcgcttatttaagtacatcgaacatcttaaaaaagagaaaacgccgaaagaagttcataactggctggtctttaagttccataaaagcgtttatcagcgtttgcaagccgttaatgcgcgctatggtttagcgaaagataaacgtcaatttttattagatagagattttgatcaagccatgttctttaatcgcttgcccgatgcgcatgacaaaatattgcgtcatatggcgaagtcatttgcgaacgcgtgtgacaacttattcgatgaattggctgatcaggcaattgttgaaaataacggtgatcgtgaggtgttacttaacctaaaagtgattaaccctatttatcatcaattaggagagttaattacctatttacatgtaacaccgttgttttggggaaaagctcaaaaaggaaaactaacaccagaaaatgcgttgtccggattaaaccggttaacagatgaaaattggtggctgaaaaagttaaaagctcatcgtcaacgttggcgtgagtctttgcatattgcctttggtgatgtgaattcagataagacaccttacgccagtaaaaatgcggttcgtgaagtcagagcgcaacgtttagcgaatatgaattatcttgaaatgatggatattcaagacgttgaatcgggtgatcgcttcgatttaatggaaaaagtattagcgagtatcgctaaccctaaaattcgccgtatggaattaatggcacaagccgcaggtattcaaaaaatcgcagaagaacggggtgatattggtttatttattacgttaaccaccccttcaaaataccatcccaccaagcaaattaacgtttctaaagatgagaaaaagaaaaaagttctcattaacgagaaatggaataacagcgcatacactccgaaagacggtcaacgttatttagtgagggtatgggcgaaaattcgcactgcttttaaagataacgatattaacgtttacgggatcagagttgttgaacctcatcatgacgctacaccccattggcatatgatgatgtttctggataaatctcaacgtgcatcagcgattgagatcatgcgtaagtatgcccttgaagaagacggcgaagaacggggcgcaaagaaacaccgttttgaagcaaagcatttaaataaaggcggtgctacgggttatctcgctaaatatatctcaaaaaatatcgacggttatgcattagagggcgaagttgatgacgaatcgggagaattattaaccgaggttgcatcagccgttactgcgtgggcgtctacttggcgtattcctcaatttcacatgtttggcttgccgtctaaaggcgtatggcgtgagtgtcgtcgtattcgtggtgtgagtatcgctgataagttgggtgatatagcggaaaaagtaagagcgtccgccgatgcgggagatttcgccgcttatatcgagcaccaaggaggccctaacgttaagcgtaacctacaaacgttattagtcgctcgtactgttgccgatgagccgaattcttatgatgaagaggtgatgcgaataatcggattatattcgccgataaaaagtagtgatttagtaaaaacgcgtgagcgtcagtatcgtttagttcgtaaatctaagcaggatattgaggcaattgagcataagcgtaagtcagaaacggggcgggttttgactttaaaaagcgcgatcagcgcgcctcggagtcctgtcaataactgtggatcgggcagttcacccgatattaaaaacccacacgataggggcttaaaatcgcccgtatgggggatttctgagcctgaatatttcaacctatgttcacaatatagcgattgggagaaatcatttggcgaggttttagagcacaaaaagagtcagcgaataatttcaacggtgtcattaagtgaaaatcaggaacgtttgatacctgaattcaaagcctttgccgaaaaaatgggattggatttaccaccagacacaatgtggtcaatggtgatgaacggtatgcgcctgagttatggcgatgaagtgatttggtttgagaacgggaagattcaaatttcatcaacgaaaagtgaaaaagttaattttgaagaagtgaagcaaaagaatatctcaaatacacgagatagggtaatggctaaggttaataaattgagaggggtaaatgattaa

SEQ ID NO: 311445 - DNA, 324 bp, Proteus mirabilis
atggaacagggttatgtcgatattcaagatccaaaaaatggggtgcatattactggcactcgttttgctatcgtttattggaaaaaacaatttggattaatcgaagtcactgtgattgacggtcgggttcgtcgtgaagtgattgcgtggtatgactctgcagtaaatgtgacggctggcgttgttggggcacatgtgagtcgtgttattagtgctgaaattaaatctatctctgaattgatagaggtaatgactcacgttgctaaactgtgcgaaacggccattgaaattattgatccgaagcatttaggcggtgtgcggtaa

SEQ ID NO: 311446 - DNA, 669 bp, Proteus mirabilis
atgcataaaaaacaacgttcgcccttctctttacgaacaagatttttacttgccaccagcgccattattttagcactgacactctcttatggtttggttgccatagtcggttctattgtcagttttgataaaacgacttttatgctaatgcgtagccaaagtaatctctactatagcttagcgcaatggaaagatgggcaattgcagattgaatttccgactaacctcaataacaacaacacatcgctggtggttattttcgacgagaaaggcaatgtgctatggacgccaacggatttacctcaggtgatcccaaacagtatcgcgccaaaatggcgcaataaagaaggcttatttgaaattagtgtgaatgttaaaacgacacgttttatgttacagcaactgcctcaatatcgagcctatctaaaaaaactcaacgaatattcaagtaatgataccttaacgcattccgtggttattaatcactatcctgcggcggataatatgccttatctatccattgcggttatcgatcctattcctcaaagtctgcaaaatgtaagtagagtctgggattggtttctctatatattactagctaattttcttttggtgaatccattattgagcagatcagcgcgttggaaaaaggcactcgcgataatttag

SEQ ID NO: 311447 - DNA, 396 bp, Proteus mirabilis
  misc_feature (370)..(379): n is a, c, g, or t
atgtctgagattgtgtatttaaataaccaattagtaccgaaagaacaagctaatatctctgtttttgatcgaggtttcttatttgctgatgccgtttatgaagttaccgccgttattaacggacaattaattgattttgaagggcattttcaacgtttacagcgctcttgcaaagcattatcaatgcctttttctttaaccaaagagcaattaaaagagatccacgggcaattgatagataagaaccatctgcatgaaggacttatctatttacaagtcactcgtggcgccgattcatcacgtttttttgatttcccgtcttcatcagtcgctcctacattagtgctatttgttcaacactcaacggtgnnnnnnnnnngtggtaaatcatcctaa

SEQ ID NO: 311448 - DNA, 819 bp, Proteus mirabilis
  misc_feature (735)..(744): n is a, c, g, or t
atggaattatcttcgctgacagcgatttcaccgattgacggtcgttacggtagtaaaacctcgtcgttacggactatttttagtgaattcggtcttttgaaattccgtgtacaggtagaagttcgctggctacaaaagctagcatcttgcaccgacattaaagaagttcccgcctttgaacaaaacgcaatcgattaccttgatgcaattgttgctaacttcaatgaagatgatgctgctcgtatcaaaactatcgagcgcaccaccaatcatgatgtgaaagcggttgaatatttcttaaaagaaaaagtggcagctatccctgcactacagcaagtttctgagtttattcacttcgcttgtacttctgaagatattaataatttatcccatgccatcatgttagaaacagcacgccaagaagtgctactaccagcatggcgcgagcttattgatactatcagtaaaatggcgcaagcatatcgtgatttacccctgctctctcgtactcacggacaaccggcaacaccttcaacggtaggaaaagagtttgcaaacgttgcataccgtatggagcgtcaatatcgccaacttactcaagtagaaattttaggtaaaattaatggtgcagtaggtaactataatgctcacctagctgcctatcctgaagttgattggcaccaatttagtgaagaatttgttacttcattggggatcacatggaacccatatacnnnnnnnnnnatactacgcaaattgagccacacgactatattgccgagctttttgattgcatcagccgctttaatacaattttaa

SEQ ID NO: 311449 - DNA, 375 bp, Proteus mirabilis
  misc_feature (338)..(347): n is a, c, g, or t
atggtgccggctcaaacagggttgatgatcactatttatgcttgggttgttgccctaatgtctttgccattaatgataatgaccagcaaagtagagcgacgtaagctgctgattattttgtttattgtatttattctaagccatgtcttatctggcgtggcatgggattttaattcgctaattgtaggtcgggttggagtcgcctttgctcatgctgttttttggtcgattactgcctcattagcaataagaatggcaccccatggtaaaaaagcacaagcattaagtttattagcaaccggtgttgcactagctaccgtgctgggtttacctctggnnnnnnnnnnctgggaagggtggttggacaatggttag

SEQ ID NO: 311450 - DNA, 1080 bp, Proteus mirabilis
atgtgtataagagacagtgtactgactggtggttcacgacgtctggatcagtctcatattgtagagctggttcgccaatgtgcaaaacaacacgaaaaagggcaccggataattattgtcacgtcgggagcaatagcggcagggcgtgaatatttaaactaccccgatttgcccgcaacaatagcatctaaacaactgttagccgctgtggggcaaagtgctttaattcaggtatggaagcagctatttgctatttatggtattcatattgggcaaatgttattaactcgcgcggatatagaagatagagaacgttttttgaatgcgcgtgatacactgcatgcattattagataacaagattattcctgttatcaatgaaaacgatgccgttgctactgcagaaataaaagtaggggataacgacaatctttcggcattagctgccattttaggtggcgctgataaactcctgttacttactgatatcgaaggtctatatacggccgatcctcgtagcaatccggatgcgaagcttattccagaagtttttgatatcaacgatgaattacgtcaaatggccggtgatagtgtctctggtttaggtactggaggtatggcaactaagttacaagcggccactgttgcagggcgtgctggtattgacgttgttattgccgccggtgttaagcctgatgttatcagtaaagttattgataatgaacctgtcggaacactctttcatggtttaaaaagcccccttgaaacgcgtaaacgatggatttttggtgctccagtcgcaggggttatcattgttgataatggggctgaaaaggcgattaaagagcagggtagttctcttttacctaaaggtattaaagaaattaaaggtgacttttctcgagggtgtgttattcgcattcaaagtttgcaaggaaaagatcttgctcatggtgtcgcgcattataatagtgatgcgctacgcttaattgcggggcaccattcgcaagagattagtcaaattttaggctatgagtatggtagtgttgcggttcaccgtgatgatatgattgtgagctag

SEQ ID NO: 311451 - DNA, 1254 bp, Proteus mirabilis; identical to SEQ ID NO: 301495

SEQ ID NO: 311452 - DNA, 1935 bp, Proteus mirabilis
atgaattttaataaccaattacacctcatttcctatcgttattctcttccgttttgtgtcgctttagggattggggtgataacaacttcttcattcgctgctgaagaagctgaatttgaccctagctttttgcattctgtgcaaggaaaaaatgcgattgatatacgtcgctttaattatggcacccctattcctgagggcaagtattacgctgatatctatctcaataatgaatggaaaggaaaagctaatgtacagtatttatatactgacaatgcgaatacgtcgacgttatgtctaacgccggaattactttcattaattgatgtcgtcaaaggcactgttcctgaaaacagttataaagccacttgttatcccgcctcagaaggactcccctcagcaaaatttcattttgatttatccactttaaagctgaatatagaaattcctcaggcacaagtgaatactcgacctcgaggatatattgcccctgcacagtggcaaagtggagtccctgccgcatttgtcaactatgatgttaactattatcaatacaatactccggatataaataatgagcagacttaccttgggttaaaagcgggactcaatttatggggatgggcttttcgtcaccgtggtggtgaaagctggaataatggtcattctactgggtatcagaatatcgaaacaaatgtgacgcatgatattgctcggttacgggcacaattcacattaggtgatttttatacgaatggcgagttaatggatagccttagcttacggggaattcgattagcatcggatgaacgaatgttacccaactctttacgtggctacgctccgatcgtgcgaggcattgctaatagtaatgctaaagttacgatttatcaaaatgctcacatcctttatgaaacaactgtgcctgctggcccctttgtcattaatgatttgtatcccagtggatatgctggcgaccttcttgtgcaaataaccgaatctaatggacaaacaagaacatttacggttccttttgcttctgttgcccaacttattcgtcccggatttagccgttggcaaatgtcagtgggacgctatcgttatgcaaatgagacatatcatgatttaattgcacaaggcacatatcaatatggtttgacaaatgatatcactttaaatagtggactgaccacaagctcaaaatataccgcaggattggctggtgttgcttttaacacgccgattggggcaattgcatctgacattacattgtccagaacaacatttaatcactctaacgtaacgcgtaaaggctacagtttacatactagctatagcgtcaatattccgaccacgagtacaaatatcacgttagcagcctatcgttattcatctaaagatttttaccatttgaaagatgcgctattggctaatcacagtgaatttattgatgatgtttccataaaaagtgccgcattttatcgccctaaaaatcaattccaagtttcaattaatcaagaattaggtgaaaaatggggaaatatatttttaactggtaccacttataattactgggaacataaaggaagtcgtaatgagtatcaaatgggatatagccatttttggaaaaaacttggttatcagattggcttttctcaatcacgagataatgagcaacaacgccgagatgacagattttatgtgaactttacgcttcctttgggagagcgtgttcaaagccccattttttctactgtcttaaattataataaaggcgagaaaaacagcattcaaacatccatcagcggtatcgctggggaagataatcaattctcttatggtatttcaggtaatagtcaggaaagtggaccttccggctatgcgatgaatggaggctatcgttcaccttatgtaaatgagcatttatcgtcatga

SEQ ID NO: 311453 - DNA, 1536 bp, Proteus mirabilis
atgcaatctactcactcaaaatcaagccgaaccttttttggccatccataccctttaagctctctgttcttcacagaaatgtgggagagattttctttctacggtattcgcccattattaatcctatttatggctgcaaccgtttatgaaggtggtatggatattcctcgagagcaggcatctgctattgtgggaatttttgctggtggtgtttatttaacatcattgccaggaggttggctggctgataattggttgggacaacgtcttgcggtttggtatggctctatctttattgcattagggcacctttctatcgcactttcagcgttttggtctcagaacctattttttatcggcttattgcttatcgtattaggtacaggcctatttaaaacctgtgtcactgttatggtgggaaccctgtataaaaaagatgatacacgccgcgatggtggtttctccttgttttatatggggatcaatatgggctcgtttatcgcaccactgatcaccggtttcttagtccgtgattatggctggcattggggctttggtattggtggtattggtatgctagttgcactactgatcttccgcttttatgccgtaccgacaatgcgtcgctttgataaagaagttggcttagattcaagttgggatcgccctactgttgtgcgtcgtaatgtcggacaatgggtattagcacttgctgtgatattaattgccattgttggtttaattatttcaggcactattccatttaatccggttattgttgccaattttatggtttatgtgatctccggcagtgttatcgcctactttatctatttattcctatttgcaggattaagtagtagtgaccgttctcgcctgtttgtttgcttcctattattagtttcagcggccctgttctggtctgcattcgaacaaaaaccaacctcatttaacttatttgctaacgactatactgatctaaattttatgggctttgagatccctgcggtttggttccagtccgtcaatgcgctatttattattattcttgcccctgtatttagctggttatggccaatgctagcacgcaacaatatgaatttaagtagcatgagcaaatttgtgattggtattttattcgctgcaggtggctttaccgtcatgatgtacgcctctgaaagcgtgcttgcaacaggcagtggtgtttcaccattatggttaatttccagtattttattgctgaccctaggtgaattatgtttaagccctataggacttgcgacgatgactattttagcgccagcaagaatgcgtggacaggttatgggtttatggttctgtgcgagtgcattaggtaacttagccgcaggtttaatgggtggaaatattcgtcctgataaacttgatgttatgcctgatttcttctctcacgtctctatagcattggttatttgtgccgttgttcttgcagcattaattattcctgtgcgtaaactgttacaaagtgcagatgataaagagaatgcgcaagcataa

SEQ ID NO: 311454 - DNA, 576 bp, Proteus mirabilis
atgtcattgggtgcgtcgggggccgttgtcgtacatccttatggagtgacgttaagtaatgatttaagtgatacttttaccattatccatgcaaaaggagcacaaggtgcggtcattaataatgcaccaggtagccgattagatttttggggaaatggtattgtgccttatgtcacgccttatgaaaaaaatcaaattagcatcgaccccactaatttggatttgaatgttgagttatcagcaacagaacaagaaatcattcctcgcgctaatagtgccacgttagtgacatttaatactcaaacagggagaagcctactatttgatattcgaatgccagatggtagtactcctccaatggcttccgaggttttggatgagcataagcagttagtcggatatgtggctcaagctggacgcttatttacccgcggtcttcctaaacaaggtcaacttgatgtgatatggggaccaaatcatgacgataaatgctcatttacatatcatgcgacacgcaatgaaactgacatgcgacctcaaaccattcctgttcagtgtataccgcactctaattag

SEQ ID NO: 311455 - DNA, 1197 bp, Proteus mirabilis
atgaataaatcaattattatcatactgcttgtcacagtattagatgccattggtattggccttatcatgccagtactaccaacactattaaatgagtttgtgagcgaaaacagactcgccaatcattacggtatattattagcactctatgcgacgatgcaggtgatcttcgcacctattttaggaaaattatcagataaatatggcagaaaacctattttattattttcgctattgggtgcggcattagattacctattaatggcttgctctacctcattatggatgctctacattggacgcattattgcgggtataacaggagccacaggtgctgtatgcgcatcagcaatgactgatgttactcatcctcatgaaagaacacgctatttcggttttttgggtggtgcatttggtgtgggtttaattattggccccatgttagggggattactgggtgagatcagcgcccatacgccatttatctttgcggctatttctcattcgttattatttatattttcattactttgtttccaagaaactcaaaccacaaaaatatcgactgaaatatccgcattaaatcaggatacagcgcctcactctgccactggttttattaaaaagagtctctgtttttggcttattgcctattttattattcaactaatagggcaaattccggccactatttgggtgctattcacacaagttcgtttcgcttggcacactactgaagtaggtttatctcttgcatttcttggtgtattacatattttttttcaagcggttctcgcaggaaaactggcgcaaaaatggggagaacgcaacacagttatcattagcatgtcaattgatgcatttggttgcttattattagcctggataagccatgtttgggttatgctccccgctttaatctgtttagctgcgggaggaatgggacaacctgctttacaaggatatttatcaaaatctgttgatcatcatgttcaaggacaattacaaggaacgttagtcagtctaacgaatataaccgggattgttggcccgttactcttctcttttatttatagttacagcgttgaatattgggatggcttattgtggtttattggtgcaatgctttacagtgggttacttgtagccagttattttaaacagaaatcaccaatattaaaaaaatttccctcataa

SEQ ID NO: 311456 - DNA, 666 bp, Proteus mirabilis
atgctggatgaatttttacgtcagcgacgggtaagaagtaatatagaaattgtttatacctatcctaccgtagctcaactattaagaaattgtctttttatgcagcaagaagtttgtgaagtacttcctgcggtcttttctgaacgagatatcaaagcaaagcgtggttttacattaagtcatgttgatcctgataagaaaatcgcctattcgaaagaaggagaagcagagccttttgatatcttaatgagcacacctcctataacagcggtagaagccattcgtaatacaggattaagtgaatataacaatggtgaaggctggctaccgaccgatcctgaaacattacaggtatatgggttaaatcaagtttatgtgttaggtgatacggttgatttgcctattagtaaggccggtggtagctgtcataaccaagcgggtgttatagctaataatatttgtggtgaactgcgttatggttatccggctgcaatttatgatggtcgagtacaagctgttgcccaaatgggattatcagcgggtatgccattacagtatgactataaacatgatgttattccaacacctccaacaaaactcggtggcatgttacgtaacggttataaccggggcttatattgggcaacggtcagaggattattgtag

SEQ ID NO: 311457 - DNA, 312 bp, Proteus mirabilis
atgaaggttcgtgaaacctatcaaaaggatgctaaaacaacagagtcaaaactgatagatgatctgtgtgatgttgatttgctagtgcttgatgatgtgggtgtgcaacgtggaaacctcaatgaggaattaattatatttcaagtagtggatcgaagactagcaaacaaaaagcctgttggagtgcttacaaacctaaattatacccaactatccaaagtgttggatgaacgagtaatagatcgactccgaatgggaaatccaacaacgataaatttcacatggcaaagctatcggcgtttagttaagtaa

SEQ ID NO: 311458 - DNA, 420 bp, Proteus mirabilis
atgtcatctagaaggtgttttgagaacgcaagccatattgatccaagaagggaagttgaacgtgtgaaggtctttaatatcgaaccagtacctaaaccaaggatgactcaggctgataaatggaaaaaacgtcccccagttttaaagtattttgcgtttaaggacgaagtaaagttaaacaaaatcaccctacctgaatcacattaccacattacattcattctacccatgccgaagagttggagtaaaactaaacgctccgaaatgaacggtaaaccccatcaacaaaaaccggataaagataatctcgaaaaagcattacttgatgctatttttgacgatgattcacgtgtatgggatgggcgggtaacaaaagtgtggggaaaaagggggcagataattatccaagaggtgcgatag

SEQ ID NO: 311459 - DNA, 279 bp, Proteus mirabilis
atgtctcatattcgtcatcctattattggggatacagcccatggtgatttacgacaaaatcgtggggtcgtaaatcattttcaatcacatcgtttgatgttacacgcaagtcagctaaacttaattcatccgatcactcaacagccacttaacttaacagcgaagtgggatctgccatggcaacatctgattaatcagtttggctggcgtggtctaaagcccgaattagagcaattcggtgaggatttagctcaccattttgtactttctgatatttga

SEQ ID NO: 311460 - DNA, 231 bp, Proteus mirabilis; identical to SEQ ID NO: 302689

SEQ ID NO: 311461 - DNA, 651 bp, Proteus mirabilis
atgtcgattgcagaaagactgttatctgccagagataaagtaggagttagtcagcagtctattcaaaaaattgaatcaggccaaacggcatttcctcgcaaaattgaagatattgcacatgcagtcggtgtctctgctcactggttacagtttggagcgccagacgaaaacggttctaaaacaaactttgaagtcaaagaatgggaagatattgggtatcataacagtgattttattggtattcctgtgttggacatagagttatctgcgggttctggagctaatgcagaattaattgaactggaagagtacacttatccttttcgcagagatgagttgagaaagcataacgttagtgcaaataatgctcgtatagtaaaaatcattgggaatagtctataccccgtattaaatagcggtgatttagtagccgtggatattagtaagagagatatacgtgatggtgatctttacgcaatacgtgatggagttttattgagggtgaaaatattagtttatcagccagatggcggaataattattaaaagctttaataaagatgagtacccagatgagcagctcagtaaaaacgagatggctgctcgagtacatattattggaagggttttttggtcatcgagaagctggtag

SEQ ID NO: 311462 - DNA, 666 bp, Proteus mirabilis
  misc_feature (554)..(563): n is a, c, g, or t
gtgttgaatacctatgctaatattttatttggtgataaggctaaatcgatcaactttagcgatattcaagcttatcaagatctcaataaattacatagcacaggcacctatgcttatgatacaaacaaaaaaagagtacgctcgatagattttatcttaaaagaactttttttacgtggccgaccttatcaagtacttgataaagaaggtcattatcttgataactacaccactataacaggctcatcttatcccagtggtcatacgtggaacggatacaaacaagctgcagtgttatccatcttattccctgaaaagggcagtgaaatgtttgccagagcaatagaatatggtgaaagtcgagttattgtcggggcacacttcgcaacagataccattgcatccagaataggcaattattacctgctgtcacaaatgcttgcagatgatgacaccacccgcacttttgtagagcttgccaaagaagtccgccaaaatgttgctagccaatgcaaaaatcaacattgcttaacgacctcgacaacaatcactannnnnnnnnnggttattacgcaaccaaagatccagagcctgcaccacgcattacccctaatgaaataccaacatctgccaacgctttactgcgtttacgctttgcctatttaa

SEQ ID NO: 311463 - DNA, 525 bp, Proteus mirabilis
  misc_feature (463)..(472): n is a, c, g, or t
atgcggatcttaattattgaagataatatcttacttcgccatcatttatctgtgcagtttcgcgatgcaggacatcaagttgatgcagcacaggatgcgaaagaagccgatcactttatcgcagaaagtacacctgatgtcgccattgttgatttaggtcttcctgatgaagatggtatcagccttattcgtcgatggcgggaaaataatattactattcccattatggtattaacggctcgagaaagctggcaggaaaaagtgaccgcattaaatgccggtgctgatgattatgtgacaaagccttttcattttgaagagatcgtggcacgcgttcaggcattaatgcgaagaaacatgggcattgcatcacaaatactgactattgccccttttgagttggatttatcacgtaaagagttcatgatcttaggtgagcaaatcaagcttactgcattcgcannnnnnnnnncaaatcaagctcactgcattcgaatatactattttagaaacattaatgcgtaa

SEQ ID NO: 311464 - DNA, 192 bp, Proteus mirabilis
atgcgtaatcaaaacaaagtggtgagcaaagatgtgctaatgcgccaactttatcctgatgcagagcagcgagaaagtcataccattgatgttcttatggggcgtctgcgcaaaaaaattctccaaaaatatgataatgatgtcattgtaactgtacgtggacaaggttatcgttttgatatgaaagcttaa

SEQ ID NO: 311465 - DNA, 270 bp, Proteus mirabilis
atgcgtatggaaaaattaaccaatgttacttacggaaccgcaggcttaacggccttttttgccagcctttcattatatgaatggggatttgttatcgggatggcgttcagcatgcttcttggtttagccacttattttatgacacgccgagagcaacgaaaacgcactcaattatttgaagagcttgttcgtcatgttgacccacaaaacccgactgaaacgttaaaaaggcttgctgaattaatggtgaaagtgtcaaaggatatttaa

SEQ ID NO: 311466 - DNA, 615 bp, Proteus mirabilis
atgagaaataaaccgtttatgagaatgcttaagctcataccggcgtttattgtcgtagctacgttatcagcctgtagttcacaaaacgcgtcttcacgcttagctaattcaacaactgccccacttaataaatcttcaagcacatctatttcccaagcatctcaagatgaatttgaatcattggtgaagaatctcgatataaaatctaagatacttgaccaatatgcagactggaaaggtgttgcataccgcttaggtggcaatacaaaaagtggtattgattgttccgcttttgtccaaagaacttttcgtgatcaatttggtgtcgaattacctcgttcaacctccgatcagcaatttgccggtaccaaagttaatcgttcaaccttaaaagcgggtgacttagtactgtttaagactggtcgcactatgcgccatattggtatttatatcggtaatgataagtttgttcacgcgtcaaccagcagtggtgttatcgtttctgaaatgtccaatgtctattggaaaaaccgtttctatacagcgcgtcggatcattgataataatacaacaacaagtcttgctgataactattctcaagcgtcattaagataa

SEQ ID NO: 311467 - DNA, 513 bp, Proteus mirabilis; identical to SEQ ID NO: 303265

SEQ ID NO: 311468 - DNA, 126 bp, Proteus mirabilis
atgatcactcaactactcgatgccaatttaaaaaataatccagaaaaaattcatgaagtcatcaagttattaactgaaatttctgatgcttggcaacaaattggcacacagattaattcttattaa

SEQ ID NO: 311469 - DNA, 576 bp, Proteus mirabilis
atgctgttacttattgataattacgactcgtttacctacaacctttaccagtatttttgtgaactgggggcggaggttgttgttaaacgtaatgatgagattgggcttaaagagatagaaaagatgatgccatcacatcttgttatctctccgggaccttgcacgccagatgaagcagggatctctcttgaggcgatacagcgatttgccggggaaatacctattttaggtgtttgccttggtcatcaggcgattgggcaagcttttggtgcatccgttatcagagcccgtgaagtgatgcatggcaaaaattcattaatacaccataatcagcaaggggtgtttaaagggcttaatcgacctttaagcgttacccgttatcactctttagtgattgatgcgacaaccttgcctgtcccttttgaggttacagcatggagccaacatgacgggaatgttgatgaaattatgggaatacgtcatcgtactttacccattgaaggtgtgcaatttcatcctgaaagtattctgagtgaacaagggcatgagttattaaataattttcttaaatattaa

SEQ ID NO: 311470 - DNA, 324 bp, Proteus mirabilis; identical to SEQ ID NO: 311433

SEQ ID NO: 311471 - DNA, 423 bp, Proteus mirabilis
atgtccacaacggatttatctctagagttgcaagataaaattaaacactcaatcacccgcgtctctaaagttatttttccaaccaccaccaatcatcactccacactctttggcggaacggcattagcatggatggatgaagtctcttttattaccgctacgcgcttttgccgtaaacgtttagtgacagtttctacagagaaaattaattttaatcaccctattccttctggcaccattattgaattagttggtgaggtaatacgtgtcgggcgtaccagtctaacggtaaatgtttctatttttctcgaagatatgtatgccgaaggacgagaagaagtgatccacggccaatttaattttgttgccgttgataagcatggtaagccaacccctttattcgataaaccatcgcttttataa

SEQ ID NO: 311472 - DNA, 324 bp, Proteus mirabilis
ttgggcatagcattagagaaaaagctgaatcaagttgggattaaccgtatcgaggaattacgtacgatcggtgcgaaggcatgttatttaaaactgattgcgcaacctaagcaaggaaatagcgacttattacttgcgttagcaggtgctattgttggctgtcatcggtctgtgttaagtccacaacaaaaattaaatcgtagttggttaaaagaaaccggcttacccctgaataaaatcattcaactcaatcatgttgattcatggctatactgttttaacagaggtagtaagatgtggttaatcatcaagggattttggtaa

SEQ ID NO: 311473 - DNA, 141 bp, Proteus mirabilis
atggacgctgttgttactatcgatctggatcagctgaaatcttggctggatgaattacagattgctttctatgaatgtgactcttgtcaggcgttacatttacctcatcttcaatatatcaatggtatttttgatgcgtaa

SEQ ID NO: 311474 - DNA, 369 bp, Proteus mirabilis
atggctgaaaatgtcgttaatgatattctgaaatggttagaaactcagttacaacgtaatgagggtataaagattgatacgattgcaaataaaagtggctactccaagtggcatttgcaacgtatttttaaagattttaaaggttgcacattaggcgaatatgtacgtaaacgtcgcttattggaagcagcaaagtctttacaagaaaaagacatgtccattttagatattgctttgatgtatggctttagttcccaagcaacatttactcgtatctttaaaaaacacttcaacactacaccagctaaatttagagaacatggtgagttaccagatacacgtcgttttatgtcatgtgaaaatagctaa

SEQ ID NO: 311475 - DNA, 357 bp, Proteus mirabilis
atgaaacggctcaagacaaagcaaaatttatggctggcacaatatgcggctaagcaaaagcgcagtaaagaaaaagagatagcgttacttgaacagatgggaattgctcatttagcaacacgttatccatctcaaatatcagggggagagcagcaacgagttgcattagcaagagcactcattagccaacccaaactgttattaatggatgaacccttttcaagtttggattgggaaacacgttatcagctttgggagcttattatctcattaaaaaaacagcagataacgatgataatagtcactcatgagcctcgtgaattgcaagcattagcagataaaacgctgtttttttaa

SEQ ID NO: 311476 - DNA, 372 bp, Proteus mirabilis
atgcttctagcatcaggtattaactttggcttaaagcgtacaatgcctcatgctatcggtgtgtctctcggtttttttgtgatgttattggctgtggggataggcataggagcacttattaaatcatcgcccattatttacaatatattaaaatatctcggagcgctgtatttattgtggttagcttggaaaacggcaattagtcattctgttgagcaaaatagtaataaacaaggctcaccgttaaccttgttagaggctgcattatttcaatggattaatcctaaatcatggatgatggcgatttcagggataacattatatacctcaccacaatatccttatatttcaatgttgggagctattttgtga

SEQ ID NO: 311477 - DNA, 201 bp, Proteus mirabilis
atgttcattgagaccattattgatcatagaacctattttggttcaccgggtgcaggtaaaactaaatctcatattgaaagacggtcatctgatttaaaacgccgcattgaaaatggaaaaaaaattagttccgaaccttcatcttcagttcaaaacgttaataaaaataacaatgattcgcctgatcaagaaaataagtaa

SEQ ID NO: 311478 - DNA, 171 bp, Proteus mirabilis
atgttgttagagcgcgctcgtttacctttatcaccttactataaagccaatattcaaatgcgtcatttatgccaaggcaaattaaatgattgtgaggatgaaaaattagttaatagttataagaactatatttatgacaaattaaacgttgccggtggcaaagataattaa

SEQ ID NO: 311479 - DNA, 240 bp, Proteus mirabilis; identical to SEQ ID NO: 310071

SEQ ID NO: 311480 - DNA, 144 bp, Proteus mirabilis; identical to SEQ ID NO: 289928

SEQ ID NO: 311481 - DNA, 354 bp, Proteus mirabilis
ttggagtcattccatgagcatttacgacaacaccctgtagttagtgatgatcaccaagtttttagtattattaaatctctgcaacaaactttacgtaataatctacaatcactcagacaaaagctactacagccttcgcaatccatacaacctgacgttattacagatatacgtcagcatttgaaccagatactggtaactttaaatagtaacattagagacaataatcagctggcagccaattttagtcaggagcgagctcgcttggcggcagattcctttgcatatcttagagaagtgagtgatccttatttgcgtcaatgtgatcaggaattagcagaaatacaacattaa

SEQ ID NO: 311482 - DNA, 759 bp, Proteus mirabilis
atgagcactccaatcacacgacaaattgtactagataccgaaacaaccggtatgaacaaactgggcgttcactatgaaggccataatatcattgaaattggtgccgttgaggttatcaatcgtcgcttaactgggcgaaatttccatgtttatataaaaccagaaagattggttgatcctgaagcttttgaagttcacgggatcagtgacgaatttttagaagattgtccttcatttgcagaaatagcagatgagtttttagcgtatattcgtggtgcagaattaattatccataacgcctcgtttgatatcggctttatggattatgagtttcagaagcttaaccgtgatattcctctcacagaaactttttgccaaataaccgatagccttgctatggcaagggagttatttcctggcaaacgcaataatctagatgcgttatgtgacagatatttaattgataactccaaacgaacactgcacggcgcattattagatgccgagatcctcgctgatgtttacttagctatgaccggtgggcaaaccgcattagctttttcaatggaaggtgaaccgagcgaagagcaaaaaggggatgatatacaacgtattgtacgaccagtgcgtggattaagagtaataaaagcctctgcagaagagttagttgcgcacgaagctcggttagatttagtggtgaaaaaaggaggccactgtttatggcgtccagctcctgcttcgaatgatgaaactgcataa

SEQ ID NO: 311483 - DNA, 480 bp, Proteus mirabilis; identical to SEQ ID NO: 295663

SEQ ID NO: 311484 - DNA, 714 bp, Proteus mirabilis
atgaaagcagcgcgttcgggaaaaccaatttgtatgccaagctcttggcgtaatattccttggggagaatattaccgtatggcaattgaattgcgattacaaaattggtggccgaaaatatacggttttcatatgcttaaattaggtcaacttagtgctgaactcgatactaaatccagtatggtctcacatcaagttaacgtgactacaacgacgacaaacacagatgttatggcgtctctcaattatctgccatttgaaaataaatcggttgatgtctgtcttatggctcatgttttagattacagtgcagatcctcattggttattaagagaagccgatcgtgtattagtggatgacggttggatcatcctatcaagttttaatcctatcagcctattaggtataggaaaatgtacgcctattttacggcataaacagccctattattgtcggatgttttcacttcgtcgccaagttgattggttaagtgtgcttaattatgaagtgataacacaacagaacttccagattatgccattttcccgtcccgtaaaacgtgatggtaagcgctatcatgtcgggggatgtttaaatttaatattagcacgtaaaagaacgcttcctttaacacccaccgcgatgaagtttgcattaccgcgtatgagtgtaaaaggcagagttttaggcgctacacgtaatcgacctgattaa

SEQ ID NO: 311485 - DNA, 1212 bp, Proteus mirabilis; identical to SEQ ID NO: 301330

SEQ ID NO: 311486 - DNA, 468 bp, Proteus mirabilis
atgcgtattgtctttttctatatgctttttttggtattaagtgcagatggtctaatggtttttttgacacctgttattgtttatcaattaacaacaagcattgaatatgcgggattgacatacgctttatggtggttaccacgtatttttttaataccgcttattggtcaatatattgatggtctaggtgtccgtcctgtttctgttatttccgatagctgtaaaattatcggttgtttatttttattaatagtagatttttcctctgatttagttattgcaattagttttggattagtgggtagcttaatttctattggtaattcacagacactgatttcatatgaaaaaattattgccttgatgagtcgccataaagaacatcatattaatataatgtctcgaatggattttttgggcatgatcattggcccattaatctattccctgtctattttatttcattaa

SEQ ID NO: 311487 - DNA, 1863 bp, Proteus mirabilis
atgggacacagtaagcgttcagttgattctcttacggtgactgcggataaacccagtcgaggtgatttaggtagtggcccagtaggaaaaggcgaaggtggtgataatcatcattcttcatctgttaatcagttagatttaagtaaaacccctgagaaaatggcggtgatgtcttatgctgctcttccggtgacgatttatccggttaatggtgtacttgggtttacggttaattggggagccattgattctgctttgatgcaaggttttaatgttttaagcaaagcggcgccttatgtggggagattagtgggtggtgctcttgtaagcgcactctatccgagtgataccattatgtccgaagccgaagaacaagcgatgttagagaaatcgcgcgcttttcgtgtggtggataaaacacagccttaccaagtaaccagtttaccggctaaggccgtgacatctgttccagccaatgatataccgaaaaacgctcaagtttctgtcactgtattggctgaacccgtgattaatctagagagtaaaaaacgggaaaatgcctttacccaacaaaaagagccatcacgggtatccgtggtgaaagccatccccaccaataaaccgaatgtgtatactgcgcaaattatgccaaatatgaagccgatgcagattcaaatagcttcaccaaagacagtggcgaaaaaaacggtaaaagtaaatgaagctcctaaggtcgaaggttatcttcctacataccccaattggctagaaacacaccatgctatcgtgcattttgatggcaagcatgagcctatttatgtttcagtatcgagaaaggtttctcctgaacaggaaaagaaacaagttgaagaaatacttcgtcgagataaagagtatttggcgacacatccggtagtagctgcagagcgaaaattagtcgaagctgaaaaagaattagctaaggcgcttgtttatgttaatgataaagagcagcaactgaataagttaaaaaatgaaccattaggtttatctttacttaaccctgttgctcatccattaaaagtagattggcatgaaatctatgagcttcctgactgggggaataaaaatcgtataaaatttgatttttttgcgatgatagaaacgaaggaacggcttaatttacttcttgataaaggtgcagaagcgttatttacggaagaaactgactggaaagaagttttaactaaatattcagaggataaagtaccacaagattatattgatagcccaacggaatcgatattaactctaggagagttctatcaaggcacagcaatagagcaactgacgttagttcgtgaacaattattaaagcaacggacgaagataaaagcggcggaggaagccttagtcattgcgatggaaagtcgtaagaaagcagaggagaagaaaaaagccgctgaggataagcttaataaggagaaaaaacgtcatcagccaggaaccgccacgggaaaagggcaaaaagtgggtgataaatggcttgacgatgcgggaaaagaaaaaggcgctcctattcctgaccgtattgcagataaattacggggtaaaaaatttaataatttcgatgagtttagacggaaattatgggaggaggtatctaaagatccagagttaagtaagaattttatacaaagtaacagaactcgaatgcgaaatggtttggcacctagggctagatataaagatagtgttggagggagacgttcctttgagcttcaccatgataaaccgattagtcaaggtggagaggtttatgatatagataatattcgagtcgctactccgaaacgtcacattgatattcacaaaggaaaataa

SEQ ID NO: 311488 - DNA, 198 bp, Proteus mirabilis
atgatgaaactgaaaaatagcattaatgattatacagaagctgaatttaaacaatttattgaagctataattaattgtgaaggtgacgaaaaaacacaagatgatgaaggcaataatgatgggagtgctactgctattattaaagaagttaaagaatggagggctaaaaatggtaagcctggatttaaaaaaggttaa

SEQ ID NO: 311489 - DNA, 990 bp, Proteus mirabilis
atgagccaaagtacgctaagagtagacgagttatatactgatgatattgatgagaacatggaagagttcgatgaagcagccgcaacaaaagaggctgaaaatgaatctgacgctcaagatgaaattgaactcattgaaggagtcaatcagcgtgcgttagatgcaactcagctctatttaggagaaattggctattctccattgttgagtgctgaagaagaagtattctttgctcgtagagcgttacgaggtgatatcccatcaagacaacggatgatagagagtaatctacgtttagttgttaaaatatctcgccgttatacgaaccgagggttagctcttcttgacttaattgaagaaggtaatttaggccttattcgtgctgttgaaaagtttgatcctgaaaaaggatttcgtttttcaacctatgccacatggtggatacgtcaaactattgaacgtgccattatgaaccaaacccgcactattcgcctccccattcatatcgttaaagaactcaatgtctatttaagaaccgcaagagaattagcacataagctcgatcatgagccaagtgttgaagaaattgcgcaaacgctggataaacccgttgatgatgtcagcaaaatgctacgtttaaatgaacgtatttcttctgttgatacaccgattggtggggattcagataaagccttactagatattatttcagacgaaaatgaagaagggccagaagcaaccattcaaaataataacctcaaggaaaatatcgtaaaatggttatttgaattaaatccaaaacagcgtgaagtattagcgcgtcgctttggattgctgggttacgaggctgaaacattagaagatgttggtcgagaaattggtttgacaagagagcgtgttcgtcaaatccaagttgagggattacgtcgtttaaaagatattctgcaagggcaaggattatgcatagaggcactttttaagatgaactag

SEQ ID NO: 311490 - DNA, 2565 bp, Proteus mirabilis
atgactgacagccaaaatttcgaatcccacacccccatgatgcagcagtatcttaagcttaaggcagagcacccagaaatcttactgttttatcgtatgggtgacttttatgaactgttttttgatgatgctaaaaaagcctcacgcttattagatatttcattaacaaaacgaggtcagtcggcaggtcaacctattcctatggctggcgttcctcatcatgcggttgaaaattatctggctaaattagtgcaattgggggaatccgttgccatctgtgaacaaattggtgatccggccaccagcaaaggccctgttgagcgtaaagtgatccgtattgtcacaccgggcaccgttacggacgaagcgctacttgaagagcgccaagacaatctattagccgctatctggcaagataaaaatggcgcttttggctatgccactttagatattacctctggacgttttcgggtcactgaaatgccggatagcgaaagtatggctgccgagctgcaacgcactcacccagcagaactactctacccagaaacctttgagtcaatggcattaattgagcgtcagcaaggtttacgccgacgtccaatttgggagtttgagtgtgaaaccgccaaacaacaacttaatttacagtttggaacccgtgatttaactggatttggtgttgaaaatgcccgacttgcactttgtgctgcaggttgcttattacaatatgttaaagatacgcaacgcactgcgttgcctcatattcgtagcattaccatggagcgtccgcaagataccattatcttagatgcagccactcgccgtaatttagaattaacccaaaatcttgctggcggttgtgataacaccttggcatctgtacttgatctgtgcgtgaccccaatgggaagccgtatgctcaaacgttggatacacacccctttacgccagcgtgaacagttaattaaacgccaagatgccattagtgccttacaacccctctattttgagttacagccttttttacgtcaggtgggtgatttagagcgggtacttgctcgtttagcattgcgatccgctcgtcctcgtgacttatcacgtatgcgccatgcctttcaacaatatcaagatatccaccaagtgcttgatcaggcggatatgccctatattaaagaattacagcagcgtatcagccagtttgatgagttgcgtgaattactggaaaatgccattgttgaaacaccacccgtattagtacgcgatgggggtgtgatagcccctggttataatgcagaattagatgaatggcgagcactggctgacggtgcgagtgactatcttgaaaagcttgaagttcgtgaacgtgaaaaatggggtattgataccttaaaggttggctttaatggggttcatggttactacatacaagtcagtcgcggccaaagcaatttagttccaatgcactatgtgcgtcgtcaaacattgaaaaatgctgaacgctatattattcctgaactaaaagagtatgaagacaaggtattaacctctaaaggtaaagcactagcgattgaaaaaatgctctacgaagagcttttcgaaaaactattacctcatctaaccgccttacaaaccagtgccgaagcgttagctgaaaccgatgttctggctaatctcgctgagcgtgcagaatcactcaattatacacgccctgaattaacagaaaaaacaggtattcaaatcactggtggacgtcaccctgttgtagaacaagtgctgagtgagccatttatctcaaaccctctacaactcgcgcctcaacgccgtctactcattattaccggccctaatatgggcggtaaaagtacctatatgcgtcaagcggcattaattacgctactggcttatattggtagttttgtgcccgcagaaaaagcggtaataggcccaattgatcgtatttttacccgcgtgggtgcctctgacgatctggcttcgggtcgttcaacatttatggtggaaatgacagaaaccgcaaatatccttcataatgctactgaaaacagtttagtgttaatggatgaaattggccgaggcacttctacttatgatgggctttctctcgcttgggcttgtgccgaaaatttagcgaatcgcattaaagcgatgacactttttgccacacactattttgaattaacaacactgccagaaaaactagaaggcactgccaatattcacttagatgcggtagagcatggtgagactattgcctttatgcacagtgttcaagaaggtgctgccagtaaaagttatggtttagcggttgcggcattagccggtgtgccaaaagaggtgatccgccgtgcaaagcagaaattaaaagagctggaaaccctatctggtcattcaggggcaagccatgtagaaacgtcacaactgatgttattagcagatattgagccttctgaagttgaattagcattaaataaaattgatccggattcattaacaccaaaacaagcgttggaattgctctatcacttaaaagagctaaacaaataa

SEQ ID NO: 311491 - DNA, 438 bp, Proteus mirabilis; identical to SEQ ID NO: 301398

SEQ ID NO: 311492 - DNA, 2616 bp, Proteus mirabilis
atgacacaacaaagaattgctaaatatcgtaaagattaccgcgccccagattacaccatcactgatttgcatcttgattttatcttagataaagaaaaaacacaggttactgctattagccaatgcaagcgcttagcgacaacggtaacgccgttggtgttagatggggaagatttaacattaaaatctatttttgttaatgatgttgcttggacacactataaagaagaaaacggcaaactcatcattgaccaattgcctgaacagtttacgttaaaaattattaatgagattaacccatcagctaataccgcgttagaagggttatatgtttctggcgatgcgctatgtacacagtgtgaagcggaaggtttccgtcatattacttattatttagatagaccggatgttttagcgcgctataccaccacgatcactgcagataaaaaacagtatccttatctattatctaatggtaaccgtgttgcacaaggtgatcttgaagatggtcgtcattgggtgacttgggaagatccgcatcctaaaccaagttatctctttgcattagtggcgggagactttgatgtattacgcgatacatttaacactaaaagtggtcgtgaagttgctttagagttatttgtcgataaaggtaatcttgatcgtgctgattgggcgatgacatcactaaaaaatgccatgaaatgggatgagtcacgctttaatttagaatacgatctcgatatctatatgatagtcgccgttgatttctttaatatgggagcaatggagaataaagggcttaatgtctttaactctaaatatgttcttgctaaaagcgaaacagcaacagacaaagattatttagggattgaatctgttattggccatgaatatttccataactggacaggtaaccgtattacttgccgtgactggttccaattaagcttaaaagagggactaacggttttccgtgatcaagaatttagctctgatttaggctctcgctcagttaatcgtatcaataacgtgcgtgttatgcgtacagcacagtttgccgaagatgcaagcccaatggctcatccaattcgtccagatagtgtgattgaaatgaataacttctataccttaacggtatatgaaaaaggggcggaagtgatccgtatgatccacacgctactcggtgaagagaaattccaagcgggtatgcagatgtatattcatcgtcacgatggtagtgctgcgacctgtgatgattttgtacaagcgatggaagatgcctcgaatgttgacctgactttattccgtcgttggtatagccaatcaggtacaccggtattgactgtacgtgatagctatgacgcacaaaaacagcaatatacattaaccgtcagccaaatgacgccaccaacggcagatcaggcggaaaaacaagttctacatattccgttagatattgaattatataatcaacaaggggaggttatccctttacgctcacaaagtcagccggtttctaatgtattaaatgtggtgagagaagagcagcagtttatttttgatgatgttgctcaacagccaattccttcattattgcgagaattctcagcgccagtaaaacttgattatccttttacggatgagcaactctcattcttaatgaaacatgcacgtaatgctttttctcgttgggatgcggcgcaatctttattagggcgttatattaaagaaaacgtttcacgtgttcaaaaagggcaaccattaattttacctgaaatggtgattgatgctttccgtgctgtattgcttgataaagatatcgatcctgccttggcggcacttattctgacattacctaccgatgttgaagcgggtgaagcttttgctattatcgatcctattgctattcatcaggccttaggttttattcgtaaaactttagccactgaaatggctgatgagttctctgcggtttatcactcaatgcatatcggtacttaccgtgtcgatcatggtgatattgctaaacgtgatttacgtaatgtctgcttgggttatttagccgttgaaaaccagcaaacgggtaatcaattggttgaagcgcaatatcacaatagcgacaatatgaccgatgcactcgcggccttaaatgccgcagtaatggcacaattaccttgtaaagaggcactattacaagagtttgatgataaatggcatcaagatggcttggtaatggataagtggtttagcttacaagcaatgagtccggcaactgatgtattacaaacagtacgcagtttgctatcacatcgctcttttactttagctaacccaaatcgtactcgtgccttaatcggtgcgtttgtgaataataaccctgtggctttccatgcagaagatggctcaggttatttattattgacagaaattctgactgacttaaatagccgaaatccacaggttgcatctcgtcttattgagccgtttattcgtttgaaacgctatgatgctaatcgccaagagaaaatgcgtgccgagttattaaagctaaaagcccttgataacttatcaggtgatttatatgagaaaatcactaaagcattagcagattaa

SEQ ID NO: 311493 - DNA, 474 bp, Proteus mirabilis
atgaatgtcccaacaaaagagaaatttatagaatttgttgagaatctcgatgcgctcggtgttttaagtgaaagaactactggaaatatcaaaattgttgttactgctttatctgattctattcccaatgaacagctagcaacagaatgggatcttcaagaaattctaaataaatttcgagaaggtgttgatatcaaagatgagactgctagaacttatttgagtagatttaaaagtgcagtagataaatttattgctcacacaaatggagaggagctaaagccagtggttaaacgtaagccagctcaaaagaaaaaaattgaagaagaagtagaagttgtcaagactttctcattgccgattccattacgtgaaaatcttattgtcaatgttgataatttaccacgtgatttatcagaagaggaggcggacagaatcgctacgattattaagtcatttgctattcgacaataa

SEQ ID NO: 311494 - DNA, 1230 bp, Proteus mirabilis; identical to SEQ ID NO: 302488

SEQ ID NO: 311495 - DNA, 273 bp, Proteus mirabilis
atgatcacgccagccacaggagacatgccgcgtcccatatgtgatgcctgctgcataggtaaaatcattgcaattggattaacccccatgctatgggcaatttgtggaataagttcaacgaatgcaaggaaaggtgcattacctgagcccataataattgcggcagccaatgtcacgatagcgaacactaatgccatggcaaatggtggtagaccaacagattccgccataacgatcaggctgtctattgcaccactgactttaataccatga

SEQ ID NO: 311496 - DNA, 417 bp, Proteus mirabilis; identical to SEQ ID NO: 301255

SEQ ID NO: 311497 - DNA, 417 bp, Proteus mirabilis; identical to SEQ ID NO: 302280

SEQ ID NO: 311498 - DNA, 576 bp, Proteus mirabilis
atggatatttgcacttttgaagaaggtgatccgacggaaaacccttgggttaaagggaaaccggcccaaatacacattgaaattgtcccccataatcctaattggcttatacaatttaatgaacaaaaatcgttaattcagaatgcattgtcagatatagcattatcaattgagcacataggatctactgcggttgcaggattggctgctaagccaataatcgatatcgatttaattatagaaaatcctaaagatgaatcgtcctatattccccaattagaggcattgggctatgaactcattattcgtgagccttcatggtatcagcaccgtatgcttaaactgagtaatccgatggttaacttacatgtatttggaaaaaattgtcccgaacattggcgccacctattattcaagcaatggttaacaacacatcctgatgatttagccaattatgcggcgattaaacagcttgctaagcataatgtaaagacgactcaagattataacctgaaaaaacagagccttgtacgtgcaatttatcagaagatttttacctcattgattggcgactaa

SEQ ID NO: 311499 - DNA, 264 bp, Proteus mirabilis
atgactgcggagaataactcgaatgatgagccttttatactagagcatatagttgcctttcctccttttggatttaatagtttaaataaagaggaaaatggtggaagaggttatgagaattctaaattagtaccaatctatgatgaaaaaggttgtaaaactcacaaggctaaaacaaaaattctgtctgcaacagcattaattaatggtgaatctgttgatttattagagaagaacttaatttcattcagcgataaaaaataa

SEQ ID NO: 311500 - DNA, 504 bp, Proteus mirabilis; identical to SEQ ID NO: 306568

SEQ ID NO: 311501 - DNA, 330 bp, Proteus mirabilis
atggcgtgggcaaaattaaccttattacttgatgggatgggcgttttaactgtggctgacacgctggcattagaacggctgtgtgatatctacgccgatattcttcaattacgagacaccattgccattgaaggtcggacatacaccacaaaaacgcaattaggggattttttaattaaagcgaatcctgccgttgccatgttggctgatgcagatcgccgttttaaaagttatttagtcgagtttggtttaacccccgccgctcgttcgaaggtgaagatggatggtggagaagaagaggaagatccgctcaaccaatatttcggttga

SEQ ID NO: 311502 - DNA, 306 bp, Proteus mirabilis
gtgactgtagacggaaaacccgcatttattagccgggcaaatgatgcaacggtaggtttttcagataataaaactgttatagttaaagaagtcactaatggttggacgacaaaacaacaagaaaatgtagataaaaatagtttagatttaatgccaggtcagattttttctaccagcatttcagcagggaaagcatcttctgcatttattttatctaaagattcattaaataaaaaaggcatagatatttctaacggattagattttatcggcgaggctgttctcacttttaactttggtgtctaa

SEQ ID NO: 311503 - DNA, 573 bp, Proteus mirabilis
atggatagttattctacattggcgcatttaaaaaaatgcttaattaaagaagtaattaaatcggaaactaaaaaattttcttggtggcgggtaataagaagggcgtggagatatccaaatagaagattcaacttttggtggagaatagcaaactatttgtttcactctcagaaaaatattaagttggcatattatataaatagaaaattacaagcaaaatatggttgtgatctaggcattggtgcaaaaattgacgaagggttagcaattaatcactatgttggcttagttgttgcttgtgaagttgagattggcaaaaactttcatgtcagacaaaatactactattggcatacagtcttctacacaagatgccagcatctatattggtgacaatgttacaattggggctaatacttgtattattggtaataacttgcggataggtaataatgtcatgattggagctatgagctttataaataaaaatatacctgataactctattgtttatacgcctaaaaatacaaatataatcattgaatcatataaaaataataaaacaatatggtaa

SEQ ID NO: 311504 - DNA, 540 bp, Proteus mirabilis
atgagtggttatgtgtatgcagggtttccaagctctgtaggagtcattattggtggttttttcctcgtgatactttttaagtggttacgatttgcattgcaagacaataaattacccactgctacaatgccagcaacaacagagcctgagcccgttttatcgtctccagcaacagaaagcccagtaaatcagttattacccaaagaatggggattatatgtcgcagccccttatgcggtaatgaatgagtgggcatataacgaatataatcaaggtaaagatgatggtgggctatcagcggcttggggagttaatgatcggtgggatttaatctaccaattattttggttgctgactcaaggtcataccaatgacttttaccagttacgtgaccagattttgaatggcaaagaagaagatattcaatcattaaaaaacgatattttattatctgatttaactgaaaatggatatgatgaacaccaatcgaatgaatatccaaaatgtaaaatatcttatttgggatctttgtcgttttaa

SEQ ID NO: 311505 - DNA, 207 bp, Proteus mirabilis; identical to SEQ ID NO: 14480

SEQ ID NO: 311506 - DNA, 1212 bp, Proteus mirabilis; identical to SEQ ID NO: 309902

SEQ ID NO: 311507 - DNA, 669 bp, Proteus mirabilis
atgaatcagaaagaaatcgtcattgaaatcgatgaattaatgacaaatgcttttaaccgagatttttggctaaacattacggatagctttggacagcagtatttggcagctgatgcggttgtgaaagggcaggcactaaaattaggtgaacctgagcaagtaagactaagacctcaggttaggcattatgttttaaactcagcgcttcgctcagcagcagaagtaacgggattggtttttagaaatatgcaaactaatcccaaaggtgaggattacgtagttgttgagtctaaaggaatacaattagggcgaataggtcaaaatcatgatgagaaaggtattaaaagtgctaagcacagagatttattagctcagcttaaccaagatatagaaggatacacattcgatctatttctagatgataaaaatacaacaaactcagtggaaactttgggtgttttattggtaaatgtaaatccaccacatcatctgccacaggatgctatgcttgatttaagagtagtagtaccatttaccaatttaaaaggcttccattataataagtcaatttcagaaattcttgaactctacacaggtgagaataagacaattattccagatttggttttacctaagcttaaaaagcgcctgaaggatcaggaaaaataa

SEQ ID NO: 311508 - DNA, 4935 bp, Proteus mirabilis
atgtctgatattcatgatacgaatcgcgaacaggaaatacttgatagcgctgttgcacaaggtggcgcatatgaaatattgcgtaaacgccttaccgagcaaggtcagcagttacatgtaaaagccactgaactcaatcagcatcgattagctgaatttggtcaaagccaaatggacatcattggccgtattcgtattcgaacagagaataattgccaagcaagagatattgttcgcgttggtgaatggttactatttggttataacgttttcctcggtttaaaacgagaaacgcatcttgaagatgttttttcactttatcgcttaattgataatgatggcgagtttgatgttgaagcggttgcttatgaaggcacttttttaaatgataatcgctttatccaagattttaccgagttatacacttactataaaaatacgcaactactacagctagttgagcgtgatggtaaattactcgctagttttcaaattggcgatcgtattaccgatgtacgcgtcttccgttggtcgatatccagtgacaaacaacgtattgaatatattgataatcgtggcgaacgcgatatagcactcccccctgcttacgattttgattggataaaaacacaacgtgaagatacggtaaatggacgttttcctcatatcaacattttagatacagtctttgtagaaaccaccggtggcgatctgactgtcaaatgtgaaaacaataccgaagatggtttaggaatttatcgtgaagcggtcttagataaaaaccagtcccttgatgatgcacaaattgaatatgcacaaactggcagtttaattttattaaaagtgcttccttaccgcgaagagaattggcgttatttagtctataacacactaacacaaagtgttcagcgtattgatgccattgggcaagcttgtgtgcaacttccggaagatcacggtatcattttccctggtggctactatctacaaaatggcgattacaaaacctttgatcaaccaatggaaggtatgtattttcgtcgtttacgtcgttcacctaacggtgaagatgtgctgtatgtcttctattcaccgacacaaggtcgtctcgcgctatttaattacaatatgattgagcgtaaattggcgacaccattggtcggtcatggctatgccatgctagaagatggcaaaatggtgctatttgaaggggaaggcgaagaagctacccgtgttcacccgatgcaagtttggcaaacgcccttctattctgaagaatttgccgataaacaaccgccacgaaacggcttttatgggcgtattggtaatgccgatttagttcgcgggatctcagaaattttacatgtcgccaaagaaattgaaggtagccaagtttccatcgctcgttatgagcaacttagccaacaaccaaaaagcttattagatctctattactggtttaatgatgaacactgtctaggtattggccccttactaaaagaaatcgctcaaacaagtgaattagtgcttgatgaatatgaaaaagtcgaaagtattcgtcaacaatcagcgaaatcaatgcaagaagcgatcaaccgtcagaaatctctgttatcactgacactgcctgatagttggaccgatattcaacaatttgttgatagtttaaattcgctcaatacacaccatggacaccttatttctttgcgtgaattccgttatatggatttaacgcaattaaataaaatggaaacggaaataaccgaggcacagcaacgtgtttcgcaagccacagcccaatttcttgccagcgacaaagcgctacagccttttaaaacacagcttactacttttgaacaacagatagaaaaagcacaaaacagtgctcagcttgatgtaccaatgaatgagatggcgcagatgtcagaagatttagacatgctgtcaaatctgatggcatcactcacctttgaggatgtgacgcaacaaacacagattattgatgccatctcccaaatttatgcacaactcaatcaatcacgagctcgcttacagcaaaaaagaaaatcacaaagtagcgtagaaaccatcgctcaatttggtgcgcaattccgcctatttagtcaggggatcaccaatgctttatcactggcaacagatccggaacgttgtgaagagcagctttcacgattgctagtacagctagaagaattagaaagccaatttagtcagcatgatgaatttcttgatgatatcttgtcaaaacgagaagagttattagagacttttgaggcgcataaacaatcgttacttgatgatcgtcaacgtcgttcacaaagcttattaactgctgctaatcgtctcttagaaaatctgcaacgtagaacaactcggttgcaatcacaagatgaattaaatgctttttttgcctctgatcctttagcattaaaaacacgtgaaatcattgaaaaactaagagaaatcaatgacaacgttaaagcagatgatattgatgcccgtcttaaatcgtctcgtgatcaagccatccgtatcttacgtgataaaacggatatctttgaagagggtggcaatgttattaaattgggccctcgtcaccgttttagtgttaatacacaagagctagatcttactattttaccgaaagaagataagctttggttatatctaaccggtaccgatttccaagagccaatcgaccatccagagcttgaaacactgcgcccttactggaatgcgacattaagttcagaatctgaaacggtgtatcgtgcggaatatctcgcctattcaattatctatgctgcatcaaaacgtcaagatggattaaccctagaaatcttaaaagaagcactgagtgtacctgaaaaattagaaaagttagtacgtgatttcgcaacacctcgctataaagaaggctatgaaaaagggatccacgatcatgatgctatcgccattctaaagaaacttctacctgtaggtgaaagtgctgatctgcttcgttataacccaacagcacgggcaattgctgctattttctgggaaaaagtacaaactaatgaatacccagcattatggccagagcgcgcacgaacggcagtgaatattcaacaactgtttcataatgatgatgcattaattgatttacaggcagaaatagaagcggatatccgcctattccttactgataatccgattaaatgtggatcttatgttccgatccaagccgctgaatatttaagttttgcactagcaagaacaccaatagaattggtttacagtaaatatgccaaagagctcgttgttgccttacaaaaccgattagaagccgctcatatgtggattgattttaatcgttcacaacaaaatttagcctcacgttatgcacaacgttgggcattgatccaaaattggctacaaggattgtgctctcaagctgattatgctcatctaaccccttatattccgggggcaattgccattattatgttagataaaatcgcctctgcacgttatagcgaggttgatttatactttaaggtaaacggattattaggtgagcatcctactattgaaaatcaaacactttcattgagtttagatgattatttcagtcgtatgcgcggacagcgtaaaacctttattcccgcctttaatcattatctgactttacgacaaaaaattgttcttgaagagcgccagcgtttaaaactgggtgagtttaaagcaaaacctctcagttcatttgtgcgtaataaactgattaacgatgtctatttgccaattattggtgacaatatggcaaaacagattggtgcattaggtgaagggaaacgcactgacttgatgggattattattaatgatctccccaccaggttacggtaaaacgaccttaatggaatatgtagccgatcgtttgggactgatctttatgaaaataaatggtcctgctttaggtcataatgttttgtcattagatcccgaacaagcgccaaacgcaacagcaaaacaagagctagaaaaactcaatcttgcccttgagatgggcaataatgtgatgttgtatgttgatgatattcagcatacacaccctgaattcctacaaaaatttatctcgctatgtgatggcacacgccgtattgaaggggtttggaaagggaaaacccgaacctatgatatgcgcggtaaaaaattctgtgtggtgatggcgggtaacccttataccgagtctggtgaactatttaagatccctgatatgttagctaaccgtgctgatatctataatcttggtgaggtattaggaggaatggatgacgcctttgcactcagttatattgaaaatagcttaacctctaactcagttcttgctccccttgctttacgtgatctaaacgatctctatctttttgttgataaagccatgggtaaatcagtttcaaccaattccctcagttatccttattcggatgcggaaattaatgaaattgtgatggtattaaaacatctaattactttgcgtgatgtgattttaaaagtaaatcaacaatatatagcaagtgccgcacaatccgataaatatcgtactgagcctgcattccgcttacaaggcagttatcgcaatatgaacaaattaagcgaaaaagtctctgcggttatgaatgagaaagaaattgaacgcttactcgacgatcactatcttggcgaagcccaattactcacaacgggtgctgaagagaacttattaaaactggcggaaatacgtggcacattaaccgaacaagatgctattcgttggcagcaaatcaaaaaagattttatgcgcaacaaagcattaggtggcgataatgctgatattggcgatcgcgtagtgtcacagttggcgaatttagtagaaagtgtgcagagcttacgctaa

SEQ ID NO: 311509 - DNA, 468 bp, Proteus mirabilis; identical to SEQ ID NO: 14482

SEQ ID NO: 311510 - DNA, 912 bp, Proteus mirabilis; identical to SEQ ID NO: 14483

SEQ ID NO: 311511 - DNA, 333 bp, Proteus mirabilis; identical to SEQ ID NO: 14485

SEQ ID NO: 311512 - DNA, 312 bp, Proteus mirabilis
atgaaaaattataaagtcgcagtcagctatgatatgtctgactctatttcaactcatcgtaaatttgttaatattctacatactgacttctcttatattgccgcaattattatttcacttgataatattcaagatggaaggctcgattttattgaacaaaatagctttggacagcctgtattcgctattattaataaagatgaagttattccgactaatattattaatcgattaacaggtgtaattgatttaaataaaaagaatacagaccggattcagccggctgttcccagactgaccggtaatatctga

SEQ ID NO: 311513 - DNA, 411 bp, Proteus mirabilis
atgaaatttaaaaataatattgctttaagtacggtactgtctgttgctatttttaactcagcaatggcatatgacggtacaattagtcttactggatgcactactggacaaaatggatctagtaatgtgaaagctttttttgaacccggagctaatactgactttaatacgaacaaactaaaaaatgcgagctctgacggagcacaaaatgttcaaattcagttattaaataacgatggtactactgctattcaattagggaaagactttgtcgaacaggatgtccattcagaagctattaatagtgacgatgaagcgacactacgctatatggcccaatattatgctacaggaaaagcaattgtaggggatgtcacttctagtgttaattacactattgcctatgagtaa

SEQ ID NO: 311514 - DNA, 462 bp, Proteus mirabilis
atgtatacgggtgaagcactgcctaatgatcgtgaatcaattttttggctaaatgtactggatatttcagctaaacctaaatttgaaaataaaaataatttaaatgcaaactcaaattatcttcaactcccgatccatagtcgcataaagctattctatcgtccagaaaaactcacacgttctctcagcgaggcctataattctgttatatggcatattgaaaaacaaggagcaaaggcctttctttgtgcagataatcaaagtccttattttattacttataatcatattactttgattcagagcaactactcacaatcaattaatccagtagatatggttgctccttattcttcaatacgccttcctatacatggaaatatgtcgggatatggaaaagtgaagtggacagttgttaacgattatggtgggcatgaattaagtgagtcagctctgaaataa

SEQ ID NO: 311515 - DNA, 219 bp, Proteus mirabilis; identical to SEQ ID NO: 14607

SEQ ID NO: 311516 - DNA, 192 bp, Proteus mirabilis; identical to SEQ ID NO: 293478

SEQ ID NO: 311517 - DNA, 2532 bp, Proteus mirabilis
  misc_feature (2515)..(2524): n is a, c, g, or t
ttgttaaagaaaacaatcaaatggacagggatgatactactgggtgtcggtgcagttagcacgaccttgtggctcaccattccacgttggttacctgttgtggctaaaacctatttacctgaaggtgtttcactctctttaacacaacctaggttacaacaatggggtgtttttattgatgatatcgcattaaaaagtgatagctgtaccttggctaatgtgcagcaatttacgtttaactatcaaaaacagcaaattgatagcctatcatttaatagtcaacaacttactattaacgaagggtgtttttcacaattatcttttgcagataaaaaagagaccgcaacagttcctctcgatattcatgcgttattagctactattcctcacttatcggttgatatcaatcatgtttctttaatggataatcagcgctataacggccattttcagcttaaaagtgatacaaatgggcgattaatcagctatcagggagataatacgcagatacaagcgctgatccgtgataatcaatggttagatattaaacaattaaagattaatttacctgacgataatcagatagagctggcggctgaaatagcgttaccccttaatgttgattcattaccagaaaatggttctatcagcacaacattgttaacatcccattatgcttacccattagtctttattgctcaatggcaagggaatagcggtactatttctattgctgaacaaggtggagggcaagcgttagctgtgttgccttggaatgtaactgcagaaaatatcacgatagaaaaagggcgttgggaatggtttgggtttgatcaacccttacgtggtggtgtgaatatcaacattgcccagtggcagcaaggattaacggggttacgcttaactgcgcgcttaaatgttatgacgcaagggcatgcagggaaagggaatttagtgatgacgatacctgaaacggcgattaactggttagatgctgatatacctattcaattgacaggcattgtaaataaagatctcatgcaagccagtgcacaacttcccgttaaagtgactggtatgttgacagatcctactatcgaatttcagcccggttcactattacgctttaaagggcaactaacagaaacgctgacggtaaaagatgctcgtttaccactggctggctcaacattatcttccaaaggatttaatggtcacctaaatgcgattgtgttagctgaagatactatttggggagattatcgggtccattttgctggacgttcgaccgattttttacctgatcagggcaattggcaatggcgttattggggagagggcaatttattgccattaaaagcgcgttgggatatcgctggaactggctcttgggtagataacatggtgagttttgagacattaaataccggatttgatgttttaacttatcagcataccagtatgttagcacccagattgacgctcttaacgccatttcgttggttaagagacgataaaaacccattatttgaaggaaaattgaagttaaccagtcaacgaatcgattttcctgcggggggattcttagatagagctgactttattgccagtgtaaaaggtcaatctccttttcgttttaatatgaaaggcgagctcaatgccaagccaaatattggaccgataacgattaatacacgttgggatggtgaaaggctaagagggcagatgcgttggcctgcacaaccaatcaatgcctttcaatctttattgccagaaaaattaggcatcacattagataatggcgaattttatactcaagctgacttttctattgcccctcaacaaggtttagttgctggtggacatttagtagttaaacaaggcagcatgtggctaaaagatggcgtattagaaggactcgattttattttaccttggcgtttaaacggtgacgaatggcaactaggtgtaaagcagccagtgcaattacgcattaagcgcgtcaataacttatttgaaatgacagatattaccgccgatctgcaaggattttaccctattacagaagcaaaacctttagttttatctaatgttaaggttgccatgcttgatggcactatttctatggctaaattagcattaccacagcatgaagcggcgattatctcattagataatctagagttaagtcggcttttcactttattgaaggtgacccaatttgccgcatcaggtaaagtaagtggcgaattacctttctttatcaataacaatcagtggatagtgaaagatgggtggctggctaattcatcgtacttaaccctcaggcttgataaagattttgttgactctattgatgatagcaatatgacagccggtgtcgctatggcatggttacgatatttagagattagccgctcttggacgcgggttaatttaagcaacctaggtgaattagtgcttgaagcggaaatccaagggaaaataaaatcgagtccttctaatacgccatctnnnnnnnnnnaatcttaa

SEQ ID NO: 311518 - DNA, 321 bp, Proteus mirabilis
atgatattgttagcttttaaatggttatgtaattctaaaagtaaagcacttttccctcttcctgcttctgccttaattaaggttactgcgttgtctttaattgagttagtgatcgaatttaattcatttctcggaattaatgtgttgcaaataaggaaaggtttgattgattcttcaaactcgatagaaagagtatcaagcacagttgaaattctatggtcctcgggtgcaatcttttgttcaaagccactcgtttttaaatctgctaataactcagataaggttattttcttccttagtttgttaaactctactggataa

SEQ ID NO: 311519 - DNA, 1542 bp, Proteus mirabilis
atgactgaacaatctgttatccaacgttgtcaacaaatcgtagaaaatccaaccctttcccccgaacaaaaacgtcattttctagcattagaagcggaaaatatgttgccatacccgacattatctaacgaggcgagccttgcgctaaatgaacgggttatctgcgatatgtatgaaggtcatgccccttataaaccacgttatgtattacctgattacgcgaaattcttagcacaaggctcgcgctatttagagcttgaacctgcccaagattttgatgatgcgctaaatatgctgactatcctttatcatcatgttccttcagtcacttcaatgccggtttatttaggtcgtattgataaaatcttactaccttatgtggggaatttgacgcaagagcaactctatccaaaattaaagcgtttctggcgctatcttgatagaacccttcctgatgcctttatgcacgctaatattggccccgaagactctatcattacacgtttaattcttaaggtagatgttgaacttcaacaagtagccccgaatctcacctttatttatgacgcggcactaacaccttctgatttattgcaccaagcaatcaccaatatttgtcatagtagtaaaccccatattgctaacggtacattgcaagatgctgtatttggtaaagatgaatacggtattgttagttgttataactctctaccgcaaagtggtggcggtagcactttagttcgtatcaatctcaaagaagtagcaaagcgcagccaaaatagtgccgactttctagagaatgtattgccgttttatatgcaaaaacaaatcgagatcatcaatgctcgttgcgaattcctctatgaaaaatcaaacttttttcaacaaagctttttagtagaagaaggtttgatctcacccgatcgttttgccccgatgtttggcatttatggtatggctgaagcagtttctctattacttgagaaagaaggtcatacagcaaactatggtcatagcgaagcggccaataaacttagctatattattagtgaaaaactggcccaatttgttgcacagactcctgtaaaatatggttggaaacagcgtgccatgttacatgctcaatcaggcataagttctgatattggtactacaccggcgacccgaattccttatggaacagagcctgatcctgttactcatttaatgaccgttgccccccaccatcaattttatacttcaggtattagtgatattttaaccgtggatgaaactatcaaacaaaatcctgatgccttaatgcaactgtgcttaggggcgttttcttgcggattacgtgaatttaccgctaatgtgggtggcaatgatttagtccgtgtcactgggtatatggtgcggttatctgatttaaaaaaatataaagaagaaggctctcgcctaaatacaacttggttaggagatgaagcaacaaccaattgccatattgctgaacgaaaaccacgagtgattagccatgaacagcagatgcgcttcgataaataa

SEQ ID NO: 311520 - DNA, 210 bp, Proteus mirabilis
  misc_feature (195)..(204): n is a, c, g, or t
atgacaaacacagttattaagtacgttttagaccgattatatgatttaggtatcaaagatatttttggtgttgctggtgattacgccttccctattgaagacactgtttgcaacaaccaacaacaacgttggattggtaactgtaatgaattaaatgcggcatatgctgcagatggctatgcccgaattaaaggnnnnnnnnnnaattaa

SEQ ID NO: 311521 - DNA, 1497 bp, Proteus mirabilis
  misc_feature (23)..(32): n is a, c, g, or t
atggctatgcccgaattaaaggnnnnnnnnnnaattaaaggtatggcagcattatccactacctttggcgtaggtgaattaagtgcgattaacgctattgccggtgcctatgctgaaaatttaccgattttccatttagttggcatgccagcaagtggcgtacaaaaaagtaaacgccttgtgcatcatactttaggtaatggtgattttgatgttttttatcagattgctcagcgccttgcttgcgctcatactattttaacacccgaaaattgtgtggaagaaatggagcgcgtaatagatgtggcattaaaagagcgtcgtcctgtttatattggtataccttcagattatgctaatagccaagtagtagcgccgttatctgttaccgcaccacaaaagccaacaagtgataaagcaacattagaaaaagcagtatcagcaatcgttgagaaacttactcacagcaataatgtctgtgtattaccaggctttttatctgcacgtttagggttaacagataaaatccagcattttattgataaaacaggtttaccttatgccactatgtttatggataaaagcatattaagtgaatctaacgcgcaatatgttggtatgtatgacggacaattaatgacaccagaggtcagagaatttgttgaaagtagtgaatatatattagggatcggtacattactgactgactttaatacaggcagtttcactgctaatataaaatcagaacaatttatcagtatcatgccagactatgttgaaattgattctgtgatctactcctgcgtttatatgacagatattctttctgaattaacccaacgactgccgaataaaacttatcataaaataacagcgaaaggattaggtgaagcggttacatctgataataataaaattacagcacaatatctctatcctcgtttagaacaattctttaagcctaatgatattattattgcagaaacaggaacctcatccatgggattaggcttcgctttattacctgaaggtgcacaatttcataaccaaacactatggggctctattggttgggcaacaccggctgcattaggcgctgcgttagcggcaccagaaaaacgtattattttaattaccggcgaaggctctcatcagttaacagtacaagaaattagccaatttgttcgtttcggtttaaaacctattattctagtattaaataacgatggttatttaatagagagattattatgtgattaccccgaagcttattataatgatttagctcagtggaactatcatcagttacctcaagcctttggtgcaacagattggtatagtgaaaaagtgacgacagcaagtgaactcgataatgcgttaaataaagccgcattaacagatagtgcatcttatattgagatagtcacagagcgatatgaggcctctgaattagcgcaaaaattaaaagaatcaaaaagttcattatattcattctaa
